United States Patent Application Publication US 2018/0126003 A1 - sequence listing, part 91

SEQ ID NO: 165360 - DNA, 6489 bp, Artificial Sequence
  derived and/or modified sequence
ttcccacatgggagagaccagagcacagcacgtttgtgtacggccaggagggaaccacgaaaaaagcagaggatagaaacgcaagcacacgatggtggtggccaagaggagcctgcccctagtgacctcacttccgcggccagtgcgagaggcgagggagctccagctctgcctgtaaggtctcggaagtacgaggcggaggggacgaaaaacggggggccagactgttgtggctgtggtggagacgagaaaccaggaagaagaggctcgcctcccactcggcgacagtaagcgaagcagccgaaggcgagcgccgacatcagcagctgccccctaaatcccgcccttcgtcttggcggcagcgggagactgagagacgcgcgcagcaggggcgggactggagaggggccccgcgcgcggatctcgcgagagcattagagggcggaagcgctatccgagcaggatgcggttcgtggttgccttggtcctcctgaacgtcgcagcggcgggagccgtgccgctcttggccaccgaaagcgtcaagcaagaagaagctggagtacggccttctgcaggaaacgtctccacccaccccagcttgagccaacggcctggaggctctaccaagtcgcatccggagccgcagactccaaaagacagccctagcaagtcgagtgcggaggcgcagaccccagaagacacccccaacaagtcgggtgcggaggcaaagacccaaaaagacagctccaacaagtcgggtgcggaggcaaagacccaaaaaggcagcactagcaagtcgggttcggaggcgcagaccacaaaagacagcactagtaagtcgcatccggagctgcagactccaaaagacagcactggcaaatcgggtgcggaggcgcagaccccagaagacagccccaacaggtcgggtgcggaggcaaagacccaaaaagacagccctagcaagtcaggttcggaggcgcagaccacaaaagatgtccctaataagtcgggtgcggacggccagaccccaaaagacggctccagcaagtcgggtgcggaggatcagaccccaaaagacgtccctaacaagtcgggtgcggagaagcagactccaaaagacggctctaacaagtccggtgcagaggagcagggcccaatagacgggcccagcaagtcgggtgcggaggagcagacctcaaaagacagccctaacaaggtggttccagagcagccttcccggaaagaccattccaagcccatctccaacccttctgataacaaggagctccccaaggctgacacaaaccagcttgctgacaaagggaagctttctcctcatgctttcaaaaccgaatctggggaggaaactgacctcatttctcccccgcaggaggaagttaagtcttcagagcctactgaggatgtggagcccaaagaggctgaagatgatgatacaggacccgaggagggctcaccgcccaaagaagagaaagaaaagatgtccggttctgcctccagtgagaaccgtgaagggacactttcggattccacgggtagcgagaaggatgacctttatccgaacggttctggaaatggcagcgcggagagcagccacttctttgcatatctggtgactgcagccattcttgtggctgtcctctatatcgctcatcacaacaagcggaagatcattgcttttgtcctggaaggaaaaagatctaaagtcacccggcggccaaaggccagtgactaccaacgtttggaccagaagtcctaacagaatggtatattcctctggaaaaagatgaacgtcaccaatggattgtgctgctctcgtttcagctttgatttttttgtccttgagaaccttgtcctccctgctgatttgtttctaaatcaaaagaaatgaagaaaaaagtactgtgacctgagagacaccctcctctagaatttagtggcgggtctgggctggcagaggtagggggctgctttgggctttgcacctgcactttggtgacattgttcttctgtgttccctttatttatgctggtggcttccatccgttcctcctctgagggtgagtggaggggtatatggaaacacggctatgaccaaagggagatcccagcctgggcaggctgcgctgctgaccaccctccctggggcccgggctctgtaggaaagttggtccttgactgtggcattgcactctgcactgtttctctctgcagacctaggggaaaactgcaggtggaagtgcttttctactaaggcctcttactttgggggggatgtgccctacagaagacatagaagatggggaaatgccaatgggcaaagagctactttgaatacataattctcttcaaagacttcagcagcaaaccaaaacagcaggttaaaaaaaaagatgcttttttgggtgcaagtctaacctgtctagcatgagatcttcttgattttctgattattttatgtagcttgagacaaagtgaatcaacttccacttagttgtaccgagcataaaacagaacttgggcttcctggcagtgaggccactgtcccatcacagatttttaaaataaatatgatttgaagtagtgtgatctttcacacaatcatactcagtaggaactttttgaaatagggcaagtttatgtttcatgcgagaaaacatgaaggagggttttggttttggtctgcagtttttccaaagggcttttatgagatacatttcccacaaagtccattttgcctttgttgcctaaaacagacaaaatagacttagatttattaatagaaactatactctctgccaattttacctcagtgtatttaatggtcctttaatctgatataagatgccaagggtatttgataaaaattcttcttccatgccatgtcaggagttaatacaaatgaagaaattccgtgggttcccctgggataagtgagggtagtgtcttggacaacactattgtttgaaggtttatcttttctaatcatgctctaccgcattgtagagagcctaaagagagttgtttctgagctgatctcagggaaatacaaataacttgggagatgagggaaataagatgaattctgtgctgtcaaggcagtaagtctgaagaaaggaccatgcttcttatattatcttccaccttgcttaaaacagcccatagctttgagttgacattttcattcttggcggatagcctactttatgaaggtaaggaatgaactcctacccttcttgggtcattctctgtactgatgcgttagtcttataatactttgcaccaacctgaggaatcttctaggcttctctagcatcccctaagactgtggctatttcacgtctctctccctgcctgccttccttttcccttcctttcccctcctcatgttttctggttgtgcccatctgtaccagctcctttccatccaccttcgtatgcacccagatttttctgttcccatctgtcctatttgttattcatcccgctgctcaacttctccagtatgttgcttcccttaagttgccattcattctcttcatgacttttactaactcacttcggtctctgtctgtcaactaaacttttctaaaggttaccagttatccaatcaccaaatccatggctttttctcaaagcttagtcttgtccttggcagaactggacactattgaccatccaaatggaaattcccctttcttggtgtctctgacaaatggtcctttgccttatcttgtgctggtggtgaagaggccctcaaagccaggcctctctattcctttgactgtctcctcagccattaacccattcttcatcctcggagtgagtgattcccaagtctttgtcttggcttaatccctaaagaacccagttctgctggtatcgaatagttcagcttggttgtcattgaaaggaatttctctcttctgtccatcagcctgtccctcccaactgtctaggacagtcttcggtcacctaaattcctaactgcagacttttgccctttttctctctcatcaccaaagtcccatccatttttttttaataaaagatcctcagctacagtctttccattttccttgcttctcttattgcacacccccagcccattttgcttctctcttggattttgttttttcagatccacatttattgggtttcctgtccagcttcttggaaaggagctcactcttggaaagactgatctttccaaaatattttccctggtctgaagctttggtgtgaacttctcaaggcttagagaatccagttacagaccttttggggttcaggatgctatagattgacaccctcctgcctgtttttctctgcatcccaacctggccaaggcccctcctgtggggtgcccatctgtgcctttattccggctgtgccctcgactttccagcttcccatgtttctttggttaggtttctctcccttccttctttctccttccccaatccgcctgtttcgtcagggcccagtttgtttcctcatacaccttcctcactaccccaccccacatggttgactctttccctcagctccaccagctcttcatcatgccactcatttcagaacttgagcaaaacagggcagtcaggatctgatgtctttctggtctccctaagaaaactaagctcttgagggacagcccttggcaatgctttcctatctgctgatcatggtgaccttccttaggacttccagagttcagttccttctggcagagaggttttctttctccatgccatatggatgtgactcaaatgaggggtcccacagcttttcctggctaccacttgctgtgaccttatacatgttggggtttgctcttaaagaggagagcaggaagaaaggttggtttcagaaaccaagagggtcggcagtggacgcgtacattttgtcacggagtccacagagctgagcttttgagcagactctgagaagtatcattgcttgtgttgaaagaatacaacaggatttaagtttctctttagaaattgcactgaagaaaggccgggcgcggtggctccccctgtaatcccagcgctttgggaggccgaggcggggggatcacgaggtcaagagatcgagaccatcctggccaacatggtgaaaccccgtctctaataaaaatacaaaaattagccgggcatggtgacgtgcacctgtagtcccagctactagataggctgaggcaggagaattgcttgaatccgggaggcggaggttgcagtgagccgagatcgtgccactgaactccaacctgccaatagagcgagactccgtctcaaaaaaaaaaaaaaaaaagaaagaaatagcattgaagaaaataccgcacatcagaggaaagcttattttctgcatggtgtcttttcaaagatagaatatttgaagcatgttttctagcgattgtgtggatgagggtgagctggctgaggcatcgctcaagctggggggtggtgtgtaagaagcacgtggagccacaagaggcacctcctatagtcagctaagggcttccctttctgcgcccagcttttgggtgaagggtgatttctattagacacatctgtgcttcagtcatagatgttaatagaggaagcagttttcctgctgcagattcctgaatagagttgctgaaagagtctacttctggactcaggggaagttgaaggccagtctgtgtagaaaggctgaggcaacggggaaagacctgacagctagttacatacgctctgacatagtactcccatgatggcttccagtgacacatgtgctgatagaattctaaacctctggaatttccctgctggcgacttctatggccgttgactgtacagggtaacctgatgccagatgctatgggcgtgatgagaactagagcattgcagcatggaggaaactgtgaggcaccagatcctgtgcttctgcaggccattttctgaaaacccctgttaggaaggttggatttggcgtgacttgcttgagcaagagtcctggggagagattttgaggtttaatttaacggtatatccagagctaacagtgactcaactcgtctagttctgcaagtcagatgtacacttagagtctctctgtgaagggtttgggtctgagctgtatagtatgtcaaactgccagtaagccagcccctcaccctctgatagatattcctttaatgcaccagacttcatgtttgataaatgattaatggttgaaattgtttctcttcttttgtgttttcccagttaatagatggtcactgtttccacaatgttttatactttcagctttttgtaacttaactataattacttaattttatttttttaaagcttgttgtggtctaatgagaagtatttttcagtgcataatgtttttctgagcttctgtaaatgccatcccaatgtggtttggttttgttgaacagaaaccaaaataaatttcaaaatgttaaagcaatgg

SEQ ID NO: 165361 - protein, 560 aa, Artificial Sequence
  derived and/or modified sequence
MEPLQQQQQQQQQQQKQPHLAPLQMDAREKQGQQMREAQFLYAQKLVTQPTLLSATAGRPSGSTPLGPLARVPPTAAVAQVFERGNMNSEPEEEDGGLEDEDGDDEVAEVAEKETQAASKYFHVQKVARQDPRVAPMSNLLPAPGLPPHGQQAKEDHTKDASKASPSVSTAGQPNWNLDEQLKQNGGLAWSDDADGGRGREISRDFAKLYELDGDPERKEFLDDLFVFMQKRGTPINRIPIMAKQILDLYMLYKLVTEKGGLVEIINKKIWREITKGLNLPTSITSAAFTLRTQYMKYLYAYECEKKALSSPAELQAAIDGNRREGRRPSYSSSLFGYSPAAATAAAAAGAPALLSPPKIRFPILGLGSSSGTNTSSPRISPATTLRKGDGAPVTTVPVPNRLAVPVTLASQQAGTRTAALEQLRERLESGEPAEKKASRLSEEEQRLVQQAFQRNFFSMARQLPMKIRINGREDRAEASAAALNLTTSSIGSINMSVDIDGTTYAGVLFAQKPVVHLITGSAPQSLGSSASSSSSSHCSPSPTSSRGTPSAEPSTSWSL

SEQ ID NO: 165362 - DNA, 4253 bp, Artificial Sequence
  derived and/or modified sequence
ttccggtgcgggccccgccccggctgtggcccccggctgcggaggagtccgagacgcagctgccgcgccggggcctgagctgccgcctcctccgccgcccgaaaacccggagtgccccgcacaggtttagacccagtgtgcctggtgggctgtgcccaggttcagagtcatgccactctgtgggtgaagcttgaggcaaaaatggagccacttcagcagcagcagcagcagcagcagcaacaacagaagcagccacacctggctcctctgcagatggatgccagagagaagcagggccagcagatgagagaagcccagttcttgtatgcccaaaagctggtcacacagccgactctcctttccgccacagctgggagaccttctggcagcactcccttaggtcccttagccagagttccacccaccgcagcagtggcccaagtgtttgaacggggcaacatgaactcagagcctgaggaagaggacggaggtttggaagatgaggatggggatgatgaagttgcagaggtggctgagaaagaaacccaggctgcttcaaaatattttcatgtgcagaaagtagctcgccaagatcccagagtggcacccatgtccaatctacttccagcaccagggctcccaccacatggacaacaagctaaagaagaccataccaaagatgcttccaaggcctcaccttctgtctccacagcaggacagccgaactggaatctggatgagcagctcaagcagaatggtggtttggcctggagtgatgatgcagatggaggccggggaagagagatctctcgagattttgccaagctgtatgaactggacggtgatcctgaaaggaaagagttcctggatgacctcttcgtctttatgcagaagagggggacccccatcaaccgaatccccatcatggccaaacagatcctggacctgtacatgctgtataagctggtgaccgagaagggaggcctggtggagatcatcaacaagaagatctggagggagatcaccaaaggcctaaacctgcccacatccatcaccagcgccgccttcaccctcaggacgcagtacatgaagtatctgtatgcctatgagtgtgagaagaaagccttgagttccccagccgagctccaggcagcaattgatggcaaccgcagggagggccggcggcccagctacagctcctccctctttggctactcacctgctgcggctactgctgctgccgctgccggggcccctgcccttctctccccacccaagatccgctttcccatccttgggcttggctccagcagtggtaccaataccagtagccctcggatatccccagcaaccactctcaggaaaggtgatggagccccagtgacaacagtgcctgtgccaaatcgtctggctgtgcccgtgaccttggcaagccagcaggctggtactcggaccgccgcactggagcagctgcgggagcggctggagtcaggggagcctgctgagaagaaggcatcgaggctgtctgaggaggagcagcgcctggtgcagcaggccttccagcgcaactttttcagcatggcacggcagctccccatgaagatcaggatcaacggcagggaagacagagcagaggcctcggctgcagcactgaacctgaccacgagtagcattgggagcattaacatgtctgtggacatcgatggcaccacctatgcaggtgtgctgtttgcccagaagcctgtggtccacctcatcacggggtctgctccccagagcctcggcagcagcgccagcagcagcagcagctctcactgttcaccaagtcctacctcatcccggggcacccccagcgcagagccctccaccagctggtccctctgatgggcaggacccagcttcccacttgccactctcctgtcgagagtgaaggaagttgatgcacagaatttacctcatctcacagagcccacgtcgacgagcaccatttggccagacattgagagtttggacgtgtccgtctgtccaggctccattcaggtcctgctgtactctgggggcagggagaggctagaggggcaggacagacagcgttgtccaatcagggattgtcctggagaactgggtgggggtctgtgggtgtccagcttcctccagggttccccagccacctcccagctcagggcacagtgtatcgacaatctgtcagccgacgcagggctggaggccctccatttccctccccttttaatttatttccctgaccctgccttctgccatgaccccagggccactagtctcttcccctgtttttaagtcccatgtggggctgccaggagccaagagcatgccttcatgcccttctctgcagagcatgggatggggcccttccagcccactttgcctactgttaggttcctggggtacgggtccctcaaacacaagtcttgaatcagtcctcagggccccagatcccccttctaatagtctgaaggaagaggctgtgagggcagttcagggccagggcccacagggcatctgctgatgggaaggcagagcctcggggctgcccagccctggcacctgcttcacacggaccattctctgaccgcccccgccaaacctcatgctccccacttgcccttattggcctgctttcccaaaaacagcccactcatcctttccccagccctcttcagccctccccagtcctccccagccttcttcagccttcttcagctcagccctcttctatttcttatggggccatcttggcctcaccatccccacacgtgccgatgtcaggttcattgaaatacctcagatttgtaattgttgatgtttgagtcttcaggaagtatttgcatctctgaaatcttttttatatgtgttttgctgacttttgttttttttttattttaaaatttttatcgtagcaccaaagaaatgaaaacagatcacccccaaagccaagcaagtgattgggtaacccggcccctctggcccttccctcaagcccagtgaggaggtgggtggaggcatgcaggggagacgactcagggatcgcgggggcggggaggtggagtggagaggcccgctctcacaccgggtcgggccctgaaactgtaccagttctgaagaccgttttctgccacacccccacccccagctgaccagggaggcagaggacacctccccatcactcagcattcccagctcagggcacaggcaggctggggtcctcgctggccttgccagaggttgagccgccccagggtatgaggagatgaataactccacagctcctcctggaccctgcgcgggagcaggcagctcctgtgctgtaaagaaaattgattcgcttgcggctcacctcagtcgaggaagccctggaatgttcagcagaacaccaccactgtgacatggggctgtggcagtgggagacaccgcgcgtggcgtgggtgtgtgtggcagcgtggctcgcattcagtcctgtgtaggagaggaaagggaatcaaaagcttgagcacaaacagatacctcagcccggtaagctgcagctctgctcaactgcgtcttctctcagccctccacacacactcacccccactcccacacacatacacacacacacacacataccccatctcccgagggctgacctcctctggcctcagcctgcagggtgtgggcagagaagggcatctgggacgtggtgccagtgaggagcccagttggctggcactgggcccatttgaaggtgtctcagacatttggccagtatgtctttctcaggggtttggtcacaaaggatggactcttcccacccagaggatgcagggaaagcacactgtgtctttccggtcattggatcctctccctttccccaggcagctcgcctggccacaccgttggagtgaaccctcactgccctcaaggacaacagcagggtgtcacccagagcccgatgaggggtgccagcaggtgcccccacgagtggggccttggcccaagcagagcttcccctgaaggtgccatcagccagggcagctctgtcccctcctgctctccatcttatatgtattctaaccaggaaaaatgtgatagcacatgggtagcctaggcagtgagtaaatacctcagatgtcctcctgcagcaagtgtctatatgttgtggttattttctatcttacatgttctcgaatgtttatatttcaataaacctctacctcttcacacaaaaaaaaaaaaaa

SEQ ID NO: 165363 - DNA, 1683 bp, Artificial Sequence
  derived and/or modified sequence
atggaacccctgcagcagcagcagcagcagcagcaacagcaacagaaacagccccatttggcccccctgcagatggatgcacgcgaaaagcaaggccagcagatgagggaagcgcaatttttgtatgcccagaagttagtaacccagccgaccctgttgtcagccaccgctggtagaccttctggcagcaccccactcggcccactcgctagggtccccccgaccgccgcagttgcacaggtgttcgaacgcggcaatatgaactctgaaccagaggaagaggacggcgggttagaagacgaagatggagacgatgaggtagccgaagtcgctgagaaggagacccaggcagctagcaagtacttccacgtccagaaggtcgctcgtcaagaccctcgagtcgcaccgatgtccaacctgctccccgcccctggcctgccgccccacgggcagcaggctaaagaggaccacacaaaagatgctagtaaggcctcaccaagtgtgagcacagctggccagccgaattggaacctggacgaacagttgaagcagaacgggggccttgcctggagcgacgatgccgacggcggccggggtagagaaatcagtcgcgactttgctaagctgtatgaattggacggcgacccagaaaggaaagagttcctggatgatctgtttgttttcatgcaaaagcgtggaactcccattaatagaattcccataatggccaaacaaatactagacctgtacatgctgtacaaacttgtgacggagaaagggggcctggtggagattattaacaagaaaatatggagggagataacaaaggggctgaacctgcccacctccattactagtgcagctttcactctcagaactcagtatatgaaatacctgtacgcttatgagtgtgagaagaaagcactctcctcccccgccgagttgcaggccgctattgatggcaatagacgcgagggacgacggccatcttactcttcttcactgtttggctacagtccggccgccgccaccgcagccgctgctgctggcgcccccgctcttctcagcccaccaaagatccgattcccaatactgggcctggggtcctcaagtggcaccaatacgtcttctcctcgcatttctccagccactacactacggaagggcgacggagcgcccgtgacgacagtgccagttcctaataggttggcagtgcctgttactcttgcttcacagcaggctgggactaggacagcagccctggagcaacttagggagagattggagtcaggcgagcctgctgaaaaaaaagcctctagactgtcagaagaggaacagaggctggtacagcaggcgttccaaagaaatttttttagtatggccagacaactcccgatgaagatcagaattaatggtagagaagatagagctgaagcctcagcagccgccctgaatctgactacctcttctataggttcaatcaatatgagtgttgacattgatggtactacctatgccggagttctttttgctcaaaagcccgtggtgcacctgattactgggtctgccccccagtctctgggcagttccgccagctccagcagtagttcccactgcagcccttccccgacctcatccaggggaacaccgagtgccgagccatctaccagctggtctctgtag

SEQ ID NO: 165364 - DNA, 1335 bp, Artificial Sequence
  derived and/or modified sequence
atggaaccactccagcaacagcagcaacagcagcaacagcaacagaaacagccccacctcgccccgttgcagatggatgcccgtgagaagcagggccagcaaatgcgagaagctcagttcctgtacgctcagaaactggtcacacagccgacactgctgagcgctacagccggaaggccatccggatccactcccctcggtccgttagctcgggtcccacccacggccgccgttgctcaagttttcgagcgcggcaacatgaacagcgagccagaggaggaggatgggggtctcgaagatgaagatggtgacgatgaagtggccgaagtcgcggagaaagagactcaggccgccagtaagtacttccacgtccagaaagtcgcaaggcaggaccccagagtggctcccatgtccaatctgctcccggcccccgggctgccgccccacggccagcaggcaaaggaggatcacacaaaggatgcatccaaggcttccccctctgtgtcaactgccggccagcctaactggaaccttgacgaacagctaaagcagaatggggggctggcatggtccgatgacgccgacggcggcaggggcagagaaatcagcagagattttgccaagctctacgagttggacggggaccctgagagaaaagaattcttggatgacctttttgtctttatgcagaagcgtggcacacctatcaatcgaatcccgattatggcaaagcagattctggatctgtatatgctctataagctcgtcactgaaaaaggcggcttagttgagattattaataagaaaatttggagagaaatcaccaaggggcttaacctgcccacaagtataacaagcgctgccttcactttgagaacacaatacatgaaatacctgtatgcctacgagtgcgaaaagaaagcactttcaagccctgctgagcttcaggccgcgatagacggcaaccgacgggagggacgccggcccagctactctagcagtctgttcggctattccccggcagctgccaccgccgccgcagctgctggtgctccagccttgttgtcaccaccaaaaattcgctttccaatacttggattaggctcgtcctcaggcacaaatacctcaagccctaggatctctccagcaacaaccctccgcaagggcgatggtgccccagtcacgacagtccctgtgcctaacagactcgcagtacccgtcactctggcctcccaacaggctggaaccagaacagccgccctggagcaactaagggaacggcttgaaagtggtgagcctgcagaaaaaaaagcttcggggacttggtgccaatag

SEQ ID NO: 165365 - DNA, 1413 bp, Artificial Sequence
  derived and/or modified sequence
atggagccattgcaacagcagcaacagcaacagcagcagcagcagaagcaaccccacctcgcccctcttcagatggacgctagagagaagcagggacagcagatgagagaggcacagttcctttacgcccaaaagctcgtaacccagccaacgttactgtccgccaccgcaggcagaccctctgggtccacacccctgggccctctggcgcgggtgccgcccactgctgctgtggctcaggtgtttgaaaggggtaacatgaatagcgaacccgaagaggaagatggggggctcgaggatgaggacggtgacgatgaggtggcagaggttgctgaaaaggaaactcaagcagccagcaagtatttccatgttcagaaggtcgcgaggcaggacccacgggtggcacccatgagcaacttgctcccggcacctggcttgccccctcatggccagcaggcaaaggaagaccatactaaagacgcttccaaagccagcccttccgtgtctaccgccggccagcccaattggaatctggatgagcaactgaagcagaacggtgggttagcatggtctgacgacgcggacgggggaaggggccgcgagatttcccgcgacttcgctaaactttatgaactcgacggagatccagaaagaaaagaatttcttgatgacctctttgtgttcatgcagaaaagagggaccccaatcaaccggatccctattatggccaaacagatcctggacctttatatgctgtacaaattggtcactgagaagggagggctcgtggagattataaataaaaagatatggcgggagattacaaagggtctgaatctgcccaccagtattacttccgcagccttcacattgagaactcagtatatgaaatacttatatgcatatgaatgtgaaaagaaagctttatcttccccagcagaactgcaggcagcaattgacggcaacagaagggagggcagaaggccctcttacagttcgtcactttttggctattcccccgcagccgctacagccgcggcagcggccggcgctccggctcttttatcaccccccaaaatcaggtttccgatccttggactcggtagctcttccggcaccaacacttcatcacctagaatttcccctgctactaccctgcgtaagggtgacggggcccccgtcacaaccgtacccgtgccaaacaggctggccgtccctgtaaccttggcgtcacagcaggccggcactagaactgcggccctggagcagctgcgagagcgactggagtccggagagccagcggagaaaaaggcctctagactcagcgaggaagagcaaagactggtgcagcaggcgtttcagcgtaacttcttcagcatggccagacaactgtctatcctctacgtgttctag

SEQ ID NO: 165366 - DNA, 1683 bp, Artificial Sequence
  derived and/or modified sequence
atggagcccctgcagcagcagcagcagcagcagcagcagcagcagaagcagccccacctggcccccctgcagatggatgcccgggagaagcagggccagcagatgagggaggcccagttcctgtatgcccagaagctggtgacccagcccaccctgctgagcgccacagctggccggcccagcggcagcacccccctgggccccctggcccgggtgcccccaacagctgctgtggcccaggtgtttgagcggggcaacatgaacagcgagcctgaggaggaggatggcggcctggaggatgaagatggagatgatgaggtggccgaggtggccgagaaggagacccaggccgccagcaagtacttccacgtgcagaaggtggcccggcaggacccccgggtggcccccatgagcaacctgctgcctgcccctggcctgccccctcatggccagcaggccaaggaggaccacaccaaggatgccagcaaggccagccccagcgtgtccacagctggccagcccaactggaacctggatgagcagctgaagcagaatggaggcctggcctggagcgatgatgctgatggcggccggggccgggagatcagccgggactttgccaagctgtatgagctggatggagaccctgagaggaaggagttcctggatgacctgtttgtgttcatgcagaagaggggcacccccatcaaccgcatccccatcatggccaagcagatcctggacctgtacatgctgtacaagctggtgacagagaagggcggcctggtggagatcatcaacaagaagatctggagggagatcaccaagggcctgaacctgcccaccagcatcaccagcgctgccttcaccctgcggacccagtacatgaagtacctgtatgcctatgaatgtgagaagaaggccctgagcagccctgctgagctgcaggccgccattgatggcaacagaagagagggcagaagacccagctacagcagcagcctgtttggctacagccctgctgctgccacagctgctgctgctgctggggccccagccctgctgagcccccccaagatccgcttccccatcctgggcctgggcagcagcagcggcaccaacaccagcagcccccgcatcagccctgccaccaccctgaggaaaggagatggagcccctgtgaccaccgtgcctgtgcccaaccggctggccgtgcctgtgaccctggccagccagcaggccggcaccaggacagctgccctggagcagctgcgggagcggctggagagcggggagcctgctgagaagaaggccagccggctgtctgaggaggagcagaggctggtgcagcaggccttccagaggaacttcttctccatggcccggcagctgcccatgaagatccgcatcaatggccgggaggacagagctgaggccagcgctgctgccctgaacctgaccaccagcagcatcggcagcatcaacatgtctgtggacattgatggcaccacctacgccggcgtgctgtttgcccagaagcctgtggtgcacctgatcaccggcagcgccccccagagcctgggcagcagcgccagcagcagcagcagcagccactgcagccccagccccaccagcagccggggcaccccatctgctgagcccagcacctcctggagcctgtag

SEQ ID NO: 165367 - DNA, 1335 bp, Artificial Sequence
  derived and/or modified sequence
atggagcccctgcagcagcagcagcagcagcagcagcagcagcagaagcagccccacctggcccccctgcagatggatgcccgggagaagcagggccagcagatgagggaggcccagttcctgtatgcccagaagctggtgacccagcccaccctgctgagcgccacagctggccggcccagcggcagcacccccctgggccccctggcccgggtgcccccaacagctgctgtggcccaggtgtttgagcggggcaacatgaacagcgagcctgaggaggaggatggcggcctggaggatgaagatggagatgatgaggtggccgaggtggccgagaaggagacccaggccgccagcaagtacttccacgtgcagaaggtggcccggcaggacccccgggtggcccccatgagcaacctgctgcctgcccctggcctgccccctcatggccagcaggccaaggaggaccacaccaaggatgccagcaaggccagccccagcgtgtccacagctggccagcccaactggaacctggatgagcagctgaagcagaatggaggcctggcctggagcgatgatgctgatggcggccggggccgggagatcagccgggactttgccaagctgtatgagctggatggagaccctgagaggaaggagttcctggatgacctgtttgtgttcatgcagaagaggggcacccccatcaaccgcatccccatcatggccaagcagatcctggacctgtacatgctgtacaagctggtgacagagaagggcggcctggtggagatcatcaacaagaagatctggagggagatcaccaagggcctgaacctgcccaccagcatcaccagcgctgccttcaccctgcggacccagtacatgaagtacctgtatgcctatgaatgtgagaagaaggccctgagcagccctgctgagctgcaggccgccattgatggcaacagaagagagggcagaagacccagctacagcagcagcctgtttggctacagccctgctgctgccacagctgctgctgctgctggggccccagccctgctgagcccccccaagatccgcttccccatcctgggcctgggcagcagcagcggcaccaacaccagcagcccccgcatcagccctgccaccaccctgaggaaaggagatggagcccctgtgaccaccgtgcctgtgcccaaccggctggccgtgcctgtgaccctggccagccagcaggccggcaccaggacagctgccctggagcagctgcgggagcggctggagagcggggagcctgctgagaagaaggccagcggcacctggtgccagtag

SEQ ID NO: 165368 - DNA, 1413 bp, Artificial Sequence
  derived and/or modified sequence
atggagcccctgcagcagcagcagcagcagcagcagcagcagcagaagcagccccacctggcccccctgcagatggatgcccgggagaagcagggccagcagatgagggaggcccagttcctgtatgcccagaagctggtgacccagcccaccctgctgagcgccacagctggccggcccagcggcagcacccccctgggccccctggcccgggtgcccccaacagctgctgtggcccaggtgtttgagcggggcaacatgaacagcgagcctgaggaggaggatggcggcctggaggatgaagatggagatgatgaggtggccgaggtggccgagaaggagacccaggccgccagcaagtacttccacgtgcagaaggtggcccggcaggacccccgggtggcccccatgagcaacctgctgcctgcccctggcctgccccctcatggccagcaggccaaggaggaccacaccaaggatgccagcaaggccagccccagcgtgtccacagctggccagcccaactggaacctggatgagcagctgaagcagaatggaggcctggcctggagcgatgatgctgatggcggccggggccgggagatcagccgggactttgccaagctgtatgagctggatggagaccctgagaggaaggagttcctggatgacctgtttgtgttcatgcagaagaggggcacccccatcaaccgcatccccatcatggccaagcagatcctggacctgtacatgctgtacaagctggtgacagagaagggcggcctggtggagatcatcaacaagaagatctggagggagatcaccaagggcctgaacctgcccaccagcatcaccagcgctgccttcaccctgcggacccagtacatgaagtacctgtatgcctatgaatgtgagaagaaggccctgagcagccctgctgagctgcaggccgccattgatggcaacagaagagagggcagaagacccagctacagcagcagcctgtttggctacagccctgctgctgccacagctgctgctgctgctggggccccagccctgctgagcccccccaagatccgcttccccatcctgggcctgggcagcagcagcggcaccaacaccagcagcccccgcatcagccctgccaccaccctgaggaaaggagatggagcccctgtgaccaccgtgcctgtgcccaaccggctggccgtgcctgtgaccctggccagccagcaggccggcaccaggacagctgccctggagcagctgcgggagcggctggagagcggggagcctgctgagaagaaggccagccggctgtctgaggaggagcagaggctggtgcagcaggccttccagaggaacttcttctccatggcccggcagctgagcatcctgtatgtgttctag

SEQ ID NO: 165369 - DNA, 1683 bp, Artificial Sequence
  derived and/or modified sequence
atggagcccctgcagcagcagcagcagcagcagcagcagcagcagaagcaacctcacctcgctccattacagatggacgcccgagagaagcaggggcagcagatgcgggaagcccagtttctgtacgctcagaaactcgtcacacaaccaacactgctgagcgccacggcaggaagaccttcagggtcaacccctcttgggcctttggccagggtacctcctacggccgctgtagctcaggtgtttgagcgcggaaacatgaattcagaacccgaggaggaggacggcggactagaagacgaggatggagatgacgaggtggctgaagtagctgaaaaggagactcaggctgcgtccaaatattttcacgtccagaaagtagcaagacaggatcccagagtggcacctatgtctaacctgcttccagctccagggttgccaccccacggtcaacaggccaaggaggaccacaccaaagacgcctcaaaggctagccctagcgtgagcacggccggccaaccaaattggaacctcgacgagcagttgaaacagaacggaggactggcatggtccgacgatgcggatggagggcgggggcgggagatatctcgcgatttcgctaagctgtacgaattagatggggatcctgaacgcaaagaattcctcgatgatctgttcgtctttatgcagaaaagaggcacccccataaaccgaatccccatcatggctaagcaaattctggatctgtacatgctttacaagttggtcacggagaagggaggcttagtggaaatcattaacaaaaaaatatggagggaaatcaccaaaggacttaatctccccacctccatcacaagtgccgcgttcacgctgcgaactcaatatatgaaatatctgtacgcctacgagtgcgaaaaaaaagctttaagtagtccagccgagctgcaggccgcaatcgatgggaatagacgcgaaggccggaggccatcatactcctcatcactctttggctacagtcccgcggccgctactgccgccgctgccgctggagctcctgcgttattgtctccaccgaaaatcaggttcccgatacttggccttgggtctagcagcggtacaaacacctcctcaccccgaatcagccctgcgacaacccttcgaaagggagacggggcccctgtaacaacagtgccagtccccaacagactggccgtaccagtcacactggcgtcccaacaagcaggtacgaggactgccgcattggaacaactgagagagcgtctcgagtcaggagagcctgctgagaagaaggcttcccgattgtccgaggaggagcagaggctggtgcaacaagccttccaaaggaatttcttcagtatggctcgccagctcccgatgaagatcagaattaacggtagggaggaccgcgccgaagcttcagcagccgccctcaatttaaccacctcctctatagggtccatcaatatgtccgtggacatagacgggaccacgtatgctggcgtgctgttcgctcagaagcccgtcgttcatctgattaccggctcagcacctcagagcctagggagctccgccagctcctcatcatcatcccattgtagtccaagcccaacttcctcaagggggacgccttcagctgaaccctctacctcttggagtctgtag

SEQ ID NO: 165370 - DNA, 1335 bp, Artificial Sequence
  derived and/or modified sequence
atggagcccctgcagcagcagcagcagcagcagcagcagcagcagaaacagccacatctggctcccctgcagatggacgctcgagaaaaacagggtcagcagatgagagaggcccaattcctttatgcccagaagctcgtgacccagccaactctgttgtcagctaccgcagggcggccgagtggttctacccctttagggcccctggcgagggtgccgcccactgccgcagtggcacaagtcttcgagaggggtaacatgaactctgaacccgaagaagaagacggcggactcgaggacgaagatggcgatgacgaggttgccgaggtggcggagaaggaaacacaggctgcctccaagtactttcatgtgcagaaagttgctcggcaggacccacgagtggcgcctatgagcaatctactcccagccccgggcttgccaccccatggtcaacaagcaaaagaagaccacaccaaggatgcttccaaagcatctccttccgtgagcacggctggacaacccaattggaacctggacgaacagctgaagcagaatgggggcctggcatggagcgatgatgcagacggcggaaggggcagggagatctctcgtgacttcgctaaactctacgagctggacggagacccggagcggaaggaattcctcgacgacctgttcgtgtttatgcaaaagagggggacacccataaacagaattcctatcatggccaaacagatcctggacttgtatatgttatacaaacttgtgaccgagaaaggcgggttagtggagatcatcaataaaaaaatttggcgggaaattaccaaaggcctgaacctgcctacgagcatcaccagcgctgcctttacgctgcgcacgcagtatatgaaatacctttacgcctacgagtgcgagaaaaaagcgctcagctcgcccgcggagctgcaagccgccattgatggtaatcggcgagaaggcagaagaccatcatactcatctagcttgttcggttacagccccgcagccgccactgccgccgcagctgctggcgctccagccttactgtctccccccaaaattaggttccctatcttgggcttgggcagcagttcaggtaccaacacgtccagccctcggatcagtcccgctacaacactgaggaaaggcgacggagctcctgtgaccaccgtacctgtccctaatcgactcgctgttcccgtgacactcgcctcacagcaggccgggaccaggaccgcagccttggagcaattaagagagagactggaaagtggtgaacccgccgagaaaaaagcatctggcacttggtgccagtag

SEQ ID NO: 165371 - DNA, 1413 bp, Artificial Sequence
  derived and/or modified sequence
atggagcccctgcagcagcagcagcagcagcagcagcagcagcagaaacagccgcatttggctcctctgcaaatggacgcaagagaaaagcagggccagcagatgagagaggcccagtttctgtacgcccagaaactggtgacccagcctactttgctgagtgctaccgcaggtcgaccttccggttccactcctctcggcccactggctcgcgtcccgccaaccgcagccgtagctcaggtgttcgagaggggcaatatgaacagcgaaccagaagaggaggatggggggctggaggacgaagatggggatgacgaagtggccgaagtcgctgaaaaggaaacacaagcggcttcaaagtattttcatgtccagaaggtggcacggcaggatccccgcgtcgcacccatgtctaatcttcttcctgcgccaggcctgcctccgcatggacagcaggctaaggaggatcacaccaaggatgccagtaaggcctcacccagcgtgtccaccgcaggccagccaaattggaacctcgacgaacagctgaagcagaacggcggcttggcttggtctgatgacgcggacgggggtagggggcgcgaaatcagccgtgactttgcaaaactgtacgaactagacggggaccctgaaaggaaggagtttttggatgacttgtttgttttcatgcaaaaaagagggactccaatcaatcgcattcccatcatggccaagcaaattcttgatttgtatatgctatacaagttggtgacagaaaagggggggctcgtggagatcattaataagaaaatttggagagaaattacaaaggggcttaatctacccacatccatcacttccgctgcttttaccttgcgcacgcagtatatgaaatatctttacgcttatgagtgtgagaaaaaggcgctgagtagtcctgccgagctccaggctgcaatcgacggaaatcggcgggagggacgcagacccagttattcttcatctctgttcgggtatagccctgccgcggccactgcagcagcagccgcaggggctcctgccctgttgtctccccctaagatccgcttccctatcctgggactgggcagcagttccggaactaacacttcctctcctcgtatcagtcccgccaccacgctgcgtaagggcgacggcgcaccagtaaccaccgtacccgttcccaataggctggccgtccctgtcactctagcttcacagcaggccgggaccagaactgccgccctggagcaacttcgggagagactcgagtctggggagcccgcggaaaagaaagcaagccgactgtcggaggaggagcagaggctggtccagcaggccttccagcggaatttcttttctatggccagacagctgtcaatcctctacgtgttctag

SEQ ID NO: 165372 - DNA, 1683 bp, Artificial Sequence
  derived and/or modified sequence
atggaaccgctacagcagcagcagcagcagcagcagcaacagcagaaacagcctcaccttgcacccttacagatggacgcccgagaaaagcaagggcagcaaatgagagaggcacagttcctgtacgcacaaaaactagtgacgcagcctaccctgctcagtgctaccgccggacgtcccagtggcagcactcccttgggccctctcgccagggtccccccaactgcagccgtggcccaggttttcgagaggggcaatatgaatagtgaaccagaagaggaggacggcggactagaggacgaagatggcgacgatgaggttgccgaggtggctgagaaagaaacacaagctgccagcaaatattttcacgtccagaaagtggcacgacaggatccacgcgtcgctccgatgtccaaccttctgcccgctccgggactgcctccacacggccaacaagcgaaagaggaccacactaaggacgctagtaaggcctcaccctccgtgtctactgccggacagcctaactggaatttagacgaacagctgaaacaaaacggcggtctggcatggtccgacgatgccgacggcggaaggggaagggagataagccgggattttgccaaactttacgagctcgatggagacccagagagaaaagagttcctggatgatctctttgtgtttatgcagaaacgcggaacgcctatcaaccgaatccctattatggccaagcaaattctcgacctgtacatgctatacaaactggtgacggaaaaaggcggactggttgagattatcaataagaagatttggagagaaattaccaagggtttaaacctcccaaccagtatcacctcagcggcattcactctccgcacacagtacatgaagtatctttacgcctatgaatgcgagaagaaagccttgtcatcccctgctgagttgcaggccgctatcgacgggaacaggcgggagggtaggagaccttcctactcgagcagcctgtttgggtattcgcccgctgctgcaaccgccgctgccgcagccggagcacccgcattgctgagcccccctaagatccgatttccaatactgggcctcggttccagctccggcacgaatacctcctcccctcgaattagcccagcaaccacactgaggaaaggagacggagcacccgtgaccactgttcctgtgcccaaccgcttggcagttcccgtaaccctagcttcacagcaggctggcacccgcaccgctgcactcgaacagttgcgggagcggctcgagtctggggagccggctgagaaaaaagcgtcccgccttagcgaggaggaacaacggctggtgcagcaagcattccagaggaactttttctcgatggctcgccagttacctatgaagatccgcatcaacggcagggaggatcgggctgaggcatccgcggcagctctcaatctgactacaagctctatcggatcgatcaacatgagtgtcgatatcgatggcacaacttatgccggagttctgttcgcccaaaagccagtggtgcatctgatcacagggagtgcaccccagtccctggggagttctgcttctagtagctccagctcccactgctccccttcgcccacgagctccagaggcaccccatccgccgaacctagcacttcatggtctttgtag

SEQ ID NO: 165373 - DNA, 1335 bp, Artificial Sequence
  derived and/or modified sequence
atggagcccttgcagcagcagcaacaacaacagcaacagcagcagaaacaaccccacctggcacccctccagatggacgctcgggagaaacagggccagcagatgagggaagcacagtttctttatgctcagaagctggtgacacagccaacccttctgtccgcaacggcgggtagaccatccggcagcaccccattaggcccactggcgcgagtgccacctacagccgcagtggctcaggtttttgagaggggcaatatgaactcggagcccgaagaggaagatggaggcctggaagacgaggacggagacgacgaagtggctgaagtggctgagaaagagacacaagcagcgagcaaatatttccacgtccagaaagtggcacgccaggaccctagagtcgccccaatgtccaacctgcttccagctcccggtttacctcctcatggccaacaggcaaaggaggatcatactaaagacgcatcaaaggcctcacccagtgtcagtacagcgggacaacccaactggaacctagacgagcagttgaagcagaacggcggattggcctggtcagatgatgctgatgggggtagaggccgagagatttccagggattttgcaaagctgtatgagctcgacggtgatccggaaaggaaagaattcctggatgatctgttcgtttttatgcaaaaaaggggcacccccatcaaccggattcccattatggccaagcagatcctggacctctacatgttatacaagctagtaacagagaaaggaggtctggtagagattataaataaaaaaatctggcgcgaaatcacgaaggggctaaacttgcctacctcaatcacctcagcggcatttactttgcgaacccaatatatgaaatatctatatgcatacgaatgcgaaaaaaaggcactgagctcacccgctgaacttcaggcggctattgacggcaaccgccgagaaggcaggcgtcctagctactcgtcctctctgttcggttattcccctgctgctgccacagccgctgcggctgccggagctccagctctgctcagtccccctaagatacggtttcccatcttgggcttgggcagctccagtggtacaaatacctcatcacctcggatcagcccagccactacattgcgaaaaggagatggtgccccagtgactactgtgcccgtgccaaaccggttagcagtgcccgtcacgctagcttctcagcaggctggaacccgcaccgccgcattagagcagcttagagagagactggagtcaggggaacccgcagagaaaaaagcatctggaacatggtgtcagtag

SEQ ID NO: 165374 - DNA, 1413 bp, Artificial Sequence
  derived and/or modified sequence
atggaacctctccaacagcagcagcagcagcaacagcagcagcaaaaacagccccatcttgctcctttgcagatggatgctcgagagaagcaagggcagcagatgagagaagctcaattcctgtatgcacaaaagttggttacacaaccgacactactgtcagccacggcaggtcggcctagtgggagcacgcctctgggaccattagctcgagtgccgccaacagctgcagtagcacaggttttcgagcgaggcaacatgaactcggagcccgaagaagaagatggaggtctcgaggacgaagatggagatgacgaagtggccgaggtggccgaaaaagagacacaggcggcttcaaagtattttcacgtgcagaaggtcgccaggcaggatccacgggtggctcctatgtcaaatctcctgcccgctccaggcctcccaccacacggacagcaggccaaggaggaccacaccaaagacgcttccaaagctagcccctctgtgtccactgccggacaacctaactggaatctggatgagcaattgaagcagaatgggggtctcgcttggtcggatgatgctgacggcggtcggggtagggagattagccgtgacttcgcgaagctgtacgagctggatggagaccccgagaggaaggagtttctggacgatcttttcgtcttcatgcagaagaggggcaccccaatcaatcgcatcccgataatggctaaacagatcctggacctgtatatgttatacaagctggttaccgaaaagggcggactggtcgagattattaacaagaagatctggcgggagattacaaagggactgaacctgcccacatctattaccagcgccgcttttaccctcagaacacagtacatgaaatatttgtacgcttacgaatgcgagaagaaggcgttgtcctccccggcagaattacaggcggctatcgatggcaaccgtcgggagggcagaagaccctcttactcctctagcctctttggttacagccccgctgccgcaaccgcagcagcagctgccggtgcgcctgccctcctcagtcctccgaagattaggttcccaatactggggctaggatcttctagtggtacaaacacgtcttcgcccaggattagtccagccactacacttcgcaaaggtgacggggcaccggtgacaaccgtgcccgtacctaacaggctcgcagtgcccgtcaccctagcttcccagcaagctgggactagaacggctgctctcgaacagcttcgagagagactggaatctggtgaaccagccgaaaagaaagcatcccgtctgtccgaggaagagcagagacttgtgcagcaagcctttcagagaaatttcttttccatggccagacagcttagcattctttatgttttctag

SEQ ID NO: 165375 - DNA, 4243 bp, Artificial Sequence
  derived and/or modified sequence
gcttccggtgcgggccccgccccggctgtggcccccggctgcggaggagtccgagacgcagctgccgcgccggggcctgagctgccgcctcctccgccgcccgaaaacccggagtgccccgcacaggtttagacccagtgtgcctggtgggctgtgcccaggttcagagtcatgccactctgtgggtgaagcttgaggcaaaaatggagccacttcagcagcagcagcagcagcagcagcaacaacagaagcagccacacctggctcctctgcagatggatgccagagagaagcagggccagcagatgagagaagcccagttcttgtatgcccaaaagctggtcacacagccgactctcctttccgccacagctgggagaccttctggcagcactcccttaggtcccttagccagagttccacccaccgcagcagtggcccaagtgtttgaacggggcaacatgaactcagagcctgaggaagaggacggaggtttggaagatgaggatggggatgatgaagttgcagaggtggctgagaaagaaacccaggctgcttcaaaatattttcatgtgcagaaagtagctcgccaagatcccagagtggcacccatgtccaatctacttccagcaccagggctcccaccacatggacaacaagctaaagaagaccataccaaagatgcttccaaggcctcaccttctgtctccacagcaggacagccgaactggaatctggatgagcagctcaagcagaatggtggtttggcctggagtgatgatgcagatggaggccggggaagagagatctctcgagattttgccaagctgtatgaactggacggtgatcctgaaaggaaagagttcctggatgacctcttcgtctttatgcagaagagggggacccccatcaaccgaatccccatcatggccaaacagatcctggacctgtacatgctgtataagctggtgaccgagaagggaggcctggtggagatcatcaacaagaagatctggagggagatcaccaaaggcctaaacctgcccacatccatcaccagcgccgccttcaccctcaggacgcagtacatgaagtatctgtatgcctatgagtgtgagaagaaagccttgagttccccagccgagctccaggcagcaattgatggcaaccgcagggagggccggcggcccagctacagctcctccctctttggctactcacctgctgcggctactgctgctgccgctgccggggcccctgcccttctctccccacccaagatccgctttcccatccttgggcttggctccagcagtggtaccaataccagtagccctcggatatccccagcaaccactctcaggaaaggtgatggagccccagtgacaacagtgcctgtgccaaatcgtctggctgtgcccgtgaccttggcaagccagcaggctggtactcggaccgccgcactggagcagctgcgggagcggctggagtcaggggagcctgctgagaagaaggcatcgaggctgtctgaggaggagcagcgcctggtgcagcaggccttccagcgcaactttttcagcatggcacggcagctccccatgaagatcaggatcaacggcagggaagacagagcagaggcctcggctgcagcactgaacctgaccacgagtagcattgggagcattaacatgtctgtggacatcgatggcaccacctatgcaggtgtgctgtttgcccagaagcctgtggtccacctcatcacggggtctgctccccagagcctcggcagcagcgccagcagcagcagcagctctcactgttcaccaagtcctacctcatcccggggcacccccagcgcagagccctccaccagctggtccctctgatgggcaggacccagcttcccacttgccactctcctgtcgagagtgaaggaagttgatgcacagaatttacctcatctcacagagcccacgtcgacgagcaccatttggccagacattgagagtttggacgtgtccgtctgtccaggctccattcaggtcctgctgtactctgggggcagggagaggctagaggggcaggacagacagcgttgtccaatcagggattgtcctggagaactgggtgggggtctgtgggtgtccagcttcctccagggttccccagccacctcccagctcagggcacagtgtatcgacaatctgtcagccgacgcagggctggaggccctccatttccctccccttttaatttatttccctgaccctgccttctgccatgaccccagggccactagtctcttcccctgtttttaagtcccatgtggggctgccaggagccaagagcatgccttcatgcccttctctgcagagcatgggatggggcccttccagcccactttgcctactgttaggttcctggggtacgggtccctcaaacacaagtcttgaatcagtcctcagggccccagatcccccttctaatagtctgaaggaagaggctgtgagggcagttcagggccagggcccacagggcatctgctgatgggaaggcagagcctcggggctgcccagccctggcacctgcttcacacggaccattctctgaccgcccccgccaaacctcatgctccccacttgcccttattggcctgctttcccaaaaacagcccactcatcctttccccagccctcttcagccctccccagtcctccccagccttcttcagccttcttcagctcagccctcttctatttcttatggggccatcttggcctcaccatccccacacgtgccgatgtcaggttcattgaaatacctcagatttgtaattgttgatgtttgagtcttcaggaagtatttgcatctctgaaatcttttttatatgtgttttgctgacttttgttttttttttattttaaaatttttatcgtagcaccaaagaaatgaaaacagatcacccccaaagccaagcaagtgattgggtaacccggcccctctggcccttccctcaagcccagtgaggaggtgggtggaggcatgcaggggagacgactcagggatcgcgggggcggggaggtggagtggagaggcccgctctcacaccgggtcgggccctgaaactgtaccagttctgaagaccgttttctgccacacccccacccccagctgaccagggaggcagaggacacctccccatcactcagcattcccagctcagggcacaggcaggctggggtcctcgctggccttgccagaggttgagccgccccagggtatgaggagatgaataactccacagctcctcctggaccctgcgcgggagcaggcagctcctgtgctgtaaagaaaattgattcgcttgcggctcacctcagtcgaggaagccctggaatgttcagcagaacaccaccactgtgacatggggctgtggcagtgggagacaccgcgcgtggcgtgggtgtgtgtggcagcgtggctcgcattcagtcctgtgtaggagaggaaagggaatcaaaagcttgagcacaaacagatacctcagcccggtaagctgcagctctgctcaactgcgtcttctctcagccctccacacacactcacccccactcccacacacatacacacacacacacacataccccatctcccgagggctgacctcctctggcctcagcctgcagggtgtgggcagagaagggcatctgggacgtggtgccagtgaggagcccagttggctggcactgggcccatttgaaggtgtctcagacatttggccagtatgtctttctcaggggtttggtcacaaaggatggactcttcccacccagaggatgcagggaaagcacactgtgtctttccggtcattggatcctctccctttccccaggcagctcgcctggccacaccgttggagtgaaccctcactgccctcaaggacaacagcagggtgtcacccagagcccgatgaggggtgccagcaggtgcccccacgagtggggccttggcccaagcagagcttcccctgaaggtgccatcagccagggcagctctgtcccctcctgctctccatcttatatgtattctaaccaggaaaaatgtgatagcacatgggtagcctaggcagtgagtaaatacctcagatgtcctcctgcagcaagtgtctatatgttgtggttattttctatcttacatgttctcgaatgtttatatttcaataaacctctacctcttcacacaa

SEQ ID NO: 165376 - DNA, 1599 bp, Artificial Sequence
  derived and/or modified sequence
ctggctggcggtccagccccgcggcgccgcttccggtgcgggccccgccccggctgtggcccccggctgcggaggagtccgagacgcagctgccgcgccggggcctgagctgccgcctcctccgccgcccgaaaacccggagtgccccgcacaggtttagacccagtgtgcctggtgggctgtgcccaggttcagagtcatgccactctgtgggtgaagcttgaggcaaaaatggagccacttcagcagcagcagcagcagcagcagcaacaacagaagcagccacacctggctcctctgcagatggatgccagagagaagcagggccagcagatgagagaagcccagttcttgtatgcccaaaagctggtcacacagccgactctcctttccgccacagctgggagaccttctggcagcactcccttaggtcccttagccagagttccacccaccgcagcagtggcccaagtgtttgaacggggcaacatgaactcagagcctgaggaagaggacggaggtttggaagatgaggatggggatgatgaagttgcagaggtggctgagaaagaaacccaggctgcttcaaaatattttcatgtgcagaaagtagctcgccaagatcccagagtggcacccatgtccaatctacttccagcaccagggctcccaccacatggacaacaagctaaagaagaccataccaaagatgcttccaaggcctcaccttctgtctccacagcaggacagccgaactggaatctggatgagcagctcaagcagaatggtggtttggcctggagtgatgatgcagatggaggccggggaagagagatctctcgagattttgccaagctgtatgaactggacggtgatcctgaaaggaaagagttcctggatgacctcttcgtctttatgcagaagagggggacccccatcaaccgaatccccatcatggccaaacagatcctggacctgtacatgctgtataagctggtgaccgagaagggaggcctggtggagatcatcaacaagaagatctggagggagatcaccaaaggcctaaacctgcccacatccatcaccagcgccgccttcaccctcaggacgcagtacatgaagtatctgtatgcctatgagtgtgagaagaaagccttgagttccccagccgagctccaggcagcaattgatggcaaccgcagggagggccggcggcccagctacagctcctccctctttggctactcacctgctgcggctactgctgctgccgctgccggggcccctgcccttctctccccacccaagatccgctttcccatccttgggcttggctccagcagtggtaccaataccagtagccctcggatatccccagcaaccactctcaggaaaggtgatggagccccagtgacaacagtgcctgtgccaaatcgtctggctgtgcccgtgaccttggcaagccagcaggctggtactcggaccgccgcactggagcagctgcgggagcggctggagtcaggggagcctgctgagaagaaggcatctgggacgtggtgccagtgaggagcccagttggctggcactgggcccatttga

SEQ ID NO: 165377 - DNA, 1719 bp, Artificial Sequence
  derived and/or modified sequence
agtccgagacgcagctgccgcgccggggcctgagctgccgcctcctccgccgcccgaaaacccggagtgccccgcacaggtttagacccagtgtgcctggtgggctgtgcccaggttcagagtcatgccactctgtgggtgaagcttgaggcaaaaatggagccacttcagcagcagcagcagcagcagcagcaacaacagaagcagccacacctggctcctctgcagatggatgccagagagaagcagggccagcagatgagagaagcccagttcttgtatgcccaaaagctggtcacacagccgactctcctttccgccacagctgggagaccttctggcagcactcccttaggtcccttagccagagttccacccaccgcagcagtggcccaagtgtttgaacggggcaacatgaactcagagcctgaggaagaggacggaggtttggaagatgaggatggggatgatgaagttgcagaggtggctgagaaagaaacccaggctgcttcaaaatattttcatgtgcagaaagtagctcgccaagatcccagagtggcacccatgtccaatctacttccagcaccagggctcccaccacatggacaacaagctaaagaagaccataccaaagatgcttccaaggcctcaccttctgtctccacagcaggacagccgaactggaatctggatgagcagctcaagcagaatggtggtttggcctggagtgatgatgcagatggaggccggggaagagagatctctcgagattttgccaagctgtatgaactggacggtgatcctgaaaggaaagagttcctggatgacctcttcgtctttatgcagaagagggggacccccatcaaccgaatccccatcatggccaaacagatcctggacctgtacatgctgtataagctggtgaccgagaagggaggcctggtggagatcatcaacaagaagatctggagggagatcaccaaaggcctaaacctgcccacatccatcaccagcgccgccttcaccctcaggacgcagtacatgaagtatctgtatgcctatgagtgtgagaagaaagccttgagttccccagccgagctccaggcagcaattgatggcaaccgcagggagggccggcggcccagctacagctcctccctctttggctactcacctgctgcggctactgctgctgccgctgccggggcccctgcccttctctccccacccaagatccgctttcccatccttgggcttggctccagcagtggtaccaataccagtagccctcggatatccccagcaaccactctcaggaaaggtgatggagccccagtgacaacagtgcctgtgccaaatcgtctggctgtgcccgtgaccttggcaagccagcaggctggtactcggaccgccgcactggagcagctgcgggagcggctggagtcaggggagcctgctgagaagaaggcatcgaggctgtctgaggaggagcagcgcctggtgcagcaggccttccagcgcaactttttcagcatggcacggcagctctccatcttatatgtattctaaccaggaaaaatgtgatagcacatgggtagcctaggcagtgagtaaatacctcagatgtcctcctgcagcaagtgtctatatgttgtggttattttctatcttacatgttctcgaatgtttatatttcaataaacctctacctcttcacac

SEQ ID NO: 165378 - DNA, 1683 bp, Artificial Sequence
  derived and/or modified sequence
atggagcccctgcagcagcagcagcagcagcagcagcagcagcagaagcagccccacctggcccccctgcagatggacgccagagagaagcagggccagcagatgagagaggcccagttcctgtacgcccagaagctggtgacccagcccaccctgctgagcgccaccgccggcagacccagcggcagcacccccctgggccccctggccagagtgccccccaccgccgccgtggcccaggtgttcgagagaggcaacatgaacagcgagcccgaggaggaggacggcggcctggaggacgaggacggcgacgacgaggtggccgaggtggccgagaaggagacccaggccgccagcaagtacttccacgtgcagaaggtggccagacaggaccccagagtggcccccatgagcaacctgctgcccgcccccggcctgcccccccacggccagcaggccaaggaggaccacaccaaggacgccagcaaggccagccccagcgtgagcaccgccggccagcccaactggaacctggacgagcagctgaagcagaacggcggcctggcctggagcgacgacgccgacggcggcagaggcagagagatcagcagagacttcgccaagctgtacgagctggacggcgaccccgagagaaaggagttcctggacgacctgttcgtgttcatgcagaagagaggcacccccatcaacagaatccccatcatggccaagcagatcctggacctgtacatgctgtacaagctggtgaccgagaagggcggcctggtggagatcatcaacaagaagatctggagagagatcaccaagggcctgaacctgcccaccagcatcaccagcgccgccttcaccctgagaacccagtacatgaagtacctgtacgcctacgagtgcgagaagaaggccctgagcagccccgccgagctgcaggccgccatcgacggcaacagaagagagggcagaagacccagctacagcagcagcctgttcggctacagccccgccgccgccaccgccgccgccgccgccggcgcccccgccctgctgagcccccccaagatcagattccccatcctgggcctgggcagcagcagcggcaccaacaccagcagccccagaatcagccccgccaccaccctgagaaagggcgacggcgcccccgtgaccaccgtgcccgtgcccaacagactggccgtgcccgtgaccctggccagccagcaggccggcaccagaaccgccgccctggagcagctgagagagagactggagagcggcgagcccgccgagaagaaggccagcagactgagcgaggaggagcagagactggtgcagcaggccttccagagaaacttcttcagcatggccagacagctgcccatgaagatcagaatcaacggcagagaggacagagccgaggccagcgccgccgccctgaacctgaccaccagcagcatcggcagcatcaacatgagcgtggacatcgacggcaccacctacgccggcgtgctgttcgcccagaagcccgtggtgcacctgatcaccggcagcgccccccagagcctgggcagcagcgccagcagcagcagcagcagccactgcagccccagccccaccagcagcagaggcacccccagcgccgagcccagcaccagctggagcctgtag

SEQ ID NO: 165379 - DNA, 1335 bp, Artificial Sequence
  derived and/or modified sequence
atggagcccctgcagcagcagcagcagcagcagcagcagcagcagaagcagccccacctggcccccctgcagatggacgccagagagaagcagggccagcagatgagagaggcccagttcctgtacgcccagaagctggtgacccagcccaccctgctgagcgccaccgccggcagacccagcggcagcacccccctgggccccctggccagagtgccccccaccgccgccgtggcccaggtgttcgagagaggcaacatgaacagcgagcccgaggaggaggacggcggcctggaggacgaggacggcgacgacgaggtggccgaggtggccgagaaggagacccaggccgccagcaagtacttccacgtgcagaaggtggccagacaggaccccagagtggcccccatgagcaacctgctgcccgcccccggcctgcccccccacggccagcaggccaaggaggaccacaccaaggacgccagcaaggccagccccagcgtgagcaccgccggccagcccaactggaacctggacgagcagctgaagcagaacggcggcctggcctggagcgacgacgccgacggcggcagaggcagagagatcagcagagacttcgccaagctgtacgagctggacggcgaccccgagagaaaggagttcctggacgacctgttcgtgttcatgcagaagagaggcacccccatcaacagaatccccatcatggccaagcagatcctggacctgtacatgctgtacaagctggtgaccgagaagggcggcctggtggagatcatcaacaagaagatctggagagagatcaccaagggcctgaacctgcccaccagcatcaccagcgccgccttcaccctgagaacccagtacatgaagtacctgtacgcctacgagtgcgagaagaaggccctgagcagccccgccgagctgcaggccgccatcgacggcaacagaagagagggcagaagacccagctacagcagcagcctgttcggctacagccccgccgccgccaccgccgccgccgccgccggcgcccccgccctgctgagcccccccaagatcagattccccatcctgggcctgggcagcagcagcggcaccaacaccagcagccccagaatcagccccgccaccaccctgagaaagggcgacggcgcccccgtgaccaccgtgcccgtgcccaacagactggccgtgcccgtgaccctggccagccagcaggccggcaccagaaccgccgccctggagcagctgagagagagactggagagcggcgagcccgccgagaagaaggccagcggcacctggtgccagtag

SEQ ID NO: 165380 - DNA, 1413 bp, Artificial Sequence
  derived and/or modified sequence
atggagcccctgcagcagcagcagcagcagcagcagcagcagcagaagcagccccacctggcccccctgcagatggacgccagagagaagcagggccagcagatgagagaggcccagttcctgtacgcccagaagctggtgacccagcccaccctgctgagcgccaccgccggcagacccagcggcagcacccccctgggccccctggccagagtgccccccaccgccgccgtggcccaggtgttcgagagaggcaacatgaacagcgagcccgaggaggaggacggcggcctggaggacgaggacggcgacgacgaggtggccgaggtggccgagaaggagacccaggccgccagcaagtacttccacgtgcagaaggtggccagacaggaccccagagtggcccccatgagcaacctgctgcccgcccccggcctgcccccccacggccagcaggccaaggaggaccacaccaaggacgccagcaaggccagccccagcgtgagcaccgccggccagcccaactggaacctggacgagcagctgaagcagaacggcggcctggcctggagcgacgacgccgacggcggcagaggcagagagatcagcagagacttcgccaagctgtacgagctggacggcgaccccgagagaaaggagttcctggacgacctgttcgtgttcatgcagaagagaggcacccccatcaacagaatccccatcatggccaagcagatcctggacctgtacatgctgtacaagctggtgaccgagaagggcggcctggtggagatcatcaacaagaagatctggagagagatcaccaagggcctgaacctgcccaccagcatcaccagcgccgccttcaccctgagaacccagtacatgaagtacctgtacgcctacgagtgcgagaagaaggccctgagcagccccgccgagctgcaggccgccatcgacggcaacagaagagagggcagaagacccagctacagcagcagcctgttcggctacagccccgccgccgccaccgccgccgccgccgccggcgcccccgccctgctgagcccccccaagatcagattccccatcctgggcctgggcagcagcagcggcaccaacaccagcagccccagaatcagccccgccaccaccctgagaaagggcgacggcgcccccgtgaccaccgtgcccgtgcccaacagactggccgtgcccgtgaccctggccagccagcaggccggcaccagaaccgccgccctggagcagctgagagagagactggagagcggcgagcccgccgagaagaaggccagcagactgagcgaggaggagcagagactggtgcagcaggccttccagagaaacttcttcagcatggccagacagctgagcatcctgtacgtgttctag

SEQ ID NO: 165381 - protein, 642 aa, Artificial Sequence
  derived and/or modified sequence
MIPNGYLMFEDENFIESSVAKLNALRKSGQFCDVRLQVCGHEMLAHRAVLACCSPYLFEIFNSDSDPHGISHVKFDDLNPEAVEVLLNYAYTAQLKADKELVKDVYSAAKKLKMDRVKQVCGDYLLSRMDVTSCISYRNFASCMGDSRLLNKVDAYIQEHLLQISEEEEFLKLPRLKLEVMLEDNVCLPSNGKLYTKVINWVQRSIWENGDSLEELMEEVQTLYYSADHKLLDGNLLDGQAEVFGSDDDHIQFVQKKPPRENGHKQISSSSTGCLSSPNATVQSPKHEWKIVASEKTSNNTYLCLAVLDGIFCVIFLHGRNSPQSSPTSTPKLSKSLSFEMQQDELIEKPMSPMQYARSGLGTAEMNGKLIAAGGYNREECLRTVECYNPHTDHWSFLAPMRTPRARFQMAVLMGQLYVVGGSNGHSDDLSCGEMYDSNIDDWIPVPELRTNRCNAGVCALNGKLYIVGGSDPYGQKGLKNCDVFDPVTKLWTSCAPLNIRRHQSAVCELGGYLYIIGGAESWNCLNTVERYNPENNTWTLIAPMNVARRGAGVAVLNGKLFVCGGFDGSHAISCVEMYDPTRNEWKMMGNMTSPRSNAGIATVGNTIYAVGGFDGNEFLNTVEVYNLESNEWSPYTKIFQF

SEQ ID NO: 165382 - protein, 424 aa, Artificial Sequence
  derived and/or modified sequence
MVQTLYYSADHKLLDGNLLDGQAEVFGSDDDHIQFVQKKPPRENGHKQISSSSTGCLSSPNATVQSPKHEWKIVASEKTSNNTYLCLAVLDGIFCVIFLHGRNSPQSSPTSTPKLSKSLSFEMQQDELIEKPMSPMQYARSGLGTAEMNGKLIAAGGYNREECLRTVECYNPHTDHWSFLAPMRTPRARFQMAVLMGQLYVVGGSNGHSDDLSCGEMYDSNIDDWIPVPELRTNRCNAGVCALNGKLYIVGGSDPYGQKGLKNCDVFDPVTKLWTSCAPLNIRRHQSAVCELGGYLYIIGGAESWNCLNTVERYNPENNTWTLIAPMNVARRGAGVAVLNGKLFVCGGFDGSHAISCVEMYDPTRNEWKMMGNMTSPRSNAGIATVGNTIYAVGGFDGNEFLNTVEVYNLESNEWSPYTKIFQF

SEQ ID NO: 165383 - DNA, 408 bp, Artificial Sequence
  derived and/or modified sequence
atgatccccaacggctacctgatgttcgaggacgagaacttcatcgagagcagcgtggccaagctgaacgccctgagaaagagcggccagttctgcgacgtgagactgcaggtgtgcggccacgagatgctggcccacagagccgtgctggcctgctgcagcccctacctgttcgagatcttcaacagcgacagcgacccccacggcatcagccacgtgaagttcgacgacctgaaccccgaggccgtggaggtgctgctgaactacgcctacaccgcccagctgaaggccgacaaggagctggtgaaggacgtgtacagcgccgccaagaagctgaagatggacagagtgaagcagcacctgctgtacttctgcctgcacagcaccagcaccagcagcctgctgtag

SEQ ID NO: 165384 - DNA, 1929 bp, Artificial Sequence
  derived and/or modified sequence
atgatccccaacggctacctgatgttcgaggacgagaacttcatcgagagcagcgtggccaagctgaacgccctgagaaagagcggccagttctgcgacgtgagactgcaggtgtgcggccacgagatgctggcccacagagccgtgctggcctgctgcagcccctacctgttcgagatcttcaacagcgacagcgacccccacggcatcagccacgtgaagttcgacgacctgaaccccgaggccgtggaggtgctgctgaactacgcctacaccgcccagctgaaggccgacaaggagctggtgaaggacgtgtacagcgccgccaagaagctgaagatggacagagtgaagcaggtgtgcggcgactacctgctgagcagaatggacgtgaccagctgcatcagctacagaaacttcgccagctgcatgggcgacagcagactgctgaacaaggtggacgcctacatccaggagcacctgctgcagatcagcgaggaggaggagttcctgaagctgcccagactgaagctggaggtgatgctggaggacaacgtgtgcctgcccagcaacggcaagctgtacaccaaggtgatcaactgggtgcagagaagcatctgggagaacggcgacagcctggaggagctgatggaggaggtgcagaccctgtactacagcgccgaccacaagctgctggacggcaacctgctggacggccaggccgaggtgttcggcagcgacgacgaccacatccagttcgtgcagaagaagccccccagagagaacggccacaagcagatcagcagcagcagcaccggctgcctgagcagccccaacgccaccgtgcagagccccaagcacgagtggaagatcgtggccagcgagaagaccagcaacaacacctacctgtgcctggccgtgctggacggcatcttctgcgtgatcttcctgcacggcagaaacagcccccagagcagccccaccagcacccccaagctgagcaagagcctgagcttcgagatgcagcaggacgagctgatcgagaagcccatgagccccatgcagtacgccagaagcggcctgggcaccgccgagatgaacggcaagctgatcgccgccggcggctacaacagagaggagtgcctgagaaccgtggagtgctacaacccccacaccgaccactggagcttcctggcccccatgagaacccccagagccagattccagatggccgtgctgatgggccagctgtacgtggtgggcggcagcaacggccacagcgacgacctgagctgcggcgagatgtacgacagcaacatcgacgactggatccccgtgcccgagctgagaaccaacagatgcaacgccggcgtgtgcgccctgaacggcaagctgtacatcgtgggcggcagcgacccctacggccagaagggcctgaagaactgcgacgtgttcgaccccgtgaccaagctgtggaccagctgcgcccccctgaacatcagaagacaccagagcgccgtgtgcgagctgggcggctacctgtacatcatcggcggcgccgagagctggaactgcctgaacaccgtggagagatacaaccccgagaacaacacctggaccctgatcgcccccatgaacgtggccagaagaggcgccggcgtggccgtgctgaacggcaagctgttcgtgtgcggcggcttcgacggcagccacgccatcagctgcgtggagatgtacgaccccaccagaaacgagtggaagatgatgggcaacatgaccagccccagaagcaacgccggcatcgccaccgtgggcaacaccatctacgccgtgggcggcttcgacggcaacgagttcctgaacaccgtggaggtgtacaacctggagagcaacgagtggagcccctacaccaagatcttccagttctag

SEQ ID NO: 165385 - DNA, 408 bp, Artificial Sequence
  derived and/or modified sequence
atgatccccaacggttacttaatgtttgaggacgagaactttattgagtctagcgtggccaaactgaatgcccttcgtaagtctggccagttctgcgatgtgcgcctccaggtttgcgggcacgagatgctggcacacagagctgtcctcgcttgttgctcaccttatcttttcgagatctttaatagcgacagcgatccccacggtatctcccacgtcaagttcgacgatctgaacccggaggctgtggaagtcctcctgaattatgcctataccgcccagctaaaggctgacaaggaattggttaaggatgtttatagtgcagccaaaaagctcaaaatggatcgggttaagcagcatctcttgtacttttgtctccattcaacgtcaacctcctcactgctgtag

SEQ ID NO: 165386 - DNA, 1929 bp, Artificial Sequence
  derived and/or modified sequence
atgatcccaaatgggtaccttatgttcgaagacgagaactttatcgagtccagcgtggcaaaactgaacgcattacggaagtctggtcagttctgtgatgtgcgtctgcaagtttgtggccatgaaatgcttgctcatcgcgccgtcctcgcctgttgcagtccatacctgtttgagatattcaatagtgatagcgatccacatggcatcagccatgtgaagttcgacgatctgaaccctgaggccgtggaagtgctgctgaactacgcctacaccgcacagcttaaggctgacaaggagctggtcaaagatgtgtatagtgcggccaagaagctcaagatggaccgcgtcaagcaggtgtgcggagattatctgttgagccgcatggatgtaacgtcttgcatcagctacaggaatttcgcttcttgcatgggcgactctaggctactgaataaagtggatgcctacattcaggaacacctcctgcaaatatcggaggaagaggagttcctaaagctgccacgactgaaactggaggtgatgctcgaggacaatgtctgtttgccatcaaatgggaagctgtatactaaggtcataaactgggttcagagaagcatttgggaaaatggtgactcattggaggagctcatggaggaggtacaaaccctgtattattccgcagatcacaaactgttagacggcaacctccttgatggtcaggctgaggtcttcggctctgatgacgatcacatccagttcgtgcagaagaagcctccacgggagaacggtcacaaacaaatctccagcagttcaaccggatgcctctccagcccgaacgccaccgtgcagagtcccaagcatgaatggaagatagttgcttcggagaagacaagcaataatacgtatctctgcctggcagtgttggacgggatcttctgcgttatttttttgcacgggagaaactctcctcaatcatctcccacaagcacgcctaagctctccaagagcctgagtttcgaaatgcagcaggacgagctgatcgagaaacctatgagccccatgcagtacgctcggtccggactgggcacagctgaaatgaatgggaagctcatcgccgccggcggatataaccgggaggagtgcttgagaactgttgagtgctacaaccctcataccgatcattggtcgtttctcgccccaatgcggacaccccgggcccggtttcagatggccgtgctaatgggtcaactgtacgtagttggtggctcaaacggtcattctgatgacttgagctgtggcgagatgtacgattcaaatattgacgattggattcccgtgcctgagctgcgcaccaataggtgcaacgccggggtttgtgccttgaatggcaaactgtacatcgttggaggcagcgatccatacggccagaagggtctcaagaactgtgacgtctttgatccggtaacaaagctgtggacatcatgtgcgccccttaatataaggagacaccagtcagccgtgtgtgaactggggggttatctttacattattggcggggccgagagctggaattgtctaaataccgtagagagatacaaccccgagaacaacacgtggaccttgattgctcccatgaatgtggctagacgcggcgcaggagttgctgtcctcaacggaaagctgttcgtatgcggcggattcgatgggtcccatgctatttcctgcgtggaaatgtacgatccaacacgtaatgagtggaaaatgatgggaaatatgacatcgcctaggtctaacgccggaatcgcgaccgtcggaaacacaatttatgctgtgggaggttttgacggtaatgagtttctgaacacagtggaggtttataatctcgaatcaaatgagtggtcaccttacacaaagatttttcaattttag

SEQ ID NO: 165387 - DNA, 746 bp, Artificial Sequence
  derived and/or modified sequence
ttcccagaaatacatttgccaccaacagagtagccaaatttataaggaaaaatgattcccaatggatatttgatgtttgaggatgaaaattttattgagtcttctgttgccaaattaaatgccctgaggaaaagtggccagttctgtgatgttcgacttcaggtctgtggccatgaaatgttagcacacagagcagtgctagcttgctgcagtccctatttatttgaaatctttaatagtgatagtgatcctcatggaatttctcacgttaaatttgatgatctcaatccagaagctgttgaagtcttgttgaattatgcctacactgctcagttgaaagcagataaggaattggtaaaagatgtttattctgcagcaaaaaagctgaagatggatcgagtaaagcagcatcttctctacttctgtctgcattcaacatcaacatcatctctcctgtagagcccagttcagatactgcgtttcatgaagccttaccaaattattctacttgaaaatacttatgtgaacttacatagcatttcaatttgttgtacctctccttaaactaaaacttacatatctgtatggcataattagatgtttatcatttgtatacgtgttattaccactattaacatttgttgtattaagacagtgatttttgattctttgtatcttcacatagtctttaccacactgaacattaaatatttgttgaataaaagatatgtaagtgttggcactca

SEQ ID NO: 165388 - DNA, 4199 bp, Artificial Sequence
  derived and/or modified sequence
gaagcgggctgggaggcgtcggcggcggcagcgcacgtggtgacgtgcgagggggtgcggcgcgagcggtcggcggcggcggaggcagtgtctcccggtcgcgcgtggaggtcggtcgctcagagctgctgggcgcagtttctccgcctgctgcttcggcgcggctgtatcggcgagcgagcgagttcccgcgagttctcggtggcgctcccccttcctttcagtctccacggactggcccctcgtccttctacttgaccgctcccgtcttccgccgccttctggcgctttccgttgggccgattcccgcccgcttcctcctgcttcccatcgaagctctagaaatgaatgtttccatctcttcagagatgaaccagattatgatgcatcattatcacagaagaaattcgtgtctatagcttttaaggacttgattacatcattttcaagcctgatagttttggaatcaccattagagcttaagacacacctgccttcatttcaaccacctgtcttcataccctgacgaagtgcaccttttaacactcctttgtccttggattacttaagagttcccagaaatacatttgccaccaacagagtagccaaatttataaggaaaaatgattcccaatggatatttgatgtttgaggatgaaaattttattgagtcttctgttgccaaattaaatgccctgaggaaaagtggccagttctgtgatgttcgacttcaggtctgtggccatgaaatgttagcacacagagcagtgctagcttgctgcagtccctatttatttgaaatctttaatagtgatagtgatcctcatggaatttctcacgttaaatttgatgatctcaatccagaagctgttgaagtcttgttgaattatgcctacactgctcagttgaaagcagataaggaattggtaaaagatgtttattctgcagcaaaaaagctgaagatggatcgagtaaagcaggtttgtggtgattatttactgtctagaatggatgttaccagctgcatctcttaccgaaattttgcaagttgtatgggagactcccgtttgttgaataaggttgatgcttatattcaggagcatttgttacaaatttctgaagaggaggagtttcttaagcttccaaggctaaagttggaggtaatgcttgaagataatgtttgcttgcccagcaatggcaaattatatacaaaggtaatcaactgggtgcagcgtagcatctgggagaatggagacagtctggaagagctgatggaagaggttcaaaccttgtactactcagctgatcacaagctgcttgatgggaacctactagatggacaggctgaggtgtttggcagtgatgatgaccacattcagtttgtgcagaaaaagccaccacgtgagaatggccataagcagataagtagcagttcaactggatgtctctcttctccaaatgctacagtacaaagccctaagcatgagtggaaaatcgttgcttcagaaaagacttcaaataacacttacttgtgcctggctgtgctggatggtatattctgtgtcatttttcttcatgggagaaacagcccacagagctcaccaacaagtactccaaaactaagtaagagtttaagctttgagatgcaacaagatgagctaatcgaaaagcccatgtctcctatgcagtacgcacgatctggtctgggaacagcagagatgaatggcaaactcatagctgcaggtggctataacagagaggaatgtcttcgaacagtcgaatgctataatccacatacagatcactggtcctttcttgctcccatgagaacaccaagagcccgatttcaaatggctgtactcatgggccagctctatgtggtaggtggatcaaatggccactcagatgacctgagttgtggagagatgtatgattcaaacatagatgactggattcctgttccagaattgagaactaaccgttgtaatgcaggagtgtgtgctctgaatggaaagttatacatcgttggtggctctgatccatatggtcaaaaaggactgaaaaattgtgatgtatttgatcctgtaacaaagttgtggacaagctgtgcccctcttaacattcggagacaccagtctgcagtctgtgagcttggtggttatttgtacataatcggaggtgcagaatcttggaattgtctgaacacagtagaacgatacaatcctgaaaataatacctggactttaattgcacccatgaatgtggctaggcgaggagctggagtggctgttcttaatggaaaactgtttgtatgtggtggctttgatggttctcatgccatcagttgtgtggaaatgtatgatccaactagaaatgaatggaagatgatgggaaatatgacttcaccaaggagcaatgctgggattgcaactgtagggaacaccatttatgcagtgggaggattcgatggcaatgaatttctgaatacggtggaagtctataaccttgagtcaaatgaatggagcccctatacaaagattttccagttttaacaaatttaagaccctctcaaactaacaggcttagtgatgtaattatggttagtagaggtacacttgtgaataaagagggtgggtgggtatagatgttgctaacagcaacacaaagcttttgcatattgcatactattaaacatgctgtacatactttttgggtttatttggaaaggaatgcaaagatgaaggtctgttttgtgtacttttaagactttggttattttactttttggaaaagaataaaccaagaattgattgggcacatcatttcaagaagtcccctctcctccacatttgttttgccaatttgcacattaaatgactcttccctcaaatgtgtactatggggtaaaaggggtagggtttaaagatgtagacagttgggttttttaagggccctttttcaataactggaacactctataacaaaggatacttatttaaatagatgacattgactatttttgtttttattaaaaggaagcttacatgcctaccaatatttaatcttttatgattgcctttttataactttttatattctcagcagagtgctttaccaattgaagtaaaatgtggcaggctggagttattgaagcagagtggcagtcttcagtttgcagagtaggggtctgtcttttaaactctgagtgcaaacttcagagttcttgccttggctgcagtttttttccttcaagaatgcagtactaacatttatttgagtggagttactgaacagtaacatagctgtgatttttggtatttgaaacactggttttaaatattttgacttgttgagggtatgttttatatagcaagacattatatagcagtaaaaaatggtgttttatcttctatataattcctgtttttattattaacaaaacagtcctaaatagcagccctcaattgtgaaaaaatttactttaaactacattaggttgtgaatgcaggttttatcagaactatgtttttgttcagtttatctgttcatatggataaatattggttgggatgacttggtgtctaatgtgtagtgctacacacctaacttatggggccaaaatagcatgtcctaatgcttgctgctgatttaaacacattaaaggtactttgcaggaaatccttgcaccatgggattaatatccaattgctgcttgtacactcattcattactaaaagttttgagaaatttttttttccagtaatgagcttaagaaatttgtggaaaataactcacctggcatcttacatctgaaataaggaatgatataaggtttttttttctcacagaagatgaagcacacaggaacctaatgggccaactgggatgaggtgactattctgagatgactattcagtggctaacttgggttaggaagaaaataattaggtattttctccaaatgttcactggtactctgccactttatttctctcatctgttacacaaagaaccaccaggaaagcaaatcagtttggttggtaactctgtaattcctaactatcactggtttggttctggactaaaactacattgacagattgaatttgcctaatatgatgactgtttttaatatggatctgtatgtgttctattcagcacaaggaaataaaattttagttgaggattcagcactaaaa

SEQ ID NO: 165389 - DNA, 408 bp, Artificial Sequence
  derived and/or modified sequence
atgatccccaacggctacctgatgtttgaagatgagaacttcatcgagagctctgtggccaagctgaatgccctgaggaagagcggccagttctgtgatgtgcggctgcaggtgtgtggccacgagatgctggcccacagagctgtgctggcctgctgcagcccctacctgtttgagatcttcaacagcgacagcgacccccacggcatcagccacgtgaagtttgatgacctgaaccctgaggccgtggaggtgctgctgaactatgcctacacagcccagctgaaggctgacaaggagctggtgaaggatgtgtacagcgctgccaagaagctgaagatggacagagtgaagcagcacctgctgtacttctgcctgcacagcaccagcaccagcagcctgctgtag

SEQ ID NO: 165390 - DNA, 1929 bp, Artificial Sequence
  derived and/or modified sequence
atgatccccaacggctacctgatgtttgaagatgagaacttcatcgagagctctgtggccaagctgaatgccctgaggaagagcggccagttctgtgatgtgcggctgcaggtgtgtggccacgagatgctggcccacagagctgtgctggcctgctgcagcccctacctgtttgagatcttcaacagcgacagcgacccccacggcatcagccacgtgaagtttgatgacctgaaccctgaggccgtggaggtgctgctgaactatgcctacacagcccagctgaaggctgacaaggagctggtgaaggatgtgtacagcgctgccaagaagctgaagatggacagagtgaagcaggtgtgtggggactacctgctgagcaggatggatgtgaccagctgcatctcctacagaaactttgccagctgcatgggagacagccggctgctgaacaaggtggatgcctacatccaggagcacctgctgcagatcagcgaggaggaggagttcctgaagctgccccggctgaagctggaggtgatgctggaggacaacgtgtgcctgcccagcaatggcaagctgtacaccaaggtgatcaactgggtgcagaggagcatctgggagaatggagacagcctggaggagctgatggaggaggtgcagaccctgtactacagcgctgaccacaagctgctggatggcaacctgctggatggccaggccgaggtgtttggaagtgatgatgaccacatccagtttgtgcagaagaagcccccaagagaaaatggccacaagcagatcagcagcagcagcacaggctgcctgagcagccccaatgccaccgtgcagagccccaagcatgagtggaagatcgtggccagcgagaagaccagcaacaacacctacctgtgcctggccgtgctggatggcatcttctgtgtgatcttcctgcacggcaggaacagcccccagagcagccccaccagcacccccaagctgagcaagagcctgagctttgagatgcagcaggatgagctgattgagaagcccatgagccccatgcagtatgcccggagcggcctgggcacagctgagatgaatggcaagctgattgctgctgggggctacaaccgggaggagtgcctgaggacagtggagtgctacaacccccacacagaccactggagcttcctggcccccatgaggaccccccgggcccgcttccagatggctgtgctgatgggccagctgtatgtggtgggcggcagcaatggccacagtgatgacctgagctgtggggagatgtatgacagcaacattgatgactggatccctgtgcctgagctgcggaccaaccgctgcaatgctggggtgtgtgccctgaatggcaagctgtacatcgtgggcggcagtgacccctacggccagaagggcctgaagaactgtgatgtgtttgatcctgtgaccaagctgtggaccagctgtgcccccctgaacatcagaagacaccagagcgctgtgtgtgagctgggcggctacctgtacatcattggaggagctgagagctggaactgcctgaacacagtggagcgctacaaccctgagaacaacacctggaccctcatcgcccccatgaatgtggccaggagaggagctggggtggccgtgctgaatggcaagctgtttgtgtgtggcggctttgatggcagccacgccatcagctgtgtggagatgtatgaccccaccagaaatgagtggaagatgatgggcaacatgaccagccccaggagcaatgccggcatcgccaccgtgggcaacaccatctatgctgtgggcggctttgatggaaatgagttcctgaacacagtggaggtgtacaacctggagagcaatgagtggagcccctacaccaagatcttccagttctag

SEQ ID NO: 165391 - DNA, 2570 bp, Artificial Sequence
  derived and/or modified sequence
tatcacagaagaaattcgtgtctatagcttttaaggacttgattacatcattttcaagcctgatagttttggaatcaccattagagcttaagacacacctgccttcatttcaaccacctgtcttcataccctgacgaagtgcaccttttaacactcctttgtccttggattacttaagagttcccagaaatacatttgccaccaacagagtagccaaatttataaggaaaaatgattcccaatggatatttgatgtttgaggatgaaaattttattgagtcttctgttgccaaattaaatgccctgaggaaaagtggccagttctgtgatgttcgacttcaggtctgtggccatgaaatgttagcacacagagcagtgctagcttgctgcagtccctatttatttgaaatctttaatagtgatagtgatcctcatggaatttctcacgttaaatttgatgatctcaatccagaagctgttgaagtcttgttgaattatgcctacactgctcagttgaaagcagataaggaattggtaaaagatgtttattctgcagcaaaaaagctgaagatggatcgagtaaagcaggtttgtggtgattatttactgtctagaatggatgttaccagctgcatctcttaccgaaattttgcaagttgtatgggagactcccgtttgttgaataaggttgatgcttatattcaggagcatttgttacaaatttctgaagaggaggagtttcttaagcttccaaggctaaagttggaggtaatgcttgaagataatgtttgcttgcccagcaatggcaaattatatacaaaggtaatcaactgggtgcagcgtagcatctgggagaatggagacagtctggaagagctgatggaagaggtttattaacaaaactaggatacccaagactgaagaaacaagaagaaacctcaagtgtattgacacgtaaagaagcagcagtcctgccccagttctcctaagaaaaatccgctgtgggcagagaacgatgatgatttaatggttcaaaccttgtactactcagctgatcacaagctgcttgatgggaacctactagatggacaggctgaggtgtttggcagtgatgatgaccacattcagtttgtgcagaaaaagccaccacgtgagaatggccataagcagataagtagcagttcaactggatgtctctcttctccaaatgctacagtacaaagccctaagcatgagtggaaaatcgttgcttcagaaaagacttcaaataacacttacttgtgcctggctgtgctggatggtatattctgtgtcatttttcttcatgggagaaacagcccacagagctcaccaacaagtactccaaaactaagtaagagtttaagctttgagatgcaacaagatgagctaatcgaaaagcccatgtctcctatgcagtacgcacgatctggtctgggaacagcagagatgaatggcaaactcatagctgcaggtggctataacagagaggaatgtcttcgaacagtcgaatgctataatccacatacagatcactggtcctttcttgctcccatgagaacaccaagagcccgatttcaaatggctgtactcatgggccagctctatgtggtaggtggatcaaatggccactcagatgacctgagttgtggagagatgtatgattcaaacatagatgactggattcctgttccagaattgagaactaaccgttgtaatgcaggagtgtgtgctctgaatggaaagttatacatcgttggtggctctgatccatatggtcaaaaaggactgaaaaattgtgatgtatttgatcctgtaacaaagttgtggacaagctgtgcccctcttaacattcggagacaccagtctgcagtctgtgagcttggtggttatttgtacataatcggaggtgcagaatcttggaattgtctgaacacagtagaacgatacaatcctgaaaataatacctggactttaattgcacccatgaatgtggctaggcgaggagctggagtggctgttcttaatggaaaactgtttgtatgtggtggctttgatggttctcatgccatcagttgtgtggaaatgtatgatccaactagaaatgaatggaagatgatgggaaatatgacttcaccaaggagcaatgctgggattgcaactgtagggaacaccatttatgcagtgggaggattcgatggcaatgaatttctgaatacggtggaagtctataaccttgagtcaaatgaatggagcccctatacaaagattttccagttttaacaaatttaagaccctctcaaactaacaggcttagtgatgtaattatggttagtagaggtacacttgtgaataaagagggtgggtgggtatagatgttgctaacagcaacacaaagcttttgcatattgcatactattaaacatgctgtacatactttttgggtttatttggaaaggaatgcaaagatgaaggtctgttttgtgtacttttaagactttggttattttactttttggaaaagaataaaccaagaattgattgggcacatc

SEQ ID NO: 165392 - DNA, 408 bp, Artificial Sequence
  derived and/or modified sequence
atgatccccaacggctacctgatgttcgaggacgagaacttcatcgaatcgagtgtagctaagctaaacgctcttcgaaagtccggtcaattctgcgatgtccggctccaggtgtgtggccacgagatgctggcccatcgagctgttctagcttgttgctcgccctacctgtttgaaatctttaatagtgatagcgaccctcacggcattagccatgtgaaattcgatgacctcaatcctgaagccgtggaggtcctgcttaactatgcctatacagcacagctaaaagccgacaaggaactggttaaagacgtctactcggctgcaaaaaagctgaagatggatcgggtgaagcagcaccttctctacttctgtctccactccacaagcacttcctcccttttatag

SEQ ID NO: 165393 - DNA, 1929 bp, Artificial Sequence
  derived and/or modified sequence
atgatccccaacggctacctgatgttcgaggacgagaacttcatcgagagctctgtggctaagctgaacgcgcttagaaaatccggccaattttgtgatgtgcgtcttcaggtctgtgggcacgaaatgctggcgcatcgggctgtgctggcatgctgttccccttacctctttgaaatctttaactccgactcagacccccatggaatttcccacgtaaaattcgacgatctgaaccccgaagccgtggaggtgctgcttaactatgcctataccgcccagttgaaagcggataaggaattagtcaaagatgtgtactctgctgcaaaaaaactgaagatggaccgcgttaagcaagtgtgcggcgactacctgctatctcggatggatgtgaccagttgcatcagttaccgcaatttcgcttcatgtatgggcgacagcaggttgctgaacaaggtcgatgcttatatacaggagcatcttctgcagattagcgaagaggaggaatttctcaaactgccccgtctgaagttggaagtgatgttggaagacaacgtatgtctgccctctaatgggaaactatacacgaaagtgatcaattgggtgcagcgcagcatctgggagaatggcgactcattggaggaactaatggaagaagtgcagacactgtattattctgccgaccataagctgttggacggaaacttgctggatggccaagccgaagtatttgggagcgatgatgatcacattcagttcgtccagaagaagccccctagggagaacggtcacaagcagatttcgagttcatctacaggatgtctgtcatcaccaaatgcaacagtgcaaagtccgaagcatgaatggaaaatagtggcatcagagaagacttcaaacaacacgtacctgtgcctcgctgtattagacggaatcttttgcgtaatttttctgcacggtcgcaacagcccacagagttcacccactagcacgcctaaattgtctaaatctttaagttttgaaatgcaacaggacgagctgattgagaaaccaatgtcaccaatgcaatacgcgagatccggccttggcacagcagagatgaatggcaagctcatagcagccggaggctacaacagggaagagtgcttacggactgtagaatgctataacccccataccgaccactggtcctttctggctcccatgaggaccccacgcgcacggttccagatggctgttttaatgggccagctgtacgtggtgggcggtagcaatggacattctgacgacctatcctgcggagagatgtatgactctaacatcgacgattggatccccgtgccagaactgcgcaccaatcggtgcaatgccggcgtgtgtgcccttaatgggaagctctacattgtggggggttctgacccctacggtcagaaaggactgaaaaactgcgacgtgtttgatcctgtcaccaagctctggacttcttgcgccccattgaatatcaggcgccatcagtccgccgtgtgtgaattgggaggatatctatacatcatcggcggtgccgagagctggaactgcctgaacaccgtggagcggtacaacccggagaataacacctggacgctgatagcacctatgaatgttgcccgccgtggggcgggcgtggcagttctcaacgggaagctgttcgtatgcgggggcttcgatggttctcacgcaattagctgcgtagagatgtacgaccccactcggaacgaatggaagatgatgggcaatatgacttcacccaggtccaatgctggaatcgctaccgtggggaatacaatatatgcagtcggagggtttgacggcaatgagttcctgaacacagttgaggtctacaacctcgagtccaatgagtggagcccgtatactaagatatttcaattctag

SEQ ID NO: 165394 - DNA, 408 bp, Artificial Sequence
  derived and/or modified sequence
atgattcctaacggatatttgatgtttgaggacgagaattttatcgaatctagtgtggctaaactgaatgccctgaggaagtctggccagttctgtgacgtacggctgcaagtctgcggtcacgaaatgctcgcccacagagcggttctggcttgctgctccccttacctctttgagatctttaattctgacagcgatcctcacggcatcagtcatgtgaagttcgacgacttgaaccctgaggctgtggaagtcctgctgaattatgcatacacagcccaactgaaagcagataaggagctagtcaaggacgtctactcagcagcaaagaagctgaagatggatcgagtgaaacagcacctactgtatttctgcctgcactccactagcacaagttctctgctctag

SEQ ID NO: 165395 - DNA, 1929 bp, Artificial Sequence
  derived and/or modified sequence
atgataccaaacggctatctcatgttcgaagatgagaactttatcgagagctcagttgccaagcttaatgcactgaggaaaagcggacagttttgtgatgtgagactgcaagtctgtggccacgagatgctcgcgcacagggccgtgctcgcctgctgtagcccttacctattcgagattttcaattcagactcagatcctcacggaatatcccacgtgaagtttgacgaccttaaccccgaggctgttgaggtgctcctgaactatgcctacacggcacagttgaaagctgataaagaactggttaaggatgtctacagcgcagccaagaagctcaagatggacagagtgaagcaggtgtgcggagactatctcctgagtagaatggacgtgaccagttgtatctcgtatagaaactttgcctcctgcatgggcgacagcaggctactgaacaaggtcgacgcatatatccaggagcacctgttgcagatctcagaggaagaggaattcctgaaactgcccaggctcaaattagaagtcatgctggaggataacgtgtgcctgccatctaacggtaaactctatacaaaagtgattaattgggtgcagaggagtatatgggagaatggggatagtctggaggagctgatggaggaggttcagactttgtactattccgccgatcataaacttctggatgggaacttactggatggtcaggcagaagtgttcggaagcgatgatgatcacatccagttcgtgcagaagaagccacctagagaaaacggccacaagcagatctcctcttcttccacaggctgtctgtcatccccaaatgccacggttcagagtccaaagcacgagtggaagatcgtcgcatccgagaagaccagcaacaacacatatttatgcctggctgtcctagatggcatattttgcgtcatttttttgcatgggcgtaacagcccgcagagctcacccacctccactccaaagctgagtaagtcattgtcctttgaaatgcaacaagacgaactgattgaaaagccaatgagccctatgcagtacgcccgaagcggcctgggaacagctgagatgaatggcaagctaatagctgccggaggctacaatcgcgaagagtgcttgaggaccgtcgaatgctataatccacacactgatcattggtcttttctggcacctatgcgaacacctagggcgaggttccagatggcagtgctgatgggacaactgtatgttgtagggggatccaatggtcacagcgatgaccttagctgtggagagatgtacgatagtaacatcgacgattggatccctgtcccggagctgcggaccaacagatgtaatgctggcgtctgcgctctgaatggcaagctgtacattgtgggtggaagtgatccctacggtcagaaggggctcaagaattgcgacgtgttcgatcctgtgacgaagttgtggactagttgcgctcctctaaatatccgacgccatcagagtgcggtgtgcgaactcgggggttatttatacatcattggtggtgcggaaagttggaactgcctaaatacagttgagagatacaatcccgagaacaacacgtggaccctgatcgcccctatgaacgtggctcgccgaggggctggcgtcgctgttcttaacgggaagctcttcgtgtgtggaggctttgatggctcacacgcaatcagttgcgtcgaaatgtacgatcccactcggaacgaatggaaaatgatggggaatatgacaagcccaaggtccaacgcagggattgctaccgtagggaataccatttacgcggtggggggttttgatgggaacgagttcctcaacacagtggaggtatataacctcgagagtaatgaatggtccccgtacactaagatttttcagttctag

SEQ ID NO: 165396 - protein, 564 aa, Artificial Sequence
  derived and/or modified sequence
MAELDLMAPGPLPRATAQPPAPLSPDSGSPSPDSGSASPVEEEDVGSSEKLGRETEEQDSDSAEQGDPAGEGKEVLCDFCLDDTRRVKAVKSCLTCMVNYCEEHLQPHQVNIKLQSHLLTEPVKDHNWRYCPAHHSPLSAFCCPDQQCICQDCCQEHSGHTIVSLDAARRDKEAELQCTQLDLERKLKLNENAISRLQANQKSVLVSVSEVKAVAEMQFGELLAAVRKAQANVMLFLEEKEQAALSQANGIKAHLEYRSAEMEKSKQELERMAAISNTVQFLEEYCKFKNTEDITFPSVYVGLKDKLSGIRKVITESTVHLIQLLENYKKKLQEFSKEEEYDIRTQVSAVVQRKYWTSKPEPSTREQFLQYAYDITFDPDTAHKYLRLQEENRKVTNTTPWEHPYPDLPSRFLHWRQVLSQQSLYLHRYYFEVEIFGAGTYVGLTCKGIDRKGEERNSCISGNNFSWSLQWNGKEFTAWYSDMETPLKAGPFRRLGVYIDFPGGILSFYGVEYDTMTLVHKFACKFSEPVYAAFWLSKKENAIRIVDLGEEPEKPAPSLVGTAP

SEQ ID NO: 165397 - DNA, 2920 bp, Artificial Sequence
  derived and/or modified sequence
gatttatggaaagcacctggtgcgtgttctgccctctgaggaccctgccctttcccaaaaggggtatcttaagaaggaaaatatggctgctctttgccggacagcagagtcccagtaggatttccattttccaaacctggtatcatctcctagttggaagaagtggtaagcccacgaacacaaatgcaggagggagaggtgccaagaagcagcggtacacagcaggcacagagacacgtggtcttcagcagagcctatggggttcagatgattcacataagaatagaagtttcagggctggacctggggaggcagcctgagcctgagccggctgtcctgagcctgagtactctagctgccttgtcgtcatcgcatctggctgccatccagcgccagcacacagtaatgagtggccgagcttcctctgggagggaggaaacagttaaaatcttgcagcagctgcaatcatctaggcgtggttctcttgtctgacttgggctgcacagatcctgggccaagggacagaagaaagacagcctaggagcagagcctcccagatggctgagttggatctaatggctccagggccactgcccagggccactgctcagcccccagcccctctcagcccagactctgggtcacccagcccagattctgggtcagccagcccagtggaagaagaggacgtgggctcctcggagaagcttggcagggagacggaggaacaggacagcgactctgcagagcagggggatcctgctggtgaggggaaagaggtcctgtgtgacttctgccttgatgacaccagaagagtgaaggcagtgaagtcctgtctaacctgcatggtgaattactgtgaagagcacttgcagccgcatcaggtgaacatcaaactgcaaagccacctgctgaccgagccagtgaaggaccacaactggcgatactgccctgcccaccacagcccactgtctgccttctgctgccctgatcagcagtgcatctgccaggactgttgccaggagcacagtggccacaccatagtctccctggatgcagcccgcagggacaaggaggctgaactccagtgcacccagttagacttggagcggaaactcaagttgaatgaaaatgccatctccaggctccaggctaaccaaaagtctgttctggtgtcggtgtcagaggtcaaagcggtggctgaaatgcagtttggggaactccttgctgctgtgaggaaggcccaggccaatgtgatgctcttcttagaggagaaggagcaagctgcgctgagccaggccaacggtatcaaggcccacctggagtacaggagtgccgagatggagaagagcaagcaggagctggagaggatggcggccatcagcaacactgtccagttcttggaggagtactgcaagtttaagaacactgaagacatcaccttccctagtgtttacgtagggctgaaggataaactctcgggcatccgcaaagttatcacggaatccactgtacacttaatccagttgctggagaactataagaaaaagctccaggagttttccaaggaagaggagtatgacatcagaactcaagtgtctgccgttgttcagcgcaaatattggacttccaaacctgagcccagcaccagggaacagttcctccaatatgcgtatgacatcacgtttgacccggacacagcacacaagtatctccggctgcaggaggagaaccgcaaggtcaccaacaccacgccctgggagcatccctacccggacctccccagcaggttcctgcactggcggcaggtgctgtcccagcagagtctgtacctgcacaggtactattttgaggtggagatcttcggggcaggcacctatgttggcctgacctgcaaaggcatcgaccggaaaggggaggagcgcaacagttgcatttccggaaacaacttctcctggagcctccaatggaacgggaaggagttcacggcctggtacagtgacatggagaccccactcaaagctggccctttccggaggctcggggtctatatcgacttcccgggagggatcctttccttctatggcgtagagtatgataccatgactctggttcacaagtttgcctgcaaattttcagaaccagtctatgctgccttctggctttccaagaaggaaaacgccatccggattgtagatctgggagaggaacccgagaagccagcaccgtccttggtggggactgctccctagactccaggagccatatcccagacctttgccagctacagtgatgggatttgcattttagggtgatttgggggcagaaataactgctgatggtagctggcttttgaaatcctatggggtctctgaatgaaaacattctccagctgctctcttttgctccatatggtgctgttctctatgtgtttgcagtaattcttttttttttttttgagacggagtctcgcactgttgcccaggctggagagcagtggcgcgatcttggctcactgcaagctccgcctcccgagttcaagcaattctcctgcctcagcctcccgagtagctgggattacaggtgcctgccaccacacccagctaatgttttgtatttttagtagagatggggtttcaccatgttggccaggcagatctcaaactcctgacctcgtgatgcacccacctcggcctcccaaagtgctgggattacatgcgtgagccactgcgccctgcctgtttgtagtaatttttaggcaccaaatctccctcatcttctagtgccattctcctctctgttcaggtaaatgtcacactgtgcccagaatggatgaccaggaaccttaaagagtggctgaaaagattgcagagttatcataataaattgctaacttgcgtaaaaaaaaaaaaaaaaaaaa

SEQ ID NO: 165398 - DNA, 1695 bp, Artificial Sequence
  derived and/or modified sequence
atggccgagctggacctgatggcccccggccccctgcccagagccaccgcccagccccccgcccccctgagccccgacagcggcagccccagccccgacagcggcagcgccagccccgtggaggaggaggacgtgggcagcagcgagaagctgggcagagagaccgaggagcaggacagcgacagcgccgagcagggcgaccccgccggcgagggcaaggaggtgctgtgcgacttctgcctggacgacaccagaagagtgaaggccgtgaagagctgcctgacctgcatggtgaactactgcgaggagcacctgcagccccaccaggtgaacatcaagctgcagagccacctgctgaccgagcccgtgaaggaccacaactggagatactgccccgcccaccacagccccctgagcgccttctgctgccccgaccagcagtgcatctgccaggactgctgccaggagcacagcggccacaccatcgtgagcctggacgccgccagaagagacaaggaggccgagctgcagtgcacccagctggacctggagagaaagctgaagctgaacgagaacgccatcagcagactgcaggccaaccagaagagcgtgctggtgagcgtgagcgaggtgaaggccgtggccgagatgcagttcggcgagctgctggccgccgtgagaaaggcccaggccaacgtgatgctgttcctggaggagaaggagcaggccgccctgagccaggccaacggcatcaaggcccacctggagtacagaagcgccgagatggagaagagcaagcaggagctggagagaatggccgccatcagcaacaccgtgcagttcctggaggagtactgcaagttcaagaacaccgaggacatcaccttccccagcgtgtacgtgggcctgaaggacaagctgagcggcatcagaaaggtgatcaccgagagcaccgtgcacctgatccagctgctggagaactacaagaagaagctgcaggagttcagcaaggaggaggagtacgacatcagaacccaggtgagcgccgtggtgcagagaaagtactggaccagcaagcccgagcccagcaccagagagcagttcctgcagtacgcctacgacatcaccttcgaccccgacaccgcccacaagtacctgagactgcaggaggagaacagaaaggtgaccaacaccaccccctgggagcacccctaccccgacctgcccagcagattcctgcactggagacaggtgctgagccagcagagcctgtacctgcacagatactacttcgaggtggagatcttcggcgccggcacctacgtgggcctgacctgcaagggcatcgacagaaagggcgaggagagaaacagctgcatcagcggcaacaacttcagctggagcctgcagtggaacggcaaggagttcaccgcctggtacagcgacatggagacccccctgaaggccggccccttcagaagactgggcgtgtacatcgacttccccggcggcatcctgagcttctacggcgtggagtacgacaccatgaccctggtgcacaagttcgcctgcaagttcagcgagcccgtgtacgccgccttctggctgagcaagaaggagaacgccatcagaatcgtggacctgggcgaggagcccgagaagcccgcccccagcctggtgggcaccgccccctag

SEQ ID NO: 165399 - DNA, 1695 bp, Artificial Sequence
  derived and/or modified sequence
atggcggaattggatttaatggcccctggtcctctgcccagggctaccgcccagccgcctgcacccctgagccctgactccggcagcccttctcctgattccgggagcgcgtcacccgtggaggaggaagacgttgggagtagcgagaaactcggaagagagactgaagaacaggattctgattctgccgaacaaggggaccccgccggagaggggaaagaggtcctgtgtgatttctgcctggacgatacccggcgcgtgaaggccgtgaagagctgtctcacttgtatggtgaactattgtgaagaacatctgcagccccaccaggttaacataaaattgcagtcacatctgttgaccgagcccgtcaaggaccataattggaggtactgcccggcgcaccactctccactttcagcattctgctgccccgaccagcaatgcatttgtcaggattgctgtcaggagcattctgggcacaccatcgtgtccctcgatgccgcccggcgagacaaagaggctgagttacaatgtacgcagctggatcttgagaggaaacttaagcttaatgagaatgccatatcaagactgcaggcaaaccagaagagtgtccttgtgtctgtaagtgaggtcaaagctgttgctgaaatgcagtttggcgaattgctcgctgccgtccgtaaggctcaggccaatgtgatgctcttcctggaggagaaggaacaggccgccttatcgcaagcaaacggcattaaagctcatctggagtatcgatcagccgaaatggagaaatctaagcaggagctcgagaggatggccgccatttccaatacagtccagtttctagaagagtattgcaaattcaaaaatacagaagacatcacgtttccctccgtgtatgtcggtttgaaagataagctttccggaattcggaaggtcataacggagagcactgtgcatctgatccaactgttagagaattacaaaaagaaacttcaggagttttccaaggaggaagaatatgacatccgaacccaagtctctgccgtggtccagcgaaaatactggacttcaaagcctgaaccatctaccagagagcagtttctgcagtatgcgtatgacataaccttcgaccccgacacagctcacaagtacctcaggctccaggaggagaatcgtaaggtgacaaacactacaccatgggaacatccctaccccgacctcccttcgaggttcttacactggaggcaggtcctgtcccaacagagcctctatctgcaccggtactacttcgaggtggagatttttggcgcagggacgtatgtgggactgacttgcaagggtatcgaccgaaagggggaagagcggaactcttgcatctcaggaaacaatttctcttggagcctgcagtggaacggtaaggaatttaccgcttggtattcggatatggaaacaccccttaaggccggcccctttaggcgattgggcgtttacatcgatttcccaggaggcattctatcgttttacggagtcgaatatgacacaatgaccttagtacacaaatttgcttgcaagttctcagaacctgtgtatgccgcgttctggctgtcaaaaaaagagaatgccatacggatcgtggacctgggagaggaacccgagaagccggctccaagccttgttggaacagcaccatag

SEQ ID NO: 165400 - DNA, 1695 bp, Artificial Sequence
  derived and/or modified sequence
atggccgagctggatttgatggcaccagggccactgcccagggccacggctcagcctccagcgcccctcagtcctgactctggctctcccagtcccgattcggggtctgctagtcctgtggaagaggaggatgtcgggagctccgagaagctcgggcgagagacggaggaacaggattcggactcagctgagcagggtgatccggctggagagggaaaagaggtgttgtgcgacttttgtttagatgatacgcgcagggtcaaagcagtgaaatcttgtctgacgtgtatggtgaactattgcgaagagcatctgcagccacatcaggtgaacatcaagctccaaagccacttgcttacagagccagtgaaggaccataactggcgttactgtccagcacaccactctcccctttctgcattttgctgtcccgatcagcagtgtatttgccaagattgctgtcaagagcactctggtcatacaatcgtttcccttgacgcagccagaagggataaggaagctgagctgcagtgcacccagctcgacctggagaggaagctgaagctgaacgagaacgccataagtagattacaggccaaccagaaaagcgtgctagtttctgttagcgaagtgaaggcagttgcagaaatgcaattcggtgagctgctcgccgccgttcggaaagctcaggccaatgtcatgctgttcctcgaggagaaagagcaagctgcactgtcccaggccaacggtatcaaagcgcacctagaatataggagcgccgaaatggagaaatctaagcaggagctcgaacggatggcagctatttccaacacggtccagttccttgaagagtattgcaagttcaagaacaccgaggatattacattccctagtgtttacgtcgggctcaaagacaaactcagcggtattaggaaggtgattacggagtctactgtgcatctaatacagcttctggagaattataaaaaaaagctgcaagaattctctaaagaggaagagtacgatatccgaacccaggtgagcgccgttgtccagcgaaagtactggacatcaaaacctgaaccctccactcgcgaacaattccttcagtacgcgtacgatatcaccttcgaccctgacaccgcccacaaatacctgagactgcaggaagagaatcgcaaggttactaatactactccttgggagcacccttatcccgatcttccatccaggtttctgcactggagacaggtcctcagccagcagtccctgtatctgcaccggtactatttcgaagttgagatatttggcgccggcacttatgtggggctgacttgcaagggaatagaccgcaaaggcgaagaaagaaactcttgcatcagtggcaacaatttttcctggagcttgcaatggaacgggaaggagttcactgcatggtattctgatatggagacaccattgaaagctggccccttccgtaggttgggggtctacattgacttcccaggaggtatcctgtcattctacggagtggaatacgatacaatgactttggtccataaatttgcatgtaagttctcagagcccgtgtacgcagccttttggctgtcaaaaaaggagaacgccattaggattgttgacctaggagaggagccagaaaagccagccccaagcctggtgggaactgctccatag

SEQ ID NO: 165401 - DNA, 1695 bp, Artificial Sequence
  derived and/or modified sequence
atggccgagctggacctgatggcccctggccccctgccccgggccacagcccagcccccagcccccctgagcccagattctggcagccccagcccagacagcggcagcgccagccctgtggaggaggaggatgtgggcagcagcgagaagctgggccgggagacagaggagcaggacagcgacagcgctgagcagggcgaccctgctggggagggcaaggaggtgctgtgtgacttctgcctggatgacaccaggagagtgaaggctgtgaagagctgcctgacctgcatggtgaactactgtgaggagcacctgcagccccaccaggtgaacatcaagctgcagagccacctgctgacagagcctgtgaaggaccacaactggagatactgcccagcccaccacagccccctgagcgccttctgctgcccagaccagcagtgcatctgccaggactgctgccaggagcacagcggccacaccatcgtgtccctggatgctgcccggcgggacaaggaggccgagctgcagtgcacccagctggacctggagaggaagctgaagctgaatgaaaatgccatcagccggctgcaggccaaccagaagtctgtgctggtgtctgtgtctgaggtgaaggctgtggccgagatgcagtttggagagctgctggccgctgtgaggaaggcccaggccaacgtgatgctgttcctggaggagaaggagcaggccgccctgagccaggccaacggcatcaaggcccacctggagtacagatctgctgagatggagaagagcaagcaggagctggagaggatggccgccatcagcaacacagtgcagttcctggaggagtactgcaagttcaagaacacagaggacatcaccttccccagcgtgtatgtgggcctgaaggacaagctgagcggcatcaggaaggtgatcacagagagcacagtgcacctgatccagctgctggagaactacaagaagaagctgcaggagttcagcaaggaggaggagtatgacatccgcacccaggtgtctgctgtggtgcagaggaagtactggaccagcaagccagagcccagcacccgggagcagttcctgcagtatgcctatgacatcacctttgatcctgacacagcccacaagtacctgcggctgcaggaggagaacaggaaggtgaccaacaccaccccctgggagcacccctacccagacctgcccagccgcttcctgcactggaggcaggtgctgagccagcagagcctgtacctgcaccgctactactttgaggtggagatctttggagctggcacctacgtgggcctgacctgcaagggcatcgacaggaagggggaggagaggaacagctgcatcagcggcaacaacttctcctggagcctgcagtggaatggcaaggagttcaccgcctggtacagcgacatggagacccccctgaaggccggccccttccggcggctgggcgtgtacatcgacttccctgggggcatcctgtccttctatggagtggagtatgacaccatgaccctggtgcacaagtttgcctgcaagttcagcgagcctgtgtatgctgccttctggctgagcaagaaggaaaatgccatcagaattgtggacctgggggaggagcctgagaagccagcccccagcctggtgggcacagccccctag

SEQ ID NO: 165402 - DNA, 1695 bp, Artificial Sequence
  derived and/or modified sequence
atggccgagctggacctgatggcccccggccccctgccccgggccactgctcaaccacccgctcccttgtcgcccgactctgggagcccaagtccagatagtggttctgccagtccagtcgaggaagaagacgttgggtcatccgagaagctaggacgcgagactgaggagcaggattcagacagcgcagaacagggcgacccagcaggcgagggcaaggaggtactctgcgacttctgtctggacgatacaagacgggtcaaagctgtgaaatcatgccttacctgtatggttaattactgtgaggagcatttacaaccccatcaggtgaacatcaagttgcaaagccatctcctgaccgaacccgtcaaggatcacaactggagatactgccctgctcaccactccccactgagcgctttttgctgccctgatcagcagtgtatttgtcaggactgctgtcaggaacattccgggcataccatcgtgagccttgatgccgccagacgggataaagaggcagaactgcagtgtacacagcttgacctcgagcgtaaactgaaactgaacgagaacgctataagtcgcctgcaagcaaaccagaaaagcgtgcttgtctctgtgtccgaagttaaagctgtagctgagatgcagttcggggaattgctggccgccgtcagaaaagcgcaggcaaatgtgatgctgttcctggaggaaaaggagcaggccgccctcagccaggctaatgggatcaaggcccatctggaatatcggtctgccgagatggagaaaagcaagcaggaactggaaaggatggcagctatcagtaacactgtccaatttctcgaggagtactgtaaattcaagaacacggaagacataactttcccctctgtatacgtgggcctgaaagataagctgtctggcatccggaaggtgatcactgaatctactgtgcatctcattcaactgctggagaattataagaaaaagctccaggaattctctaaagaggaggagtatgatattaggacacaagttagtgccgtggtgcaaagaaaatattggacctctaagcccgaaccaagtacaagagagcagttcctccaatacgcctatgatattaccttcgacccagacaccgcacataagtacctgcgattgcaggaagagaaccgtaaagtgactaacaccaccccttgggaacacccttacccggatctgcctagccgcttccttcactggcgccaagttctcagtcagcagagcctctacctgcacaggtactacttcgaagttgagatttttggggccggaacttatgtcgggttaacctgtaagggtattgatcgaaagggtgaggagaggaattcctgcattagtggaaataatttcagctggtcactgcagtggaatggtaaggagtttaccgcctggtacagtgacatggaaaccccgctgaaggctgggccgttcagaagactgggagtctacattgacttccccggcggcatcctgtcgttctacggcgtcgaatacgacactatgactcttgttcacaaatttgcctgcaaattctccgagcctgtctatgccgccttctggctctcaaagaaggaaaatgcgatccggatagtggacttgggggaggaacctgagaagccggctccaagcttagttgggaccgctccttag

SEQ ID NO: 165403 - DNA, 1695 bp, Artificial Sequence
  derived and/or modified sequence
atggccgagctggacctgatggcccccggccccctgccccgggccaccgcgcagccacccgccccactgtccccggatagcggttctccctctcctgattccggttccgcttcacctgtggaagaggaagatgtgggcagctcagagaagctagggagagaaacagaggagcaagacagtgactctgcagagcagggggaccctgctggcgaaggaaaggaggtcctgtgcgatttttgtctggacgatacgcgccgcgtcaaggcagtcaaatcgtgccttacctgtatggtgaattattgcgaggagcatctccagccacaccaagttaatatcaagctgcagtcgcacctgctgaccgaacccgtgaaggaccacaattggagatattgtccagctcaccactccccattgtccgcattctgctgtccggaccagcaatgcatctgtcaggattgctgtcaggagcattcggggcacaccatcgtttcactcgacgccgcccgccgcgacaaggaggcggagctccagtgcacacagctggacctggagcgcaagctcaagttgaacgagaacgccatctcgcggctccaagccaatcagaaatccgtgctcgtctctgtgagtgaggtgaaagcagtggccgaaatgcagtttggcgagcttttggcagccgtgaggaaagcccaggcaaatgtgatgctatttttggaagaaaaagaacaagccgcattaagtcaggccaatggcatcaaagctcaccttgagtacaggagtgcagagatggaaaaatccaaacaggagctggagcggatggccgcaatttccaacacagtgcagtttcttgaggagtactgtaaatttaagaataccgaagacattacttttccatctgtgtacgtggggttgaaagataagctgtctggaattcgcaaggtcattaccgaatcgactgtgcatcttattcagctactggaaaactataaaaaaaagttacaggagttttccaaggaggaagagtatgacattcgtacgcaggtgtctgcggtggtccagcgtaaatactggaccagcaaacctgaacctagcacgagagagcagttcctccagtacgcctacgatatcacatttgatcctgacactgcccataaatatttacgactgcaggaagaaaataggaaggtgacaaacactacaccctgggagcacccataccccgatctgccgtccagatttcttcactggcggcaggtgttgtcccaacagtcactttacctgcatagatactatttcgaagtggaaatcttcggggcaggcacctacgtggggctgacatgcaagggtatagatagaaagggtgaggaaagaaacagctgcatcagcgggaacaattttagctggtcacttcagtggaacggaaaggaattcactgcctggtatagcgacatggagacgccactcaaggctggcccctttagacgtttgggagtctacattgacttccctgggggcatcctttcattttatggtgtggagtatgacacaatgaccctggtgcataagtttgcttgcaagttctccgagcccgtctatgcggccttctggctttcaaagaaggagaatgcaatacgcatagtggaccttggggaagagccagagaaacccgcaccgtcactggtaggcacagctccctag

SEQ ID NO: 165404 - DNA, 1695 bp, Artificial Sequence
  derived and/or modified sequence
atggcagaactagatttaatggcaccaggtccactgccacgcgcaacagctcagccacccgcaccgctcagtccagacagcggcagcccttcccccgattctggttctgcctcccccgtggaagaggaggacgtgggcagctccgagaaactgggcagagagaccgaggagcaggattcggacagcgcagaacaaggagacccagcgggagaagggaaggaggtcctttgcgacttctgtctagatgacacccggagagtgaaggccgtgaagagctgtctgacttgtatggtgaactactgcgaagaacacctacagccgcaccaggttaatattaagctgcaatcacatcttttaaccgagccggtgaaggaccataattggcgctactgcccagctcaccattctcccctgagcgctttttgttgccctgaccagcagtgtatttgtcaagactgttgccaggagcactcaggccataccatcgtgtctctggatgcagcaaggcgggataaggaggccgaactccagtgtacacagctcgatttggagagaaagctgaagctgaacgaaaatgcgatctcacggctgcaggccaaccaaaagtccgtgttagttagtgtctccgaagtgaaggctgtggcggaaatgcagtttggcgagctcctggcagccgtgaggaaagctcaagcaaacgtcatgttgtttctcgaggaaaaggagcaggccgctctgtcccaggccaacgggatcaaggcccatctggagtaccggtctgccgaaatggagaagtccaaacaagagcttgagagaatggcagccatttctaacaccgtgcagttcttggaagaatactgtaagttcaagaacacagaggacatcacatttccttctgtctatgtgggtctgaaagataaactgtccgggattagaaaggtcattacagaaagcaccgtgcatctgattcagctgttggaaaactataagaagaagcttcaggaatttagcaaagaggaggagtatgatatccgcactcaagtcagtgcagtcgtgcagcggaaatattggaccagcaagcccgaaccctctactagagaacagttcctccagtatgcctatgatatcacctttgaccccgatactgcccataagtacttaagattgcaggaggagaatcggaaagtgactaacactacgccctgggaacacccttaccccgatctaccaagccgcttcttgcactggagacaggttctttcccagcaaagtctctatttgcaccgctattatttcgaggtcgagatctttggggcaggcacctacgtcggtcttacatgtaagggcatcgacaggaaaggtgaagaaagaaacagctgcatatccggcaacaattttagctggtccctacagtggaacggcaaagaattcaccgcctggtacagcgacatggagacaccgctgaaggcgggaccattccgcagactgggcgtgtacattgacttccccggtgggattcttagcttttatggcgtagaatacgacactatgaccctggtgcataagttcgcatgcaagttcagcgagcccgtctatgctgccttttggcttagtaagaaagagaacgccatccgcatcgtggacctaggagaggagccagaaaagccagctcctagtctggtcggcaccgcaccatag

SEQ ID NO: 165405 - DNA, 1695 bp, Artificial Sequence
  derived and/or modified sequence
atggcagaactggacctgatggctccaggacccctaccgagggctaccgctcaacccccagcccctttatcacctgattctgggtcaccaagcccagatagtgggtcagccagcccagttgaggaagaagacgtaggtagctctgaaaagttaggacgggagaccgaggagcaggatagcgacagtgcagagcagggagatcctgccggtgagggtaaagaagtgctctgcgacttctgtctcgatgatactcgccgtgtgaaggcggtaaaatcatgtcttacttgcatggtgaactattgcgaggaacacctccagcctcatcaggtgaacataaagctccaatcccatctgctaaccgagcctgttaaagaccacaattggaggtattgtccagcccaccacagtccgctgtctgctttttgttgtcccgatcagcagtgtatctgtcaagattgctgccaagagcatagcggacatacaattgtgagccttgatgcagctaggagggacaaggaggctgagcttcagtgcacccagctcgatctggaacgcaagctgaaattaaatgagaacgccatttctaggcttcaggccaaccagaagagcgtgctggtgtctgtctccgaggtcaaagcggtggcagagatgcagtttggcgagctcttagctgcagtgcgcaaggcccaggccaacgtaatgctctttctagaggaaaaagagcaggcggcactgtctcaggccaatggtatcaaagcacatctcgaatacagatccgctgagatggaaaagtctaagcaggagcttgagcggatggccgcaattagcaatacggtgcaattcctggaggagtattgtaaattcaagaacactgaagacattactttcccatctgtatacgtcggacttaaggacaagctgtcgggcattaggaaggtgattacagagtcgactgtccacctgatccaactgctcgagaattataagaagaaattacaggagttcagtaaagaagaggagtacgacatccgaacacaggtgagcgccgtcgttcagcggaagtattggacatcaaagcctgaaccatcaacaagggaacagtttctacaatacgcgtacgatatcacctttgaccctgacacagcacacaagtatctgcgacttcaggaggagaatcggaaagtaacaaatacaactccatgggaacacccctatcccgatcttccctcccgtttcctgcattggagacaagtccttagtcagcagagtctttacctccaccggtactatttcgaagtagaaattttcggggcagggacatatgtgggccttacctgcaagggaattgaccgtaagggcgaggagcgaaacagctgcatttcagggaataatttttcctggagcctgcagtggaacgggaaggagtttacggcatggtatagcgacatggagacaccgttgaaggccggacccttcagaaggctgggagtttacattgacttccccggagggattctgagcttttacggtgtggagtatgacacaatgactctggtccacaaatttgcttgtaaattttccgagccagtctacgccgctttttggctgtccaaaaaggaaaacgccatccgcatcgtagaccttggagaggagcccgagaagcccgcaccaagcctggttgggaccgctccatag

SEQ ID NO: 165406 - DNA, 2907 bp, Artificial Sequence
  derived and/or modified sequence
gatttatggaaagcacctggtgcgtgttctgccctctgaggaccctgccctttcccaaaaggggtatcttaagaaggaaaatatggctgctctttgccggacagcagagtcccagtaggatttccattttccaaacctggtatcatctcctagttggaagaagtggtaagcccacgaacacaaatgcaggagggagaggtgccaagaagcagcggtacacagcaggcacagagacacgtggtcttcagcagagcctatggggttcagatgattcacataagaatagaagtttcagggctggacctggggaggcagcctgagcctgagccggctgtcctgagcctgagtactctagctgccttgtcgtcatcgcatctggctgccatccagcgccagcacacagtaatgagtggccgagcttcctctgggagggaggaaacagttaaaatcttgcagcagctgcaatcatctaggcgtggttctcttgtctgacttgggctgcacagatcctgggccaagggacagaagaaagacagcctaggagcagagcctcccagatggctgagttggatctaatggctccagggccactgcccagggccactgctcagcccccagcccctctcagcccagactctgggtcacccagcccagattctgggtcagccagcccagtggaagaagaggacgtgggctcctcggagaagcttggcagggagacggaggaacaggacagcgactctgcagagcagggggatcctgctggtgaggggaaagaggtcctgtgtgacttctgccttgatgacaccagaagagtgaaggcagtgaagtcctgtctaacctgcatggtgaattactgtgaagagcacttgcagccgcatcaggtgaacatcaaactgcaaagccacctgctgaccgagccagtgaaggaccacaactggcgatactgccctgcccaccacagcccactgtctgccttctgctgccctgatcagcagtgcatctgccaggactgttgccaggagcacagtggccacaccatagtctccctggatgcagcccgcagggacaaggaggctgaactccagtgcacccagttagacttggagcggaaactcaagttgaatgaaaatgccatctccaggctccaggctaaccaaaagtctgttctggtgtcggtgtcagaggtcaaagcggtggctgaaatgcagtttggggaactccttgctgctgtgaggaaggcccaggccaatgtgatgctcttcttagaggagaaggagcaagctgcgctgagccaggccaacggtatcaaggcccacctggagtacaggagtgccgagatggagaagagcaagcaggagctggagaggatggcggccatcagcaacactgtccagttcttggaggagtactgcaagtttaagaacactgaagacatcaccttccctagtgtttacgtagggctgaaggataaactctcgggcatccgcaaagttatcacggaatccactgtacacttaatccagttgctggagaactataagaaaaagctccaggagttttccaaggaagaggagtatgacatcagaactcaagtgtctgccgttgttcagcgcaaatattggacttccaaacctgagcccagcaccagggaacagttcctccaatatgcgtatgacatcacgtttgacccggacacagcacacaagtatctccggctgcaggaggagaaccgcaaggtcaccaacaccacgccctgggagcatccctacccggacctccccagcaggttcctgcactggcggcaggtgctgtcccagcagagtctgtacctgcacaggtactattttgaggtggagatcttcggggcaggcacctatgttggcctgacctgcaaaggcatcgaccggaaaggggaggagcgcaacagttgcatttccggaaacaacttctcctggagcctccaatggaacgggaaggagttcacggcctggtacagtgacatggagaccccactcaaagctggccctttccggaggctcggggtctatatcgacttcccgggagggatcctttccttctatggcgtagagtatgataccatgactctggttcacaagtttgcctgcaaattttcagaaccagtctatgctgccttctggctttccaagaaggaaaacgccatccggattgtagatctgggagaggaacccgagaagccagcaccgtccttggtggggactgctccctagactccaggagccatatcccagacctttgccagctacagtgatgggatttgcattttagggtgatttgggggcagaaataactgctgatggtagctggcttttgaaatcctatggggtctctgaatgaaaacattctccagctgctctcttttgctccatatggtgctgttctctatgtgtttgcagtaattcttttttttttttttgagacggagtctcgcactgttgcccaggctggagagcagtggcgcgatcttggctcactgcaagctccgcctcccgagttcaagcaattctcctgcctcagcctcccgagtagctgggattacaggtgcctgccaccacacccagctaatgttttgtatttttagtagagatggggtttcaccatgttggccaggcagatctcaaactcctgacctcgtgatgcacccacctcggcctcccaaagtgctgggattacatgcgtgagccactgcgccctgcctgtttgtagtaatttttaggcaccaaatctccctcatcttctagtgccattctcctctctgttcaggtaaatgtcacactgtgcccagaatggatgaccaggaaccttaaagagtggctgaaaagattgcagagttatcataataaattgctaacttgcgtatttcct

SEQ ID NO: 165407 - DNA, 3206 bp, Artificial Sequence
  derived and/or modified sequence
ctttctctggaggatctccgcgcgtggcgagtctgtgtcctccctgtcccccagagcagacaccctctctgtgtctggaccggggaggagcagacgctggacaggtttctggtagaatgctggcaatttccaggaagatacgtggagaacggaaaggttgctacacccaaatagtgaagcaaaggctatgattatggaggattggacctgcaaactccagaacagagcaaccttgtaaaatgtgtgtgggcagcacagagaacttgggcaagttaacagtttcctcatctgtgaatactgatttatggaaagcacctggtgcgtgttctgccctctgaggaccctgccctttcccaaaaggggtatcttaagaaggaaaatatggctgctctttgccggacagcagagtcccagtaggatttccattttccaaacctggtatcatctcctagttggaagaagtggtaagcccacgaacacaaatgcaggagggagaggtgccaagaagcagcggtacacagcaggcacagagacacgtggtcttcagcagagcctatggggttcagatgattcacataagaatagaagtttcagggctggacctggggaggcagcctgagcctgagccggctgtcctgagcctgagtactctagctgccttgtcgtcatcgcatctggctgccatccagcgccagcacacagtaatgagtggccgagcttcctctgggagggaggaaacagttaaaatcttgcagcagctgcaatcatctaggcgtggttctcttgtctgacttgggctgcacagatcctgggccaagggacagaagaaagacagcctaggagcagagcctcccagatggctgagttggatctaatggctccagggccactgcccagggccactgctcagcccccagcccctctcagcccagactctgggtcacccagcccagattctgggtcagccagcccagtggaagaagaggacgtgggctcctcggagaagcttggcagggagacggaggaacaggacagcgactctgcagagcagggggatcctgctggtgaggggaaagaggtcctgtgtgacttctgccttgatgacaccagaagagtgaaggcagtgaagtcctgtctaacctgcatggtgaattactgtgaagagcacttgcagccgcatcaggtgaacatcaaactgcaaagccacctgctgaccgagccagtgaaggaccacaactggcgatactgccctgcccaccacagcccactgtctgccttctgctgccctgatcagcagtgcatctgccaggactgttgccaggagcacagtggccacaccatagtctccctggatgcagcccgcagggacaaggaggctgaactccagtgcacccagttagacttggagcggaaactcaagttgaatgaaaatgccatctccaggctccaggctaaccaaaagtctgttctggtgtcggtgtcagaggtcaaagcggtggctgaaatgcagtttggggaactccttgctgctgtgaggaaggcccaggccaatgtgatgctcttcttagaggagaaggagcaagctgcgctgagccaggccaacggtatcaaggcccacctggagtacaggagtgccgagatggagaagagcaagcaggagctggagaggatggcggccatcagcaacactgtccagttcttggaggagtactgcaagtttaagaacactgaagacatcaccttccctagtgtttacgtagggctgaaggataaactctcgggcatccgcaaagttatcacggaatccactgtacacttaatccagttgctggagaactataagaaaaagctccaggagttttccaaggaagaggagtatgacatcagaactcaagtgtctgccgttgttcagcgcaaatattggacttccaaacctgagcccagcaccagggaacagttcctccaatatgcgtatgacatcacgtttgacccggacacagcacacaagtatctccggctgcaggaggagaaccgcaaggtcaccaacaccacgccctgggagcatccctacccggacctccccagcaggttcctgcactggcggcaggtgctgtcccagcagagtctgtacctgcacaggtactattttgaggtggagatcttcggggcaggcacctatgttggcctgacctgcaaaggcatcgaccggaaaggggaggagcgcaacagttgcatttccggaaacaacttctcctggagcctccaatggaacgggaaggagttcacggcctggtacagtgacatggagaccccactcaaagctggccctttccggaggctcggggtctatatcgacttcccgggagggatcctttccttctatggcgtagagtatgataccatgactctggttcacaagtttgcctgcaaattttcagaaccagtctatgctgccttctggctttccaagaaggaaaacgccatccggattgtagatctgggagaggaacccgagaagccagcaccgtccttggtggggactgctccctagactccaggagccatatcccagacctttgccagctacagtgatgggatttgcattttagggtgatttgggggcagaaataactgctgatggtagctggcttttgaaatcctatggggtctctgaatgaaaacattctccagctgctctcttttgctccatatggtgctgttctctatgtgtttgcagtaattcttttttttttttttgagacggagtctcgcactgttgcccaggctggagagcagtggcgcgatcttggctcactgcaagctccgcctcccgagttcaagcaattctcctgcctcagcctcccgagtagctgggattacaggtgcctgccaccacacccagctaatgttttgtatttttagtagagatggggtttcaccatgttggccaggcagatctcaaactcctgacctcgtgatgcacccacctcggcctcccaaagtgctgggattacatgcgtgagccactgcgccctgcctgtttgtagtaatttttaggcaccaaatctccctcatcttctagtgccattctcctctctgttcaggtaaatgtcacactgtgcccagaatggatgaccaggaaccttaaagagtggctgaaaagattgcagagttatcataataaattgctaacttgcgtatttcct

SEQ ID NO: 165408 - protein, 836 aa, Artificial Sequence
  derived and/or modified sequence
MIPFLPMFSLLLLLIVNPINANNHYDKILAHSRIRGRDQGPNVCALQQILGTKKKYFSTCKNWYKKSICGQKTTVLYECCPGYMRMEGMKGCPAVLPIDHVYGTLGIVGATTTQRYSDASKLREEIEGKGSFTYFAPSNEAWDNLDSDIRRGLESNVNVELLNALHSHMINKRMLTKDLKNGMIIPSMYNNLGLFINHYPNGVVTVNCARIIHGNQIATNGVVHVIDRVLTQIGTSIQDFIEAEDDLSSFRAAAITSDILEALGRDGHFTLFAPTNEAFEKLPRGVLERIMGDKVASEALMKYHILNTLQCSESIMGGAVFETLEGNTIEIGCDGDSITVNGIKMVNKKDIVTNNGVIHLIDQVLIPDSAKQVIELAGKQQTTFTDLVAQLGLASALRPDGEYTLLAPVNNAFSDDTLSMDQRLLKLILQNHILKVKVGLNELYNGQILETIGGKQLRVFVYRTAVCIENSCMEKGSKQGRNGAIHIFREIIKPAEKSLHEKLKQDKRFSTFLSLLEAADLKELLTQPGDWTLFVPTNDAFKGMTSEEKEILIRDKNALQNIILYHLTPGVFIGKGFEPGVTNILKTTQGSKIFLKEVNDTLLVNELKSKESDIMTTNGVIHVVDKLLYPADTPVGNDQLLEILNKLIKYIQIKFVRGSTFKEIPVTVYTTKIITKVVEPKIKVIEGSLQPIIKTEGPTLTKVKIEGEPEFRLIKEGETITEVIHGEPIIKKYTKIIDGVPVEITEKETREERIITGPEIKYTRISTGGGETEETLKKLLQEEVTKVTKFIEGGDGHLFEDEEIKRLLQGDTPVRKLQANKKVQGSRRRLREGRSQ

SEQ ID NO: 165409 - DNA, 3390 bp, Artificial Sequence
  derived and/or modified sequence
agactctcaggttgatgcagtgttccctcccacaactctgacatgtatataaattctgagctctccaaagcccactgccagttctcttcggggactaactgcaacggagagactcaagatgattccctttttacccatgttttctctactattgctgcttattgttaaccctataaacgccaacaatcattatgacaagatcttggctcatagtcgtatcaggggtcgggaccaaggcccaaatgtctgtgcccttcaacagattttgggcaccaaaaagaaatacttcagcacttgtaagaactggtataaaaagtccatctgtggacagaaaacgactgtgttatatgaatgttgccctggttatatgagaatggaaggaatgaaaggctgcccagcagttttgcccattgaccatgtttatggcactctgggcatcgtgggagccaccacaacgcagcgctattctgacgcctcaaaactgagggaggagatcgagggaaagggatccttcacttactttgcaccgagtaatgaggcttgggacaacttggattctgatatccgtagaggtttggagagcaacgtgaatgttgaattactgaatgctttacatagtcacatgattaataagagaatgttgaccaaggacttaaaaaatggcatgattattccttcaatgtataacaatttggggcttttcattaaccattatcctaatggggttgtcactgttaattgtgctcgaatcatccatgggaaccagattgcaacaaatggtgttgtccatgtcattgaccgtgtgcttacacaaattggtacctcaattcaagacttcattgaagcagaagatgacctttcatcttttagagcagctgccatcacatcggacatattggaggcccttggaagagacggtcacttcacactctttgctcccaccaatgaggcttttgagaaacttccacgaggtgtcctagaaaggatcatgggagacaaagtggcttccgaagctcttatgaagtaccacatcttaaatactctccagtgttctgagtctattatgggaggagcagtctttgagacgctggaaggaaatacaattgagataggatgtgacggtgacagtataacagtaaatggaatcaaaatggtgaacaaaaaggatattgtgacaaataatggtgtgatccatttgattgatcaggtcctaattcctgattctgccaaacaagttattgagctggctggaaaacagcaaaccaccttcacggatcttgtggcccaattaggcttggcatctgctctgaggccagatggagaatacactttgctggcacctgtgaataatgcattttctgatgatactctcagcatggatcagcgcctccttaaattaattctgcagaatcacatattgaaagtaaaagttggccttaatgagctttacaacgggcaaatactggaaaccatcggaggcaaacagctcagagtcttcgtatatcgtacagctgtctgcattgaaaattcatgcatggagaaagggagtaagcaagggagaaacggtgcgattcacatattccgcgagatcatcaagccagcagagaaatccctccatgaaaagttaaaacaagataagcgctttagcaccttcctcagcctacttgaagctgcagacttgaaagagctcctgacacaacctggagactggacattatttgtgccaaccaatgatgcttttaagggaatgactagtgaagaaaaagaaattctgatacgggacaaaaatgctcttcaaaacatcattctttatcacctgacaccaggagttttcattggaaaaggatttgaacctggtgttactaacattttaaagaccacacaaggaagcaaaatctttctgaaagaagtaaatgatacacttctggtgaatgaattgaaatcaaaagaatctgacatcatgacaacaaatggtgtaattcatgttgtagataaactcctctatccagcagacacacctgttggaaatgatcaactgctggaaatacttaataaattaatcaaatacatccaaattaagtttgttcgtggtagcaccttcaaagaaatccccgtgactgtctatacaactaaaattataaccaaagttgtggaaccaaaaattaaagtgattgaaggcagtcttcagcctattatcaaaactgaaggacccacactaacaaaagtcaaaattgaaggtgaacctgaattcagactgattaaagaaggtgaaacaataactgaagtgatccatggagagccaattattaaaaaatacaccaaaatcattgatggagtgcctgtggaaataactgaaaaagagacacgagaagaacgaatcattacaggtcctgaaataaaatacactaggatttctactggaggtggagaaacagaagaaactctgaagaaattgttacaagaagaggtcaccaaggtcaccaaattcattgaaggtggtgatggtcatttatttgaagatgaagaaattaaaagactgcttcagggagacacacccgtgaggaagttgcaagccaacaaaaaagttcaaggatctagaagacgattaagggaaggtcgttctcagtgaaaatccaaaaaccagaaaaaaatgtttatacaaccctaagtcaataacctgaccttagaaaattgtgagagccaagttgacttcaggaactgaaacatcagcacaaagaagcaatcatcaaataattctgaacacaaatttaatatttttttttctgaatgagaaacatgagggaaattgtggagttagcctcctgtggtaaaggaattgaagaaaatataacaccttacaccctttttcatcttgacattaaaagttctggctaactttggaatccattagagaaaaatccttgtcaccagattcattacaattcaaatcgaagagttgtgaactgttatcccattgaaaagaccgagccttgtatgtatgttatggatacataaaatgcacgcaagccattatctctccatgggaagctaagttataaaaataggtgcttggtgtacaaaactttttatatcaaaaggctttgcacatttctatatgagtgggtttactggtaaattatgttattttttacaactaattttgtactctcagaatgtttgtcatatgcttcttgcaatgcatattttttaatctcaaacgtttcaataaaaccatttttcagatataaagagaattacttcaaattgagtaattcagaaaaactcaagatttaagttaaaaagtggtttggacttgggaacaggactttatacctcttttactgtaacaagtactcattaaaggaaattgaatgaaattaaaaaaaaaaa

SEQ ID NO: 165410 - DNA, 2511 bp, Artificial Sequence
  derived and/or modified sequence
atgattccctttctgcctatgttctcattgctccttctactgatagttaaccctattaatgctaacaatcattatgataagattctcgctcactctcgtattcgagggcgcgaccagggccccaatgtctgtgccctgcagcaaattttgggaaccaagaagaagtactttagcacctgtaagaattggtacaaaaagagtatttgcggacaaaaaaccactgtcttatacgaatgttgcccgggatatatgcgcatggagggtatgaagggctgtcccgccgtccttcccatagatcacgtatacgggacactggggattgtcggagcgacaaccacccagcgctactctgatgcctccaaactgcgagaagagatcgaaggaaagggttcattcacatactttgctcctagcaacgaggcgtgggacaacttggatagtgatatccggcgtgggctggagtcaaatgtgaatgttgaactcttgaacgccttacatagccacatgatcaataaaaggatgctgaccaaagatctcaagaatggtatgatcataccctccatgtataacaatctggggctgtttattaatcattatcctaatggcgtcgtgaccgtgaactgcgccaggattatccatggcaatcaaatcgccactaacggagttgtgcacgtgattgatcgcgtgctcacccagatcgggaccagcattcaggactttattgaagcggaggatgacctctcctccttccgcgcagccgccattacctctgacatccttgaagctctgggacgggacggccattttaccctcttcgcacctacaaacgaagcgttcgagaaactgcccaggggggtgctggagcgcattatgggtgacaaagtggctagtgaagcgttgatgaagtaccatatcctcaacaccctccagtgctcagaatcaataatgggcggcgcagtctttgagaccctggagggcaatactatcgagatagggtgcgatggggacagcattaccgtcaatggcataaagatggtcaacaagaaggatatcgtgactaacaatggggtgatccatcttatcgaccaggtgcttatccccgattcagccaagcaggtgattgagctggctggaaagcaacaaactacatttactgatctggttgcacagctcggcctggcttctgcgttgcggcctgatggcgagtatactctgctggcacccgtgaacaacgctttcagcgacgacacactcagtatggatcagcgtctgctaaaactgatcctacagaatcacatcttgaaggtgaaggtcggtttgaatgagctgtacaatggtcaaattctagagacaatcggaggaaagcagctccgtgtgtttgtctatcgcactgctgtttgtattgagaacagttgtatggagaagggttctaagcagggaagaaatggcgcaatacatatcttccgggagattataaagcctgccgagaaatctctccacgagaagctgaaacaggataagcgcttcagtactttcctctcattactggaagctgcagaccttaaggagctccttacccaaccaggagactggactctcttcgtacctaccaatgacgcgttcaagggaatgaccagcgaagaaaaggagattctcattagggacaagaatgccctgcaaaacattatcctgtaccacctgacacccggtgtgtttattggcaaaggatttgaacctggcgtcaccaacatcctcaaaaccacccagggctctaagatttttttaaaggaggttaacgatacgctgctagtcaatgaattaaagagcaaggaatcagacattatgacaaccaatggcgtgattcacgtcgtcgacaagctcctctatcccgccgacactccagtgggtaacgaccagctgctggagatactcaacaagttgatcaaatacatccagatcaagtttgtgcgtggctcaaccttcaaggaaataccagttaccgtttatacaacaaaaattattaccaaagtggtagaacccaagatcaaggtgattgagggctcactccaacctataattaaaaccgaaggacccacactgacgaaggtgaagatcgaaggtgagcctgagttccgcctgatcaaagagggggagacaatcactgaggttattcacggagaacctatcataaaaaagtataccaagatcatagacggggtcccagtggaaattaccgaaaaagaaacgcgcgaggagaggattataacaggcccagagataaagtacaccagaatttctaccggcggaggggagaccgaggaaacactgaagaagctgcttcaggaggaagtcacaaaggtgactaagtttatcgaagggggagatgggcacctctttgaggacgaagagattaaaagactcttacagggagatacaccagttcgtaagttacaagcgaacaaaaaggtacagggctccagacggcgcctccgcgaaggaagatcccagtag

SEQ ID NO: 165411 - DNA, 2511 bp, Artificial Sequence
  derived and/or modified sequence
atgatccccttcctgcccatgttcagcctgctgctgctgctgattgtgaaccccatcaatgccaacaaccactatgacaagatcctggcccacagccgcatccggggccgggaccagggccccaacgtgtgtgccctgcagcagatcctgggcaccaagaagaagtacttcagcacctgcaagaactggtacaagaagagcatctgtggccagaagaccaccgtgctgtatgagtgctgccccggctacatgaggatggagggcatgaagggctgcccagctgtgctgcccatcgaccacgtgtatggcaccctgggcatcgtgggcgccaccaccacccagcgctacagtgatgccagcaagctgcgggaggagattgagggcaagggcagcttcacctactttgcccccagcaatgaggcctgggacaacctggacagcgacatccggcggggcctggagagcaatgtgaatgtggagctgctgaatgccctgcacagccacatgatcaacaagaggatgctgaccaaggacctgaagaatggcatgatcatccccagcatgtacaacaacctgggcctcttcatcaaccactacccaaatggagtggtgacagtgaactgtgcccgcatcatccacggcaaccagatcgccaccaacggggtggtgcacgtgattgacagagtgctgacccagatcggcaccagcatccaggacttcattgaagcagaagatgacctgagcagcttccgggctgctgccatcaccagtgacatcctggaggccctgggcagagatggccacttcaccctgtttgcccccaccaatgaggcctttgagaagctgccccggggcgtgctggagcgcatcatgggagacaaggtggccagcgaggccctgatgaagtaccacatcctgaacaccctgcagtgcagcgagagcatcatgggcggcgctgtgtttgagaccctggagggcaacaccattgaaattggctgtgatggagacagcatcaccgtgaatggcatcaagatggtgaacaagaaggacatcgtgaccaacaatggagtcatccacctgattgaccaggtgctgatcccagattctgccaagcaggtgattgagctggccggcaagcagcagaccaccttcacagacctggtggcccagctgggcctggccagcgccctgcggccagatggagagtacaccctgctggcccctgtgaacaatgccttcagtgatgacaccctgtccatggaccagaggctgctgaagctgatcctgcagaaccacatcctgaaggtgaaggtgggcctgaatgagctgtacaacggccagatcctggagaccatcggcggcaagcagctgcgggtgtttgtgtacagaacagctgtgtgcatcgagaacagctgcatggagaagggcagcaagcagggcagaaatggagccatccacatcttccgggagatcatcaagccagctgagaagagcctgcacgagaagctgaagcaggacaagcgcttcagcaccttcctgagcctgctggaggccgctgacctgaaggagctgctgacccagcccggggactggaccctgtttgtgcccaccaatgatgccttcaagggcatgaccagcgaggagaaggagatcctgatccgggacaagaatgccctgcagaacatcatcctgtaccacctgaccccaggagtcttcatcggcaaaggatttgagcccggggtgaccaacatcctgaagaccacccagggcagcaagatcttcctgaaggaggtgaatgacaccctgctggtgaatgagctgaagagcaaggagagtgacatcatgaccaccaacggggtcatccacgtggtggacaagctgctgtacccagctgacacccctgtgggcaatgaccagctgctggagatcctgaacaagctgatcaagtacatccagatcaagtttgtgcggggcagcaccttcaaggagatccctgtgacagtgtacaccaccaagatcatcaccaaggtggtggagcccaagatcaaggtgattgagggcagcctgcagcccatcatcaagacagagggccccaccctgaccaaggtgaagattgaaggagagcctgagttccgcctcatcaaggagggggagaccatcacagaggtgattcatggagagcccatcatcaagaagtacaccaagatcattgatggagtgcctgtggagatcacagagaaggagacccgggaggagcgcatcatcaccggccctgagatcaagtacacccgcatcagcactggaggaggagaaacagaggagaccctgaagaagctgctgcaggaggaggtgaccaaggtgaccaagttcattgaaggaggagatggccacctgtttgaagatgaggagatcaagaggctgctgcagggcgacacccctgtgaggaagctgcaggccaacaagaaggtgcagggcagcagaagaaggctgcgggagggccgcagccagtag

SEQ ID NO: 165412 - DNA, 2511 bp, Artificial Sequence
  derived and/or modified sequence
atgatccccttcctgcccatgttcagcctgctgctgctgctgatcgttaatcctattaacgccaataatcattatgacaagattctcgctcactcgcggattcgtgggcgggaccaaggacctaatgtgtgcgcccttcaacaaattctgggcacaaagaaaaagtatttttccacatgcaagaattggtacaaaaagtcaatctgtggacagaagactactgtcctttatgaatgctgtcccggctatatgagaatggaaggcatgaagggctgccctgctgtgttacccatcgaccacgtctatggcaccctggggatcgtgggagccacgacaacacagaggtactcggatgcatccaagctgcgcgaggagatcgaggggaaaggttctttcacatatttcgccccgagtaacgaagcttgggacaatctggacagcgacatacgacgcggactcgagagcaacgtgaatgttgaattactaaatgccctccactcccacatgatcaacaagaggatgcttactaaggatcttaaaaacggcatgatcatcccctcaatgtacaataacctaggtttattcattaaccactaccccaatggcgtggtaacagttaattgtgcaagaataattcatggtaatcaaatcgccaccaacggcgtcgtgcatgtgatcgacagggtactgacccagataggcacgtccatccaggatttcatcgaagcagaggatgacctgagctccttccgagctgcggctatcacttctgacatcctggaggcactaggtagagacggccacttcactctgttcgcccctacaaacgaggccttcgagaagttgcctagaggagtactcgaaaggattatgggtgacaaagttgctagcgaggcgttgatgaaataccacatcctcaacactctgcaatgctctgagagcattatggggggagctgttttcgagacactggaaggcaacaccatcgagattggatgcgacggagacagcataaccgtgaacgggatcaagatggtgaataaaaaagatatcgtgaccaacaacggcgtcattcacctgattgatcaggtgctgatacctgactcagctaaacaggttatagaactggcaggaaagcagcagactacatttaccgatctcgtggcccagctcgggctggcttctgcccttaggccagatggggaatacaccctcctcgccccagtgaacaatgcttttagtgacgatacactctccatggatcagaggttgctcaaacttatcctgcagaatcatatcctcaaggtcaaagtcggactgaatgagctctataacggacagatactcgagacgattggcggtaaacagctccgtgtgtttgtgtatcggaccgcagtctgcattgagaatagctgcatggaaaagggctctaagcaggggaggaacggtgcgattcacatctttagagaaatcattaaacccgcggagaagtctttgcatgagaagctgaagcaggataagcggttctcgacgttcctcagtcttctcgaagccgcagatctaaaagagctgttgacccaacccggcgactggaccttgttcgtgcctacgaatgacgcttttaaggggatgacctctgaagagaaagagatcctgattcgcgacaagaacgctctccagaatatcatcctgtatcacctgacccctggcgtcttcatcggaaagggcttcgagccgggggtcacgaatatactgaagactactcaggggtcgaagatctttctcaaagaagtgaatgatacgttgctcgtgaacgaactgaaaagcaaggaatccgatataatgactactaacggggtgattcacgtggtggacaaacttctgtatcctgccgatacccccgtgggcaacgatcagctcttggagatcctgaacaagctgattaagtacatacagattaagttcgtcaggggttctacctttaaagaaatccctgttaccgtgtacacgacaaaaatcattacaaaggtagtggaaccgaagattaaggtgatcgaaggaagcttgcagccaatcattaagacagaaggcccaacgctgacaaaggtgaaaatagaaggggagccggagttcagactaatcaaggagggggaaactatcacagaggtgattcacggggaaccaataatcaagaagtacaccaaaatcattgacggcgtaccagtcgagattacagagaaggaaactagggaggaacgcattatcacaggcccagagattaagtacacccgtatttccaccggaggcggcgaaaccgaggagactctgaagaaactgcttcaggaggaagtgaccaaggtcacgaagtttatagaagggggcgatggacacctgttcgaagatgaggagatcaagcgtctgctgcaaggcgacaccccagttcggaaattgcaggcgaataagaaagtccagggatctagaaggcgtcttagagaaggccgctcccagtag

SEQ ID NO: 165413 - DNA, 3373 bp, Artificial Sequence
  derived and/or modified sequence
agactctcaggttgatgcagtgttccctcccacaactctgacatgtatataaattctgagctctccaaagcccactgccagttctcttcggggactaactgcaacggagagactcaagatgattccctttttacccatgttttctctactattgctgcttattgttaaccctataaacgccaacaatcattatgacaagatcttggctcatagtcgtatcaggggtcgggaccaaggcccaaatgtctgtgcccttcaacagattttgggcaccaaaaagaaatacttcagcacttgtaagaactggtataaaaagtccatctgtggacagaaaacgactgtgttatatgaatgttgccctggttatatgagaatggaaggaatgaaaggctgcccagcagttttgcccattgaccatgtttatggcactctgggcatcgtgggagccaccacaacgcagcgctattctgacgcctcaaaactgagggaggagatcgagggaaagggatccttcacttactttgcaccgagtaatgaggcttgggacaacttggattctgatatccgtagaggtttggagagcaacgtgaatgttgaattactgaatgctttacatagtcacatgattaataagagaatgttgaccaaggacttaaaaaatggcatgattattccttcaatgtataacaatttggggcttttcattaaccattatcctaatggggttgtcactgttaattgtgctcgaatcatccatgggaaccagattgcaacaaatggtgttgtccatgtcattgaccgtgtgcttacacaaattggtacctcaattcaagacttcattgaagcagaagatgacctttcatcttttagagcagctgccatcacatcggacatattggaggcccttggaagagacggtcacttcacactctttgctcccaccaatgaggcttttgagaaacttccacgaggtgtcctagaaaggatcatgggagacaaagtggcttccgaagctcttatgaagtaccacatcttaaatactctccagtgttctgagtctattatgggaggagcagtctttgagacgctggaaggaaatacaattgagataggatgtgacggtgacagtataacagtaaatggaatcaaaatggtgaacaaaaaggatattgtgacaaataatggtgtgatccatttgattgatcaggtcctaattcctgattctgccaaacaagttattgagctggctggaaaacagcaaaccaccttcacggatcttgtggcccaattaggcttggcatctgctctgaggccagatggagaatacactttgctggcacctgtgaataatgcattttctgatgatactctcagcatggatcagcgcctccttaaattaattctgcagaatcacatattgaaagtaaaagttggccttaatgagctttacaacgggcaaatactggaaaccatcggaggcaaacagctcagagtcttcgtatatcgtacagctgtctgcattgaaaattcatgcatggagaaagggagtaagcaagggagaaacggtgcgattcacatattccgcgagatcatcaagccagcagagaaatccctccatgaaaagttaaaacaagataagcgctttagcaccttcctcagcctacttgaagctgcagacttgaaagagctcctgacacaacctggagactggacattatttgtgccaaccaatgatgcttttaagggaatgactagtgaagaaaaagaaattctgatacgggacaaaaatgctcttcaaaacatcattctttatcacctgacaccaggagttttcattggaaaaggatttgaacctggtgttactaacattttaaagaccacacaaggaagcaaaatctttctgaaagaagtaaatgatacacttctggtgaatgaattgaaatcaaaagaatctgacatcatgacaacaaatggtgtaattcatgttgtagataaactcctctatccagcagacacacctgttggaaatgatcaactgctggaaatacttaataaattaatcaaatacatccaaattaagtttgttcgtggtagcaccttcaaagaaatccccgtgactgtctatacaactaaaattataaccaaagttgtggaaccaaaaattaaagtgattgaaggcagtcttcagcctattatcaaaactgaaggacccacactaacaaaagtcaaaattgaaggtgaacctgaattcagactgattaaagaaggtgaaacaataactgaagtgatccatggagagccaattattaaaaaatacaccaaaatcattgatggagtgcctgtggaaataactgaaaaagagacacgagaagaacgaatcattacaggtcctgaaataaaatacactaggatttctactggaggtggagaaacagaagaaactctgaagaaattgttacaagaagaggtcaccaaggtcaccaaattcattgaaggtggtgatggtcatttatttgaagatgaagaaattaaaagactgcttcagggagacacacccgtgaggaagttgcaagccaacaaaaaagttcaaggatctagaagacgattaagggaaggtcgttctcagtgaaaatccaaaaaccagaaaaaaatgtttatacaaccctaagtcaataacctgaccttagaaaattgtgagagccaagttgacttcaggaactgaaacatcagcacaaagaagcaatcatcaaataattctgaacacaaatttaatatttttttttctgaatgagaaacatgagggaaattgtggagttagcctcctgtggtaaaggaattgaagaaaatataacaccttacaccctttttcatcttgacattaaaagttctggctaactttggaatccattagagaaaaatccttgtcaccagattcattacaattcaaatcgaagagttgtgaactgttatcccattgaaaagaccgagccttgtatgtatgttatggatacataaaatgcacgcaagccattatctctccatgggaagctaagttataaaaataggtgcttggtgtacaaaactttttatatcaaaaggctttgcacatttctatatgagtgggtttactggtaaattatgttattttttacaactaattttgtactctcagaatgtttgtcatatgcttcttgcaatgcatattttttaatctcaaacgtttcaataaaaccatttttcagatataaagagaattacttcaaattgagtaattcagaaaaactcaagatttaagttaaaaagtggtttggacttgggaacaggactttatacctcttttactgtaacaagtactcattaaaggaaattgaat

SEQ ID NO: 165414 - DNA, 1952 bp, Artificial Sequence
  derived and/or modified sequence
acaccacagacaaactgcccaaaccagagatggaaaagaaatccataggaataaagatacattgtattcagaggaaaatgacaagagagtcaacttttatcagaaacattgcaatccagaaaataaaagaaaaaaacttataataactgccaacaagaaaaagtcaacctagaattttcttgaatagaaaatattcttctaaaaattagatgaaacaaaaataagtaaaagctgagaaaatgtgtcactagaaactctctttgtaagaaatgcaaaaggaaattcttcaagctgagcaaaatgataccaagaaatctggatctactagaaggaatggaaagcacacaaatgcccaaatgtctgtgcccttcaacagattttgggcaccaaaaagaaatacttcagcacttgtaagaactggtataaaaagtccatctgtggacagaaaacgactgtgttatatgaatgttgccctggttatatgagaatggaaggaatgaaaggctgcccagcagttttgcccattgaccatgtttatggcactctgggcatcgtgggagccaccacaacgcagcgctattctgacgcctcaaaactgagggaggagatcgagggaaagggatccttcacttactttgcaccgagtaatgaggcttgggacaacttggattctgatatccgtagaggtttggagagcaacgtgaatgttgaattactgaatgctttacatagtcacatgattaataagagaatgttgaccaaggacttaaaaaatggcatgattattccttcaatgtataacaatttggggcttttcattaaccattatcctaatggggttgtcactgttaattgtgctcgaatcatccatgggaaccagattgcaacaaatggtgttgtccatgtcattgaccgtgtgcttacacaaattggtacctcaattcaagacttcattgaagcagaagatgacctttcatcttttagagcagctgccatcacatcggacatattggaggcccttggaagagacggtcacttcacactctttgctcccaccaatgaggcttttgagaaacttccacgaggtgtcctagaaaggatcatgggagacaaagtggcttccgaagctcttatgaagtaccacatcttaaatactctccagtgttctgagtctattatgggaggagcagtctttgagacgctggaaggaaatacaattgagataggatgtgacggtgacagtataacagtaaatggaatcaaaatggtgaacaaaaaggatattgtgacaaattggtgtgatccatttgattgatcaggtcctaattcctgattctgccaaacaagttattgagctggctggaaaacagcaaaccaccttcacggatcttgtggcccaattaggcttggcatctgctctgaggccagatggagaatacactttgctggcacctgtgaataatgcattttctgatgatactctcagcatggatcagcgcctccttaaattaattctgcagaatcacatattgaaagtaaaagttggccttaatgagctttacaacgggcaaatactggaaaccatcggaggcaaacagctcagagtcttcgtatatcgtacagctgtctgcattgaaaattcatgcatggagaaagggagtaagcaagggagaaacggtgcgattcacatattccgcgagatcatcaagccagcagagaaatccctccatgaaaagttaaaacaagataagcgctttagcaccttcctcagcctacttgaagctgcagacttgaaagagctcctgacacaacctggagactggacattatttgtgccaaccaatgatgcttttaagggaatgactagtgaagaaaaagaaattctgatacgggacaaaaatgctcttcaaaacatcattctttatcacctgacaccaggagttttcattgga

SEQ ID NO: 165415 - DNA, 2511 bp, Artificial Sequence
  derived and/or modified sequence
atgattccatttctgcccatgttctctttgctcctgctgctgatcgtgaatcccatcaacgccaataaccattacgacaaaatactcgctcactcccgcattagaggcagagaccaaggcccaaacgtgtgcgctctgcagcaaatcctgggcaccaaaaaaaaatacttttccacatgcaaaaactggtacaagaaatcaatctgtggccaaaagacaactgtcctgtacgagtgttgccctggatacatgcggatggaagggatgaaaggctgccccgcagtcctgcccatcgaccatgtctatggcacgcttggtatcgtaggtgccaccacgacgcagcgatacagcgacgccagtaagctccgtgaggagattgaggggaagggctcgtttacctacttcgcaccttctaatgaggcttgggacaacctcgatagcgacatccgcaggggactcgaatccaacgtgaacgtggaactcctgaatgccctgcattcccacatgataaacaagagaatgctcactaaagacctcaaaaatggcatgatcatccctagcatgtacaacaatttgggcctattcataaatcattatcctaatggggtggtcaccgtgaactgtgctaggatcatccacgggaatcagatcgccaccaacggggtcgtacatgtgattgacagagtgctcacccaaatcggcactagcatccaagacttcattgaagcagaggacgatctcagcagcttccgcgcagctgcgatcacttccgacatcctggaggcgcttggaagagacgggcattttaccttgttcgctcccaccaatgaagctttcgaaaagctgccacgtggcgtgcttgagcgaataatgggcgataaagtggcttccgaagccctgatgaagtaccatatcctgaatactctccaatgctctgaatctatcatgggcggagcagtgtttgaaacgctggagggtaacaccattgagattggctgcgacggcgactcaataaccgtcaatggtatcaagatggtgaacaagaaagacatcgttacaaacaacggcgtgatccatttgatcgatcaagtgctgatccccgacagcgcgaagcaggtcattgagttggccggaaagcagcagaccacattcacagacctggtcgctcagttgggacttgctagcgcacttaggcccgatggagaatatacgttgcttgcaccagtgaacaatgctttctccgatgatacgctatctatggaccagcgactgcttaaactgattctccaaaaccacatactgaaggtgaaggtgggcctcaacgaactgtacaatggacaaattcttgaaaccattgggggaaagcagttgcgagtgttcgtgtaccgtacagccgtgtgcatcgaaaattcatgtatggagaagggatctaaacaggggcgaaatggtgccatccacatcttcagagagatcatcaagcccgcagagaagagccttcatgaaaaacttaaacaggataagcgcttctcgaccttcctgagcctattggaggcagctgaccttaaggagctattgacccagcctggagactggactcttttcgttcctacaaatgacgcctttaagggcatgactagcgaagagaaggaaatcctaatccgtgataaaaatgctctgcagaatatcattctgtaccacctcacaccaggagtgtttattgggaaagggttcgagcccggagtgaccaatattcttaagaccacacaaggaagcaaaatctttctaaaggaagtgaacgatactcttcttgtgaatgagctgaaaagtaaggagagtgacatcatgacgactaatggggtgattcatgtcgtcgacaaactactctatccagctgatacccccgtaggaaacgatcagttactcgaaatactcaacaagctgataaagtatattcagatcaagtttgtgcgtggcagtacatttaaagaaattccagtgacggtttacacgacgaaaataatcaccaaagtggtggaacccaagatcaaggtaatagaaggttccctgcagccaattattaaaacagaggggccaacgctgacaaaagttaaaattgaaggggaacctgaattccgcctaattaaggagggagaaaccatcaccgaggtgattcacggcgaacccatcatcaagaagtatactaaaataatcgatggagtgccagtggagataacggagaaggagacccgggaagagcggattataacaggacctgaaataaaatacacgcgtatctctacgggcggtggggagaccgaagagaccctaaaaaaactgttgcaggaggaggtcacaaaggtcacaaagtttattgaaggcggtgacgggcatctgtttgaggatgaggagatcaagaggttactacagggcgacacacccgtgaggaaacttcaagccaataagaaagtgcaaggatccagaaggcgactccgagagggtcgatcccaatag

SEQ ID NO: 165416 - DNA, 2511 bp, Artificial Sequence
  derived and/or modified sequence
atgatccccttcctgcccatgttcagcctgctgctgctgctgatcgtgaaccccatcaacgccaacaaccactacgacaagatcctggcccacagcagaatcagaggcagagaccagggccccaacgtgtgcgccctgcagcagatcctgggcaccaagaagaagtacttcagcacctgcaagaactggtacaagaagagcatctgcggccagaagaccaccgtgctgtacgagtgctgccccggctacatgagaatggagggcatgaagggctgccccgccgtgctgcccatcgaccacgtgtacggcaccctgggcatcgtgggcgccaccaccacccagagatacagcgacgccagcaagctgagagaggagatcgagggcaagggcagcttcacctacttcgcccccagcaacgaggcctgggacaacctggacagcgacatcagaagaggcctggagagcaacgtgaacgtggagctgctgaacgccctgcacagccacatgatcaacaagagaatgctgaccaaggacctgaagaacggcatgatcatccccagcatgtacaacaacctgggcctgttcatcaaccactaccccaacggcgtggtgaccgtgaactgcgccagaatcatccacggcaaccagatcgccaccaacggcgtggtgcacgtgatcgacagagtgctgacccagatcggcaccagcatccaggacttcatcgaggccgaggacgacctgagcagcttcagagccgccgccatcaccagcgacatcctggaggccctgggcagagacggccacttcaccctgttcgcccccaccaacgaggccttcgagaagctgcccagaggcgtgctggagagaatcatgggcgacaaggtggccagcgaggccctgatgaagtaccacatcctgaacaccctgcagtgcagcgagagcatcatgggcggcgccgtgttcgagaccctggagggcaacaccatcgagatcggctgcgacggcgacagcatcaccgtgaacggcatcaagatggtgaacaagaaggacatcgtgaccaacaacggcgtgatccacctgatcgaccaggtgctgatccccgacagcgccaagcaggtgatcgagctggccggcaagcagcagaccaccttcaccgacctggtggcccagctgggcctggccagcgccctgagacccgacggcgagtacaccctgctggcccccgtgaacaacgccttcagcgacgacaccctgagcatggaccagagactgctgaagctgatcctgcagaaccacatcctgaaggtgaaggtgggcctgaacgagctgtacaacggccagatcctggagaccatcggcggcaagcagctgagagtgttcgtgtacagaaccgccgtgtgcatcgagaacagctgcatggagaagggcagcaagcagggcagaaacggcgccatccacatcttcagagagatcatcaagcccgccgagaagagcctgcacgagaagctgaagcaggacaagagattcagcaccttcctgagcctgctggaggccgccgacctgaaggagctgctgacccagcccggcgactggaccctgttcgtgcccaccaacgacgccttcaagggcatgaccagcgaggagaaggagatcctgatcagagacaagaacgccctgcagaacatcatcctgtaccacctgacccccggcgtgttcatcggcaagggcttcgagcccggcgtgaccaacatcctgaagaccacccagggcagcaagatcttcctgaaggaggtgaacgacaccctgctggtgaacgagctgaagagcaaggagagcgacatcatgaccaccaacggcgtgatccacgtggtggacaagctgctgtaccccgccgacacccccgtgggcaacgaccagctgctggagatcctgaacaagctgatcaagtacatccagatcaagttcgtgagaggcagcaccttcaaggagatccccgtgaccgtgtacaccaccaagatcatcaccaaggtggtggagcccaagatcaaggtgatcgagggcagcctgcagcccatcatcaagaccgagggccccaccctgaccaaggtgaagatcgagggcgagcccgagttcagactgatcaaggagggcgagaccatcaccgaggtgatccacggcgagcccatcatcaagaagtacaccaagatcatcgacggcgtgcccgtggagatcaccgagaaggagaccagagaggagagaatcatcaccggccccgagatcaagtacaccagaatcagcaccggcggcggcgagaccgaggagaccctgaagaagctgctgcaggaggaggtgaccaaggtgaccaagttcatcgagggcggcgacggccacctgttcgaggacgaggagatcaagagactgctgcagggcgacacccccgtgagaaagctgcaggccaacaagaaggtgcagggcagcagaagaagactgagagagggcagaagccagtag

SEQ ID NO: 165417 - protein, 103 aa, Artificial Sequence
  derived and/or modified sequence
MAQFVRNLVEKTPALVNAAVTYSKPRLATFWYYAKVELVPPTPAEIPRAIQSLKKIVNSAQTGSFKQLTVKEAVLNGLVATEVLMWFYVGEIIGKRGIIGYDV

SEQ ID NO: 165418 - DNA, 312 bp, Artificial Sequence
  derived and/or modified sequence
atggcccagttcgtgagaaacctggtggagaagacccccgccctggtgaacgccgccgtgacctacagcaagcccagactggccaccttctggtactacgccaaggtggagctggtgccccccacccccgccgagatccccagagccatccagagcctgaagaagatcgtgaacagcgcccagaccggcagcttcaagcagctgaccgtgaaggaggccgtgctgaacggcctggtggccaccgaggtgctgatgtggttctacgtgggcgagatcatcggcaagagaggcatcatcggctacgacgtgtag

SEQ ID NO: 165419 - DNA, 312 bp, Artificial Sequence
  derived and/or modified sequence
atggctcagtttgttagaaatttagtcgaaaaaactccggcgctggtcaatgccgccgttacctatagcaagcctagactggcaaccttctggtactatgccaaggttgagcttgtgccacccactcccgccgagattcccagggccattcagtcccttaagaagattgtaaattccgctcagaccgggtcttttaaacagctgacggttaaagaggcggtgctgaatgggctggtcgcaacagaggtactgatgtggttctacgttggagagatcataggcaagaggggaatcattggatatgatgtgtag

SEQ ID NO: 165420 - DNA, 312 bp, Artificial Sequence
  derived and/or modified sequence
atggcccagtttgtgaggaacctggtggagaagaccccagccctggtgaatgctgctgtgacctacagcaagccccggctggccaccttctggtactatgccaaggtggagctggtgccccccaccccagctgagatcccccgggccatccagagcctgaagaagatcgtgaacagcgcccagacaggcagcttcaagcagctgactgtgaaggaggccgtgctgaatggcctggtggccacagaggtgctgatgtggttctacgtgggggagatcatcggcaagaggggcatcatcggctatgatgtgtag

SEQ ID NO: 165421 - DNA, 312 bp, Artificial Sequence
  derived and/or modified sequence
atggcccagttcgtgcggaacctggtggagaagacccccgccctggttaatgcagccgtcacatactctaaaccccgtcttgctaccttttggtactacgcgaaggtggaactggtcccccctaccccagccgagatccctcgagctattcagtctctaaagaagattgtcaatagcgcccaaaccgggagcttcaagcagctcaccgtcaaagaggccgttttgaacggcctcgtggcaactgaagtcctgatgtggttctatgtgggggagatcattggcaagcggggcatcattggctacgacgtctag

SEQ ID NO: 165422 - DNA, 312 bp, Artificial Sequence
  derived and/or modified sequence
atggctcagttcgtcaggaaccttgtcgagaaaacaccggcactggttaacgccgctgtgacctactccaagccgaggctggctaccttttggtattacgctaaagtggagcttgtgccccctaccccagcagaaatccctcgtgccattcaatctcttaagaagatcgtaaactccgctcagacgggatcattcaagcagctcacagtcaaggaggccgtgctgaatggcctcgttgcaactgaagttttaatgtggttttacgtcggcgaaattatcggcaagagaggtatcatcggttatgacgtctag

SEQ ID NO: 165423 - DNA, 1571 bp, Artificial Sequence
  derived and/or modified sequence
tgattgctcggcccctaactttatatgtttggccttggaccctctctacctctgtacaacgatcgtgttggactagaagaatctcagcgaatccttctccagtactgacttcaaaggttctcagaatcgcggcgaaagcaccctacgcaaaatagcggaggtcggcgccaagaaaagcactgcaggttcagggcgcatgcgcatttccgctccttgccggttttccggacctctacgagtggctgccccacaaaatgcctgcttctctgcggaatcctactgttcttcacatgctctctaataccatcttttcatatccactttctcttccatgttgaaaaattaaattgacaggctggattctgcaaagatctttggacatttaagtatcttcgaccggcgcgaaaagaggcggcctgaccttggaagtgggacggggtcctgcagcgggtccttccggcgggtgacattcagccggcggttcggggcgacggactctccattccagaaccatggcccaatttgtccgtaaccttgtggagaagaccccggcgctggtgaacgctgctgtgacttactcgaagcctcgattggccacattttggtactacgccaaggttgagctggttcctcccacccctgctgagatccctagagctattcagagcctgaaaaaaatagtcaatagtgctcagactggtagcttcaaacagctcacagttaaggaagctgtgctgaatggtttggtggccactgaggtgttgatgtggttttatgtcggagagattataggcaagcggggcatcattggctatgatgtttgaagaccaatctttaacatctgattatatttgatttattatttgagtgttgttggaccatgtgtgatcagactgctatctgaataaaataagatttgtcaaaactcagtgttttctccatcagatactccatgaaaggtcacaatttctcttgatattaagctgggttgtctttaaacaaccctaaatacacgtctgtttagcccgcaattggaaaggatatatgtggcaatattaacctggtacatgaatatatggggataacattttaatttgaaggtttggaatatatatatttaagctttatttccagaacagtgagggttaggtcttgggaaaactataacttgccaaagtagaagaaatagtagtaccatatgccaaagtgatagagatgaatcatgtcagtagttagaataacatttcaactgttttctttgctaaaatcacagaaagaccctattgacaacatctatgtctgtaaaaatgttagagtacttgtcatcttgaatatagcctccccaagagagaacagggtggtattctaagtatgtttctttgtaacatctttagcagtaggacagagccatacatgtgaaatctgatttttatgtgtgttattcgtttgtctggttttactacctttgcaaaaacaaaataccccaaagatatttaaacaaggttataatttagcatcttccctggatctaaatagtatattatatcctgaaataaatgaaatgattgcta

SEQ ID NO: 165424 - protein, 203 aa, Artificial Sequence
  derived and/or modified sequence
MGGSLRVAVLGAPGVGKTAIIRQFLFGDYPERHRPTDGPRLYRPAVLLDGAVYDLSIRDGDVAGPGSSPGGPEEWPDAKDWSLQDTDAFVLVYDICSPDSFDYVKALRQRIAETRPAGAPEAPILVVGNKRDRQRLRFGPRRALAALVRRGWRCGYLECSAKYNWHVLRLFRELLRCALVRARPAHPALRLQGALHPARCSLM

SEQ ID NO: 165425 - protein, 115 aa, Artificial Sequence
  derived and/or modified sequence
MGGSLRVAVLGAPGVGKTAIIRQFLFGDYPERHRPTDGPRLYRPAVLLDGAVYDLSIRDGDVAGPGSSPGGPEEWPDAKDWSLQDTDAFVLVYDICSPDSFDYVKALRQRIAETR

SEQ ID NO: 165426 - DNA, 348 bp, Artificial Sequence
  derived and/or modified sequence
atgggcggcagcctgagagtggccgtgctgggcgcccccggcgtgggcaagaccgccatcatcagacagttcctgttcggcgactaccccgagagacacagacccaccgacggccccagactgtacagacccgccgtgctgctggacggcgccgtgtacgacctgagcatcagagacggcgacgtggccggccccggcagcagccccggcggccccgaggagtggcccgacgccaaggactggagcctgcaggacaccgacgccttcgtgctggtgtacgacatctgcagccccgacagcttcgactacgtgaaggccctgagacagagaatcgccgagaccagatag

SEQ ID NO: 165427 - DNA, 348 bp, Artificial Sequence
  derived and/or modified sequence
atggggggttctttgagggtggccgtccttggagctccaggtgtgggaaaaacggctatcatccgtcagttcctttttggcgattacccggaaagacaccgtccaacagatggtccacggctgtaccgtcccgccgtattgctagacggtgcagtgtacgacttatctattagagatggagatgtagcaggcccaggatctagccctggaggacctgaagagtggcccgacgccaaggattggtctctacaggataccgacgccttcgttctggtttatgatatatgctctcccgactcctttgattatgtgaaagccctccgacagcgcatagctgagaccaggtag

SEQ ID NO: 165428 - DNA, 348 bp, Artificial Sequence
  derived and/or modified sequence
atgggcggcagcctgcgggtggccgtgctgggcgcccctggggtgggcaagacagccatcatccggcagttcctgtttggagactacccagagcggcaccggcccacagatggcccccggctgtacagacctgctgtgctgctggatggagctgtgtatgacctgagcatcagagatggagatgtggccggccctggcagcagccctgggggccctgaggagtggccagatgccaaggactggagcctgcaggacacagatgcctttgtgctggtgtatgacatctgcagcccagacagctttgattatgtgaaggccctgcggcagagaattgctgagaccaggtag

SEQ ID NO: 165429 - DNA, 348 bp, Artificial Sequence
  derived and/or modified sequence
atgggcggcagcctgcgggtggccgtgctgggcgcccccggcgtggggaagaccgccatcatccgtcagttccttttcggagactaccctgagcggcacagaccgacggacggacctaggctgtaccgaccggccgtgctgcttgatggcgcagtttacgacctgtccatccgggatggagatgtcgcgggtccaggatcttcacctgggggccccgaggaatggccggatgccaaggattggagcctgcaagataccgacgccttcgtcctggtgtatgacatctgctctcctgacagcttcgactatgtcaaggcattaagacagcgcatcgctgagacccggtag

SEQ ID NO: 165430 - DNA, 348 bp, Artificial Sequence
  derived and/or modified sequence
atgggcggttcactgcgagtagccgttcttggggctcccggtgtgggaaagaccgccattataagacaatttctgtttggtgactatccggagagacatcggcctacagatggaccaaggctgtaccgcccagcagtgctgctcgacggagctgtctacgatctatctataagagacggggatgtggctggaccgggatcaagccccggaggtccagaagagtggccggatgcaaaagattggagcctccaggacaccgacgcattcgtcttagtgtatgatatctgcagccccgattcgttcgattatgttaaggcactgaggcagaggatcgcggaaacacggtag

SEQ ID NO: 165431 - DNA, 1490 bp, Artificial Sequence
  derived and/or modified sequence
ggttacctcatcgccgcctccgggaggccccgctcgctcgcgccggcggctggggcggcgactccaggcgcggaagcgagagaaggatagaggcacagaggctccgggaggcagcgctgccccccgcgccccgcaccgctgcgggacccgcgccgcgagaggggcggacttcggcgcctcgcgcgtccgccggcgcctgggttggcgctgcggggcggaggcggtgtctgagcgccgctccggctctgctctctctcgagcttcggcacccgcccgagccgctcgcgcgcccgccacctgtctgcccactcggctgtctgtctgccctcccgccgccagctcctgcctcgggcctgccctctccggtctcggtgctccgaggggcgacgagaagcgcgacggggccgtggcgcaccgggcagggcgcgcggggcgcacggcctgggggcgcacggtgcggcgccggcccatgaggctttccagcgcggggagcgacagcgccggccggccatggggggtagcctgcgggtggccgttctaggcgccccgggcgtgggcaagacggccatcatccgccagttcctgttcggtgactaccccgagcgccaccggcccacggacgggccgcgcctctaccgacccgcggtgctgctcgacggcgccgtctacgacttgagcatccgcgacggcgacgtcgctggccccggctcgagccccgggggtccggaggagtggccagacgctaaggactggagcttgcaggacacggacgccttcgtgctcgtctacgacatctgcagcccggacagtttcgactacgtgaaggccctgcggcagcgcatcgcggagaccaggccggcgggcgcgcccgaagcgcccatcctcgtggtaggcaacaagcgggacaggcagcggctgcgcttcggaccgcggcgcgcgctggccgccctagtgcgcaggggctggcgctgcggctacctcgagtgctccgccaagtacaactggcacgtgctgcgtctcttccgcgagctgctgcgctgcgctctggtgcgcgcgcgccctgcacacccggccctgcgcctgcagggggcgctgcatcccgcgcgctgcagcctcatgtgacccgatcggacagtgccatccatgggccccaccttgtgactgggacaatcagggacctggattggacgggatcgcccaacttcactgggactggacagggaagtctccgccctgattggatgaggaaagctccaacccagtctcctaagcgactggcccccttttgaacctcattggacccaaccaggtcccaagctccattggagatgaccagtcctttctgggacctcaatgggtcacaatcccattggatggaaaggacttggctatgaacttgactggaaacacgcagcctgctcctggagcttcactggacatattctttatgccacacctaccacgggataataaaagggaaaataatttga

SEQ ID NO: 165432 - DNA, 1720 bp, Artificial Sequence
  derived and/or modified sequence
caggcgcggaagcgagagaaggatagaggcacagaggctccgggaggcagcgctgccccccgcgccccgcaccgctgcgggacccgcgccgcgagaggggcggacttcggcgcctcgcgcgtccgccggcgcctgggttggcgctgcggggcggaggcggtgtctgagcgccgctccggctctgctctctctcgagcttcggcacccgcccgagccgctcgcgcgcccgccacctgtctgcccactcggctgtctgtctgccctcccgccgccagctcctgcctcgggcctgccctctccggtctcggtgctccgaggggcgacgagaagcgcgacggggccgtggcgcaccgggcagggcgcgcggggcgcacggcctgggggcgcacggtgcggcgccggcccatgaggctttccagcgcggggagcgacagcgccggccggccatggggggtagcctgcgggtggccgttctaggcgccccgggcgtgggcaagacggccatcatccgccagttcctgttcggtgactaccccgagcgccaccggcccacggacgggccgcgcctctaccgacccgcggtgctgctcgacggcgccgtctacgacttgagcatccgcgacggcgacgtcgctggccccggctcgagccccgggggtccggaggagtggccagacgctaaggactggagcttgcaggacacggacgccttcgtgctcgtctacgacatctgcagcccggacagtttcgactacgtgaaggccctgcggcagcgcatcgcggagaccaggtaggggcccggcagttctggcggtggggagctaggacaggtctggcagggcctttgcctgaggagagtgtgtagggtctcccaacgtcgtgggccgggtcttaggccttcgcccgtgggaaggtcttaagctgtatgtgctctttggcccacatgggcctggggtttcgttggggcggcggggggggcggtgtctctggccgtaggaagggaatgcgcctgcgtgtgtatacccactgggggaattctccggccgtggggtccccgcgtctctcatctccattcggcccccaggccggcgggcgcgcccgaagcgcccatcctcgtggtaggcaacaagcgggacaggcagcggctgcgcttcggaccgcggcgcgcgctggccgccctagtgcgcaggggctggcgctgcggctacctcgagtgctccgccaagtacaactggcacgtgctgcgtctcttccgcgagctgctgcgctgcgctctggtgcgcgcgcgccctgcacacccggccctgcgcctgcagggggcgctgcatcccgcgcgctgcagcctcatgtgacccgatcggacagtgccatccatgggccccaccttgtgactgggacaatcagggacctggattggacgggatcgcccaacttcactgggactggacagggaagtctccgccctgattggatgaggaaagctccaacccagtctcctaagcgactggcccccttttgaacctcattggacccaaccaggtcccaagctccattggagatgaccagtcctttctgggacctcaatgggtcacaatcccattggatggaaaggacttggctatgaacttgactggaaacacgcagcctgctcctggagcttcactggacatattctttatgccacacctaccacgggataataaaagggaaaataatttga

SEQ ID NO: 165433 - DNA, 612 bp, Artificial Sequence
  derived and/or modified sequence
atgggtggtagcctgcgcgtggccgtccttggggcacccggggttgggaagaccgctattatccgccagttccttttcggcgattaccctgaacgtcaccggcctacagatgggcctcggttgtaccgtccagcagttctgctggacggcgcagtgtacgatctgagtattcgggacggggatgtagctggacccggtagttcccccggcggcccagaagaatggcccgacgccaaagactggtccctccaggatacagatgctttcgtgctagtttatgacatttgctctccagatagcttcgactacgtcaaggcactgcggcagcggattgccgagactagacctgccggtgctccagaagctcctatactggtagttggcaataaacgagatcgccagcggctgagatttggaccgaggcgggcgctggccgccctggttcgccgagggtggcgctgcggttatttggaatgtagcgcgaagtacaattggcatgttttgaggctgttccgggagctgctccgctgcgcgctagtccgggcaaggcccgcacatccggctttacggcttcagggcgccttacatcctgcacgatgtagtttgatgtag

SEQ ID NO: 165434 - DNA, 612 bp, Artificial Sequence
  derived and/or modified sequence
atgggcggcagcctgcgggtggccgtgctgggcgcccctggggtgggcaagacagccatcatccggcagttcctgtttggagactacccagagcggcaccggcccacagatggcccccggctgtacagacctgctgtgctgctggatggagctgtgtatgacctgagcatcagagatggagatgtggccggccctggcagcagccctgggggccctgaggagtggccagatgccaaggactggagcctgcaggacacagatgcctttgtgctggtgtatgacatctgcagcccagacagctttgattatgtgaaggccctgcggcagagaattgctgagaccaggcctgctggggcccctgaggcccccatcctggtggtgggcaacaagagggaccggcagaggctgcgcttcggcccccggcgggccctggccgccctggtgagaagaggctggaggtgtggctacctggagtgcagcgccaagtacaactggcacgtgctgcggctcttccgggagctgctgcgctgtgccctggtgcgggcccggcctgcccacccagccctgcggctgcagggcgccctgcacccagcccgctgcagcctgatgtag

SEQ ID NO: 165435 - DNA, 612 bp, Artificial Sequence
  derived and/or modified sequence
atgggcggcagcctgcgggtggccgtgctgggcgcccccggcgtgggtaaaacggccattataagacagtttctgttcggagattatccggaacggcaccggcctacggatgggccaaggctttacaggcccgctgtcctgctggatggagctgtatatgatttatccatccgggacggcgacgtggcgggcccaggctcatcccccggtggccctgaggagtggcccgatgctaaggattggtccctgcaggacactgacgccttcgtcctcgtgtatgatatttgctcaccagactctttcgactacgtcaaagcattgcggcaacgcatcgcggaaacacgccccgcaggggctccagaggcccccattttggtggtggggaataaacgcgacagacagcgcctgagattcggaccccgacgggccctcgccgcactcgtaagacgggggtggcgttgcggatacctcgagtgcagtgccaagtacaattggcatgtattacgactgttccgggagctactcagatgtgccctggtaagagctcgccctgcgcacccagcactgcgcttacagggtgccctccaccccgcaagatgcagccttatgtag

SEQ ID NO: 165436 - DNA, 612 bp, Artificial Sequence
  derived and/or modified sequence
atgggtggaagtctgcgagtggcagtcttgggcgcacctggcgttggcaaaaccgctataattcggcaatttctgtttggggactaccctgagaggcacaggccgactgacgggcctagactctatcgaccagccgtgctgttagacggcgcagtttacgaccttagcatcagggacggtgatgtggccggaccaggctcctctcctggcggtccagaggagtggccagatgccaaggattggtccctgcaagatacagacgcctttgttctggtatacgacatctgctccccagactctttcgattacgtcaaggctcttcggcagcgcattgccgagacccgacccgctggtgcacccgaggctcccatcctggtagtgggaaacaaacgggaccgtcagcgtttgcgttttggtccgaggcgggctctggcagcccttgtgaggcgcggatggagatgtggctatttggaatgctcagctaaatacaactggcatgtgctgcgactctttcgtgagctcttacggtgtgcactggtccgggctcggcctgcacatcccgctctccgactgcaaggagcacttcatcccgctaggtgttccctgatgtag

SEQ ID NO: 165437 - DNA, 612 bp, Artificial Sequence
  derived and/or modified sequence
atgggcggcagcctgagagtggccgtgctgggcgcccccggcgtgggcaagaccgccatcatcagacagttcctgttcggcgactaccccgagagacacagacccaccgacggccccagactgtacagacccgccgtgctgctggacggcgccgtgtacgacctgagcatcagagacggcgacgtggccggccccggcagcagccccggcggccccgaggagtggcccgacgccaaggactggagcctgcaggacaccgacgccttcgtgctggtgtacgacatctgcagccccgacagcttcgactacgtgaaggccctgagacagagaatcgccgagaccagacccgccggcgcccccgaggcccccatcctggtggtgggcaacaagagagacagacagagactgagattcggccccagaagagccctggccgccctggtgagaagaggctggagatgcggctacctggagtgcagcgccaagtacaactggcacgtgctgagactgttcagagagctgctgagatgcgccctggtgagagccagacccgcccaccccgccctgagactgcagggcgccctgcaccccgccagatgcagcctgatgtag

SEQ ID NO: 165438 - protein, 335 aa, Artificial Sequence
  derived and/or modified sequence
MVRPVRHKKPVNYSQFDHSDSDDDFVSATVPLNKKSRTAPKELKQDKPKPNLNNLRKEEIPVQEKTPKKRMALDDKLYQRDLEVALALSVKELPTVTTNVQNSQDKSIEKHGSSKIETMNKSPHISNCSVASDYLDLDKITVEDDVGGVQGKRKAASKAAAQQRKILLEGSDGDSANDTEPDFAPGEDSEDDSDFCESEDNDEDFSMRKSKVKEIKKKEVKVKSPVEKKEKKSKSKCNALVTSVDSAPAAVKSESQSLPKKVSLSSDTTRKPLEIRSPSAESKKPKWVPPAASGGSRSSSSPLVVVSVKSPNQSLRLGLSRLARVKPLHPNATST

SEQ ID NO: 165439 - protein, 233 aa, Artificial Sequence
  derived and/or modified sequence
MNKSPHISNCSVASDYLDLDKITVEDDVGGVQGKRKAASKAAAQQRKILLEGSDGDSANDTEPDFAPGEDSEDDSDFCESEDNDEDFSMRKSKVKEIKKKEVKVKSPVEKKEKKSKSKCNALVTSVDSAPAAVKSESQSLPKKVSLSSDTTRKPLEIRSPSAESKKPKWVPPGMAYLSSRTGAWKIITAASGGSRSSSSPLVVVSVKSPNQSLRLGLSRLARVKPLHPNATST

SEQ ID NO: 165440 - DNA, 1008 bp, Artificial Sequence
  derived and/or modified sequence
atggttcgccccgtgaggcacaaaaaacccgtcaattactcacagttcgaccactctgacagcgacgacgacttcgtttctgcgaccgtgccattgaataagaaaagccggacagcgcctaaggagctgaagcaggacaaacccaagcccaatcttaacaacttgcggaaggaagagatacctgtgcaagagaagacccctaaaaaacgcatggcgctggatgataagctttatcagcgggacctggaagttgcgcttgctttatctgttaaggaactgcctactgtgactacgaacgttcagaacagccaggataagtccattgagaagcacggctcctctaagatagagacaatgaataagtctcctcacatttccaattgctcagtcgcatctgattacctggacttggataagatcactgtagaggacgatgtgggcggggtacagggcaaacggaaagccgcttcaaaagcagccgcacagcagagaaaaatcctgctggagggctccgacggggactccgctaacgacacagagcctgatttcgctcccggagaggacagcgaggacgacagcgacttttgtgagtcggaggataatgatgaggacttttccatgaggaagtccaaggtgaaagagattaaaaagaaggaagtgaaagtgaaaagtcctgtggagaaaaaggagaagaagtcaaaatcaaagtgcaacgcactagtgacctcagtggactctgcccccgcagccgtaaaaagtgaatcacagtctctccctaaaaaggtttccttgtcatccgacacgactaggaagccacttgagatccgaagcccatccgccgaaagtaagaagcctaaatgggtgccacccgctgccagcggaggttcccggtcttcgtcaagtcctctggtggtagtttctgtcaagtcccctaatcagagcttgcgtttgggactctcgcggttggcccgcgtgaaaccactgcacccaaatgcaacaagtacatag

SEQ ID NO: 165441 - DNA, 702 bp, Artificial Sequence
  derived and/or modified sequence
atgaataaatcacctcatatcagcaactgtagtgtcgcctccgactatttggatctggacaaaatcacggtggaagacgacgtgggcggagttcaggggaagaggaaggccgcttctaaagccgctgcccagcaacggaaaatcctacttgaagggtctgatggtgattccgccaacgacacggagcccgacttcgctcccggagaggattcagaagacgacagcgatttctgcgaatctgaggataacgacgaggatttttccatgcggaaatctaaagtcaaagagattaaaaaaaaagaagtcaaggtgaagtcgcccgtggagaagaaggagaaaaagtcaaagagcaaatgtaacgcattagtgacaagcgtagactccgcaccggcggccgtgaaatccgaatctcagtccctcccgaagaaagtgtcattatcctccgatacaacacgcaagcctttggagatacggtccccaagtgcagaatccaaaaaacccaagtgggttcctcctggaatggcctacctgtcctcccggaccggcgcttggaagatcattacagctgcttcaggcgggtcgcggtcctcttcaagccccctggtcgtggtgtcagtgaaatccccaaatcagtctctgcgactgggtcttagcaggttggctcgggtgaagccccttcaccccaatgctacttctacttag

SEQ ID NO: 165442 - DNA, 1008 bp, Artificial Sequence
  derived and/or modified sequence
atggtgcggcctgtgcgccacaagaagcctgtgaactacagccagtttgaccacagcgacagtgatgatgactttgtgtctgccaccgtgcccctgaacaagaagagcaggacagcccccaaggagctgaagcaggacaagcccaagcccaacctgaacaacctgaggaaggaggagatccctgtgcaggagaagacccccaagaagaggatggccctggatgacaagctgtaccagagggacctggaggtggccctggccctgtctgtgaaggagctgcccaccgtgaccaccaacgtgcagaacagccaggacaagagcattgagaagcacggcagcagcaagattgagaccatgaacaagagcccccacatcagcaactgcagcgtggccagtgactacctggacctggacaagatcaccgtggaggatgatgtgggcggcgtgcagggcaagaggaaggccgccagcaaggccgccgcccagcagaggaagatcctgctggagggcagtgatggagacagcgccaatgacacagagccagactttgcccctggagaagattctgaagatgacagcgacttctgtgagagtgaagataatgatgaggacttctccatgaggaagagcaaggtgaaggagatcaagaagaaggaggtgaaggtgaagagccctgtggagaagaaggagaagaagagcaagagcaagtgcaatgccctggtgacctctgtggacagcgccccagctgctgtgaagtctgagagccagagcctgcccaagaaggtgtccctgagcagtgacaccaccaggaagcccctggagatccgcagccccagcgctgagagcaagaagcccaagtgggtgcccccagctgccagcggcggcagccgcagcagcagcagccccctggtggtggtgtctgtgaagagccccaaccagagcctgcggctgggcctgagccggctggcccgggtgaagcccctgcaccccaatgccaccagcacctag

SEQ ID NO: 165443 - DNA, 702 bp, Artificial Sequence
  derived and/or modified sequence
atgaacaagagcccccacatcagcaactgcagcgtggccagtgactacctggacctggacaagatcaccgtggaggatgatgtgggcggcgtgcagggcaagaggaaggccgccagcaaggccgccgcccagcagaggaagatcctgctggagggcagtgatggagacagcgccaatgacacagagccagactttgcccctggagaagattctgaagatgacagcgacttctgtgagagtgaagataatgatgaggacttctccatgaggaagagcaaggtgaaggagatcaagaagaaggaggtgaaggtgaagagccctgtggagaagaaggagaagaagagcaagagcaagtgcaatgccctggtgacctctgtggacagcgccccagctgctgtgaagtctgagagccagagcctgcccaagaaggtgtccctgagcagtgacaccaccaggaagcccctggagatccgcagccccagcgctgagagcaagaagcccaagtgggtgcccccaggcatggcctacctgagcagcaggactggagcctggaagatcatcacagctgccagcggcggcagccgcagcagcagcagccccctggtggtggtgtctgtgaagagccccaaccagagcctgcggctgggcctgagccggctggcccgggtgaagcccctgcaccccaatgccaccagcacctag

SEQ ID NO: 165444 - DNA, 1008 bp, Artificial Sequence
  derived and/or modified sequence
atggtgcggcccgtgcggcacaagaagcccgtgaactacagccagtttgatcactccgacagcgacgatgatttcgtatcagctacggtgccgctgaataagaaatcccgcacagcccccaaagagctgaaacaggacaaaccaaagcccaatctcaacaaccttaggaaggaggagatacctgtccaggaaaagacccccaagaaaagaatggcactggatgataagctctaccaacgtgatctggaggtcgcattggcactttctgttaaggagttgcctaccgtgacaaccaatgtacagaactcccaggataaaagtatagagaaacacggatcgtccaaaatcgagactatgaataaatctcctcatatatctaactgtagtgtggccagcgactatctggacttagacaaaattactgttgaggacgatgtgggcggagtgcagggcaaacgcaaagctgcaagcaaggcggccgcccaacagcggaaaattctcctcgaaggctcagacggtgattcagccaatgacaccgagcccgactttgctcccggagaggacagcgaggatgactctgatttctgcgagtccgaggacaatgacgaagacttctctatgcggaaaagcaaagtgaaagagattaagaagaaagaggtgaaggtgaagtcgccggtggagaagaaagagaagaagtcaaaatccaaatgtaacgcactggtgacctcagtagattctgctccggcagccgtgaagtcggagtcccagagtctccccaaaaaggtgtccctgtctagtgataccacgcggaagcctctggagattcggtccccatcagctgaaagtaagaagccaaagtgggtgccacccgctgcatcggggggctccagaagtagctcatcgcccctggtcgttgtgtctgtgaaatcccccaatcagagtctgaggttggggcttagtagactggcccgcgtaaagccgcttcatcctaatgcaacctctacctag

SEQ ID NO: 165445 - DNA, 702 bp, Artificial Sequence
  derived and/or modified sequence
atgaacaagagcccccacatcagcaactgcagcgtggccagcgactacttagacctggacaagatcaccgtggaagatgatgtcggtggcgttcaagggaagagaaaggcggcttctaaggccgccgcacagcagcgaaagatcctcttagagggaagcgacggcgactctgccaacgacaccgagcccgattttgcacccggggaggactcagaggatgacagcgatttctgcgagagtgaagataatgatgaggacttcagcatgcgcaaaagcaaggtaaaagaaattaagaaaaaggaagtcaaggtgaaaagccccgtcgaaaaaaaggagaagaagagcaaaagcaaatgtaacgctctggtcactagcgtcgatagcgcaccagcagccgtgaagagcgaatcccagagtctccctaagaaggtgtccctctcctcagacactacgcgcaaacctttagagattcgcagccctagtgccgaatccaaaaaacctaaatgggtccccccaggaatggcctatttgtcctccagaacgggtgcatggaagattataaccgcagccagcggcggctcaagatctagttcatctcctctagttgtcgtgtccgtgaagtctcccaatcagagcctgcgtctaggcctttccaggctggcccgagttaagccgttacacccgaacgctacttctacttag

SEQ ID NO: 165446 - DNA, 1008 bp, Artificial Sequence
  derived and/or modified sequence
atggtaaggccagtcagacacaaaaagccagttaattactcccagttcgaccattccgattcggatgatgactttgtcagtgcaacagtcccgctcaataaaaaaagtagaactgcacccaaggaactcaagcaggacaagcccaagcctaacctgaacaacctgagaaaggaggaaatccccgttcaggagaaaacacccaaaaagcgaatggccttagatgataagctgtatcagcgcgatctggaggtagcactcgcactgagcgtaaaggaactccctacggtgaccaccaacgtgcagaactcccaggacaaatcaatcgagaagcacggcagtagtaagatcgagacgatgaataagtcaccgcacatttctaactgtagtgtcgcatccgattatctcgacctggataaaataaccgtcgaggatgatgtcgggggtgtgcagggaaagaggaaagcggcttccaaggcggcagcacagcaaagaaaaattctgctcgagggctctgatggagactctgcaaatgatactgagcctgacttcgctcccggagaggattccgaagacgatagtgacttctgcgaatctgaagacaatgatgaggatttctccatgaggaaatcgaaggtgaaagagatcaagaaaaaagaggtcaaagttaagtctcccgtcgagaagaaagagaagaaatccaaatccaaatgcaatgcactggtaacatcggtcgatagtgcccctgccgctgtgaagagcgagtcccaaagtttgcctaagaaagtctctttgagcagtgataccacacggaaaccactggagatcagaagcccgagcgcagaatccaagaaaccaaagtgggtgcccccagccgcatcagggggtagtaggtcaagcagctcccccctcgttgtggtgagtgtgaagtcgcctaaccagagtctgaggttgggtctgtccaggctggccagagtcaaacctttgcacccaaatgccacaagtacgtag

SEQ ID NO: 165447 - DNA, 702 bp, Artificial Sequence
  derived and/or modified sequence
atgaataaatctcctcatatctcgaactgctctgtggctagcgattatctggatctggataaaatcaccgtggaggatgatgtggggggagttcaaggcaaacgcaaggccgctagcaaggcagctgcacagcagaggaaaatcctgctcgaaggatcagatggagattccgccaatgatactgagcctgacttcgccccaggagaagacagcgaagacgactcagacttctgcgagtcagaagacaacgacgaggatttcagcatgcgcaaaagtaaggtcaaggagattaaaaagaaggaggtcaaagtcaagagccctgtggagaaaaaggaaaaaaagagtaagtccaagtgcaatgcactggtcaccagcgttgattctgccccagccgctgtcaagtctgagtctcagagcttgcccaagaaggtgtctctttcatcagacacgactcgcaaacctctggagattcgctcaccttcagcagaaagtaagaaacctaagtgggttccccctggcatggcttacctatcttccagaacgggggcttggaaaattatcacagccgcatctggcggatcaagatccagctcatcccccctggtagtggtatccgtgaaaagcccaaaccagagtctgcggctgggtctctctaggctagcacgcgtcaagccactccatcccaacgccacaagcacctag

SEQ ID NO: 165448 - DNA, 2113 bp, Artificial Sequence
  derived and/or modified sequence
gaagccaacaagaatttgagaactgtaaataccaagccttgaaagggaccatggtgcggcctgtgagacataagaaaccagtcaattactcacagtttgaccactctgacagtgatgatgattttgtttctgcaactgtacctttaaacaagaaatccagaacagcaccaaaggagttaaaacaagataaaccaaaacctaacttgaacaatctccggaaagaagaaatcccagtacaagagaaaacccctaaaaaaaggatggctttagatgacaagctctaccagagagacttagaagttgcactagctttatcagtgaaggaacttccaacagtcaccactaatgtgcagaactctcaagataaaagcattgaaaaacatggcagtagtaaaatagaaacaatgaataagtctcctcatatctctaattgcagtgtagccagtgattatttagatttggataagattactgtggaagatgatgttggtggtgttcaagggaaaagaaaagcagcatctaaagctgcagcacagcagaggaagattcttctggaaggcagtgatggtgatagtgctaatgacactgaaccagactttgcacctggtgaagattctgaggatgattctgatttttgtgagagtgaggataatgacgaagacttctctatgagaaaaagtaaagttaaagaaattaaaaagaaagaagtgaaggtaaaatccccagtagaaaagaaagagaagaaatctaaatccaaatgtaatgctttggtgacttcggtggactctgctccagctgccgtcaaatcagaatctcagtccttgccaaaaaaggtttctctgtcttcagataccactaggaaaccattagaaatacgcagtccttcagctgaaagcaagaaacctaaatgggtcccaccagcggcatctggaggtagcagaagtagcagcagcccactggtggtagtgtctgtgaagtctcccaatcagagtctccgccttggcttgtccagattagcacgagttaaacctttgcatccaaatgccactagcacctgagtgtggtacaggaggaatgtttggttgggagaatcacagctttacaagggtgtttatatttgatttgtgtttatatttgaggcaggtattgtaatataaaggaatccattaccatgtcctataaatgacctctagccattttatgattatgttctctgtaaaactcttcaagacttcaatgagaagtttgtttataagaattatcttctcatacctttccttgtgaagagcgtattctgtttttctatcagttcgacatgaagtccacatcacatgctgttcttttctagttacatgatgtgcctttctagctttgtctagtttatagcaccttaactttaactgttcagttttatctggcagaggaaaacattcttatttctttcagaagacatttctgaaatcttataagctacttaagctacgttgtcagttttatcgcaaagatgttttgtattttagccaaatctttttatagtacaaacttagaattattttacacactaaaatggttgcagttttatggcatatgtctccgatttagatggttattctctagaaaatagtatttaaagacattttatgaaatcttcattgtcaaaacctttaataaaagtggaaatattttgaaatgccctttttcttgataccactcatccacgtgttcctgattgtccacatttcatgataaaatgagagctccgcagagaatgttagcctttctgttgtaaatgtaatcttcaagtagtcactttttgttaagttctttagaaagtagttgtcaagtacttagtcatccctattatgatatgagatagtacagcttttcaggaagcttagatctgaatttactttgaaaaacaattgtaatgaatattttatatttacattgagaatttcaactagcttctgatcaatttttaataaaaaattttcaaatcatgttagctgttaaaaaatgtataataactcagtttttcttggtttatggaaatatctatattaatgtgaaaataattaatttagaattgtgattaaagtgagcatttgtctat

SEQ ID NO: 165449 - DNA, 1036 bp, Artificial Sequence
  derived and/or modified sequence
cgccgctgaagccaacaagaatttgagaactgtaaataccaagccttgaaagggaccatggtgcggcctgtgagacataagaaaccagtcaattactcacagtttgaccactctgacagtgatgatgattttgtttctgcaactgtacctttaaacaagaaatccagaacagcaccaaaggagttaaaacaagataaaccaaaacctaacttgaacaatctccggaaagaagaaatcccagtacaagagaaaacccctaaaaaaaggtgagaggcattgaaaaacatggcagtagtaaaatagaaacaatgaataagtctcctcatatctctaattgcagtgtagccagtgattatttagatttggataagattactgtggaagatgatgttggtggtgttcaagggaaaagaaaagcagcatctaaagctgcagcacagcagaggaagattcttctggaaggcagtgatggtgatagtgctaatgacactgaaccagactttgcacctggtgaagattctgaggatgattctgatttttgtgagagtgaggataatgacgaagacttctctatgagaaaaagtaaagttaaagaaattaaaaagaaagaagtgaaggtaaaatccccagtagaaaagaaagagaagaaatctaaatccaaatgtaatgctttggtgacttcggtggactctgctccagctgccgtcaaatcagaatctcagtccttgccaaaaaaggtttctctgtcttcagataccactaggaaaccattagaaatacgcagtccttcagctgaaagcaagaaacctaaatgggtcccaccaggtatggcatatttatcatcaaggacaggagcttggaaaattatcactgcggcatctggaggtagcagaagtagcagcagcccactggtggtagtgtctgtgaagtctcccaatcagagtctccgccttggcttgtccagattagcacgagttaaacctttgcatccaaatgccactagcacctgagtgtggtacaggaggaatgtttggtt

SEQ ID NO: 165450 - DNA, 1008 bp, Artificial Sequence
  derived and/or modified sequence
atggtgagacccgtgagacacaagaagcccgtgaactacagccagttcgaccacagcgacagcgacgacgacttcgtgagcgccaccgtgcccctgaacaagaagagcagaaccgcccccaaggagctgaagcaggacaagcccaagcccaacctgaacaacctgagaaaggaggagatccccgtgcaggagaagacccccaagaagagaatggccctggacgacaagctgtaccagagagacctggaggtggccctggccctgagcgtgaaggagctgcccaccgtgaccaccaacgtgcagaacagccaggacaagagcatcgagaagcacggcagcagcaagatcgagaccatgaacaagagcccccacatcagcaactgcagcgtggccagcgactacctggacctggacaagatcaccgtggaggacgacgtgggcggcgtgcagggcaagagaaaggccgccagcaaggccgccgcccagcagagaaagatcctgctggagggcagcgacggcgacagcgccaacgacaccgagcccgacttcgcccccggcgaggacagcgaggacgacagcgacttctgcgagagcgaggacaacgacgaggacttcagcatgagaaagagcaaggtgaaggagatcaagaagaaggaggtgaaggtgaagagccccgtggagaagaaggagaagaagagcaagagcaagtgcaacgccctggtgaccagcgtggacagcgcccccgccgccgtgaagagcgagagccagagcctgcccaagaaggtgagcctgagcagcgacaccaccagaaagcccctggagatcagaagccccagcgccgagagcaagaagcccaagtgggtgccccccgccgccagcggcggcagcagaagcagcagcagccccctggtggtggtgagcgtgaagagccccaaccagagcctgagactgggcctgagcagactggccagagtgaagcccctgcaccccaacgccaccagcacctag

SEQ ID NO: 165451 - DNA, 702 bp, Artificial Sequence
  derived and/or modified sequence
atgaacaagagcccccacatcagcaactgcagcgtggccagcgactacctggacctggacaagatcaccgtggaggacgacgtgggcggcgtgcagggcaagagaaaggccgccagcaaggccgccgcccagcagagaaagatcctgctggagggcagcgacggcgacagcgccaacgacaccgagcccgacttcgcccccggcgaggacagcgaggacgacagcgacttctgcgagagcgaggacaacgacgaggacttcagcatgagaaagagcaaggtgaaggagatcaagaagaaggaggtgaaggtgaagagccccgtggagaagaaggagaagaagagcaagagcaagtgcaacgccctggtgaccagcgtggacagcgcccccgccgccgtgaagagcgagagccagagcctgcccaagaaggtgagcctgagcagcgacaccaccagaaagcccctggagatcagaagccccagcgccgagagcaagaagcccaagtgggtgccccccggcatggcctacctgagcagcagaaccggcgcctggaagatcatcaccgccgccagcggcggcagcagaagcagcagcagccccctggtggtggtgagcgtgaagagccccaaccagagcctgagactgggcctgagcagactggccagagtgaagcccctgcaccccaacgccaccagcacctag

SEQ ID NO: 165452 - protein, 566 aa, Artificial Sequence
  derived and/or modified sequence
MPGKPKHLGVPNGRMVLAVSDGELSSTTGPQGQGEGRGSSLSIHSLPSGPSSPFPTEEQPVASWALSFERLLQDPLGLAYFTEFLKKEFSAENVTFWKACERFQQIPASDTQQLAQEARNIYQEFLSSQALSPVNIDRQAWLGEEVLAEPRPDMFRAQQLQIFNLMKFDSYARFVKSPLYRECLLAEAEGRPLREPGSSRLGSPDATRKKPKLKPGKSLPLGVEELGQLPPVEGPGGRPLRKSFRRELGGTANAALRRESQGSLNSSASLDLGFLAFVSSKSESHRKSLGSTEGESESRPGKYCCVYLPDGTASLALARPGLTIRDMLAGICEKRGLSLPDIKVYLVGNEQALVLDQDCTVLADQEVRLENRITFELELTALERVVRISAKPTKRLQEALQPILEKHGLSPLEVVLHRPGEKQPLDLGKLVSSVAAQRLVLDTLPGVKISKARDKSPCRSQGCPPRTQDKATHPPPASPSSLVKVPSSATGKRQTCDIEGLVELLNRVQSSGAHDQRGLLRKEDLVLPEFLQLPAQGPSSEETPPQTKSAAQPIGGSLNSTTDSAL

SEQ ID NO: 165453 - DNA, 1701 bp, Artificial Sequence
  derived and/or modified sequence
atgccaggtaaacctaagcatctaggtgtgcccaacggccggatggtgctcgctgtctcagatggggaactttcatccacaactgggccccaggggcagggagagggtaggggtagtagtttgtctattcactccttgccctctgggcccagcagccccttcccgacagaggagcagccggtagccagctgggcgctatcgtttgagagactgctgcaggacccactgggccttgcctatttcacagaattccttaagaaggagttctctgcagagaatgtcaccttctggaaagcatgcgagaggtttcagcagatacctgctagcgatactcagcagcttgcccaagaagcccgcaatatttaccaggaattcctgagcagccaggctctgagcccagtcaatatcgacaggcaggcatggcttggagaggaagtgttagcagaaccaagacccgatatgttccgggcccagcagttgcagatattcaatctgatgaaatttgacagttatgcccggttcgtcaaaagcccactgtaccgagagtgtcttctggcagaagctgaaggaagacctcttagggaaccaggctcttctaggctgggctccccagacgctacgaggaaaaagcccaagctgaagccagggaaatctctaccactaggcgtggaagagttgggccaactccctccagtggaggggcctggcggaagacccctgcggaagtccttccgccgcgaactgggaggaacggcaaacgcagccctgaggcgagaatcccagggtagtcttaacagctccgctagcttagatctggggttcctagcttttgtgtcttccaaaagtgagtctcacagaaaatctctcggtagcactgagggcgagtctgagagtcgcccagggaagtattgttgtgtgtatctgcctgacggaactgctagtctcgcactggcgaggcctggcctcacaatccgggatatgctggcaggtatctgtgagaaacgaggcttaagtctgccagatatcaaagtgtaccttgtggggaatgagcaggcacttgtcctggaccaggactgtaccgtccttgccgatcaggaggtccgactggaaaatcgcatcactttcgaactggagctgaccgctctcgagcgagtggtgcgaattagcgccaagcccacaaagcgtctgcaagaggctctgcagcctatccttgaaaagcacggacttagcccactcgaagtcgttctgcatcgtcctggggagaagcaacctttggacctggggaaactggtgagtagcgtggcggcacaaagactcgtgctggatacactcccaggtgtaaaaattagcaaagcccgcgacaagtctccttgtcgctcccaagggtgtccacctaggacccaggacaaagctacccaccctccacccgcttcaccatctagtctggtgaaggttccgagtagtgccacaggtaaacgccagacctgtgacattgaggggctcgtcgagctgctgaacagagtgcagagtagcggcgcccatgaccagcgcggcctgctcaggaaagaagaccttgtgctgcctgaattcctgcaactccccgcccaaggcccttcatcagaagaaacaccaccacaaactaaaagtgcagctcaacctatcggcgggtcgcttaacagtaccactgattccgctttgtag

SEQ ID NO: 165454 - DNA, 1701 bp, Artificial Sequence
  derived and/or modified sequence
atgcctgggaagcccaagcacctgggcgtgcccaacggccgcatggtgctggccgtgtctgatggagagctgagcagcaccaccggcccccagggccagggcgagggccggggcagcagcctgagcatccacagcctgcccagcggccccagcagccccttccccacagaggagcagcctgtggcctcctgggccctgagctttgagcggctgctgcaggaccccctgggcctggcctacttcacagagttcctgaagaaggagttcagcgcagaaaatgtgaccttctggaaggcctgtgagcgcttccagcagatcccagccagtgacacccagcagctggcccaggaggccaggaacatctaccaggagttcctgagcagccaggccctgagccctgtgaacatcgaccggcaggcctggctgggggaggaggtgctggccgagcccaggccagacatgttccgggcccagcagctgcagatcttcaacctgatgaagtttgacagctatgccaggtttgtgaagagccccctgtaccgggagtgcctgctggccgaggccgagggccggcccctgcgggagcccggcagcagccggctgggcagcccagatgccaccaggaagaagcccaagctgaagccaggcaagagcctgcccctgggcgtggaggagctgggccagctgccccctgtggagggccctgggggccggcccctgaggaagagcttcagaagagagctgggcggcacagccaatgctgccctgcggcgggagagccagggcagcctgaacagcagcgccagcctggacctgggcttcctggcctttgtgagcagcaagtctgagagccacaggaagagcctgggcagcacagaaggagagagcgagagcaggcctgggaagtactgctgcgtgtacctgcctgatggaacagccagcctggccctggcccggcccggcctgaccatccgggacatgctggccggcatctgtgagaagaggggcctgagcctgcctgacatcaaggtgtacctggtgggcaatgagcaggccctggtgctggaccaggactgcaccgtgctggccgaccaggaggtgcggctggagaaccgcatcacctttgagctggagctgacagccctggagcgggtggtgcgcatcagcgccaagcccaccaagaggctgcaggaggccctgcagcccatcctggagaagcacggcctgagccccctggaggtggtgctgcacaggcctggagagaagcagcccctggacctgggcaagctggtgtcctctgtggccgcccagaggctggtgctggacaccctgcccggggtgaagatcagcaaggcccgggacaagagcccctgccgcagccagggctgcccccccaggacccaggacaaggccacccaccccccaccagccagccccagcagcctggtgaaggtgcccagcagcgccaccgggaagaggcagacctgtgacatcgagggcctggtggagctgctgaacagagtgcagagcagcggggcccatgaccagaggggcctgctgaggaaagaagacctggtgctgcctgagttcctgcagctgcctgcccagggccccagcagcgaggagaccccaccccagaccaagtctgctgcccagcccatcggcggcagcctgaacagcaccacagacagcgccctgtag

SEQ ID NO: 165455 - DNA, 1701 bp, Artificial Sequence
  derived and/or modified sequence
atgcccggcaagcccaagcacctgggcgtgcccaacggccggatggtgcttgctgtgtcagacggagagctgagcagtacgaccggaccacagggacagggtgaagggagggggagttccctctcaattcattcgctgccttctggcccttccagtcctttcccgacagaggaacagcccgtcgccagctgggctctgtcattcgagaggcttttgcaagatccgctgggccttgcttactttactgagttcctaaagaaagaattctcagcagagaatgtgaccttctggaaagcctgcgagcgctttcagcagattcccgccagcgacactcagcagttggcccaggaagctaggaacatctaccaggagttcctcagctcacaggcactgtcacccgttaatatcgaccgacaggcatggctgggagaagaggtgctggcagagcccaggcctgacatgtttcgggcccagcagttgcagatatttaacctgatgaagtttgatagttacgctagattcgtcaagtcccccctctacagagagtgtctgttagccgaagccgagggtcgcccactccgagaaccaggctcctccagactgggcagtccggatgctacccgcaaaaagcccaagctaaagcctggtaagagccttccgcttggagtcgaagaactgggacagttaccaccagtcgagggtcccggtgggcggccgcttagaaagtcttttcgacgggagttaggcggaaccgcaaacgcggcccttcggcgtgaaagtcagggaagcctcaatagcagcgcttctctggacctgggtttcctggccttcgtctctagcaagtccgaatcccaccggaagagcctggggagcactgaaggagagtctgagtcacgccccggcaaatattgttgcgtgtatctaccagacggaaccgcctccctggcactggcccgccctgggctgactatcagagacatgctagctggtatatgtgagaaacgcggattgtctctgcccgacattaaagtttacctcgttggcaacgagcaggcgctagtcctggatcaggactgtaccgtcctggctgatcaggaggtacggctcgaaaatcggatcacgtttgagctggaattgacagcgcttgaaagagtggtgcggatttccgccaaaccaacgaagcgcctacaggaagctttgcagcccattctggagaagcatggcctctcacccctggaagttgttctgcatcgccctggggagaagcagccattggacctgggcaagctcgtaagcagtgtcgcagcacagcggttggtcctggacaccctgcccggcgtgaaaataagtaaggcccgtgacaagagtccttgtcggtcgcagggctgtccgccccgaactcaagacaaggcaacacatcccccccccgcctcccccagcagcttggtcaaggtgccatctagcgccacaggtaagaggcagacttgcgatattgagggccttgtagagttgctaaacagagtccagagcagcggagcacacgaccagcgggggttgctgcgaaaagaggaccttgtcctgcccgagtttttgcagctgcctgctcagggccctagtagcgaggagacacccccccagacaaaaagtgccgcccagcccatcggtggttctctgaactccactacagatagcgccctatag

SEQ ID NO: 165456 - DNA, 1701 bp, Artificial Sequence
  derived and/or modified sequence
atgccgggtaagcctaagcacctgggtgtgcctaatggtcggatggtcttggccgtcagcgacggggagctctccagcacaaccgggcctcaaggccagggtgaagggagagggtcctcactaagtatacacagcctgccttcaggaccctccagtccattccctacagaagagcagccagtcgctagttgggccctctctttcgagaggttactccaagatcccctcggcctcgcctactttaccgaatttctcaaaaaagagtttagcgccgagaatgttacattctggaaagcttgcgagcggtttcagcaaatccccgcatccgatacccaacagctggctcaagaggcacgaaatatatatcaagaattcctctctagccaggctttgtcaccggtaaatatcgaccgccaagcatggctgggggaagaagtgttggcagaacccagacccgacatgtttcgagcccaacaactgcagatctttaacctcatgaagttcgattcatacgcccgttttgttaaaagtcccttgtaccgggagtgccttttggccgaggccgaggggaggccgctcagagagccaggaagctcccgacttgggtcccctgacgctacccgcaagaagcccaagctgaagcccggtaagagcttacccctgggggttgaagaattgggccagctaccaccagttgaggggccaggaggacgaccattgagaaagtccttcagacgtgagctcggtggaacagcgaacgcagctctccgccgagaatctcagggctctctcaattcctcagcctctcttgacctgggcttcctggctttcgtctcatctaaaagcgagtcccacaggaaatccctgggttctaccgagggagaatcagaatccagacccggtaagtactgttgcgtctacctgcccgacgggaccgcctcactcgcccttgctaggcccggacttaccatcagggacatgttggctgggatctgcgaaaagcgcggactttcattgcccgatattaaagtgtacctggtaggtaacgaacaggcgctggtgctcgaccaggattgtacagttcttgctgatcaggaagtgagactggagaacaggattacgtttgagctggaactaactgccttggaaagggtggtccggattagtgccaaaccgacaaagcgtctccaggaggccctgcagcctatcctggaaaagcacggcctgtcacctctggaggtggtcttgcatcgacccggagaaaagcagcctctagacctgggcaagcttgtgagttcggttgccgcacagagacttgtgctggatacgttgccaggggtaaagatctctaaagctcgtgacaaaagcccatgccggtcacaaggctgtccacccagaactcaggacaaagctacccaccccccacccgctagcccttcatccttggtcaaggtgccatccagtgcgacaggtaaacgacaaacttgcgacattgaagggctggtagagttattaaaccgcgtccagagcagcggcgcacatgaccagaggggtctgctgcggaaggaggatctggtcctgccagaattcctccagctgccggcacaggggccatctagcgaggagaccccaccccagaccaagtcggccgctcagccgattgggggatccctgaattcaaccaccgacagcgcactgtag

SEQ ID NO: 165457 - DNA, 2415 bp, Artificial Sequence
  derived and/or modified sequence
tttctatagagacacttcctgtggcagagaaaagaggtagtgagcggtgtttcaggatgtgagggcccgcaggagccgagtcaggctctctccactgcctgcccgccaccgtgcaagctctggccggcgctgcccacagtccccatggtgggcagcccccgcggcggggacccctgatcggcagcggcatgccagggaagcccaagcacctgggcgtccccaacgggcgcatggttctggctgtgtcagatggagagctgagcagcacgacggggccccagggccagggcgagggccgcggcagctctctcagcatccacagcctccccagtggtcccagcagccccttcccaaccgaggagcagcctgtggccagctgggccctgtccttcgagcggctgttgcaggacccgctgggcctggcttacttcactgagttcctgaagaaggagttcagcgcggaaaacgtgactttctggaaggcctgcgagcgcttccagcagatcccggccagcgatacccagcagctagctcaggaggcccgcaacatctaccaggagttcctgtccagccaggcgctgagcccagtgaacatcgaccgtcaggcctggcttggcgaggaggtgctggccgagccccggccggacatgtttcgggcacagcagcttcagatcttcaacttgatgaagttcgacagctatgcgcgcttcgtcaagtccccgctgtaccgcgagtgcctgctagccgaagccgagggacgccctctgcgggaacctggctcctcgcgcctcggcagccctgacgccacgaggaagaagccgaagctgaagcccgggaagtcgctgccgctgggtgtggaggagttggggcagctgccacccgttgagggtcctgggggccgccctctccgcaagtccttccgccgggagctgggcgggactgcaaacgccgccttgcgccgagagtctcagggctccctcaactcctccgccagcctggaccttggcttcctagccttcgtcagcagcaaatctgagagccaccggaagagccttgggagcacggagggtgaaagtgaaagccggccagggaagtactgctgtgtgtacctgcccgatggcacagcctccttggccctggccagacctggcctcaccatccgagacatgctggcagggatctgtgagaaacgaggcctctctctacctgacatcaaggtctacctggtgggcaatgaacaggccctggtcctggatcaggactgcaccgtgctggcggatcaggaagtgcggctggaaaacaggatcaccttcgagctggagctgacggcgctggagcgcgtggtacgaatctcagccaagcccaccaagcggctgcaggaggcgctgcagcccattctggagaagcacggcttgagcccgctagaggtggtgctgcaccggccaggcgagaaacagcctctggatctggggaagctagtgagctcggtggcggcccagagactggttttggacactcttccaggtgtgaagatctccaaagcccgtgacaaatctccctgccgcagccagggctgcccacctagaactcaggataaggccacccatccccctccagcgtcccccagttctctggtgaaggtgcccagtagtgccactggaaagcggcagacctgtgacatcgaaggcctggtggagctgctgaaccgggtgcagagcagcggggcccacgaccagaggggccttctgaggaaagaggacctggtacttccagaatttctgcagctgcccgcccaagggcccagctccgaggagaccccaccacagaccaaatcagcagcccagcccatcgggggatccttgaactccaccaccgactcagccctctgacagctacccaacagtccaggacagctgcatggcacccggcgggccgagcatgccatgggtccgctctgcatgccctgtctgtgccatgagtgtccctggccccttcctgccatgggcaggcccgcaggaagagccggtaggggtggaaaggggactcagatgagacacaccccacagctgccaccgccttgtccctcaacaagctcacccccaatcccttgcagccaggccacaatgggggaggtgagtccagccccttggaacaggcttgcccaacatggagggatggcgttggcagtgccagcctccccagcctgtgccaagcttcaacaggggcaagaggaggggccggcccctcctcaggaagctggtatgagtaaggccttgagggtgcaggcaggcagccctgtaccccacccacatagactatactgtacatacagattttgcagtaggcttggggcagctgggtttgtccttgatgtatgatactgttattataataattattattattctgccatga

SEQ ID NO: 165458 - DNA, 1701 bp, Artificial Sequence
  derived and/or modified sequence
atgcccggcaagcccaagcacctgggcgtgcccaacggcagaatggtgctggccgtgagcgacggcgagctgagcagcaccaccggcccccagggccagggcgagggcagaggcagcagcctgagcatccacagcctgcccagcggccccagcagccccttccccaccgaggagcagcccgtggccagctgggccctgagcttcgagagactgctgcaggaccccctgggcctggcctacttcaccgagttcctgaagaaggagttcagcgccgagaacgtgaccttctggaaggcctgcgagagattccagcagatccccgccagcgacacccagcagctggcccaggaggccagaaacatctaccaggagttcctgagcagccaggccctgagccccgtgaacatcgacagacaggcctggctgggcgaggaggtgctggccgagcccagacccgacatgttcagagcccagcagctgcagatcttcaacctgatgaagttcgacagctacgccagattcgtgaagagccccctgtacagagagtgcctgctggccgaggccgagggcagacccctgagagagcccggcagcagcagactgggcagccccgacgccaccagaaagaagcccaagctgaagcccggcaagagcctgcccctgggcgtggaggagctgggccagctgccccccgtggagggccccggcggcagacccctgagaaagagcttcagaagagagctgggcggcaccgccaacgccgccctgagaagagagagccagggcagcctgaacagcagcgccagcctggacctgggcttcctggccttcgtgagcagcaagagcgagagccacagaaagagcctgggcagcaccgagggcgagagcgagagcagacccggcaagtactgctgcgtgtacctgcccgacggcaccgccagcctggccctggccagacccggcctgaccatcagagacatgctggccggcatctgcgagaagagaggcctgagcctgcccgacatcaaggtgtacctggtgggcaacgagcaggccctggtgctggaccaggactgcaccgtgctggccgaccaggaggtgagactggagaacagaatcaccttcgagctggagctgaccgccctggagagagtggtgagaatcagcgccaagcccaccaagagactgcaggaggccctgcagcccatcctggagaagcacggcctgagccccctggaggtggtgctgcacagacccggcgagaagcagcccctggacctgggcaagctggtgagcagcgtggccgcccagagactggtgctggacaccctgcccggcgtgaagatcagcaaggccagagacaagagcccctgcagaagccagggctgcccccccagaacccaggacaaggccacccaccccccccccgccagccccagcagcctggtgaaggtgcccagcagcgccaccggcaagagacagacctgcgacatcgagggcctggtggagctgctgaacagagtgcagagcagcggcgcccacgaccagagaggcctgctgagaaaggaggacctggtgctgcccgagttcctgcagctgcccgcccagggccccagcagcgaggagacccccccccagaccaagagcgccgcccagcccatcggcggcagcctgaacagcaccaccgacagcgccctgtag

SEQ ID NO: 165459 - protein, 94 aa, Artificial Sequence
  derived and/or modified sequence
MNDHLHVGSHAHGQIQVQQLFEDNSNKRTVLTTQPNGLTTVGKTGLPVVPERQLDSIHRRQGSSTSLKSMEGMGKVKATPMTPEQAMKQYMQKL

SEQ ID NO: 165460 - protein, 601 aa, Artificial Sequence
  derived and/or modified sequence
MLTRKPSAAAPAAYPTGRGGDSAVRQLQASPGLGAGATRSGVGTGPPSPIALPPLRASNAAAAAHTIGGSKHTMNDHLHVGSHAHGQIQVQQLFEDNSNKRTVLTTQPNGLTTVGKTGLPVVPERQLDSIHRRQGSSTSLKSMEGMGKVKATPMTPEQAMKQYMQKLTAFEHHEIFSYPEIYFLGLNAKKRQGMTGGPNNGGYDDDQGSYVQVPHDHVAYRYEVLKVIGKGSFGQVVKAYDHKVHQHVALKMVRNEKRFHRQAAEEIRILEHLRKQDKDNTMNVIHMLENFTFRNHICMTFELLSMNLYELIKKNKFQGFSLPLVRKFAHSILQCLDALHKNRIIHCDLKPENILLKQQGRSGIKVIDFGSSCYEHQRVYTYIQSRFYRAPEVILGARYGMPIDMWSLGCILAELLTGYPLLPGEDEGDQLACMIELLGMPSQKLLDASKRAKNFVSSKGYPRYCTVTTLSDGSVVLNGGRSRRGKLRGPPESREWGNALKGCDDPLFLDFLKQCLEWDPAVRMTPGQALRHPWLRRRLPKPPTGEKTSVKRITESTGAITSISKLPPPSSSASKLRTNLAQMTDANGNIQQRTVLPKLVS

SEQ ID NO: 165461 - protein, 528 aa, Artificial Sequence
  derived and/or modified sequence
MNDHLHVGSHAHGQIQVQQLFEDNSNKRTVLTTQPNGLTTVGKTGLPVVPERQLDSIHRRQGSSTSLKSMEGMGKVKATPMTPEQAMKQYMQKLTAFEHHEIFSYPEIYFLGLNAKKRQGMTGGPNNGGYDDDQGSYVQVPHDHVAYRYEVLKVIGKGSFGQVVKAYDHKVHQHVALKMVRNEKRFHRQAAEEIRILEHLRKQDKDNTMNVIHMLENFTFRNHICMTFELLSMNLYELIKKNKFQGFSLPLVRKFAHSILQCLDALHKNRIIHCDLKPENILLKQQGRSGIKVIDFGSSCYEHQRVYTYIQSRFYRAPEVILGARYGMPIDMWSLGCILAELLTGYPLLPGEDEGDQLACMIELLGMPSQKLLDASKRAKNFVSSKGYPRYCTVTTLSDGSVVLNGGRSRRGKLRGPPESREWGNALKGCDDPLFLDFLKQCLEWDPAVRMTPGQALRHPWLRRRLPKPPTGEKTSVKRITESTGAITSISKLPPPSSSASKLRTNLAQMTDANGNIQQRTVLPKLVS

SEQ ID NO: 165462 - protein, 156 aa, Artificial Sequence
  derived and/or modified sequence
MNDHLHVGSHAHGQIQVQQLFEDNSNKRTVLTTQPNGLTTVGKTGLPVVPERQLDSIHRRQGSSTSLKSMEGMGKVKATPMTPEQAMKQYMQKLTAFEHHEIFSYPEIYFLGLNAKKRQGMTGGPNNGGYDDDQGSYVQVPHDHVAYRYEVLKVIG

SEQ ID NO: 165463 - DNA, 1806 bp, Artificial Sequence
  derived and/or modified sequence
atgctgaccaggaaaccgagtgccgctgcacccgccgcctacccaaccggtcgggggggcgactccgcggtccgccaacttcaagcttcccctggccttggagccggtgctacccgatctggagtcggcaccggcccaccatcacccatagcccttcccccactgcgcgccagcaacgctgcagccgccgcacataccataggcggttcgaagcacactatgaatgatcacctgcatgtcggctcacatgcccatggacaaatccaggtgcagcagctgtttgaggataatagcaacaaaaggacagttctgactacccagccaaacggccttacaacggtgggaaagacaggcctgccagtggttcctgagaggcaactggactctattcaccgtagacaaggatcctcaaccagtctgaagtctatggaggggatggggaaggtgaaagccaccccaatgactccggagcaagctatgaaacaatacatgcagaagctgacagccttcgagcatcatgaaattttctcttaccccgagatctactttctgggcctgaatgctaaaaaacggcagggaatgactggcgggccaaataatggcggttacgacgacgaccaggggagctacgtccaagtgccacacgaccatgtggcctatcgatacgaggtgctgaaggtcatcggcaaagggagttttgggcaagtggtcaaagcctatgaccataaagtccaccagcatgtcgctctgaagatggtcagaaatgagaagagatttcaccgccaggctgccgaagagatccgaatcttagagcaccttagaaagcaagataaagataatacgatgaacgtcattcacatgctggaaaactttacttttaggaaccacatctgcatgacatttgaactgctgtcaatgaatctctacgagctgatcaaaaagaacaagtttcaggggttctctctgcccctcgtacgcaagttcgcccactccattttgcagtgcctcgacgctctgcacaaaaacagaatcatccactgtgatctcaagccagagaatatcctcctaaagcagcagggaaggtctggcataaaggtaatcgattttggttcatcctgttacgagcatcagagagtttacacctatatccagtcccgtttttaccgagcacctgaggtaatcctcggtgcccgatacggcatgcctatagacatgtggtcccttggctgtatccttgccgaactccttaccgggtaccctttgctgccaggggaagatgagggggaccaactcgcgtgtatgatcgagctactgggcatgccatctcagaaacttctggatgcttctaagagggccaaaaatttcgtatctagcaaagggtacccgcgctactgtacagttaccactctttccgacgggtctgtcgtgctgaacggggggagatccaggcggggtaaactgagagggccacccgagtcgagagagtggggcaacgccctgaagggctgcgacgaccccctttttttggactttcttaagcagtgcctcgaatgggaccccgcagtaagaatgacccctggacaggcgcttaggcacccgtggctgcgccggaggctcccgaaaccccctactggggagaaaacgtcagtgaaacgtatcaccgagagtaccggagccattacatccattagtaagcttcctccaccatcgagctcggcctccaagcttagaacgaacctggcccaaatgaccgacgctaacggcaacatccagcagcgcacagttctccccaaactggtctcgtag

SEQ ID NO: 165464 - DNA, 1587 bp, Artificial Sequence
  derived and/or modified sequence
atgaacgatcacctgcacgtgggatcgcacgcacacggtcagatacaggtgcaacagctgttcgaagataattccaacaaaagaacggtgttgacaacccaaccaaatgggctgacaactgtaggcaagaccggcctccccgttgtccctgaacggcagctggattccattcataggcgccaaggtagcagcacatctttaaagtcaatggaaggcatgggaaaggtgaaagccactccgatgacccccgagcaggctatgaagcagtacatgcaaaagttaacggcattcgaacaccacgagatcttctcatacccagaaatttatttccttggccttaacgctaagaaacgacagggtatgactggcggccccaataacggtgggtacgatgatgaccagggatcctatgtgcaggtcccgcatgaccacgtggcttataggtacgaagttctcaaagtcatcgggaaaggctccttcggccaggtcgtgaaggcctacgaccataaggtgcaccaacatgtggctctcaaaatggtgagaaacgagaaacgattccataggcaagctgccgaggaaatacggattctggagcacctgcgtaagcaggataaggataacaccatgaacgttatacacatgctggaaaatttcacttttcgaaatcatatctgtatgacattcgagctattgagcatgaatttatatgagctgataaagaaaaacaaattccagggcttctccctcccactcgtccggaagttcgcacactcaatcctgcagtgtttggatgcgctccacaagaaccgaatcatacactgcgatttgaaaccagagaatatcctcctaaagcagcagggcagatccggcatcaaagtaattgacttcggtagttcttgctatgagcatcaacgcgtttacacttatatccagagccggttttacagagcgcctgaagttatcctcggcgctagatacgggatgcccatagacatgtggtctcttggctgcattttggctgagctccttacgggctatcccctacttcctggcgaagacgagggggaccagcttgcttgcatgattgaattactgggcatgccatcccagaagctgctggacgcctcgaagcgggcgaagaacttcgtgtctagtaaggggtatcctaggtactgcaccgttacgacacttagcgatggttcagtagtgctgaacggcggtcggtcccgacgagggaaactgcggggtcctcctgagagccgagaatggggaaatgccctgaaggggtgcgacgatccactctttttggatttccttaaacaatgcctggagtgggatccagctgtccgcatgacacccggtcaggctttacggcatccctggctgcgtagacgcctcccgaagccccctaccggtgagaagacctctgtcaagcgaataaccgagtccacaggcgccatcacatctatctctaaactgcctcctccatcctcatccgcgtcaaagcttaggactaacctcgcccaaatgacggatgccaacggaaacatccagcagcggaccgtcctgcctaagctcgtgtcatag

SEQ ID NO: 165465 - DNA, 1806 bp, Artificial Sequence
  derived and/or modified sequence
atgctgaccaggaagcccagcgctgctgccccagctgcctaccccaccggccggggcggggacagcgctgtgcggcagctgcaggccagccctggcctgggcgctggggccaccaggtctggagtgggcaccggcccccccagccccatcgccctgccccccctgcgggccagcaatgctgctgctgctgcccacaccatcggcggcagcaagcacaccatgaatgaccacctgcacgtgggcagccacgcccacggccagatccaggtgcagcagctgtttgaggacaacagcaacaagaggacagtgctgaccacccagcccaacggcctgaccaccgtgggcaagacaggcctgcctgtggtgcctgagcggcagctggacagcatccaccggcggcagggcagcagcaccagcctgaagtccatggagggcatgggcaaggtgaaggccacccccatgaccccagagcaggccatgaagcagtacatgcagaagctgacagcctttgagcaccacgagatcttctcctacccagagatctacttcctgggcctgaatgccaagaagaggcagggcatgactggaggccccaacaacggcggctatgatgatgaccagggcagctatgtgcaggtgccccatgaccacgtggcctaccgctatgaggtgctgaaggtgattggcaagggcagctttggccaggtggtgaaggcctatgaccacaaggtgcaccagcacgtggccctgaagatggtgagaaatgagaagcgcttccaccggcaggccgctgaggagatccgcatcctggagcacctgaggaagcaggacaaggacaacaccatgaatgtcatccacatgctggagaacttcaccttcaggaaccacatctgcatgacctttgagctgctgtccatgaacctgtatgagctgatcaagaagaacaagttccagggcttcagcctgcccctggtgaggaagtttgcccacagcatcctgcagtgcctggatgccctgcacaagaaccgcatcatccactgtgacctgaagccagagaacatcctgctgaagcagcagggccgcagcggcatcaaggtgattgactttggcagcagctgctatgagcaccagagggtgtacacctacatccagagccgcttctaccgggcccctgaggtgatcctgggcgcccgctatggcatgcccatcgacatgtggagcctgggctgcatcctggccgagctgctgaccggctaccccctgctgcctggagaagatgaaggagaccagctggcctgcatgattgagctgctgggcatgcccagccagaagctgctggatgccagcaagagggccaagaactttgtgagcagcaagggctacccccgctactgcaccgtgaccaccctgagtgatggctctgtggtgctgaatggaggccgcagcagaagaggcaagctgcggggccccccagagagccgggagtggggcaatgccctgaagggctgtgatgaccccctcttcctggacttcctgaagcagtgcctggagtgggaccctgctgtgaggatgaccccaggccaggccctgcggcacccctggctgcggcggcggctgcccaagccacccaccggggagaagacctctgtgaagaggatcacagagagcactggagccatcaccagcatcagcaagctgcccccacccagcagcagcgccagcaagctgcggaccaacctggcccagatgacagatgccaatggaaacatccagcagaggacagtgctgcccaagctggtgtcctag

SEQ ID NO: 165466 - DNA, 1587 bp, Artificial Sequence
  derived and/or modified sequence
atgaatgaccacctgcacgtgggcagccacgcccacggccagatccaggtgcagcagctgtttgaggacaacagcaacaagaggacagtgctgaccacccagcccaacggcctgaccaccgtgggcaagacaggcctgcctgtggtgcctgagcggcagctggacagcatccaccggcggcagggcagcagcaccagcctgaagtccatggagggcatgggcaaggtgaaggccacccccatgaccccagagcaggccatgaagcagtacatgcagaagctgacagcctttgagcaccacgagatcttctcctacccagagatctacttcctgggcctgaatgccaagaagaggcagggcatgactggaggccccaacaatggaggctatgatgatgaccagggcagctatgtgcaggtgccccatgaccacgtggcctaccgctatgaggtgctgaaggtgattggcaagggcagctttggccaggtggtgaaggcctatgaccacaaggtgcaccagcacgtggccctgaagatggtgagaaatgagaagcgcttccaccggcaggccgctgaggagatccgcatcctggagcacctgaggaagcaggacaaggacaacaccatgaatgtcatccacatgctggagaacttcaccttcaggaaccacatctgcatgacctttgagctgctgtccatgaacctgtatgagctgatcaagaagaacaagttccagggcttcagcctgcccctggtgaggaagtttgcccacagcatcctgcagtgcctggatgccctgcacaagaaccgcatcatccactgtgacctgaagccagagaacatcctgctgaagcagcagggccgcagcggcatcaaggtgattgactttggcagcagctgctatgagcaccagagggtgtacacctacatccagagccgcttctaccgggcccctgaggtgatcctgggcgcccgctatggcatgcccatcgacatgtggagcctgggctgcatcctggccgagctgctgaccggctaccccctgctgcccggggaggatgaaggagaccagctggcctgcatgattgagctgctgggcatgcccagccagaagctgctggatgccagcaagagggccaagaactttgtgagcagcaagggctacccccgctactgcaccgtgaccaccctgagtgatggctctgtggtgctgaatggaggccgcagccggcggggcaagctgcggggccccccagagagccgggagtggggcaatgccctgaagggctgtgatgaccccctcttcctggacttcctgaagcagtgcctggagtgggaccctgctgtgaggatgaccccaggccaggccctgcggcacccctggctgcggcggcggctgcccaagcccccaactggagagaagacctctgtgaagaggatcacagagagcactggagccatcaccagcatcagcaagctgcccccacccagcagcagcgccagcaagctgcggaccaacctggcccagatgacagatgccaacggcaacatccagcagaggacagtgctgcccaagctggtgtcctag

SEQ ID NO: 165467 - DNA, 1806 bp, Artificial Sequence
  derived and/or modified sequence
atgctgacccggaagcccagcgccgccgcccccgccgcctaccccaccggccgggggggagatagcgcagttcggcagctgcaggcttctccgggtctcggagctggggcaacaaggtcgggtgtgggcaccggccctccgtcccctatcgcactgccaccactgagagcctccaatgcagccgccgctgctcacaccattggggggtccaaacacactatgaacgatcacctgcatgtgggcagccacgcgcatgggcagatccaggtgcagcagctctttgaggataattctaacaagcgcactgtattgacaacccagcccaacggcctcacaacagtgggaaaaaccggtttaccagtcgttcccgaacggcagctggactcaatccacagacggcaggggagctctaccagtttgaaaagtatggaaggtatggggaaggtcaaagcaacccctatgacgccagaacaagcaatgaagcagtacatgcagaaattgacagcctttgaacatcatgagatatttagctatccagagatctatttcctaggcctgaacgcaaaaaaaagacagggtatgaccggtgggccgaacaatggtggctacgacgatgaccagggatcctacgtgcaggtgccacacgaccacgttgcctatcgctacgaagtgctgaaggtcatcggtaaaggctcatttggtcaggtggtcaaagcttatgaccacaaagtgcaccagcacgtagcgctgaaaatggtccggaacgaaaagagatttcacaggcaggctgcggaagagattagaattctggagcatctgcgcaagcaggacaaggataacaccatgaatgtaatccatatgctggagaattttacatttcgaaatcatatctgtatgacatttgagctcttaagcatgaacctctatgaattaatcaagaaaaataagttccagggtttttcactgccgctggttcgcaaattcgcccactcgattctacaatgcctggacgctctgcacaagaatagaataatacactgtgacctaaagccagagaacatcctactgaaacagcagggacgatcaggaatcaaggtgatcgatttcggatcctcctgctatgagcatcaaagagtgtatacatacatccaaagcagattttacagagctcctgaggtgatccttggagcccgatacggcatgcctatcgatatgtggtcgctcgggtgcatcctagcagagctcctcactggctacccattgctgcctggggaggacgagggggatcagcttgcatgtatgattgaactccttggcatgccaagccagaagctgctggacgcatccaaacgagcaaagaacttcgtaagttcaaaggggtacccccggtactgcacagtgaccactctttcagatgggtccgtggttctcaatgggggcaggagtagacgaggaaaactgcgtggcccaccagagagtcgggaatggggaaatgctctgaaaggctgtgatgacccgctgttcctcgacttccttaagcagtgcctcgagtgggatcccgctgttaggatgacgcccggccaggccttgaggcatccttggctgcgacgaaggctgcctaagcccccaacaggagagaaaacttcagtgaaacgaattaccgagtcaacaggagcaattacttctatctctaagttaccccccccaagctccagcgcatccaaactgcgcactaacttagcccaaatgaccgacgcaaatggaaacattcagcagcggacagtcttacctaaactggtgtcatag

SEQ ID NO: 165468 - DNA, 1587 bp, Artificial Sequence
  derived and/or modified sequence
atgaacgaccacctgcacgtgggcagccacgcccacggccagatccaagtgcagcagctcttcgaggacaactccaataagcggactgtccttaccactcagcccaatggacttaccaccgtgggtaagactggtctcccggtcgtgccagagcgccagctagattccatacacaggcgtcagggatcgagcaccagcttaaagtcaatggaagggatgggaaaggttaaggcgacccctatgaccccagagcaagccatgaaacagtatatgcagaagctgaccgccttcgagcaccatgagatattttcctatcctgagatttactttctgggcttaaacgctaagaaaagacaaggtatgactggcgggcccaacaacggcgggtacgatgatgaccagggatcatacgtccaagtccctcatgaccacgttgcctatcgctacgaagtgctcaaggtgattgggaaaggatccttcggccaggtcgtgaaggcctacgaccacaaagtgcaccagcatgtggccctcaaaatggtaaggaatgaaaagaggttccacagacaggctgcggaggagatacgtatcctcgaacatctcagaaaacaggacaaggacaatacgatgaacgtgattcacatgctggaaaacttcactttccggaaccacatatgcatgactttcgagctgttaagtatgaatctgtatgaactgatcaagaagaataaatttcagggattctccttgcccctcgtacgcaagttcgcgcattccatactccaatgtctggatgcactgcacaaaaatagaattattcactgtgatctgaaaccagagaatattcttctcaaacagcaagggcgctcaggaataaaggtgatcgacttcggatctagctgctacgagcaccagcgagtatatacttatatccaatctcggttctacagggccccagaggttatcctaggagcgaggtacgggatgccaattgatatgtggtcccttggttgcattctggccgagctcctgaccggatatccactcctgccgggggaggatgagggagaccagctcgcttgtatgatcgagctgctcggtatgccttcccagaagctgctcgacgcatccaaaagggctaaaaattttgtgtccagcaagggatatcctcgatattgcactgttaccacactgtcggatggctccgtggtcctaaatggcggtcgttctcgcagaggcaaattgcgaggtccacctgaatcacgggaatggggtaatgctctgaaggggtgcgatgacccactttttctggattttctgaagcagtgtctggagtgggaccccgccgttcggatgactcccggtcaggcgctgagacatccgtggttgaggcggaggctacccaagcctccgacgggggagaaaacctcggtaaaaagaatcactgagagtacgggcgccatcacctccatttccaagctgcctcctccttcctcctccgcctcaaaactgcgcactaacctcgctcagatgactgacgctaatgggaacatccagcaaagaacagtgctccctaaactggtgagttag

SEQ ID NO: 165469 - DNA, 1806 bp, Artificial Sequence
  derived and/or modified sequence
atgcttacccggaaaccctcagcagccgcacctgctgcctatcctaccggccgtggcggagattcggccgtgcgacagcttcaggctagcccaggtcttggagctggagcaacacggtcaggcgtgggcacaggaccaccgtctccaatcgctcttcccccactaagggcaagcaacgctgcagccgcagcccatactatcgggggttccaaacacaccatgaacgaccatctccacgtgggttcccacgcccacggtcagattcaggtgcagcagttgttcgaggataactctaataaacgcactgtgcttacaacacaacccaacggcctgacaactgtcgggaagacgggtttaccggtcgtgccagagcggcagcttgactccattcacaggcgccaagggagcagcacttctctcaaaagcatggaaggcatgggaaaagtgaaggctacccccatgaccccagagcaggcaatgaagcagtatatgcagaagctgacagcctttgaacatcatgaaatctttagctaccccgaaatctactttcttgggctgaacgctaagaagaggcagggaatgactggagggcctaacaatgggggatatgatgacgatcaggggtcatatgtacaagtccctcatgatcacgttgcttaccgttatgaggtgctcaaggttattggcaagggcagcttcgggcaagtggtgaaagcttacgatcataaggtccaccagcatgtcgcgcttaagatggtgagaaatgaaaagcgatttcatagacaggcagctgaagagatccgtatattagagcatctgcgaaagcaggataaggacaatactatgaatgtcattcatatgttggagaattttaccttccgtaatcatatctgcatgaccttcgagttgctgtccatgaacctctatgagctaataaagaagaataaattccaaggcttttcactgcctctggtgcgtaagtttgcgcactctatcctccagtgtttggacgcattacacaaaaatagaatcattcactgcgacttgaagccggaaaatattctgctgaaacaacagggccgttcaggcatcaaggtcatcgatttcggtagcagttgctacgagcaccagcgtgtctatacttatatacagagcagattttatcgtgccccagaagtcattctgggcgctaggtacggtatgccaatcgacatgtggtcactcggttgtatattggccgaattgcttactggctacccgctgctacccggagaagatgaaggagatcagctcgcttgcatgatcgaattgctgggtatgccctctcagaagctcctggatgccagcaagcgcgctaagaattttgtatccagcaaaggatacccacgttactgtacagtgaccacattaagcgacggctccgtggtgctaaacggtggacgaagcaggcgcggaaagttgcgcggaccgcctgaatctcgggagtggggcaatgctcttaagggttgtgatgaccctctatttcttgacttccttaaacagtgtctggagtgggatccagcagtgagaatgactccaggacaggcattgaggcacccatggctgagacgcaggcttccaaaacctcccacgggcgagaaaacaagcgttaaacggatcaccgaaagcaccggtgccataacctcgatctccaagcttccacccccttcgtcctctgcctccaaactaagaacgaacctcgcccagatgaccgacgcaaatggcaacattcagcaaagaacagtgctgccgaaactcgtttcttag

SEQ ID NO: 165470 - DNA, 1587 bp, Artificial Sequence
  derived and/or modified sequence
atgaatgaccacttacatgtgggcagccatgcccatgggcagattcaggtgcagcagctgtttgaagacaactcaaacaaacggacagttctgacgacccaacctaacggcctcacgactgtgggcaagactggcctgccagttgttcccgagagacagctcgatagcattcatagacggcagggcagctcaacctccctaaagtccatggagggaatgggaaaggtgaaagcaacaccgatgactccggaacaggctatgaagcagtatatgcagaaactcaccgcattcgagcaccacgaaattttctcgtatccagagatctacttcctgggcctcaatgctaagaaacgacagggaatgacaggcggtccaaacaatgggggttacgatgacgatcagggctcgtacgtacaggtgccgcatgatcatgtcgcgtacagatacgaagtgctgaaggttattggaaagggatcctttggacaggtggttaaagcctatgatcataaagtgcaccagcatgtggctctcaaaatggtacgcaacgaaaaaaggttccaccggcaggcagctgaggaaattaggattcttgaacatctccgaaagcaggacaaggacaatacgatgaatgtgatccatatgttagaaaatttcacctttagaaatcacatttgtatgacctttgaactcctgtctatgaatctgtatgaactgattaaaaagaataagttccaagggttttccctgcctctcgtgagaaaattcgcccattcaatccttcaatgtttagacgccctgcacaagaatcgcatcatccactgcgacctgaagcctgagaacatcctattaaagcagcaagggcgatccggcattaaggtaatcgactttgggtcctcgtgctacgagcaccagcgagtgtacacctacattcagtccagattttaccgcgcacctgaggttatcttgggggcaagatatggcatgcccattgatatgtggagcctgggatgcattcttgcggagctgctgaccggttacccactattgcccggtgaagatgagggggatcagctagcatgtatgatcgagttattagggatgcccagccagaaactgctggacgcctctaaaagggccaaaaatttcgtgtcttcaaagggctatccccgatattgcactgtgactaccctgtccgatggctctgtagttctgaacggcggacggtcccgacggggaaagctgcgcggacccccagaatcccgcgaatggggcaacgcactgaagggctgcgatgatcctctcttcctggatttcttgaaacagtgcctggaatgggacccagccgtgcgtatgactcctggtcaggcattacgtcatccgtggcttagacggcgactcccaaagccccctactggtgaaaagacctctgtgaagcggattaccgaaagcaccggagccatcacctcaatcagcaagttacctccaccaagttcatctgcaagcaaactgcggacaaacttagctcaaatgaccgatgccaacgggaacattcagcaacggacagtgctgcccaagctcgtctcatag

SEQ ID NO: 165471 - DNA, 1806 bp, Artificial Sequence
  derived and/or modified sequence
atgctgaccagaaagcccagcgccgccgcccccgccgcctaccccaccggcagaggcggcgacagcgccgtgagacagctgcaggccagccccggcctgggcgccggcgccaccagaagcggcgtgggcaccggcccccccagccccatcgccctgccccccctgagagccagcaacgccgccgccgccgcccacaccatcggcggcagcaagcacaccatgaacgaccacctgcacgtgggcagccacgcccacggccagatccaggtgcagcagctgttcgaggacaacagcaacaagagaaccgtgctgaccacccagcccaacggcctgaccaccgtgggcaagaccggcctgcccgtggtgcccgagagacagctggacagcatccacagaagacagggcagcagcaccagcctgaagagcatggagggcatgggcaaggtgaaggccacccccatgacccccgagcaggccatgaagcagtacatgcagaagctgaccgccttcgagcaccacgagatcttcagctaccccgagatctacttcctgggcctgaacgccaagaagagacagggcatgaccggcggccccaacaacggcggctacgacgacgaccagggcagctacgtgcaggtgccccacgaccacgtggcctacagatacgaggtgctgaaggtgatcggcaagggcagcttcggccaggtggtgaaggcctacgaccacaaggtgcaccagcacgtggccctgaagatggtgagaaacgagaagagattccacagacaggccgccgaggagatcagaatcctggagcacctgagaaagcaggacaaggacaacaccatgaacgtgatccacatgctggagaacttcaccttcagaaaccacatctgcatgaccttcgagctgctgagcatgaacctgtacgagctgatcaagaagaacaagttccagggcttcagcctgcccctggtgagaaagttcgcccacagcatcctgcagtgcctggacgccctgcacaagaacagaatcatccactgcgacctgaagcccgagaacatcctgctgaagcagcagggcagaagcggcatcaaggtgatcgacttcggcagcagctgctacgagcaccagagagtgtacacctacatccagagcagattctacagagcccccgaggtgatcctgggcgccagatacggcatgcccatcgacatgtggagcctgggctgcatcctggccgagctgctgaccggctaccccctgctgcccggcgaggacgagggcgaccagctggcctgcatgatcgagctgctgggcatgcccagccagaagctgctggacgccagcaagagagccaagaacttcgtgagcagcaagggctaccccagatactgcaccgtgaccaccctgagcgacggcagcgtggtgctgaacggcggcagaagcagaagaggcaagctgagaggcccccccgagagcagagagtggggcaacgccctgaagggctgcgacgaccccctgttcctggacttcctgaagcagtgcctggagtgggaccccgccgtgagaatgacccccggccaggccctgagacacccctggctgagaagaagactgcccaagccccccaccggcgagaagaccagcgtgaagagaatcaccgagagcaccggcgccatcaccagcatcagcaagctgcccccccccagcagcagcgccagcaagctgagaaccaacctggcccagatgaccgacgccaacggcaacatccagcagagaaccgtgctgcccaagctggtgagctag

SEQ ID NO: 165472 - DNA, 1587 bp, Artificial Sequence
  derived and/or modified sequence
atgaacgaccacctgcacgtgggcagccacgcccacggccagatccaggtgcagcagctgttcgaggacaacagcaacaagagaaccgtgctgaccacccagcccaacggcctgaccaccgtgggcaagaccggcctgcccgtggtgcccgagagacagctggacagcatccacagaagacagggcagcagcaccagcctgaagagcatggagggcatgggcaaggtgaaggccacccccatgacccccgagcaggccatgaagcagtacatgcagaagctgaccgccttcgagcaccacgagatcttcagctaccccgagatctacttcctgggcctgaacgccaagaagagacagggcatgaccggcggccccaacaacggcggctacgacgacgaccagggcagctacgtgcaggtgccccacgaccacgtggcctacagatacgaggtgctgaaggtgatcggcaagggcagcttcggccaggtggtgaaggcctacgaccacaaggtgcaccagcacgtggccctgaagatggtgagaaacgagaagagattccacagacaggccgccgaggagatcagaatcctggagcacctgagaaagcaggacaaggacaacaccatgaacgtgatccacatgctggagaacttcaccttcagaaaccacatctgcatgaccttcgagctgctgagcatgaacctgtacgagctgatcaagaagaacaagttccagggcttcagcctgcccctggtgagaaagttcgcccacagcatcctgcagtgcctggacgccctgcacaagaacagaatcatccactgcgacctgaagcccgagaacatcctgctgaagcagcagggcagaagcggcatcaaggtgatcgacttcggcagcagctgctacgagcaccagagagtgtacacctacatccagagcagattctacagagcccccgaggtgatcctgggcgccagatacggcatgcccatcgacatgtggagcctgggctgcatcctggccgagctgctgaccggctaccccctgctgcccggcgaggacgagggcgaccagctggcctgcatgatcgagctgctgggcatgcccagccagaagctgctggacgccagcaagagagccaagaacttcgtgagcagcaagggctaccccagatactgcaccgtgaccaccctgagcgacggcagcgtggtgctgaacggcggcagaagcagaagaggcaagctgagaggcccccccgagagcagagagtggggcaacgccctgaagggctgcgacgaccccctgttcctggacttcctgaagcagtgcctggagtgggaccccgccgtgagaatgacccccggccaggccctgagacacccctggctgagaagaagactgcccaagccccccaccggcgagaagaccagcgtgaagagaatcaccgagagcaccggcgccatcaccagcatcagcaagctgcccccccccagcagcagcgccagcaagctgagaaccaacctggcccagatgaccgacgccaacggcaacatccagcagagaaccgtgctgcccaagctggtgagctag

SEQ ID NO: 165473 - DNA, 566 bp, Artificial Sequence
  derived and/or modified sequence
ttcctccgtctttctttggaagagggttgtcgctgcccagcggggttggagggggggtctgggtgactttctcccccctgaccctcttttgtctcctcccgcacgtggcttccaggccgaggtggggacagcgccgttcgtcagcttcaggcttccccggggctcggtgcaggggccacccggagcggagtggggactggcccgccctcccccatcgccctgccgcctctccgggccagcaacgctgccgccgcagcccacacgattggcggcagtaagcacacaatgaatgatcacctgcatgtcggcagccacgctcacggacagatccaggttcaacagttgtttgaggataacagtaacaagcggacagtgctcacgacacaaccaaatgggcttacaacagtgggcaaaacgggcttgccagtggtgccagagcggcagctggacagcattcatagacggcaggggagctccacctctctaaagtccatggaaggcatggggaaggtgaaagccacccccatgacacctgaacaagcaatgaagcaatacatgcaaaaact

SEQ ID NO: 165474 - DNA, 8912 bp, Artificial Sequence
  derived and/or modified sequence
gtgtgtgagtgcgcgggggcgcgcgcgcgcgggcccgggagaggctcccgagccaggcggtcttcggtcctcgcagcgcttccagctccccgcgcccctatgtgagggagacggggaggcccgcggcgcgcaggggagggcgaggcatgtgcacgggccggagggtgctgcagccgcccgaggaagaggaggacggcggcgaggaggagagcggggggctcgcggcggcgggccccggccgaggggatgcagtggactgtgtgtgtctggctgtagcagacgcgaggcggcgacgaggcgccggggacccgcgcgaggggcggccgggaggcggcggcggcggccgccagaagtagcagcaggaccggcggcggcgacggcagccctgaaatgcattttcctctccagcggccatgttaaccaggaaaccttcggccgccgctcccgccgcctacccgaccggccgaggtggggacagcgccgttcgtcagcttcaggcttccccggggctcggtgcaggggccacccggagcggagtggggactggcccgccctcccccatcgccctgccgcctctccgggccagcaacgctgccgccgcagcccacacgattggcggcagtaagcacacaatgaatgatcacctgcatgtcggcagccacgctcacggacagatccaggttcaacagttgtttgaggataacagtaacaagcggacagtgctcacgacacaaccaaatgggcttacaacagtgggcaaaacgggcttgccagtggtgccagagcggcagctggacagcattcatagacggcaggggagctccacctctctaaagtccatggaaggcatggggaaggtgaaagccacccccatgacacctgaacaagcaatgaagcaatacatgcaaaaactcacagccttcgaacaccatgagattttcagctaccctgaaatatatttcttgggtctaaatgctaagaagcgccagggcatgacaggtgggcccaacaatggtggctatgatgatgaccagggatcatatgtgcaggtgccccacgatcacgtggcttacaggtatgaggtcctcaaggtcattgggaaggggagctttgggcaggtggtcaaggcctacgatcacaaagtccaccagcacgtggccctaaagatggtgcggaatgagaagcgcttccaccggcaagcagcggaggagatccgaatcctggaacacctgcggaagcaggacaaggataacacaatgaatgtcatccatatgctggagaatttcaccttccgcaaccacatctgcatgacgtttgagctgctgagcatgaacctctatgagctcatcaagaagaataaattccagggcttcagtctgcctttggttcgcaagtttgcccactcgattctgcagtgcttggatgctttgcacaaaaacagaataattcactgtgaccttaagcccgagaacattttgttaaagcagcagggtagaagcggtattaaagtaattgattttggctccagttgttacgagcatcagcgtgtctacacgtacatccagtcgcgtttttaccgggctccagaagtgatccttggggccaggtatggcatgcccattgatatgtggagcctgggctgcattttagcagagctcctgacgggttaccccctcttgcctggggaagatgaaggggaccagctggcctgtatgattgaactgttgggcatgccctcacagaaactgctggatgcatccaaacgagccaaaaattttgtgagctccaagggttatccccgttactgcactgtcacgactctctcagatggctctgtggtcctaaacggaggccgttcccggagggggaaactgaggggcccaccggagagcagagagtgggggaacgcgctgaaggggtgtgatgatccccttttccttgacttcttaaaacagtgtttagagtgggatcctgcagtgcgcatgaccccaggccaggctttgcggcacccctggctgaggaggcggttgccaaagcctcccaccggggagaaaacgtcagtgaaaaggataactgagagcaccggtgctatcacatctatatccaagttacctccaccttctagctcagcttccaaactgaggactaatttggcgcagatgacagatgccaatgggaatattcagcagaggacagtgttgccaaaacttgttagctgagctcacgtcccctgatgctggtaacctgaaagatacgacattgctgagccttactgggttgaaaaggagtagctcagacctgtttttatttgctcaataactctactcatttgtatcttttcagcacttaattttaatgtaagaaagttgttcattttgtttttataaaatacatgaggacaatgctttaagtttttatactttcagaaactttttgtgttctaaaagtacaatgagccttactgtatttagtgtggcagaataataacatcagtggcaggccactgattacttcatgactgccacgcatttacagattggtgtcaaagacattcactatgtttttatggttcatgttatatcctccccagggtgacagccccttaaggccctccttttccctccatgctccaggtccatgcacaggtgtagcatgtcctgcttccgtttttcataaattaatctgggtgttgggggtagtgggaggagaacggtcagaatcaaagtgacattctaagaaaaactgtaccttagagattttcctctagtgctcaaacaaatacaaaataagatccccaaggtttaaactgcccagttagcattctgacattctaaaagccggcaaagcagcttttagtggataaatgggaatggaaacgtgtgtgttcctccaaattttctagtatgatcggtgagctgttttgtaaagaagcctcatattacagagttgcttttgcacctaaatttagaattgtattccatgaactgttcctcccttttctctgcttttctcctctctgttcctcttttaataccacacgtctgttgcttgcatttagtttgtcttcttccttcagctgtgtatcccagactgttaatacagaaaagagacatttcagctgtgattatgaccattgtttcatattccaattaaaaaaagaacagcagcctagctacttaaggtggggatttccatagttccaaagaagatttagcagattagagtgagttcacacttttcaggtgccactgtaaggttctctcagcctgggaaactatcaactctttctttaaaaagaaagagggttgaaaatcctctggacgaacagaagtcactttggctgttcagtaaggccaatgttaacaacacgtttagaggaggaaaagttcaacctcaagttaaatggtttgacttattcttcgtatcattagaagaaccccagagatagcattcctctattttattttactttcttttggattgcactgattgtttttgtgggaatgacactttatctggcaaagtaactgagagtttggtaaaagaatattttcttctctgaataataattattttcacagtgaaaatttcagtattttatcactaatgtatgagcaatgatctatatcaatttcaaggcacgtgaaaaaaattttttagtatgtgcaatttaatatagaaagatttctgcctgtttggacaataggttttgggtagtacagattaggataagtaagcttatatatgcacagagattattgtattacctgtaaattgatttacaagtacttaaaagcgtggtccccagtgaggccaagaaagtttccggttaagttctttaataataatcctacagtttatcttaagaaaaaaaaaaaggtttgaaaaaaacactttaatttaggcttcgttggttgatggtggaaaaaaatgctcaggaaatatttcagatatttgccaaaaaaccagtaataaggttaccttattaaaatagtgatatttgctttactatttaaggtgtcactgataaattaatttgtacttctgtgtttagaaattatagcttcttttcccttagtcaaattttttagcatattatacacatttctgtgtaatctgtggaagtgcaataatatgttagtaagttacattttaaataatgctcatgtgacaatactcccaatcaatggcttatagaatttaaagatctgtatattagattttggcttaaaggcatgagaagtataagacttggtttggtggctttgtaagaccaccagcctcttaatgatggttagcttctttaggtcattaaatcaataaaaacatataatgctgttttgctcttctaatgctcctcttccatttccagttatcttcacatttacatttaaatatacaaacctgagcctgccattattaatttccctataaaatgacgatacatgtgaacatttataaatggactaatactgcttgtctttcccccaccgcacaaaactggttcttaagatgccagcaatgaatttgagactatctttatttataaatggaaaccggaaacttttataccaaactataataatgtgcagcactgtagggcttttttttttttccctccaaatacagtgaaatttttttattcacaagagctgccacatctcagcatttagtaatagagctgctttaataaaattctagtttgattgtcatgtcaaaaaaagaaaaatgttgcatctttgtgattttaaaacataaattaatgaaggctctgataggctattaggagttggcttggaaacagtttttggtctcacaggttaccattgtttggggatgtctgagctgttttcagatctaggaatagcacagtgttgtcttgtctttggcagtctcatttggctctgtttcttgcaccaccagcgtgttcattaccacttaaatatattgctacagcagtggaacaacagagtggtgcaagacactgtagattaacggtagaggagaaattgtgcccttagtgttaacaatgtgccttttgttctgaatgccatgttgtagggcatgcattttttggcctctttaactcttcgaattctagtcagtaagaatggaacccatctctgcaaagatacatctgtcttaaatatctagttacaggccttaatagaaaccataaggcatgactcatcttcaggcactgaaaaaagataaccatcaggtagtgttacacaaggacttcctatatttaaggggttaaagatggtctttgttgtatcttaacatcagactgatttttacattttttttttgttatgctaacactagacaaaaatcaactgtatttgtaaaaatttacctcaaaccatttaattttatagtgtgattaatcccagggcatttggtatgaaccaaagtgcattccttttatatgtgcctggctctagtaaggatggccagggatttttacaatttgggtgcaaggcacttaagccacttttaaacttaatgggtggtttggggtcgtgttaaatgactccatcagaatgttagaaaacactttaggcatcagtagcattgggccatattggaatcctaaagtgtgaattattttaaggagagcattcatttttgtaatttttttcatcaaaaatatttctggtaagcagaagactttttaaaaaaactgatctggtctcggtaaaggttttaatattgcccaacataatgctgtaatagcattaaaaaaagtatttgtgaactctgtttcttaggggcttgtacatctctctgctatggacatacataaaattaattgtaattatactcagctcaactgctacagttctgtctaggcagtggcttgggtttttatcgagcaacaacttagacacgtgactgtaatatgctgcaactgtgtgtactgaaaatatgtgaaaatggttgaatgtggactgtgtatatatgtatgtaaaaatttctgtgagatgctgctgtcgccacttaacattaaatatgttctagtggattttaatcctagtggccagttctatgatactgtatgtattatacagctgatgacaggagtaagactgtttagtgaatatctgttaaattttattgttgtggccagagataatttcagaataaaattttaatgtcctaccttacttctctcccctttctaactataatttaactcctgatctatttctggtattatcctttgtcaattagcctggagagggtttagaatgcaaaatggatagctctatatcagggtcttgagaagttaaaataattcattctactagtttgttcatagcaatactttattagttcaatataagtatgcagattccaagtggaaaaacaaaggttttagtaagtagttcttgcttttcccaggatattctattccttcacctgtcagatttttatgttaacttttttatatatagcctctgctgtgttctttattatgctagagcttcatatcttcttttattttaaccttcacaatgatagttaagctgggggagcagaacctgtcaattattccccaccagtcttcattcttttctctgcacaagttctggtaaattattctaatgtgctctaaccagttccacccaatgttttttaatgcttatgagtttgcagtttttgtacttggtggtctctgtggttcacatttttttgtgttgtagtgtctcctgcctcggttggctcagaaaataaggcctaggaactgcaattagctcatgatttgtcaagttcagttagtaccaagctaagagtttacttacagatgacagcaagcagatgctctagtaattcgtcagacattgcagggatattgtgtagtcagatattaccctcttgtggaaagaactacctcacatcattatttatttcccttctgttaccaacagccaaggaattacttagtgtggctccctgcatcaatactgggatatgcttaaacaagggaatgccataagagttcccaattgcctcgtcatagcctgggccatagatttttgttactgctaatcttgcttcttaaagttcacacccagtgcaaaaaacccaatcagcaaactaaccccaaaatccaatatatttagaaatgtaagtgttaagagatgtgcattatgtacaaaattgaaaattggtgctaaagtggcaatgtcaatttaaaatttcttgtccagatctgactgactgactcaggagattatagttcctactcattctctttccttttatcagatctttcaaaagcgctttttaaaattgatcaatgtgcaattctgtttgagtctctacagtcctatcccttttggaatgaacagctacacaaataaatattcttggaacttcgaagttgtcttcaaactagctctagaaaatgtccctagttgacattagtgttggtctgttagaaggggaaattgatttgactgcttcatgttttgaaaagagcattaagagggatttgaggaaggtatatgtggctttctttttttttcttaagtttgaattacacttgatttcctttgggttattaggcagataaacccttgtcattagtaatacttagcactgtccaaaatgaaaaatgactgccagtgtgttgcacatacataagaaaattacatcttactgcgaagtctttggtttgtttccttatttggtttgactttgacttactattttgctatggtcatatccttaatatctgcggtacatttcatatatatatatggggtgggagcataattgccattcccatgtgtctcaaggaagcttaatgaggaaactaatgagttaatattaactcttctgaagaaagctgacattttaggagtattaagtcatctgtcgttaaggagcagcaagaatatattatgattgtatcacatgttccagaagagcattaccccttacatagaaagctccttggagatttcatgatgttggatgaacatcagtttatccttatacatccctatgagctataattatcctcatttgatacttgaggaaactgaagtgacttgctccaaagttgactacaaaaacattgcagtttgaggcttaggttgtaatcaggtaattttggtcttggacagtaagggaaaatccataatacataaaacacaaaagtttagaaagggggggaagttgagctagcaatgggcatttctattatttaagttacatatcagtttccaggaatatttttcaaatgggacaaactaaaaagttgaggactagagcatcgtagtgtctaagtgcacctaataacttaatgcatgtgcacacaccctcagttaatttgtaagagagtgacttctcattgttatttgtggagaggctaattatagtagcttcattctttattttctgtgttcttaaatttttttttacatttgaaagtatgaaaatactatttttgacactttactgatactcagggattaaaagttaaattttactgactgtagcagcaggtaaatctcttaaatttactcaggtttcctatcctttgcctccatatttaagaaaatatagaatgcctgccagggaaatatataaaaataaaaatttcaaatacaattttaaaataccaatttgtaaataaaccaattttacaaactaaaatattgtgtctttccttgctttttatcccaatttatctcccctcctaagtttgaggagttttatatattaaggctatttcttcatttgtaaaaatgaagtatgctatttgcaaagcaaaagcccatgaaaagccccaaatcatttaagtaaagcttactgaattgttttcaattgttttgggagaaatgtaactaattataagcaatttatgtggaccagcagcaaataaatgtatgagtaca

SEQ ID NO: 165475 - DNA, 2209 bp, Artificial Sequence
  derived and/or modified sequence
cggtcttcggtcctcgcagcgcttccagctccccgcgcccctatgtgagggagacggggaggcccgcggcgcgcaggggagggcgaggcatgtgcacgggccggagggtgctgcagccgcccgaggaagaggaggacggcggcgaggaggagagcggggggctcgcggcggcgggccccggccgaggggatgcagtggactgtgtgtgtctggctgtagcagacgcgaggcggcgacgaggcgccggggacccgcgcgaggggcggccgggaggcggcggcggcggccgccagaagtagcagcaggaccggcggcggcgacggcagccctgaaatgcattttcctctccagcggccatgttaaccaggaaaccttcggccgccgctcccgccgcctacccgaccgattggcggcagtaagcacacaatgaatgatcacctgcatgtcggcagccacgctcacggacagatccaggttcaacagttgtttgaggataacagtaacaagcggacagtgctcacgacacaaccaaatgggcttacaacagtgggcaaaacgggcttgccagtggtgccagagcggcagctggacagcattcatagacggcaggggagctccacctctctaaagtccatggaaggcatggggaaggtgaaagccacccccatgacacctgaacaagcaatgaagcaatacatgcaaaaactcacagccttcgaacaccatgagattttcagctaccctgaaatatatttcttgggtctaaatgctaagaagcgccagggcatgacaggtgggcccaacaatggtggctatgatgatgaccagggatcatatgtgcaggtgccccacgatcacgtggcttacaggtatgaggtcctcaaggtcattgggaaggggagctttgggcaggtggtcaaggcctacgatcacaaagtccaccagcacgtggccctaaagatggtgcggaatgagaagcgcttccaccggcaagcagcggaggagatccgaatcctggaacacctgcggaagcaggacaaggataacacaatgaatgtcatccatatgctggagaatttcaccttccgcaaccacatctgcatgacgtttgagctgctgagcatgaacctctatgagctcatcaagaagaataaattccagggcttcagtctgcctttggttcgcaagtttgcccactcgattctgcagtgcttggatgctttgcacaaaaacagaataattcactgtgaccttaagcccgagaacattttgttaaagcagcagggtagaagcggtattaaagtaattgattttggctccagttgttacgagcatcagcgtgtctacacgtacatccagtcgcgtttttaccgggctccagaagtgatccttggggccaggtatggcatgcccattgatatgtggagcctgggctgcattttagcagagctcctgacgggttaccccctcttgcctggggaagatgaaggggaccagctggcctgtatgattgaactgttgggcatgccctcacagaaactgctggatgcatccaaacgagccaaaaattttgtgagctccaagggttatccccgttactgcactgtcacgactctctcagatggctctgtggtcctaaacggaggccgttcccggagggggaaactgaggggcccaccggagagcagagagtgggggaacgcgctgaaggggtgtgatgatccccttttccttgacttcttaaaacagtgtttagagtgggatcctgcagtgcgcatgaccccaggccaggctttgcggcacccctggctgaggaggcggttgccaaagcctcccaccggggagaaaacgtcagtgaaaaggataactgagagcaccggtgctatcacatctatatccaagttacctccaccttctagctcagcttccaaactgaggactaatttggcgcagatgacagatgccaatgggaatattcagcagaggacagtgttgccaaaacttgttagctgagctcacgtcccctgatgctggtaacctgaaagatacgacattgctgagccttactgggttgaaaaggagtagctcagacctgtttttatttgctcaataactctactcatttgtatcttttcagcacttaattttaatgtaagaaagttgttcattttgtttttataaaatacatgaggacaatgctttaagtttt

SEQ ID NO: 165476 - DNA, 568 bp, Artificial Sequence
  derived and/or modified sequence
gaaaatgcatttatgtttaggggtgcgcatggcaggggaggggtctctgcggcgctttcggccggagggcagcagcgattggcggcagtaagcacacaatgaatgatcacctgcatgtcggcagccacgctcacggacagatccaggttcaacagttgtttgaggataacagtaacaagcggacagtgctcacgacacaaccaaatgggcttacaacagtgggcaaaacgggcttgccagtggtgccagagcggcagctggacagcattcatagacggcaggggagctccacctctctaaagtccatggaaggcatggggaaggtgaaagccacccccatgacacctgaacaagcaatgaagcaatacatgcaaaaactcacagccttcgaacaccatgagattttcagctaccctgaaatatatttcttgggtctaaatgctaagaagcgccagggcatgacaggtgggcccaacaatggtggctatgatgatgaccagggatcatatgtgcaggtgccccacgatcacgtggcttacaggtatgaggtcctcaaggtcattgggaa

SEQ ID NO: 165477 - protein, 589 aa, Artificial Sequence
  derived and/or modified sequence
MAVPPGHGPFSGFPGPQEHTQVLPDVRLLPRRLPLAFRDATSAPLRKLSVDLIKTYKHINEVYYAKKKRRAQQAPPQDSSNKKEKKVLNHGYDDDNHDYIVRSGERWLERYEIDSLIGKGSFGQVVKAYDHQTQELVAIKIIKNKKAFLNQAQIELRLLELMNQHDTEMKYYIVHLKRHFMFRNHLCLVFELLSYNLYDLLRNTHFRGVSLNLTRKLAQQLCTALLFLATPELSIIHCDLKPENILLCNPKRSAIKIVDFGSSCQLGQRIYQYIQSRFYRSPEVLLGTPYDLAIDMWSLGCILVEMHTGEPLFSGSNEVDQMNRIVEVLGIPPAAMLDQAPKARKYFERLPGGGWTLRRTKELRKDLVLRMLEYEPAARISPLGALQHGFFRRTADEATNTGPAGSSASTSPAPLDTCPSSSTASSISSSGGSSGSSSDNRTYRYSNRYCGGPGPPITDCEMNSPQVPPSQPLRPWAGGDVPHKTHQAPASASSLPGTGAQLPPQPRYLGRPPSPTSPPPPELMDVSLVGGPADCSPPHPAPAPQHPAASALRTRMTGGRPPLPPPDDPATLGPHLGLRGVPQSTAASS

SEQ ID NO: 165478 - DNA, 1770 bp, Artificial Sequence
  derived and/or modified sequence
atggctgttcctccaggacacggccctttctccggctttccaggacctcaggagcatacacaggtgctgccagacgtccgtctacttcctaggagattgcccctcgcatttcgggacgcgactagcgcccctttgcggaaattgtctgtggaccttatcaagacctataagcatattaacgaagtgtattacgctaagaagaaaagacgcgcgcaacaggcgccaccacaggactccagcaacaagaaagaaaagaaagtactgaaccacggctacgacgatgataaccacgattacattgtgcgatctggagagagatggctcgagaggtacgaaattgacagcctgatcggcaaggggagctttggacaggtggtgaaggcttatgaccatcagacacaagagcttgtggccattaagatcattaagaataagaaggctttcttgaatcaggcacaaattgaattacgacttctagagcttatgaaccaacatgacaccgagatgaagtactacatcgtgcacctcaaacgtcatttcatgtttcggaaccatctgtgcctggtgttcgaacttctttcctataacctatacgatctgctgagaaacactcacttcagaggtgtatccttgaacctgaccagaaaactggcccagcagctatgtaccgccttactgttccttgcgactccagagctgagcattattcactgtgatctcaaaccagagaacatactgctctgcaatcccaaaaggtccgccataaaaatagttgactttggcagcagctgccagctgggccagagaatttaccaatacattcagtcccggttctataggagcccggaagtgttactcggtactccttatgatctagcaattgatatgtggtccctcgggtgcatcttggttgaaatgcacactggggaacctttattcagcggatccaacgaggtggatcagatgaatcgcatcgtcgaagtgctggggatcccgcccgccgctatgttagaccaagcgcctaaggcaaggaagtacttcgagaggctcccgggcggcggctggacacttcggcggaccaaagaattacgcaaagatctcgtgctccggatgctcgagtatgagcccgctgcacgaatatcccctctgggcgcactccagcacggctttttccgcagaaccgcagacgaggcaacaaatactggacctgccggaagtagcgcctctacctctcccgctcccctggacacctgtccaagcagttctacagcatccagtataagttccagcggcggctcgtcaggcagcagcagcgacaatcggacatatcgttacagtaacaggtactgcggaggaccaggaccaccgatcactgactgcgagatgaactccccacaggtccccccttctcagccacttcgcccctgggccgggggagacgtcccccataaaactcaccaggcccccgcctcagcttccagtttgccagggacaggcgctcagctgccacctcaaccaaggtacttaggccgtccaccctccccgacatctccacccccccctgagctgatggacgtttcgctggtgggaggccctgccgactgtagcccccctcacccagcccctgctccacagcacccagctgcctccgctcttagaacgcggatgacaggcggccgaccccccctacctccaccggatgaccccgcaacattggggcctcacttagggctcaggggtgtgccccagtctaccgctgccagtagctag

SEQ ID NO: 165479 - DNA, 1770 bp, Artificial Sequence
  derived and/or modified sequence
atggctgtgcccccaggccacggccccttcagcggcttccctggcccccaggagcacacccaggtgctgcctgatgtgcggctgctgccccggcggctgcccctggccttcagagatgccaccagcgcccccctgaggaagctgtctgtggacctgatcaagacctacaagcacatcaatgaggtgtactatgccaagaagaagagaagagcccagcaggccccaccccaggacagcagcaacaagaaggagaagaaggtgctgaaccacggctatgatgatgacaaccacgactacatcgtgcgctctggagagcgctggctggagagatatgaaattgacagcctgattggcaagggcagctttggccaggtggtgaaggcctatgaccaccagacccaggagctggtggccatcaagatcatcaagaacaagaaggccttcctgaaccaggcccagatcgagctgcggctgctggagctgatgaaccagcacgacacagagatgaagtactacatcgtgcacctgaagaggcacttcatgttcaggaaccacctgtgcctggtgtttgagctgctgagctacaacctgtatgacctgctgaggaacacccacttccggggcgtgtccctgaacctgaccaggaagctggcccagcagctgtgcacagccctgctcttcctggccaccccagagctgagcatcatccactgtgacctgaagccagagaacatcctgctgtgcaaccccaagaggtctgccatcaagatcgtggactttggcagcagctgccagctgggccagaggatctaccagtacatccagagccgcttctaccgcagccctgaggtgctgctgggcaccccctatgacctggccatcgacatgtggagcctgggctgcatcctggtggagatgcacactggagagcccctcttcagcggcagcaatgaggtggaccagatgaacagaattgtggaggtgctgggcatccccccagctgccatgctggaccaggcccccaaggccaggaagtactttgagcggctgcccggcggcggctggaccctgcggaggaccaaggagctgaggaaggacctggtgctgaggatgctggagtatgagcctgctgcccgcatcagccccctgggcgccctgcagcacggcttcttccggaggacagcagatgaggccaccaacacaggccctgctggcagcagcgccagcaccagccctgcccccctggacacctgccccagcagcagcacagccagcagcatcagcagcagcggcggcagcagcggcagcagcagtgacaacagaacctaccgctacagcaaccgctactgcggcggccctggcccccccatcacagactgtgagatgaacagcccccaggtgccccccagccagcccctgcggccctgggccggaggagatgtgccccacaagacccaccaggccccagccagcgccagcagcctgcccggcaccggggcccagctgcccccccagccccgctacctgggccggccccccagccccaccagccccccacctcctgagctgatggatgtgtccctggtgggcggccctgctgactgcagccccccccacccagccccagccccccagcaccctgctgccagcgccctgcggaccaggatgactggaggccggccccccctgcccccaccagatgatcctgccaccctgggcccccacctgggcctgcggggcgtgccccagagcacagctgccagcagctag

SEQ ID NO: 165480 - DNA, 1770 bp, Artificial Sequence
  derived and/or modified sequence
atggccgtgccccccggccacggccccttcagcggcttccccggcccccaggagcacacacaagttctcccagacgtccgcttgttgccccgccgcctacccctcgcattccgcgacgccactagtgctccacttagaaagttaagcgtggacttgataaaaacctataagcacatcaacgaagtttactatgctaagaaaaaacggagggctcagcaggctcccccccaagactcgagcaataagaaggagaagaaagtcctgaatcacggctatgacgatgataaccatgactacatcgtgagatctggtgagcgttggctggagcgctatgagatcgatagcctgataggaaaaggttccttcggacaggtggtcaaagcatatgatcaccaaactcaggaattggtcgctatcaaaattatcaagaataagaaggccttcttgaaccaggcacagatcgagttgcgcctgttggagctgatgaatcagcacgacactgagatgaagtactatatcgtccatctgaagaggcactttatgtttcgtaatcatttgtgtctggttttcgaactcctcagttataatctgtatgatctactgcgcaacacccactttcgtggagtcagcttgaatctcacacgaaaactggctcagcagctctgcacagcactgctctttctggcaacccctgaactttccatcattcattgtgacctgaaaccagaaaacatcttattgtgtaacccgaaacgttctgccatcaaaattgtggatttcgggagctcatgccagttaggccagcgcatataccagtatatacaaagcaggttctaccgcagtcctgaggtgctactcggaaccccctacgaccttgccatcgacatgtggtccctcgggtgtatcctggtggaaatgcacactggggagcccctgtttagcgggagcaacgaagtggatcagatgaacaggattgtagaggtgctgggtattccccctgctgctatgctcgaccaggcccccaaagccaggaaatatttcgagcgactccctggagggggatggaccctgcggcgcacaaaggagctgcggaaggatctcgtgctgcggatgctcgaatatgagcctgccgcccgcatcagccctctgggggctctgcagcacggattttttcgaaggactgcagacgaggccaccaacacgggacctgccggatcatccgcctctacttcacccgccccactcgacacctgtccatcttcatcgaccgcgagtagtatatcttcaagcggcgggtcgtcaggaagttctagtgacaataggacttaccgatactctaaccgctactgtggcggaccagggcctcctattaccgattgcgagatgaatagccctcaggtccctccaagtcaacccttgcgcccatgggccggcggcgacgtgccccacaagacccaccaggcacccgccagtgcgtcaagtctcccaggaacaggagctcagctccccccccagcccaggtatctggggcgaccccctagccccacgtcccctccacccccagagcttatggacgtcagcctggtgggtggaccagctgattgtagcccgccccaccccgcacctgcccctcaacatcctgctgccagcgctctccgtacacgcatgacgggcggaaggcctcctctccctcctccagatgatccggctaccctgggccctcacctgggactgcggggcgtaccccagagtacagctgcatcttcctag

SEQ ID NO: 165481 - DNA, 1770 bp, Artificial Sequence
  derived and/or modified sequence
atggccgtgccaccagggcatggtccattctccggctttccaggaccccaggaacacactcaggtcctcccggacgtgcggctcctgccacggaggctccccttagcatttcgggatgcaaccagcgccccactgagaaaactctccgtggatctgatcaaaacctacaagcatatcaatgaggtctattacgctaaaaaaaagagacgcgctcaacaggccccaccccaggactcatctaacaagaaagagaagaaggtgctgaatcacggttacgacgatgataaccatgactacatcgtcaggtcgggggagcgctggctcgagcgctatgaaatcgatagcttgatagggaagggatccttcggacaggtcgtgaaagcctacgaccatcaaacccaagaactggtagcaatcaagataataaagaataaaaaggcattcctgaaccaggcccaaatagagttgcggctcctggagcttatgaaccagcacgataccgaaatgaaatattatattgtccacctgaagcgtcactttatgttccggaaccacctctgcctagtgttcgaattgctgagctataacctctatgacctgctaaggaatacacacttccgcggtgtgtctctgaaccttacccgcaaacttgcccagcagctttgcaccgccctcttgtttttggccacgcctgagctgtccatcatccactgtgatttgaaaccagagaacattctgctctgcaaccccaagaggagcgccataaagatcgtggacttcggctcttcctgtcaactaggacagcgtatttatcagtacattcagagccggttctaccgaagccctgaggtgctgctagggacgccatacgatctcgccatcgatatgtggagtctgggatgcatcctagtggagatgcatacaggagagcccctattcagcggctccaacgaggtggatcagatgaaccggattgtggaggtactgggcatcccaccagccgcaatgctggatcaagccccaaaagctcggaagtattttgaacgcctgcccggaggagggtggacactgaggcggaccaaggagctgcggaaggatttggttctgagaatgctcgagtatgagccagcagctcgcattagcccgctgggtgcactgcagcacgggttcttcagacgaacggccgacgaagccacaaataccggtcctgcaggctcttccgcctccacttcacccgctcccctggacacttgtcccagttcctccacagcatcgagcatttcttctagtgggggttcatcagggagcagcagcgacaaccgcacatatagatactccaataggtactgtggtggcccaggaccacccattaccgactgcgagatgaattcaccgcaagtgccgccaagtcagcccctccgcccatgggctgggggagacgtcccccacaagacacatcaagcacccgcatctgcatcctcattacccggaacaggggctcagttacctcctcaacccaggtacctcggcaggcccccaagtccgacctcaccccctccccctgaactgatggacgtcagtctggtgggtggcccagccgattgcagtccaccacatcccgcacctgcccctcagcaccccgcagcatctgccctacgcacgaggatgaccggaggtcgtccacctttaccaccaccagacgatcccgctactcttggccctcatttaggcctgagaggggtccctcagtctacggcagcatcttcttag

SEQ ID NO: 165482 - DNA, 1770 bp, Artificial Sequence
  derived and/or modified sequence
atggccgtgccccccggccacggccccttcagcggcttccccggcccccaggagcacacccaggtgctgcccgacgtgagactgctgcccagaagactgcccctggccttcagagacgccaccagcgcccccctgagaaagctgagcgtggacctgatcaagacctacaagcacatcaacgaggtgtactacgccaagaagaagagaagagcccagcaggcccccccccaggacagcagcaacaagaaggagaagaaggtgctgaaccacggctacgacgacgacaaccacgactacatcgtgagaagcggcgagagatggctggagagatacgagatcgacagcctgatcggcaagggcagcttcggccaggtggtgaaggcctacgaccaccagacccaggagctggtggccatcaagatcatcaagaacaagaaggccttcctgaaccaggcccagatcgagctgagactgctggagctgatgaaccagcacgacaccgagatgaagtactacatcgtgcacctgaagagacacttcatgttcagaaaccacctgtgcctggtgttcgagctgctgagctacaacctgtacgacctgctgagaaacacccacttcagaggcgtgagcctgaacctgaccagaaagctggcccagcagctgtgcaccgccctgctgttcctggccacccccgagctgagcatcatccactgcgacctgaagcccgagaacatcctgctgtgcaaccccaagagaagcgccatcaagatcgtggacttcggcagcagctgccagctgggccagagaatctaccagtacatccagagcagattctacagaagccccgaggtgctgctgggcaccccctacgacctggccatcgacatgtggagcctgggctgcatcctggtggagatgcacaccggcgagcccctgttcagcggcagcaacgaggtggaccagatgaacagaatcgtggaggtgctgggcatcccccccgccgccatgctggaccaggcccccaaggccagaaagtacttcgagagactgcccggcggcggctggaccctgagaagaaccaaggagctgagaaaggacctggtgctgagaatgctggagtacgagcccgccgccagaatcagccccctgggcgccctgcagcacggcttcttcagaagaaccgccgacgaggccaccaacaccggccccgccggcagcagcgccagcaccagccccgcccccctggacacctgccccagcagcagcaccgccagcagcatcagcagcagcggcggcagcagcggcagcagcagcgacaacagaacctacagatacagcaacagatactgcggcggccccggcccccccatcaccgactgcgagatgaacagcccccaggtgccccccagccagcccctgagaccctgggccggcggcgacgtgccccacaagacccaccaggcccccgccagcgccagcagcctgcccggcaccggcgcccagctgcccccccagcccagatacctgggcagaccccccagccccaccagcccccccccccccgagctgatggacgtgagcctggtgggcggccccgccgactgcagccccccccaccccgcccccgccccccagcaccccgccgccagcgccctgagaaccagaatgaccggcggcagaccccccctgcccccccccgacgaccccgccaccctgggcccccacctgggcctgagaggcgtgccccagagcaccgccgccagcagctag

SEQ ID NO: 165483 - protein, 601 aa, Artificial Sequence
  derived and/or modified sequence
MAVPPGHGPFSGFPGPQEHTQVLPDVRLLPRRLPLAFRDATSAPLRKLSVDLIKTYKHINEVYYAKKKRRAQQAPPQDSSNKKEKKVLNHGYDDDNHDYIVRSGERWLERYEIDSLIGKGSFGQVVKAYDHQTQELVAIKIIKNKKAFLNQAQIELRLLELMNQHDTEMKYYIVHLKRHFMFRNHLCLVFELLSYNLYDLLRNTHFRGVSLNLTRKLAQQLCTALLFLATPELSIIHCDLKPENILLCNPKRSAIKIVDFGSSCQLGQRIYQYIQSRFYRSPEVLLGTPYDLAIDMWSLGCILVEMHTGEPLFSGSNEVDQMNRIVEVLGIPPAAMLDQAPKARKYFERLPGGGWTLRRTKELRKDYQGPGTRRLQEDLVLRMLEYEPAARISPLGALQHGFFRRTADEATNTGPAGSSASTSPAPLDTCPSSSTASSISSSGGSSGSSSDNRTYRYSNRYCGGPGPPITDCEMNSPQVPPSQPLRPWAGGDVPHKTHQAPASASSLPGTGAQLPPQPRYLGRPPSPTSPPPPELMDVSLVGGPADCSPPHPAPAPQHPAASALRTRMTGGRPPLPPPDDPATLGPHLGLRGVPQSTAASS

SEQ ID NO: 165484 - DNA, 1806 bp, Artificial Sequence
  derived and/or modified sequence
atggccgtcccacccgggcacggacctttttccggcttcccaggtcctcaggagcacacccaagtgttgccggatgtgcgattgctcccaaggcgcctgcctctggccttccgcgacgcgactagtgcaccactacgcaagctgagcgtcgatttaataaagacctacaaacatattaatgaggtgtactacgccaagaaaaagcgcagggctcagcaggcacctccgcaagactcttcaaacaagaaggaaaagaaagtcttgaaccatgggtacgatgacgataatcatgactatatcgtacgatcgggcgaaagatggctggagcgctatgaaattgattccttgatcggaaagggctccttcggccaggttgtgaaggcttacgatcatcagactcaggaactggtggcgatcaagatcattaagaataaaaaggccttcctcaatcaggcgcagatagagctgcggctgctagaactgatgaatcaacacgatacagagatgaagtactatattgtgcacctcaaaagacactttatgttccggaaccacctttgcctggttttcgagctactgtcctataatctctacgatctccttaggaatacacattttaggggtgtgagtcttaatttaaccaggaagctggcacaacaactgtgcactgccttgttgtttctcgccacaccggagctgtccattattcactgtgatctgaagccagaaaacatccttctgtgcaatcctaagcgcagtgctattaagatcgtggattttggaagctcatgccaattggggcagcgtatataccaatatatccaatctagattctacaggtcaccagaggttctcttgggaacaccgtatgacctagcaatagatatgtggagtctggggtgtattctggtcgagatgcacacaggcgaaccgttgtttagcgggtcgaatgaagttgaccagatgaaccggattgtggaggtgttagggattcctcccgctgcaatgcttgatcaggcaccaaaagcaaggaaatatttcgagagactgcctggcggaggctggaccttgcggcggactaaggaattaagaaaggattaccagggtcctggtacgcgcaggctccaggaggatcttgtgctgcggatgctagagtacgaaccggccgctcggatttcgcctctcggcgctctgcagcatgggtttttccggcggacagccgacgaggccacgaataccggccctgccggatccagtgcgagtacctcaccggcgcctctggacacctgcccatcttctagtaccgcctccagcattagctcgtccggcggcagcagcgggtcctctagtgataacagaacctatcgctactctaaccggtattgcggcggcccaggccctcccatcactgattgcgaaatgaacagccctcaagtgccaccctctcaacctttacgcccttgggcgggtggcgatgtcccgcacaagacccaccaggcccctgcgagcgcttcaagcctgcctggcaccggtgcacagttgccaccccagcctcgctacctgggacgacctccctcacctacatccccacctccgccagaactgatggatgtgtccctggtgggggggccagctgactgtagccctccccaccccgcaccagctccgcagcaccctgccgcatccgccctacgcacacggatgaccggtggacggcccccactacccccgcccgatgaccccgcgacactaggcccacatttaggcctccgcggagtaccccagagtactgccgccagttcctag

SEQ ID NO: 165485 - DNA, 1806 bp, Artificial Sequence
  derived and/or modified sequence
atggctgtgcccccaggccacggccccttcagcggcttccctggcccccaggagcacacccaggtgctgcctgatgtgcggctgctgccccggcggctgcccctggccttcagagatgccaccagcgcccccctgaggaagctgtctgtggacctgatcaagacctacaagcacatcaatgaggtgtactatgccaagaagaagagaagagcccagcaggccccaccccaggacagcagcaacaagaaggagaagaaggtgctgaaccacggctatgatgatgacaaccacgactacatcgtgcgctctggagagcgctggctggagagatatgaaattgacagcctgattggcaagggcagctttggccaggtggtgaaggcctatgaccaccagacccaggagctggtggccatcaagatcatcaagaacaagaaggccttcctgaaccaggcccagatcgagctgcggctgctggagctgatgaaccagcacgacacagagatgaagtactacatcgtgcacctgaagaggcacttcatgttcaggaaccacctgtgcctggtgtttgagctgctgagctacaacctgtatgacctgctgaggaacacccacttccggggcgtgtccctgaacctgaccaggaagctggcccagcagctgtgcacagccctgctcttcctggccaccccagagctgagcatcatccactgtgacctgaagccagagaacatcctgctgtgcaaccccaagaggtctgccatcaagatcgtggactttggcagcagctgccagctgggccagaggatctaccagtacatccagagccgcttctaccgcagccctgaggtgctgctgggcaccccctatgacctggccatcgacatgtggagcctgggctgcatcctggtggagatgcacactggagagcccctcttcagcggcagcaatgaggtggaccagatgaacagaattgtggaggtgctgggcatccccccagctgccatgctggaccaggcccccaaggccaggaagtactttgagcggctgcccggcggcggctggaccctgcggaggaccaaggagctgaggaaggactaccagggccctggcacccggcggctgcaggaggacctggtgctgaggatgctggagtatgagcctgctgcccgcatcagccccctgggcgccctgcagcacggcttcttccggaggacagcagatgaggccaccaacacaggccctgctggcagcagcgccagcaccagccctgcccccctggacacctgccccagcagcagcacagccagcagcatcagcagcagcggcggcagcagcggcagcagcagtgacaacagaacctaccgctacagcaaccgctactgcggcggccctggcccccccatcacagactgtgagatgaacagcccccaggtgccccccagccagcccctgcggccctgggccggaggagatgtgccccacaagacccaccaggccccagccagcgccagcagcctgcccggcaccggggcccagctgcccccccagccccgctacctgggccggccccccagccccaccagccccccacctcctgagctgatggatgtgtccctggtgggcggccctgctgactgcagccccccccacccagccccagccccccagcaccctgctgccagcgccctgcggaccaggatgactggaggccggccccccctgcccccaccagatgatcctgccaccctgggcccccacctgggcctgcggggcgtgccccagagcacagctgccagcagctag

SEQ ID NO: 165486 - DNA, 1806 bp, Artificial Sequence
  derived and/or modified sequence
atggccgtgccccccggccacggccccttcagcggcttccccggcccccaagagcacacccaggtcctgcccgacgtgcgactactaccacggagacttccgctggcgtttcgtgatgcaacatctgcaccattgagaaagttgtcggtcgacttgattaaaacctacaagcatatcaacgaggtatactatgcaaagaaaaaaagaagagcgcagcaggcaccaccccaggacagtagtaataaaaaagaaaaaaaggtacttaaccatgggtatgacgatgacaatcacgattacattgtgagatccggcgagaggtggttggaacgctatgagattgactcactgattggcaaaggctccttcgggcaggtggtcaaggcctacgatcatcagacacaggaactggtggcaattaagattatcaagaataaaaaggcctttttgaaccaagcccaaatcgaactacgcttacttgaactgatgaaccagcacgatacagagatgaagtattacattgtgcatctgaaacggcactttatgtttcgaaaccacctgtgcttggtttttgaactgctgtcctacaacctttatgatctgctgagaaacacacacttccggggtgtttccctaaatctaactcgcaaattggcacagcaactgtgtactgccctccttttcttagctacccctgagttaagtatcatacattgtgaccttaagcctgagaacatactcctgtgcaaccctaaacggtccgccatcaagatcgtggactttgggagctcctgccagttggggcagcgcatctaccaatacattcagtcacgcttttaccggtctcccgaggtactgctgggcaccccctacgacctcgctatcgacatgtggagtctgggatgcattcttgtcgagatgcatacaggggaaccactctttagcggtagcaacgaggtggaccagatgaatagaatcgtcgaagtcctcggaatccccccagccgcgatgctcgaccaggctcccaaggcaaggaaatactttgagcggctgcctgggggaggatggacactgagacgcactaaagagctgagaaaagattaccagggacctggaactcgaagactccaggaggacctcgtgcttcgaatgctggaatatgagcccgcggcacggatcagtcccttaggggctttgcagcatggattctttagacgaaccgcagacgaagcaaccaatacaggcccagccggttcatctgcaagtacctcccccgccccactcgacacctgtccctcaagctcaacagcaagctctatcagcagctctgggggttccagtgggagctccagcgacaacaggacgtaccggtactctaacagatactgtgggggacctgggccacccattactgactgcgagatgaacagtccccaggtgccgccaagccaacctttgcgaccctgggcagggggcgacgttccccacaaaacacaccaggctcccgcctccgccagctctcttcccggtacaggcgctcaactgccgccgcagcctagatatcttggtaggcctccaagccccaccagccctcctccccccgagctaatggacgtgagtttagtcggaggccccgccgactgttcccctcctcatccggcaccggcccctcaacaccctgccgcttctgcgttgcggaccaggatgactggtggccggcctcccctccccccacccgatgaccccgccaccctggggcctcacctggggctcagaggcgttccgcagagcacggccgctagcagctag

SEQ ID NO: 165487 - DNA, 1806 bp, Artificial Sequence
  derived and/or modified sequence
atggccgtacctcccggacatggtccattctccggatttcctggaccccaggagcatactcaagttcttcctgacgtgcgcttactgcctcgccgattgcccctggccttccgagacgccacatctgctcccctcagaaaacttagcgtggatctgattaaaacatataagcacattaacgaggtgtattacgctaaaaagaagaggagggcccaacaggctccgccacaggacagcagcaataaaaaggagaaaaaagtgcttaaccatggttatgatgacgacaatcacgactacatcgtgcggagtggcgagagatggctggaacggtatgagattgactcactcatcggcaagggatcattcggacaagtcgtgaaagcttatgatcaccagacacaagaactggtggcaatcaagattatcaaaaacaagaaggccttcctcaaccaggcacagatcgagctccggctgctggaacttatgaaccagcacgacaccgaaatgaaatattatatcgtccaccttaagagacactttatgttcaggaatcacctctgcctggtttttgaacttctgtcatacaacctctacgacttgttgcgtaacacgcatttcagaggggttagcttgaatctgactaggaaactggcccagcagctttgcactgcgcttctttttttagcaacacctgaactttctatcatccactgtgatctaaagccagaaaatattctgctctgtaacccaaaacgatcggccataaagatagtagacttcggttccagttgtcagctgggccaaaggatctatcagtacatacagagcaggttctaccggagccccgaggtgctgctggggactccctatgatctggcaatagacatgtggtctttgggctgcattctggtggagatgcataccggagagcccctgttctcgggctcaaacgaagtcgaccagatgaaccgtatcgtggaagtattgggcatcccccctgccgctatgctggaccaggccccaaaggcaagaaagtacttcgagaggctaccaggtggcggatggaccctgcgcaggacaaaagagctgcgtaaagactatcaaggtcctggaacccgtagactgcaggaggatctcgtgctgcgtatgctcgagtatgagccagccgcacgcatctcacctctcggggcactgcagcatgggttttttcgcaggaccgcagatgaagccacaaacaccgggccagcagggagctctgcatccactagcccggcacctcttgatacctgcccttctagctccacagcgtcatccattagcagctcgggaggaagtagtggatccagttctgacaatagaacatacagatactccaatcggtattgcggaggacccggaccacctatcaccgactgcgagatgaattctcctcaagttccacccagccaacccctgcggccatgggcagggggtgatgtaccccataagactcaccaggcaccggctagtgcatcgagcttgcccggaaccggagcccagctaccaccacaacccaggtatctcgggagacctcctagtcccacgagccccccacccccagagctgatggacgttagtctggtgggtggccctgccgattgtagcccacctcaccctgccccagctccacagcaccccgctgcctccgcactcagaactcggatgaccggcggtcgcccacccctccccccaccagatgaccctgcaaccctaggcccacatctgggactccgaggggtacctcagagcacagcagcctcatcttag

SEQ ID NO: 165488 - DNA, 1806 bp, Artificial Sequence
  derived and/or modified sequence
atggccgtgccccccggccacggccccttcagcggcttccccggcccccaggagcacacccaggtgctgcccgacgtgagactgctgcccagaagactgcccctggccttcagagacgccaccagcgcccccctgagaaagctgagcgtggacctgatcaagacctacaagcacatcaacgaggtgtactacgccaagaagaagagaagagcccagcaggcccccccccaggacagcagcaacaagaaggagaagaaggtgctgaaccacggctacgacgacgacaaccacgactacatcgtgagaagcggcgagagatggctggagagatacgagatcgacagcctgatcggcaagggcagcttcggccaggtggtgaaggcctacgaccaccagacccaggagctggtggccatcaagatcatcaagaacaagaaggccttcctgaaccaggcccagatcgagctgagactgctggagctgatgaaccagcacgacaccgagatgaagtactacatcgtgcacctgaagagacacttcatgttcagaaaccacctgtgcctggtgttcgagctgctgagctacaacctgtacgacctgctgagaaacacccacttcagaggcgtgagcctgaacctgaccagaaagctggcccagcagctgtgcaccgccctgctgttcctggccacccccgagctgagcatcatccactgcgacctgaagcccgagaacatcctgctgtgcaaccccaagagaagcgccatcaagatcgtggacttcggcagcagctgccagctgggccagagaatctaccagtacatccagagcagattctacagaagccccgaggtgctgctgggcaccccctacgacctggccatcgacatgtggagcctgggctgcatcctggtggagatgcacaccggcgagcccctgttcagcggcagcaacgaggtggaccagatgaacagaatcgtggaggtgctgggcatcccccccgccgccatgctggaccaggcccccaaggccagaaagtacttcgagagactgcccggcggcggctggaccctgagaagaaccaaggagctgagaaaggactaccagggccccggcaccagaagactgcaggaggacctggtgctgagaatgctggagtacgagcccgccgccagaatcagccccctgggcgccctgcagcacggcttcttcagaagaaccgccgacgaggccaccaacaccggccccgccggcagcagcgccagcaccagccccgcccccctggacacctgccccagcagcagcaccgccagcagcatcagcagcagcggcggcagcagcggcagcagcagcgacaacagaacctacagatacagcaacagatactgcggcggccccggcccccccatcaccgactgcgagatgaacagcccccaggtgccccccagccagcccctgagaccctgggccggcggcgacgtgccccacaagacccaccaggcccccgccagcgccagcagcctgcccggcaccggcgcccagctgcccccccagcccagatacctgggcagaccccccagccccaccagcccccccccccccgagctgatggacgtgagcctggtgggcggccccgccgactgcagccccccccaccccgcccccgccccccagcaccccgccgccagcgccctgagaaccagaatgaccggcggcagaccccccctgcccccccccgacgaccccgccaccctgggcccccacctgggcctgagaggcgtgccccagagcaccgccgccagcagctag

SEQ ID NO: 165489 - protein, 601 aa, Artificial Sequence
  derived and/or modified sequence
MERAAPSRRVPLPLLLLGGLALLAAGVDADVLLEACCADGHRMATHQKDCSLPYATESKECRMVQEQCCHSQLEELHCATGISLANEQDRCATPHGDNASLEATFVKRCCHCCLLGRAAQAQGQSCEYSLMVGYQCGQVFQACCVKSQETGDLDVGGLQETDKIIEVEEEQEDPYLNDRCRGGGPCKQQCRDTGDEVVCSCFVGYQLLSDGVSCEDVNECITGSHSCRLGESCINTVGSFRCQRDSSCGTGYELTEDNSCKDIDECESGIHNCLPDFICQNTLGSFRCRPKLQCKSGFIQDALGNCIDINECLSISAPCPIGHTCINTEGSYTCQKNVPNCGRGYHLNEEGTRCVDVDECAPPAEPCGKGHRCVNSPGSFRCECKTGYYFDGISRMCVDVNECQRYPGRLCGHKCENTLGSYLCSCSVGFRLSVDGRSCEDINECSSSPCSQECANVYGSYQCYCRRGYQLSDVDGVTCEDIDECALPTGGHICSYRCINIPGSFQCSCPSSGYRLAPNGRNCQDIDECVTGIHNCSINETCFNIQGGFRCLAFECPENYRRSAATQKSKKGRQNTPAGSSKEDCRVLPWKQGLEDTHLDA

SEQ ID NO: 165490 - DNA, 2348 bp, Artificial Sequence
  derived and/or modified sequence
cccgccgcccatggagcgcgccgcgccgtcgcgccgggtcccgcttccgctgctgctgctcggcggccttgcgctgctggcggccggagtggacgcggatgtcctcctggaggcctgctgtgcggacggacaccggatggccactcatcagaaggactgctcgctgccatatgctacggaatccaaagaatgcaggatggtgcaggagcagtgctgccacagccagctggaggagctgcactgtgccacgggcatcagcctggccaacgagcaggaccgctgtgccacgccccacggtgacaacgccagcctggaggccacatttgtgaagaggtgctgccattgctgtctgctggggagggcggcccaggcccagggccagagctgcgagtacagcctcatggttggctaccagtgtggacaggtcttccaggcatgctgtgtcaagagccaggagaccggagatttggatgtcgggggcctccaagaaacggataagatcattgaggttgaggaggaacaagaggacccatatctgaatgaccgctgccgaggaggcgggccctgcaagcagcagtgccgagacacgggtgacgaggtggtctgctcctgcttcgtgggctaccagctgctgtctgatggtgtctcctgtgaagatgtcaatgaatgcatcacgggcagccacagctgccggcttggagaatcctgcatcaacacagtgggctctttccgctgccagcgggacagcagctgcgggactggctatgagctcacagaggacaatagctgcaaagatattgacgagtgtgagagtggtattcataactgcctccccgattttatctgtcagaatactctgggatccttccgctgccgacccaagctacagtgcaagagtggctttatacaagatgctctaggcaactgtattgatatcaatgagtgtttgagtatcagtgccccgtgccctatcgggcatacatgcatcaacacagagggctcctacacgtgccagaagaacgtgcccaactgtggccgtggctaccatctcaacgaggagggaacgcgctgtgttgatgtggacgagtgcgcgccacctgctgagccctgtgggaagggacatcgctgcgtgaactctcccggcagtttccgctgcgaatgcaagacgggttactattttgacggcatcagcaggatgtgtgtcgatgtcaacgagtgccagcgctaccccgggcgcctgtgtggccacaagtgcgagaacacgctgggctcctacctctgcagctgttccgtgggcttccggctctctgtggatggcaggtcatgtgaagacatcaatgagtgcagcagcagcccctgtagccaggagtgtgccaacgtctacggctcctaccagtgttactgccggcgaggctaccagctcagcgatgtggatggagtcacctgtgaagacatcgacgagtgcgccctgcccaccgggggccacatctgctcctaccgctgcatcaacatccctggaagcttccagtgcagctgcccctcgtctggctacaggctggcccccaatggccgcaactgccaagacattgatgagtgtgtgactggcatccacaactgctccatcaacgagacctgcttcaacatccagggcggcttccgctgcctggccttcgagtgccctgagaactaccgccgctccgcagccacatgatcgtagggaactctgcatgaggccatcggtgcaggctggagaagagaaggcaagttggcaggagtggagaccacgggcatttgagccacttcctcatgtaacttaacttgtgccttcaggacctgctcaagcccgatcacgtatataccacttccatttgatgatggaatgctgctgttcatgaccaactttatggctagatgggtcagaaagcacccagttcatgataggcagttcaggtcatatggtgacttgatgacccagagtcaaacattcagtttccaccaaagcccagtaacaggccaagagctgtctctcaaaaggagagtagttatctgcagaagatggcagggccttgctccgaaagcctagagaccgccactgtgattcacctatgggggcctgccaaaggctgcagccagcatccttatctgccactgacacctcaagcaacattggatctgctgggtcatatggcccaagtggcagagcaacttgcacaacagcctggacctgtcatagagctttctcctgttctggaccccactcaaaactggcagcctttcaggtcactcgataaatgtgctggagtaacactcaaacgaggaatgtgttgcctccaaaatccaataggccc

SEQ ID NO: 165491 - DNA, 2531 bp, Artificial Sequence
  derived and/or modified sequence
ccgtcgcccgccgcccatggagcgcgccgcgccgtcgcgccgggtcccgcttccgctgctgctgctcggcggccttgcgctgctggcggccggagtggacgcggatgtcctcctggaggcctgctgtgcggacggacaccggatggccactcatcagaaggactgctcgctgccatatgctacggaatccaaagaatgcaggatggtgcaggagcagtgctgccacagccagctggaggagctgcactgtgccacgggcatcagcctggccaacgagcaggaccgctgtgccacgccccacggtgacaacgccagcctggaggccacatttgtgaagaggtgctgccattgctgtctgctggggagggcggcccaggcccagggccagagctgcgagtacagcctcatggttggctaccagtgtggacaggtcttccaggcatgctgtgtcaagagccaggagaccggagatttggatgtcgggggcctccaagaaacggataagatcattgaggttgaggaggaacaagaggacccatatctgaatgaccgctgccgaggaggcgggccctgcaagcagcagtgccgagacacgggtgacgaggtggtctgctcctgcttcgtgggctaccagctgctgtctgatggtgtctcctgtgaagatgtcaatgaatgcatcacgggcagccacagctgccggcttggagaatcctgcatcaacacagtgggctctttccgctgccagcgggacagcagctgcgggactggctatgagctcacagaggacaatagctgcaaagatattgacgagtgtgagagtggtattcataactgcctccccgattttatctgtcagaatactctgggatccttccgctgccgacccaagctacagtgcaagagtggctttatacaagatgctctaggcaactgtattgatatcaatgagtgtttgagtatcagtgccccgtgccctatcgggcatacatgcatcaacacagagggctcctacacgtgccagaagaacgtgcccaactgtggccgtggctaccatctcaacgaggagggaacgcgctgtgttgatgtggacgagtgcgcgccacctgctgagccctgtgggaagggacatcgctgcgtgaactctcccggcagtttccgctgcgaatgcaagacgggttactattttgacggcatcagcaggatgtgtgtcgatgtcaacgagtgccagcgctaccccgggcgcctgtgtggccacaagtgcgagaacacgctgggctcctacctctgcagctgttccgtgggcttccggctctctgtggatggcaggtcatgtgaagacatcaatgagtgcagcagcagcccctgtagccaggagtgtgccaacgtctacggctcctaccagtgttactgccggcgaggctaccagctcagcgatgtggatggagtcacctgtgaagacatcgacgagtgcgccctgcccaccgggggccacatctgctcctaccgctgcatcaacatccctggaagcttccagtgcagctgcccctcgtctggctacaggctggcccccaatggccgcaactgccaagacattgatgagtgtgtgactggcatccacaactgctccatcaacgagacctgcttcaacatccagggcggcttccgctgcctggccttcgagtgccctgagaactaccgccgctccgcagccacgcagaaatccaagaagggaaggcagaacaccccagcgggatcaagtaaagaggactgcagggttcttccatggaagcaggggttggaggatacccaccttgatgcctagtgaggaagatggacctggacagacagtcagctccacaccttgcgctgagcagctgtgattgtgccacgggagcatgagcccttttccccacggcccttgccactgtctcctggccctctctctgatcatgccaggtttgcaccagcctcgagtctcccatgttgtagtacattctccaagatgcagcccaggagcctctctgaaggaccagtctggttacgatggtctgagcttccttagaaccttccatggttgtcttttcccagcagatgaagcatagcctccttggaatggcatgggaggcctggcctgatctggcctctgcccaccctttgagctgcacctgccccaccccagctcatccatgtgcttgtaccctggccccacggggaggcttgcccttccctgaatctgccttcttgtggctttagcatgtgccatgctgtccccctgcagactgccattctccttgcagacttggctcagaagtcacctcctcagtgcagttagcctgagctcccctggccccaggtgcctccatcagagcatttaccccattgtgttgtggctgttccttaacgtccccactagccaggctctttgagggcagggattgtgtctggttaatttctgtattctctgcaactttgcaatgtttggcttgaagaaggagctcagtaaacatctgaataaacatgcaggttgatgg

SEQ ID NO: 165492 - DNA, 1701 bp, Artificial Sequence
  derived and/or modified sequence
atggaaagagcagctccatccaggagggtgcctctccctcttcttttgctaggggggctcgccctcttggcggctggagtagatgcagatgtactactagaggcatgttgcgccgatggccatagaatggctacccaccagaaagattgcagcctgccatatgcgaccgagagcaaggaatgcaggatggtccaggagcaatgctgtcatagccagctggaggagctgcattgtgccaccggcatcagcttagcaaatgaacaggatagatgcgctacgcctcacggtgacaatgcctctctcgaggccacttttgtgaaacggtgttgccattgttgcctactgggtagggctgcccaagcacaggggcaaagctgtgaatactcactgatggtgggttaccaatgtgggcaggtctttcaagcctgctgcgttaagagccaagagaccggagacctcgacgtcgggggcctccaggaaactgacaagatcatagaggttgaggaggagcaggaggatccttacctgaacgacaggtgtcggggtggtggaccttgtaagcaacagtgtcgggatactggggacgaagtcgtatgttcatgttttgtgggctatcagttgctgtccgatggcgtatcttgtgaggacgtcaacgaatgtattacaggcagccactcttgcaggctgggagaatcttgcatcaataccgtaggaagctttcggtgtcagcgagattccagctgcggcacaggatatgaattgactgaagacaattcctgcaaggacatcgatgaatgcgaatctggcatacacaattgcctgcctgacttcatttgccagaatactctgggctctttccgctgtcggccaaagctgcagtgcaagagcggcttcattcaggatgccctcggaaactgcatcgacatcaacgagtgtctgtccattagtgcaccctgccccatcgggcatacctgtataaacacagaggggagttacacctgccaaaagaacgtgccgaattgcggccgcggctatcacttgaacgaagagggtacccggtgcgttgacgttgatgagtgtgccccaccagcagaaccatgcggtaaaggccataggtgtgtcaatagccctggatcatttaggtgcgagtgtaaaaccggctattacttcgacggaatctccagaatgtgtgtcgacgtgaacgagtgccagagatatcctggcaggttgtgcggccacaagtgcgagaacacgctcggttcctatttgtgtagctgctccgtgggcttcaggctttccgtggatggaaggtcctgcgaggatataaatgaatgcagcagcagtccatgcagccaggaatgcgccaacgtatatggttcgtatcaatgctactgccgtagggggtatcagctttccgatgtggatggagttacatgcgaggacatcgacgaatgtgctttgccgacaggcggccacatctgttcttatcgttgtattaatataccgggttcatttcaatgctcgtgtccatctagcggttacagactggccccaaatggtagaaattgtcaagatatagacgagtgcgtgaccggtattcataattgttcgattaatgaaacatgttttaatatccaaggtggatttcggtgcctcgccttcgagtgtccagaaaactacaggcgctccgcggctacttag

SEQ ID NO: 165493 - DNA, 1806 bp, Artificial Sequence
  derived and/or modified sequence
atggagcgggctgcgccctccagaagagtgccactcccattactgcttctgggaggattagctctgttggccgccggagtcgacgcagatgtgctgctggaggcttgttgcgctgatggacatagaatggccactcatcagaaggactgtagcctgccatacgccacagagtcaaaggagtgtagaatggttcaggagcagtgttgccatagccaactcgaggagttacactgtgctaccgggattagcctggccaatgaacaggaccgctgtgctaccccacacggtgataatgctagtcttgaggctacgttcgtcaaacgatgttgccactgctgcctgctgggtagggccgctcaggcccaagggcagtcctgcgagtatagtttaatggtcgggtaccagtgtgggcaggtcttccaggcctgttgtgtcaagtcacaggagactggcgacttagacgttggcggtcttcaggagacggataagatcattgaagtggaggaagaacaggaggacccttacctgaacgaccgctgccggggcggtggcccgtgcaaacaacaatgccgggataccggcgatgaggtcgtgtgttcatgtttcgtggggtaccagctgctgtccgacggcgtgagctgtgaagatgtcaatgagtgtatcactggtagtcactcttgccgactgggtgagagttgcattaatacggtgggtagttttcgttgtcagagagattcgtcctgcggcacggggtacgaactgaccgaagacaactcatgtaaggacattgacgaatgtgagtccggtatccacaactgtctgcctgactttatttgccagaataccctggggagtttcaggtgccgacctaagttgcagtgcaaatccggcttcatccaggatgcactcggtaattgcatcgatatcaatgagtgtctaagcatatcagcaccctgccccattggccatacctgtattaatacggaaggctcttatacctgtcagaagaacgtgccgaactgcggaagagggtatcatctgaacgaggagggcactcggtgcgtcgatgtggatgaatgtgctccgcctgccgaaccatgtggaaagggacacaggtgcgtaaacagccccggtagttttaggtgcgagtgcaaaacggggtactatttcgatgggatctcccgtatgtgtgttgatgtgaatgagtgtcaacggtacccaggccggttgtgtggccacaagtgcgagaatactctagggagctacctctgtagctgttctgtggggtttaggctgtccgtcgacgggcgaagctgtgaagacataaacgagtgttccagctcaccttgtagtcaggagtgtgcaaacgtttatggctcttaccaatgctactgtcgacggggctatcaattaagcgatgtagatggcgtgacctgcgaagatattgacgaatgtgcactacccaccgggggccatatttgtagctatcgttgcataaacattcccgggagctttcagtgttcatgtccaagcagtgggtatagattggctcctaacggcagaaattgtcaggatatcgacgagtgtgtgaccggtattcataactgttcaattaatgagacttgttttaacatccagggagggttcaggtgtttggcatttgaatgtccagaaaactacagacgttcggcagcaacacaaaagtctaagaagggtagacagaacacaccagccggctccagcaaggaggattgtcgtgttctgccttggaagcagggccttgaagatacccatttagacgcgtag

SEQ ID NO: 165494 - DNA, 1701 bp, Artificial Sequence
  derived and/or modified sequence
atggagcgggccgcccccagccggcgggtgcccctgcccctgctgctgctgggcggcctggccctgctggccgccggcgtggatgctgatgtgctgctggaggcctgctgtgctgatggccacaggatggccacccaccagaaggactgcagcctgccctatgccacagagagcaaggagtgcaggatggtgcaggagcagtgctgccacagccagctggaggagctgcactgtgccaccggcatcagcctggccaatgagcaggacagatgtgccacccctcatggagacaatgccagcctggaggccacctttgtgaagcgctgctgccactgctgcctgctgggccgggccgcccaggcccagggccagagctgtgagtacagcctgatggtgggctaccagtgtggccaggtgttccaggcctgctgcgtgaagagccaggagaccggggacctggatgtgggcggcctgcaggagacagacaagatcatcgaggtggaggaggagcaggaggacccctacctgaatgaccgctgccggggcggcggcccctgcaagcagcagtgccgggacacaggagatgaggtggtgtgcagctgctttgtgggctaccagctgctgagtgatggagtgtcctgtgaagatgtgaatgaatgcatcaccggcagccacagctgccgcctgggggagagctgcatcaacacagtgggcagcttccgctgccagagggacagcagctgtggcaccggctatgagctgacagaggacaacagctgcaaggacattgatgaatgtgagagcggcatccacaactgcctgcctgacttcatctgccagaacaccctgggcagcttccgctgccggcccaagctgcagtgcaagagcggcttcatccaggatgccctgggcaactgcatcgacatcaatgaatgtctgagcatcagcgccccctgccccatcggccacacctgcatcaacacagagggcagctacacctgccagaagaatgtgcccaactgtggccggggctaccacctgaatgaggagggcacccgctgtgtggatgtggatgaatgtgcccccccagctgagccctgtgggaagggccaccgctgtgtgaacagccctggcagcttccgctgtgagtgcaagacaggctactactttgatggcatcagcaggatgtgtgtggatgtgaatgaatgccagcgctacccaggccgcctgtgtggccacaagtgtgagaacaccctgggcagctacctgtgcagctgcagcgtgggcttccggctgtctgtggatggccgcagctgtgaggacatcaatgaatgtagcagcagcccctgcagccaggagtgtgccaacgtgtatggcagctaccagtgctactgccggcggggctaccagctgagtgatgtggatggagtgacctgtgaggacattgatgaatgtgccctgcccactggaggccacatctgcagctaccgctgcatcaacatccctggcagcttccagtgcagctgccccagcagcggctaccgcctggccccaaatggaagaaactgccaggacattgatgaatgtgtgacaggcatccacaactgcagcatcaatgagacctgcttcaacatccagggcggcttccgctgcctggcctttgaatgtcctgagaactacagaagatctgctgccacctag

SEQ ID NO: 165495 - DNA, 1806 bp, Artificial Sequence
  derived and/or modified sequence
atggagcgggccgcccccagccggcgggtgcccctgcccctgctgctgctgggcggcctggccctgctggccgccggcgtggatgctgatgtgctgctggaggcctgctgtgctgatggccacaggatggccacccaccagaaggactgcagcctgccctatgccacagagagcaaggagtgcaggatggtgcaggagcagtgctgccacagccagctggaggagctgcactgtgccaccggcatcagcctggccaatgagcaggacagatgtgccacccctcatggagacaatgccagcctggaggccacctttgtgaagcgctgctgccactgctgcctgctgggccgggccgcccaggcccagggccagagctgtgagtacagcctgatggtgggctaccagtgtggccaggtgttccaggcctgctgcgtgaagagccaggagaccggggacctggatgtgggcggcctgcaggagacagacaagatcatcgaggtggaggaggagcaggaggacccctacctgaatgaccgctgccggggcggcggcccctgcaagcagcagtgccgggacacaggagatgaggtggtgtgcagctgctttgtgggctaccagctgctgagtgatggagtgtcctgtgaagatgtgaatgaatgcatcaccggcagccacagctgccgcctgggggagagctgcatcaacacagtgggcagcttccgctgccagagggacagcagctgtggcaccggctatgagctgacagaggacaacagctgcaaggacattgatgaatgtgagagcggcatccacaactgcctgcctgacttcatctgccagaacaccctgggcagcttccgctgccggcccaagctgcagtgcaagagcggcttcatccaggatgccctgggcaactgcatcgacatcaatgaatgtctgagcatcagcgccccctgccccatcggccacacctgcatcaacacagagggcagctacacctgccagaagaatgtgcccaactgtggccggggctaccacctgaatgaggagggcacccgctgtgtggatgtggatgaatgtgcccccccagctgagccctgtgggaagggccaccgctgtgtgaacagccctggcagcttccgctgtgagtgcaagacaggctactactttgatggcatcagcaggatgtgtgtggatgtgaatgaatgccagcgctacccaggccgcctgtgtggccacaagtgtgagaacaccctgggcagctacctgtgcagctgcagcgtgggcttccggctgtctgtggatggccgcagctgtgaggacatcaatgaatgtagcagcagcccctgcagccaggagtgtgccaacgtgtatggcagctaccagtgctactgccggcggggctaccagctgagtgatgtggatggagtgacctgtgaggacattgatgaatgtgccctgcccactggaggccacatctgcagctaccgctgcatcaacatccctggcagcttccagtgcagctgccccagcagcggctaccgcctggccccaaatggaagaaactgccaggacattgatgaatgtgtgacaggcatccacaactgcagcatcaatgagacctgcttcaacatccagggcggcttccgctgcctggcctttgaatgtcctgagaactacagaagatctgctgccacccagaagagcaagaagggccggcagaacaccccagctggcagcagcaaagaagactgccgggtgctgccctggaagcagggcctggaggacacccacctggatgcctag

SEQ ID NO: 165496 - DNA, 1701 bp, Artificial Sequence
  derived and/or modified sequence
atggagcgggccgcccccagccggcgggtgcccctgcccctgctgcttctaggagggttagctctgctggctgccggagtggacgccgatgtcttgctagaggcctgttgcgcggatgggcaccggatggctactcaccagaaggattgttctcttccctacgccactgaaagtaaagaatgtcgtatggtgcaggagcagtgctgccattcccagctggaggaattgcactgcgccaccggaatttcattggccaatgaacaagaccgttgcgctacacctcatggagataatgccagcctcgaagccacatttgttaagcggtgctgtcattgctgcctgttgggacgcgccgctcaggctcagggccaaagctgcgagtatagcctgatggtgggctatcagtgcgggcaagtttttcaggcttgctgtgtcaaaagccaggaaacaggagatctcgatgtcggaggtctgcaagagaccgataaaattattgaagttgaagaggaacaagaagacccatacctaaacgatcgatgccgaggcggcgggccttgtaaacagcagtgtcgggatacaggagatgaggttgtgtgttcttgttttgttggataccaactcctttctgatggcgtgtcgtgcgaggacgtcaatgagtgcataaccggaagccacagctgtcgcctgggcgaaagttgcattaacacagtcggctcctttcgatgtcagagggactcttcatgtggtacaggctacgagttgactgaggataactcgtgtaaagacatcgatgagtgcgagtccggcattcacaattgtctgcctgactttatctgccagaatacactgggatcttttcgatgcaggccaaagctccagtgtaaaagtggttttatccaggacgccctgggcaattgcatagatattaatgagtgcttaagtatttctgcaccatgcccaattggacacacatgcatcaatactgagggcagctatacctgtcaaaaaaacgtgccaaattgcggtcgcggctatcatcttaatgaagaagggacccggtgtgtagacgtggacgaatgtgccccccctgccgagccatgtggcaaagggcacaggtgcgtgaactccccaggatccttcagatgcgagtgcaaaacaggctactacttcgacggaatctcgcgcatgtgcgtggacgtgaatgagtgccaacgctaccccgggcgtctctgtgggcacaaatgcgagaacacactgggctcctacctgtgttcttgcagcgtgggttttcggttgagcgttgacgggaggagttgcgaggacattaatgagtgctcttcttcaccgtgttcccaggaatgcgcgaatgtctatggcagctatcagtgctattgccggcggggatatcagctgagcgatgtcgacggagtgacgtgcgaggatatcgacgaatgcgccctccctacgggtggacacatttgttcataccgctgcatcaatattccgggatcattccagtgctcctgccccagctctggatacaggctggcgcccaacggcaggaattgtcaggacatagacgagtgcgtgaccggaatccacaattgtagtatcaatgagacctgctttaacatccagggcggcttccgatgtctagcctttgaatgccccgagaattaccgtagaagtgcagcaacatag

SEQ ID NO: 165497 - DNA, 1806 bp, Artificial Sequence
  derived and/or modified sequence
atggagcgggccgcccccagccggcgggtgcccctgcccctgctgctgttgggggggctagcactgcttgcagccggggtggatgctgacgtgctgctcgaggcttgctgcgccgacggacataggatggccacgcatcagaaagactgttcactcccttatgccactgaaagcaaggagtgtcgcatggtgcaagagcaatgttgccacagccagctcgaagagttacactgtgctacaggaatctctttggctaatgagcaggatcgatgcgcgaccccccacggggataacgcatccctggaggcaacatttgtgaagcgctgctgtcattgttgcttgcttggccgagctgcccaggctcaaggccaatcttgtgaatattcccttatggtgggataccagtgcggacaggtgtttcaggcttgttgtgtcaagtcacaggaaacaggtgatctcgacgtgggaggactgcaggagaccgacaaaatcatcgaggtggaggaggaacaagaagatccctatctgaatgaccgctgcagaggaggaggtccctgtaagcagcaatgccgggacacaggcgacgaggtagtgtgcagctgttttgtcggctaccagctcttatccgatggcgtctcatgcgaggatgtgaatgagtgtatcactggttcccatagttgtaggctgggggaaagttgcattaacactgtagggtcatttcggtgccagcgagacagcagctgtggcacggggtacgaactaacagaggataattcctgcaaggacattgatgagtgtgaaagtggcattcacaattgtttaccagatttcatttgccaaaatactttgggaagcttccggtgccgtcctaagcttcaatgtaagagcggctttattcaagacgccctcgggaactgtattgacattaacgagtgtctgagtatttccgccccatgcccaataggccacacatgcattaacaccgagggatcgtatacttgccagaagaacgttcctaactgtggacgcgggtatcaccttaacgaagagggcactcgctgcgtggacgttgacgagtgcgcacctcctgcagaaccatgtgggaaaggccaccgctgcgtgaattccccagggtcattccgctgcgagtgtaagaccgggtactactttgacggaataagtaggatgtgtgtggacgtgaacgaatgtcaaaggtaccccggtaggctgtgtgggcacaaatgcgaaaatactctgggctcctatttgtgttcgtgctccgtcggttttcgactttctgtagacggcagaagctgtgaggacatcaacgagtgtagtagttcaccctgctcacaggaatgcgctaatgtctacggcagctaccagtgttattgtagacggggataccagctctccgatgtcgacggtgtgacttgtgaggacattgatgagtgtgccctaccgaccggcggccatatttgcagctatcgatgtataaatattcctggttcattccagtgtagctgcccatcatccggctatcgactggccccgaacggacgcaactgtcaggatattgacgaatgcgttacaggcattcataactgcagtatcaatgagacatgctttaacattcaaggtggttttcggtgtttggccttcgagtgccccgagaattaccgacgcagcgccgccacacagaagtctaaaaaaggacgccaaaacacaccagcaggctcaagcaaggaggattgccgtgtgctgccctggaagcagggcttggaggatacacatctggatgcatag

SEQ ID NO: 165498 - DNA, 1701 bp, Artificial Sequence
  derived and/or modified sequence
atggagcgcgcagcaccttccaggcgcgtaccattgccattgctgcttctggggggactggcactgctggcagccggtgtcgatgccgacgtgctgctagaggcatgctgtgccgacggccataggatggcaactcatcaaaaagattgcagccttccttatgccactgagtccaaggagtgcaggatggtgcaggagcaatgttgtcacagccagctggaggagctacactgcgccaccggaatcagtttggctaacgagcaggaccggtgtgcaactcctcacggtgacaatgcaagcctggaagctactttcgttaaacggtgctgtcactgctgtttacttggaagagccgctcaagcacagggccagtcttgtgagtattctcttatggttggctaccagtgtgggcaggttttccaagcctgttgtgttaaatcacaggagaccggggatctcgacgtaggcggtttacaggaaactgataagattatcgaggtggaggaggagcaggaagacccgtacctgaatgatcggtgccggggtggcggtccctgcaagcagcagtgtcgggatacaggggacgaggtggtttgttcctgcttcgtaggataccaactgctgtcagatggcgtatcttgcgaagatgttaatgaatgcataactggatcgcactcgtgccgcctaggggagagttgtattaatacagtgggttcctttcgttgccaacgggatagctcttgtgggacaggttatgaattgaccgaggataattcctgcaaagatattgatgaatgcgagtcaggaattcacaattgtctgcctgatttcatttgccaaaataccttgggctcttttcggtgtaggcctaaactccagtgtaaatcaggatttatacaggatgctctggggaattgcatcgacattaacgagtgcctgtctatatccgccccttgtccgataggccacacttgtatcaacactgagggctcatatacttgtcagaagaatgtgcccaattgtggacgaggataccatctgaacgaagagggaacccgttgcgttgacgttgacgaatgcgcccctcccgcagaaccctgtgggaaaggccatcggtgcgtcaatagtcctgggtccttcagatgcgaatgcaaaaccggatattatttcgatggtatatcccgaatgtgtgtggacgtgaacgagtgtcagcgctaccctgggagactttgtggtcataagtgtgagaataccctcggaagttatctgtgcagctgttccgttggctttcgactctccgtcgacggcagaagctgtgaagatattaacgagtgctcctcatctccgtgctcccaggaatgcgctaatgtatatgggtcttatcagtgctattgcagaagaggataccagctgagcgacgtcgacggcgtcacgtgtgaagacatcgacgagtgcgcccttcctaccggaggacacatctgtagttacaggtgcataaatatccctggatccttccagtgtagctgtccctccagtggttaccgcctcgctcccaatggacgaaactgtcaggacatcgacgagtgtgtaacagggatccacaattgttcaattaacgaaacttgcttcaacattcaaggcggattccgatgtttggcattcgagtgccccgaaaattacaggcgcagcgctgccacatag

SEQ ID NO: 165499 - DNA, 1806 bp, Artificial Sequence
  derived and/or modified sequence
atggagcgggcagccccttctcgaagggtgccactgccactgctgctgctcggcggtctggccctccttgcggcaggagtggatgccgacgtcctcttggaggcatgctgtgctgacgggcacaggatggccacccaccaaaaagattgctcgcttccctatgcaactgagagcaaagagtgtaggatggttcaagaacagtgctgtcactctcagttggaagaactccattgtgccacaggcattagtctggcaaatgagcaggaccggtgtgccactccccacggggataacgctagcctcgaagctacctttgtgaagaggtgctgtcattgttgcctattgggaagagcggctcaagcccaaggccagtcttgtgaatatagcttaatggtggggtatcaatgcggacaggtttttcaggcctgctgcgtcaagtcacaggagactggggatctggacgtaggcggactgcaggaaacagataagataatcgaggttgaggaggagcaggaagacccctacctaaacgatagatgcagggggggaggaccctgtaaacagcagtgcagggacaccggcgacgaagtcgtttgtagctgctttgtggggtatcagctcctcagcgacggtgtgtcctgcgaggatgttaatgaatgcatcaccggctctcactcttgtcggctcggcgaatcgtgcattaatacagtgggcagttttcgctgtcagcgtgacagttcctgcggtactggttacgaattgaccgaggacaactcatgtaaagatattgatgagtgcgagtcgggtatccacaactgcctcccagattttatctgtcagaatacccttggttctttccgctgtagacctaaactccaatgtaagtctggattcatccaggatgcattagggaattgtatcgacatcaacgagtgtctgtcgatctctgccccatgcccaataggccatacttgcatcaacaccgagggaagctatacctgtcagaaaaacgtacccaattgcggaagggggtatcatctcaatgaggaggggacccgatgcgttgatgtggatgaatgtgcccctcctgctgaaccatgcggcaaaggccaccgctgcgttaatagccccggttcctttcgatgcgaatgtaaaacaggctattactttgacggtataagccgaatgtgcgtagatgtgaatgagtgccagcgctaccctggacgcctttgcggtcacaaatgtgaaaataccctggggtcgtacctatgttcctgttctgtaggctttcggctatccgtggacggccgatcttgtgaggatataaatgagtgcagcagctctccatgctcccaggaatgcgcaaatgtatacggatcctaccagtgctattgccgccgtggataccagctatccgacgtggacggagtgacatgcgaggacatcgatgagtgtgctctacccacaggtgggcatatttgttcctacaggtgtattaatattcccggttcgttccagtgctcctgtccttcttcagggtacaggctagcgcctaacggacgaaactgtcaggatattgatgagtgtgtaacgggcattcacaactgctccataaacgaaacttgcttcaatatccaaggcggtttcaggtgtctggctttcgagtgtcccgagaactacaggagaagtgcagcgacccagaagagcaagaaaggcaggcagaacacgcctgctggtagtagcaaagaagattgcagggtactgccatggaagcaagggctagaagacacacatttagacgcgtag

SEQ ID NO: 165500 - DNA, 1701 bp, Artificial Sequence
  derived and/or modified sequence
atggagcgagccgccccctcacggagggtacctcttcccctcttgctgttaggaggactcgccttgttggctgctggagtggacgccgatgtcctgttagaggcctgttgcgcagatggtcacagaatggcgactcaccagaaggattgcagtctgccgtatgcaactgagagcaaagagtgcaggatggtgcaagaacagtgttgccacagccagctagaagagttgcactgtgccacggggatcagtttggctaatgaacaggaccgctgcgcaacaccccacggggacaacgctagcctcgaggcaacttttgtgaagaggtgttgccactgctgcctgttgggacgggccgcgcaagcacaagggcaaagctgcgagtatagcctgatggtcggataccagtgtggccaggtgttccaggcttgctgcgtgaaatctcaggaaacaggtgacctcgatgtgggcggtctccaggagacagacaagatcattgaggttgaagaggaacaggaagatccatacctgaatgacaggtgccgcggcggaggaccttgtaaacagcaatgtcgggatactggggacgaagtcgtttgcagttgtttcgttggctaccagctgctttcagatggcgtgtcctgcgaggacgttaacgagtgtattaccggctcgcattcatgcaggctcggagagtcctgtatcaatactgtcggatcattccgatgtcagagagattcaagctgtggaactgggtatgagctcacggaagataatagttgcaaggatatcgacgagtgtgagtcagggatccataattgcctgccagattttatttgccagaacacgttaggctcttttagatgccggcccaaactgcagtgcaagagtgggtttattcaggatgctctcggcaattgtattgatataaacgaatgtctgtcaatttcggctccatgcccaatcggccatacctgtatcaacacagaggggagctacacatgtcagaaaaacgtccccaattgcggaagggggtatcatctgaatgaagaggggacacgttgtgttgatgtcgacgaatgcgcacctcctgcagagccctgcggcaaaggacataggtgtgtaaatagcccagggtcttttagatgcgagtgtaaaacagggtattactttgacggcatcagccgtatgtgcgtagacgtgaacgaatgccagcgatatccgggtaggttgtgcggccacaaatgcgaaaacacacttggatcttatctttgctcttgcagtgttggcttccggctctccgttgatggtagatcctgtgaggacatcaatgaatgctcctcttccccgtgctcacaggaatgtgctaacgtttacggatcctatcagtgctactgcagacgggggtaccagctgagcgatgtagatggtgtgacatgcgaagatatcgacgaatgcgccctgccaacgggaggacatatatgtagctaccgctgcatcaatatcccaggaagctttcagtgctcatgcccctccagcggttataggttggctcctaatggacgaaactgtcaagatatagatgaatgtgttactggaattcataattgttccatcaacgaaacgtgcttcaatatccagggcggctttagatgtctcgcattcgaatgccccgagaattaccggcgcagcgctgctacctag

SEQ ID NO: 165501 - DNA, 1806 bp, Artificial Sequence
  derived and/or modified sequence
atggagagggctgcccctagccgccgggttccacttccactgctcctgctcggggggttggctttactggcagccggagtggacgctgatgttttgctggaggcgtgttgcgccgacggccacagaatggctacacaccagaaggattgttcgctgccgtatgctacagaaagtaaggagtgccgaatggtgcaggagcagtgttgtcactcccaattggaagagcttcactgtgcgactgggataagcttagctaacgaacaagatagatgcgccaccccccatggagataatgcgtccttagaggccactttcgtgaaaaggtgttgccactgttgcttacttggaagagctgcccaagcccagggccagtcttgcgagtatagcctgatggtggggtatcaatgcgggcaggtcttccaagcgtgttgtgttaaaagtcaagaaactggcgatctcgacgttggggggctacaagagaccgataaaattatcgaggtagaggaggaacaggaagatccataccttaatgatcggtgccgcggggggggtccctgcaagcaacagtgcagggacaccggggacgaggtagtctgttcatgcttcgtgggctatcagctgctatctgacggggtttcatgcgaagatgtgaacgagtgtatcaccggtagccactcttgtagactaggggaatcatgtatcaacaccgttgggtccttccgatgccagcgagactcatcctgtgggacagggtatgagttgacagaagacaactcttgcaaggacattgacgaatgtgaatcagggatccacaattgcctcccagactttatttgtcagaacactctaggtagctttcggtgccgtccaaagctgcagtgcaaatctggcttcattcaggacgcactgggcaactgtatcgacataaacgagtgtttgagcatctcagcaccctgccccatcgggcacacatgcatcaacactgaagggagctatacatgccagaagaatgtacctaattgtggaagagggtaccacctaaacgaggagggaacccggtgcgtggatgtggacgagtgcgccccaccagccgaaccatgtggtaagggccatcggtgtgtcaattctcccggctccttcaggtgtgagtgcaagacaggctattacttcgatggaatctcaagaatgtgtgtagacgtgaatgagtgccagcgctacccaggcagactgtgtgggcacaaatgcgagaacactcttggcagttacctatgcagttgttccgtgggcttcaggctgagcgtggacggacggtcatgcgaggatatcaacgagtgcagcagctctccgtgcagtcaggagtgtgctaatgtgtacggctcttaccaatgctattgtaggcgcggctaccagctctccgatgtggatggggttacgtgtgaggatattgatgagtgtgcactccccacaggtggacacatctgctcctaccggtgcatcaacatacccgggtcctttcaatgttcttgtccatctagcggatacagactggcccccaatggacggaactgccaggacatagacgagtgtgtcacaggcattcataactgttctattaacgaaacgtgttttaatatccagggcggctttagatgcttagcctttgaatgccctgaaaactacaggaggagcgcagcaacacaaaaatcgaagaaaggacgccaaaacacccccgccggctcaagtaaagaggactgcagggtactcccatggaaacagggtttagaggatactcatctggacgcctag

SEQ ID NO: 165502 - DNA, 1701 bp, Artificial Sequence
  derived and/or modified sequence
atggagcgcgccgcaccttctaggagggttcccctccccctgctgctgctaggaggcctcgctctgctggctgccggcgtcgacgctgatgtgctcctcgaagcttgctgcgcagacggccatcgcatggcaactcatcagaaggattgctctctgccctacgccacagaatccaaagagtgtcgcatggttcaagaacagtgttgtcatagccaactggaagagctgcactgtgccaccggtatttccctagcaaacgagcaagaccgttgtgctacccctcatggtgataatgcttcacttgaagctaccttcgtcaaacgctgttgtcactgttgtctgttaggacgggcggctcaggcccaggggcaaagctgcgaatactcactgatggttggctatcaatgcgggcaggtgtttcaggcgtgctgcgtgaagagtcaggaaacaggtgatctcgatgtgggcgggttgcaggaaacagataaaatcattgaagtcgaggaagagcaagaagatccatacttgaacgatcgatgtcgaggcggaggcccttgtaagcaacaatgtcgggacacaggtgacgaagttgtttgctcatgttttgtcggctaccaattgctctccgatggtgttagctgtgaggatgtgaatgaatgtataactgggtcccactcgtgtcgtctgggggaatcctgtattaataccgtcgggtctttccgatgccagcgagacagcagttgtgggaccggatatgaactgactgaagataacagctgcaaggacatcgacgagtgtgagtcaggtatccacaactgtcttcccgatttcatttgccagaacactctcggctcctttagatgcaggcctaaattgcagtgcaagagcggattcattcaggacgcactgggcaattgcattgacattaatgaatgcttatccatctccgctccctgtcctattggccacacttgcataaataccgagggatcttatacttgccaaaaaaacgtgccaaactgtggtcggggttatcatttgaatgaggaaggcacaagatgcgtcgacgttgacgagtgcgcacccccagccgaaccttgcggtaaaggacatcgatgtgtaaatagtcccggatccttccgttgcgaatgtaaaactggttattattttgacggaatttcacgcatgtgcgtggacgtgaacgagtgccaacggtatcctggacggctttgcggccacaaatgcgagaatactctgggctcttatctgtgcagctgtagcgtgggctttagattatcggtggacggtagaagttgcgaagacataaacgagtgcagctccagtccttgcagtcaggaatgcgccaatgtctacggctcatatcagtgctattgcaggagaggataccaactaagcgacgtcgacggcgtaacatgtgaggacatagatgagtgcgccctgcccactggaggtcatatttgtagctaccgatgtattaacatccctggatcctttcagtgttcttgtccctcgtccggctacagattagcacccaatggtcgcaactgccaggacatcgatgaatgcgttaccgggatacataattgcagcataaacgaaacgtgttttaacatccaaggcggctttcgttgcttagcattcgagtgcccagagaactaccgtagatcggccgctacttag

SEQ ID NO: 165503 - DNA, 1806 bp, Artificial Sequence
  derived and/or modified sequence
atggaacgagccgccccgtcccgacgagtcccactccccttgctgcttttggggggcctcgcgttgcttgcagccggcgtggacgcagatgtgctccttgaagcttgttgtgctgacggtcatagaatggcaactcaccagaaggattgctctttaccctatgccactgagagtaaagagtgcaggatggtccaggaacaatgctgccattcccagcttgaagagctccattgtgcaactggcatctcactcgccaatgaacaagatcgatgcgccacaccccacggcgacaacgcctccctggaggcaacttttgtgaagaggtgttgtcactgttgcttactgggtagggccgcgcaggcacaaggccaatcctgtgagtattctctgatggtgggttatcaatgtggacaagtatttcaggcctgttgtgtcaagagccaagaaactggtgatctcgacgtgggtgggctccaggagaccgacaagattattgaagtggaggaagagcaggaagatccctatctcaatgatcggtgcagaggcggcggaccttgcaaacagcagtgccgagatacaggtgatgaggtcgtttgttcctgcttcgtaggataccaattattgtccgacggcgttagttgtgaggatgttaatgagtgcattactggaagtcactcttgcagactgggagaaagctgtattaacactgtgggaagttttagatgtcagagggacagctcttgcggaaccggctacgagttgactgaggacaatagttgtaaagatatcgacgagtgcgagagtggcattcataactgcctacctgatttcatctgtcagaacaccttgggtagctttcgctgcaggccaaagctccaatgcaaatctggatttattcaggacgctctcggaaactgtatcgatattaatgagtgcttatccatctcggccccttgcccgatcggccacacgtgtattaacacagaagggtcttatacctgccagaaaaatgttcccaattgcggacgaggatatcacctgaatgaggagggtaccagatgcgtggatgtggatgaatgcgctcccccagccgaaccatgtggaaaaggccatagatgcgtgaactcgccaggatcttttcgctgtgaatgcaagacgggatattacttcgatggcatctctagaatgtgtgtggatgtgaatgagtgtcagagataccccggcaggctttgtggccacaaatgcgaaaacaccctgggctcttatctatgttcatgctctgtggggttccgcctatccgtagacggaagaagttgtgaagatattaacgagtgctcaagctccccctgttcccaagaatgcgcaaacgtttacgggagttaccaatgctactgcaggcggggttatcagctgtcagatgttgacggcgtaacatgtgaggatattgatgagtgtgctctacccactggcgggcatatttgcagctacagatgtattaatatacccgggtcctttcaatgttcttgtccatctagcggatacagactggcccccaatggacggaactgccaggacatagacgagtgtgtcacaggcattcataactgttctattaacgaaacgtgttttaatatccagggcggctttagatgcttagcctttgaatgccctgaaaactacaggaggagcgcagcaacacaaaaatcgaagaaaggacgccaaaacacccccgccggctcaagtaaagaggactgcagggtactcccatggaaacagggtttagaggatactcatctggacgcatag

SEQ ID NO: 165504 - DNA, 1701 bp, Artificial Sequence
  derived and/or modified sequence
atggagagagccgcccccagcagaagagtgcccctgcccctgctgctgctgggcggcctggccctgctggccgccggcgtggacgccgacgtgctgctggaggcctgctgcgccgacggccacagaatggccacccaccagaaggactgcagcctgccctacgccaccgagagcaaggagtgcagaatggtgcaggagcagtgctgccacagccagctggaggagctgcactgcgccaccggcatcagcctggccaacgagcaggacagatgcgccaccccccacggcgacaacgccagcctggaggccaccttcgtgaagagatgctgccactgctgcctgctgggcagagccgcccaggcccagggccagagctgcgagtacagcctgatggtgggctaccagtgcggccaggtgttccaggcctgctgcgtgaagagccaggagaccggcgacctggacgtgggcggcctgcaggagaccgacaagatcatcgaggtggaggaggagcaggaggacccctacctgaacgacagatgcagaggcggcggcccctgcaagcagcagtgcagagacaccggcgacgaggtggtgtgcagctgcttcgtgggctaccagctgctgagcgacggcgtgagctgcgaggacgtgaacgagtgcatcaccggcagccacagctgcagactgggcgagagctgcatcaacaccgtgggcagcttcagatgccagagagacagcagctgcggcaccggctacgagctgaccgaggacaacagctgcaaggacatcgacgagtgcgagagcggcatccacaactgcctgcccgacttcatctgccagaacaccctgggcagcttcagatgcagacccaagctgcagtgcaagagcggcttcatccaggacgccctgggcaactgcatcgacatcaacgagtgcctgagcatcagcgccccctgccccatcggccacacctgcatcaacaccgagggcagctacacctgccagaagaacgtgcccaactgcggcagaggctaccacctgaacgaggagggcaccagatgcgtggacgtggacgagtgcgccccccccgccgagccctgcggcaagggccacagatgcgtgaacagccccggcagcttcagatgcgagtgcaagaccggctactacttcgacggcatcagcagaatgtgcgtggacgtgaacgagtgccagagataccccggcagactgtgcggccacaagtgcgagaacaccctgggcagctacctgtgcagctgcagcgtgggcttcagactgagcgtggacggcagaagctgcgaggacatcaacgagtgcagcagcagcccctgcagccaggagtgcgccaacgtgtacggcagctaccagtgctactgcagaagaggctaccagctgagcgacgtggacggcgtgacctgcgaggacatcgacgagtgcgccctgcccaccggcggccacatctgcagctacagatgcatcaacatccccggcagcttccagtgcagctgccccagcagcggctacagactggcccccaacggcagaaactgccaggacatcgacgagtgcgtgaccggcatccacaactgcagcatcaacgagacctgcttcaacatccagggcggcttcagatgcctggccttcgagtgccccgagaactacagaagaagcgccgccacctag

SEQ ID NO: 165505 - DNA, 1806 bp, Artificial Sequence
  derived and/or modified sequence
atggagagagccgcccccagcagaagagtgcccctgcccctgctgctgctgggcggcctggccctgctggccgccggcgtggacgccgacgtgctgctggaggcctgctgcgccgacggccacagaatggccacccaccagaaggactgcagcctgccctacgccaccgagagcaaggagtgcagaatggtgcaggagcagtgctgccacagccagctggaggagctgcactgcgccaccggcatcagcctggccaacgagcaggacagatgcgccaccccccacggcgacaacgccagcctggaggccaccttcgtgaagagatgctgccactgctgcctgctgggcagagccgcccaggcccagggccagagctgcgagtacagcctgatggtgggctaccagtgcggccaggtgttccaggcctgctgcgtgaagagccaggagaccggcgacctggacgtgggcggcctgcaggagaccgacaagatcatcgaggtggaggaggagcaggaggacccctacctgaacgacagatgcagaggcggcggcccctgcaagcagcagtgcagagacaccggcgacgaggtggtgtgcagctgcttcgtgggctaccagctgctgagcgacggcgtgagctgcgaggacgtgaacgagtgcatcaccggcagccacagctgcagactgggcgagagctgcatcaacaccgtgggcagcttcagatgccagagagacagcagctgcggcaccggctacgagctgaccgaggacaacagctgcaaggacatcgacgagtgcgagagcggcatccacaactgcctgcccgacttcatctgccagaacaccctgggcagcttcagatgcagacccaagctgcagtgcaagagcggcttcatccaggacgccctgggcaactgcatcgacatcaacgagtgcctgagcatcagcgccccctgccccatcggccacacctgcatcaacaccgagggcagctacacctgccagaagaacgtgcccaactgcggcagaggctaccacctgaacgaggagggcaccagatgcgtggacgtggacgagtgcgccccccccgccgagccctgcggcaagggccacagatgcgtgaacagccccggcagcttcagatgcgagtgcaagaccggctactacttcgacggcatcagcagaatgtgcgtggacgtgaacgagtgccagagataccccggcagactgtgcggccacaagtgcgagaacaccctgggcagctacctgtgcagctgcagcgtgggcttcagactgagcgtggacggcagaagctgcgaggacatcaacgagtgcagcagcagcccctgcagccaggagtgcgccaacgtgtacggcagctaccagtgctactgcagaagaggctaccagctgagcgacgtggacggcgtgacctgcgaggacatcgacgagtgcgccctgcccaccggcggccacatctgcagctacagatgcatcaacatccccggcagcttccagtgcagctgccccagcagcggctacagactggcccccaacggcagaaactgccaggacatcgacgagtgcgtgaccggcatccacaactgcagcatcaacgagacctgcttcaacatccagggcggcttcagatgcctggccttcgagtgccccgagaactacagaagaagcgccgccacccagaagagcaagaagggcagacagaacacccccgccggcagcagcaaggaggactgcagagtgctgccctggaagcagggcctggaggacacccacctggacgcctag

SEQ ID NO: 165506 - protein, 703 aa, Artificial Sequence
  derived and/or modified sequence
MERAAPSRRVPLPLLLLGGLALLAAGVDADVLLEACCADGHRMATHQKDCSLPYATESKECRMVQEQCCHSQLEELHCATGISLANEQDRCATPHGDNASLEATFVKRCCHCCLLGRAAQAQGQSCEYSLMVGYQCGQVFQACCVKSQETGDLDVGGLQETDKIIEVEEEQEDPYLNDRCRGGGPCKQQCRDTGDEVVCSCFVGYQLLSDGVSCEDVNECITGSHSCRLGESCINTVGSFRCQRDSSCGTGYELTEDNSCKDIDECESGIHNCLPDFICQNTLGSFRCRPKLQCKSGFIQDALGNCIDINECLSISAPCPIGHTCINTEGSYTCQKNVPNCGRGYHLNEEGTRCVDVDECAPPAEPCGKGHRCVNSPGSFRCECKTGYYFDGISRMCVDVNECQRYPGRLCGHKCENTLGSYLCSCSVGFRLSVDGRSCEDINECSSSPCSQECANVYGSYQCYCRRGYQLSDVDGVTCEDIDECALPTGGHICSYRCINIPGSFQCSCPSSGYRLAPNGRNCQDIDECVTGIHNCSINETCFNIQGGFRCLAFECPENYRRSAATLQQEKTDTVRCIKSCRPNDVTCVFDPVHTISHTVISLPTFREFTRPEEIIFLRAITPPHPASQANIIFDITEGNLRDSFDIIKRYMDGMTVGVVRQVRPIVGPFHAVLKLEMNYVVGGVVSHRNVVNVHIFVSEYWF

SEQ ID NO: 165507 - protein, 703 aa, Artificial Sequence
  derived and/or modified sequence
MERAAPSRRVPLPLLLLGGLALLAAGVDADVLLEACCADGHRMATHQKDCSLPYATESKECRMVQEQCCHSQLEELHCATGISLANEQDRCATPHGDNASLEATFVKRCCHCCLLGRAAQAQGQSCEYSLMVGYQCGQVFQACCVKSQETGDLDVGGLQETDKIIEVEEEQEDPYLNDRCRGGGPCKQQCRDTGDEVVCSCFVGYQLLSDGVSCEDVNECITGSHSCRLGESCINTVGSFRCQRDSSCGTGYELTEDNSCKDIDECESGIHNCLPDFICQNTLGSFRCRPKLQCKSGFIQDALGNCIDINECLSISAPCPIGHTCINTEGSYTCQKNVPNCGRGYHLNEEGTRCVDVDECAPPAEPCGKGHRCVNSPGSFRCECKTGYYFDGISRMCVDVNECQRYPGRLCGHKCENTLGSYLCSCSVGFRLSVDGRSCEDINECSSSPCSQECANVYGSYQCYCRRGYQLSDVDGVTCEDIDECALPTGGHICSYRCINIPGSFQCSCPSSGYRLAPNGRNCQDIDECVTGIHNCSINETCFNIQGGFRCLAFECPENYRRSAATQKSKKGRQNTPAGSSKEDCRVLPWKQGLEDTHLDAYLPCCRRFTRPEEIIFLRAITPPHPASQANIIFDITEGNLRDSFDIIKRYMDGMTVGVVRQVRPIVGPFHAVLKLEMNYVVGGVVSHRNVVNVHIFVSEYWF

SEQ ID NO: 165508 - protein, 181 aa, Artificial Sequence
  derived and/or modified sequence
CRMVQEQCCHSQLEELHCATGISLANEQDRCATPHGDNASLEATFVKRCCHCCLLGRAAQAQGQSCEYSLMVGYQCGQVFQACCVKSQETGDLDVGGLQETGGGPCKQQCRDTGDEVVCSCFVGYQLLSDGVSCEDVNECITGSHSCRLGESCINTVGSFRCQRDSSCGTGYELTEDNSCK

SEQ ID NO: 165509 - protein, 139 aa, Artificial Sequence
  derived and/or modified sequence
MATHQKDCSLPYATESKECRMVQEQCCHSQLEELHCATGISLANEQDRCATPHGDNASLEATFVKRCCHCCLLGRAAQAQGQSCEYSLMVGYQCGQVFQACCVKSQETGDLDVGGLQETDKIIEVEEEQEDPYLNDRCR

SEQ ID NO: 165510 - protein, 172 aa, Artificial Sequence
  derived and/or modified sequence
MERAAPSRRVPLPLLLLGGLALLAAGVDADVLLEACCADGHRMATHQKDCSLPYATESKECRMVQEQCCHSQLEELHCATGISLANEQDRCATPHGDNASLEATFVKRCCHCCLLGRAAQAQGQSCEYSLMVGYQCGQVFQACCVKSQETGDLDVGGLQETGGGPCKQQCRD

SEQ ID NO: 165511 - DNA, 80 bp, Artificial Sequence
  derived and/or modified sequence
agagcatccacaaggcccaattcaaagaatctgaaataatgtattgttactgcaacagttgtgagtaccagtggcatcag

SEQ ID NO: 165512 - DNA, 2896 bp, Artificial Sequence
  derived and/or modified sequence
ccgaggctcggccggagcgtggagcccgcgccgctgccccaggaccgcgcccgcgcctttgtccgccgccgcccaccgcccgtcgcccgccgcccatggagcgcgccgcgccgtcgcgccgggtcccgcttccgctgctgctgctcggcggccttgcgctgctggcggccggagtggacgcggatgtcctcctggaggcctgctgtgcggacggacaccggatggccactcatcagaaggactgctcgctgccatatgctacggaatccaaagaatgcaggatggtgcaggagcagtgctgccacagccagctggaggagctgcactgtgccacgggcatcagcctggccaacgagcaggaccgctgtgccacgccccacggtgacaacgccagcctggaggccacatttgtgaagaggtgctgccattgctgtctgctggggagggcggcccaggcccagggccagagctgcgagtacagcctcatggttggctaccagtgtggacaggtcttccaggcatgctgtgtcaagagccaggagaccggagatttggatgtcgggggcctccaagaaacggataagatcattgaggttgaggaggaacaagaggacccatatctgaatgaccgctgccgaggaggcgggccctgcaagcagcagtgccgagacacgggtgacgaggtggtctgctcctgcttcgtgggctaccagctgctgtctgatggtgtctcctgtgaagatgtcaatgaatgcatcacgggcagccacagctgccggcttggagaatcctgcatcaacacagtgggctctttccgctgccagcgggacagcagctgcgggactggctatgagctcacagaggacaatagctgcaaagatattgacgagtgtgagagtggtattcataactgcctccccgattttatctgtcagaatactctgggatccttccgctgccgacccaagctacagtgcaagagtggctttatacaagatgctctaggcaactgtattgatatcaatgagtgtttgagtatcagtgccccgtgccctatcgggcatacatgcatcaacacagagggctcctacacgtgccagaagaacgtgcccaactgtggccgtggctaccatctcaacgaggagggaacgcgctgtgttgatgtggacgagtgcgcgccacctgctgagccctgtgggaagggacatcgctgcgtgaactctcccggcagtttccgctgcgaatgcaagacgggttactattttgacggcatcagcaggatgtgtgtcgatgtcaacgagtgccagcgctaccccgggcgcctgtgtggccacaagtgcgagaacacgctgggctcctacctctgcagctgttccgtgggcttccggctctctgtggatggcaggtcatgtgaagacatcaatgagtgcagcagcagcccctgtagccaggagtgtgccaacgtctacggctcctaccagtgttactgccggcgaggctaccagctcagcgatgtggatggagtcacctgtgaagacatcgacgagtgcgccctgcccaccgggggccacatctgctcctaccgctgcatcaacatccctggaagcttccagtgcagctgcccctcgtctggctacaggctggcccccaatggccgcaactgccaagacattgatgagtgtgtgactggcatccacaactgctccatcaacgagacctgcttcaacatccagggcggcttccgctgcctggccttcgagtgccctgagaactaccgccgctccgcagccacgctccagcaggagaagacagacacggtccgctgcatcaagtcctgccgccccaacgatgtcacatgcgtgttcgaccccgtgcacaccatctcccacaccgtcatctcgctgcctaccttccgcgagttcacccgccctgaagagatcatcttcctccgggccatcacgccaccgcatcctgccagccaggctaacatcatcttcgacatcacggaagggaacctgcgggactcttttgacatcatcaagcgttacatggacggcatgaccgtgggtgtcgtgcgccaggtgcggcccatcgtgggcccatttcatgccgtcctgaagctggagatgaactatgtggtcgggggcgtggtctcccaccgaaatgttgtcaacgtccacatcttcgtctctgagtactggttctgagggctggtctgccgcacagccgcaggtgcacctccaggccaaatcattgctgccagtgactgtggtctgtacttgtttataccctcagacttttttaatgttaggtatttgtagcattaggccaacatgtattaagctgagccagatgaataagtccatctgatgtattttcggtgtttaaaaaatgagcccagttgctcaactgtttggttgaaaaccttgctcattttttaatgcgaaggctaagtgtcaccccctttctctgcctctggctgggccttgctaagggccaaggaaagaaagacattttttagggggcagccagtccaaatgccaaaagaagaccagttcttgccctgattgtatgaaatttgacattttggcactttttttttttttttggccaatcagattttctatgttctaaggacatggctgctgtagaatagcacagacgtggatgataaattatccccagaagcagcatgacagaatgcctcggggagcacttggaagggaaattgcagttctgttgaaatagaggaaaatcccttggtaaagacacagcctgttaggctcgtgtgggcctccagtatgttcaccaggggaatggctgggatttctcggcactctgcatcatccatcttttcttataggtgggaaaataaacaactttgtgatcctcctga

SEQ ID NO: 165513 - DNA, 2947 bp, Artificial Sequence
  derived and/or modified sequence
ctcctcccgggcgggataattgaacggcgcggccctggcccagcgttggctgccgaggctcggccggagcgtggagcccgcgccgctgccccaggaccgcgcccgcgcctttgtccgccgccgcccaccgcccgtcgcccgccgcccatggagcgcgccgcgccgtcgcgccgggtcccgcttccgctgctgctgctcggcggccttgcgctgctggcggccggagtggacgcggatgtcctcctggaggcctgctgtgcggacggacaccggatggccactcatcagaaggactgctcgctgccatatgctacggaatccaaagaatgcaggatggtgcaggagcagtgctgccacagccagctggaggagctgcactgtgccacgggcatcagcctggccaacgagcaggaccgctgtgccacgccccacggtgacaacgccagcctggaggccacatttgtgaagaggtgctgccattgctgtctgctggggagggcggcccaggcccagggccagagctgcgagtacagcctcatggttggctaccagtgtggacaggtcttccaggcatgctgtgtcaagagccaggagaccggagatttggatgtcgggggcctccaagaaacggataagatcattgaggttgaggaggaacaagaggacccatatctgaatgaccgctgccgaggaggcgggccctgcaagcagcagtgccgagacacgggtgacgaggtggtctgctcctgcttcgtgggctaccagctgctgtctgatggtgtctcctgtgaagatgtcaatgaatgcatcacgggcagccacagctgccggcttggagaatcctgcatcaacacagtgggctctttccgctgccagcgggacagcagctgcgggactggctatgagctcacagaggacaatagctgcaaagatattgacgagtgtgagagtggtattcataactgcctccccgattttatctgtcagaatactctgggatccttccgctgccgacccaagctacagtgcaagagtggctttatacaagatgctctaggcaactgtattgatatcaatgagtgtttgagtatcagtgccccgtgccctatcgggcatacatgcatcaacacagagggctcctacacgtgccagaagaacgtgcccaactgtggccgtggctaccatctcaacgaggagggaacgcgctgtgttgatgtggacgagtgcgcgccacctgctgagccctgtgggaagggacatcgctgcgtgaactctcccggcagtttccgctgcgaatgcaagacgggttactattttgacggcatcagcaggatgtgtgtcgatgtcaacgagtgccagcgctaccccgggcgcctgtgtggccacaagtgcgagaacacgctgggctcctacctctgcagctgttccgtgggcttccggctctctgtggatggcaggtcatgtgaagacatcaatgagtgcagcagcagcccctgtagccaggagtgtgccaacgtctacggctcctaccagtgttactgccggcgaggctaccagctcagcgatgtggatggagtcacctgtgaagacatcgacgagtgcgccctgcccaccgggggccacatctgctcctaccgctgcatcaacatccctggaagcttccagtgcagctgcccctcgtctggctacaggctggcccccaatggccgcaactgccaagacattgatgagtgtgtgactggcatccacaactgctccatcaacgagacctgcttcaacatccagggcggcttccgctgcctggccttcgagtgccctgagaactaccgccgctccgcagccacgcagaaatccaagaagggaaggcagaacaccccagcgggatcaagtaaagaggactgcagggttcttccatggaagcaggggttggaggatacccaccttgatgcctatctcccatgttgcaggagattcacccgccctgaagagatcatcttcctccgggccatcacgccaccgcatcctgccagccaggctaacatcatcttcgacatcacggaagggaacctgcgggactcttttgacatcatcaagcgttacatggacggcatgaccgtgggtgtcgtgcgccaggtgcggcccatcgtgggcccatttcatgccgtcctgaagctggagatgaactatgtggtcgggggcgtggtctcccaccgaaatgttgtcaacgtccacatcttcgtctctgagtactggttctgagggctggtctgccgcacagccgcaggtgcacctccaggccaaatcattgctgccagtgactgtggtctgtacttgtttataccctcagacttttttaatgttaggtatttgtagcattaggccaacatgtattaagctgagccagatgaataagtccatctgatgtattttcggtgtttaaaaaatgagcccagttgctcaactgtttggttgaaaaccttgctcattttttaatgcgaaggctaagtgtcaccccctttctctgcctctggctgggccttgctaagggccaaggaaagaaagacattttttagggggcagccagtccaaatgccaaaagaagaccagttcttgccctgattgtatgaaatttgacattttggcactttttttttttttttggccaatcagattttctatgttctaaggacatggctgctgtagaatagcacagacgtggatgataaattatccccagaagcagcatgacagaatgcctcggggagcacttggaagggaaattgcagttctgttgaaatagaggaaaatcccttggtaaagacacagcctgttaggctcgtgtgggcctccagtatgttcaccaggggaatggctgggatttctcggcactctgcatcatccatcttttcttataggtgggaaaataaacaactttgtgatcctcctg

SEQ ID NO: 165514 - DNA, 2112 bp, Artificial Sequence
  derived and/or modified sequence
atggagagagccgctccttccaggcgcgttcccttacccctgctcttgttgggcggcctggccctactggccgctggcgtggatgctgatgtactattggaagcctgttgtgcagatggccatcgcatggccacccaccagaaagattgctctctgccatacgctacggagtcaaaggaatgtaggatggtacaggagcagtgttgtcactcgcagctcgaagaactgcactgtgccactggcatttccttggccaatgagcaggacagatgtgcgacacctcacggtgacaatgccagccttgaggcaaccttcgtcaaaaggtgctgccattgctgtttgttgggacgcgctgcccaggcccaaggtcaatcctgtgagtactcattgatggttgggtaccagtgtgggcaggtgttccaggcttgttgcgtcaaatcccaggagacgggggatctcgatgtgggaggcctgcaggaaaccgacaagatcattgaagttgaggaggagcaggaagatccatatttgaatgatcggtgcaggggagggggaccgtgtaagcagcagtgccgggacacaggcgacgaggtggtttgctcttgtttcgttgggtatcagctgctgagcgacggcgtgagctgtgaggacgtgaatgaatgcatcacagggtctcactcttgtcgacttggggagagttgcattaacactgtcggcagtttccgttgccagcgggattcatcatgcggcacaggttatgagctcacagaagacaacagctgcaaggatatagatgagtgcgaatctggcatacacaattgcctccctgattttatttgccagaacacattgggcagcttccggtgccgtccaaagttgcagtgcaagtccggatttattcaagatgccctcggaaattgcatcgacattaacgagtgtctctctataagcgcaccatgccccattggacacacatgtatcaatactgaggggtcttacacatgtcagaaaaacgtgcccaattgtggccgcggttaccatctgaatgaggagggaactcgctgcgtggatgtcgatgagtgtgctccacctgcagagccctgcggcaaaggccacaggtgtgtgaactctccaggttcgttcagatgtgaatgcaagacaggctattactttgatgggatctccagaatgtgcgttgacgtgaacgagtgtcaaagatatcccggccgattgtgtggccataagtgtgaaaacactcttgggtcttacctatgctcctgtagcgtaggtttcaggttaagtgtggacggtcgtagttgtgaggacattaacgagtgtagctctagcccttgctctcaagagtgtgccaatgtgtatggaagctaccagtgctattgcagacggggctaccaactttccgatgtggatggggtgacctgtgaagacattgatgagtgtgctctgccaaccggaggtcacatttgcagctataggtgcatcaacatcccaggaagctttcaatgttcctgtccttcctcaggctaccgccttgctccgaatggccggaattgtcaggacatcgacgagtgcgtgactggaatccataactgtagtatcaatgaaacctgctttaatatccagggagggttcagatgtctggccttcgagtgtcctgaaaactatcggcgctcagctgcaacactgcaacaggagaagacagatactgtaagatgcatcaagagctgcagaccaaacgatgtaacctgcgtctttgaccccgtgcacaccattagtcataccgtcatttcattacctacgtttagggaatttaccaggcctgaagagataatattcctccgggcaattactccaccccatcccgcgtctcaggcgaatatcatcttcgacattacagaaggaaacctccgtgacagctttgatattatcaagcgttatatggatggcatgactgtgggcgtggtgagacaagtcagacccatagtcggaccttttcacgctgtgctgaaattggagatgaactatgtagtcggaggggtggtgagccaccgtaatgtagtgaacgtgcacatcttcgtgtctgaatactggttctag

SEQ ID NO: 165515 - DNA, 2112 bp, Artificial Sequence
  derived and/or modified sequence
atggaacgtgccgcgccaagcaggcgggtcccactccccttactgctcctgggggggttagccctgctggccgcaggagtggatgcagatgtgctgctggaggcatgctgtgctgatggacatcgaatggctactcaccagaaagactgttctctaccttatgcaacagaatcaaaggagtgccggatggtccaggaacaatgctgccattcacagctcgaggagttacactgtgccactgggatcagtctcgcaaacgaacaggaccgctgtgctacccctcacggggataacgcgagcttggaggctacctttgtgaaacgatgctgtcattgctgcttgctcggcagggccgcacaagcccaagggcagagttgcgaatattctctgatggttggctatcaatgcggacaggtgtttcaagcctgttgtgtgaaaagtcaggaaactggcgacctggacgttggtggacttcaggaaacagacaagattattgaagtcgaggaggagcaggaggacccatacctcaacgaccgctgcagaggaggcggtccatgtaagcagcagtgccgcgataccggcgacgaggtcgtgtgtagctgcttcgtaggttatcagctgttaagtgacggagtgtcctgcgaggatgtcaacgaatgtatcaccggcagccactcttgtcggctcggcgaatcatgtatcaataccgtgggatccttccggtgccaacgggactcatcatgtggtactgggtatgagcttacagaagataattcatgcaaggacatagacgaatgcgagagcgggatccacaattgtttacccgatttcatctgccagaacacactgggctcgttccggtgccgccccaaacttcagtgcaagtccgggtttattcaggatgctctgggtaactgcatagatatcaatgaatgtctatcaatttctgcaccatgccctataggtcacacgtgtattaacaccgaaggatcttatacatgtcagaagaatgtacctaattgcggtcgcggctaccatctcaatgaagagggaacgcggtgtgtcgacgttgatgaatgcgcacctcccgcggaaccctgcggcaagggccaccggtgcgtgaattcccccggatcattccgttgcgagtgcaagaccggatattactttgacgggatcagcagaatgtgtgtggacgttaatgaatgtcaaaggtatcctggacggctctgtggccacaagtgtgaaaatacactcggttcatacttgtgctcttgttctgttggatttagattgtccgtggacggccggagctgtgaagatatcaacgaatgctcttcctccccttgctcacaggaatgcgcaaacgtgtacggttcctaccagtgttactgcaggagaggctatcagctgagtgacgtggatggagtcacatgtgaggacattgatgagtgcgccctgcccacaggcggacatatttgctcatatcgctgtatcaacattcctggctcgtttcaatgttcatgtccatcttcaggctacaggctggcacctaacggccgcaactgccaggacatagatgagtgcgtcaccggtattcataactgttctataaatgagacatgtttcaacattcagggggggttcagatgccttgcgtttgaatgcccagagaattaccgccgctctgctgcaactcagaagagtaagaaaggtagacagaataccccagccggatccagtaaggaagactgcagagttttaccttggaagcagggcctggaggacacacacttggacgcatacctgccatgctgtcgtaggttcactcgaccggaggaaattatcttccttagagccattacccccccgcatcccgccagccaagctaatatcatatttgatatcactgagggcaatctgagggactctttcgacatcataaagcgatacatggacggcatgactgtcggcgttgtgcgacaggtcaggccaattgtgggaccgttccacgccgtcctgaaattagagatgaactatgtggtcggtggtgttgtcagtcatcggaacgtagtcaacgtgcatatcttcgtgtcggaatattggttttag

SEQ ID NO: 165516 - DNA, 81 bp, Artificial Sequence
  derived and/or modified sequence
atggcaacccatcagaaggattgttccctgccatacgctacagaatcaaaagagtgtcgaatggtccaagagcagtgctag

SEQ ID NO: 165517 - DNA, 2112 bp, Artificial Sequence
  derived and/or modified sequence
atggagcgggccgcccccagccggcgggtgcccctgcccctgctgctgctgggcggcctggccctgctggccgccggcgtggatgctgatgtgctgctggaggcctgctgtgctgatggccacaggatggccacccaccagaaggactgcagcctgccctatgccacagagagcaaggagtgcaggatggtgcaggagcagtgctgccacagccagctggaggagctgcactgtgccaccggcatcagcctggccaatgagcaggacagatgtgccacccctcatggagacaatgccagcctggaggccacctttgtgaagcgctgctgccactgctgcctgctgggccgggccgcccaggcccagggccagagctgtgagtacagcctgatggtgggctaccagtgtggccaggtgttccaggcctgctgcgtgaagagccaggagaccggggacctggatgtgggcggcctgcaggagacagacaagatcatcgaggtggaggaggagcaggaggacccctacctgaatgaccgctgccggggcggcggcccctgcaagcagcagtgccgggacacaggagatgaggtggtgtgcagctgctttgtgggctaccagctgctgagtgatggagtgtcctgtgaagatgtgaatgaatgcatcaccggcagccacagctgccgcctgggggagagctgcatcaacacagtgggcagcttccgctgccagagggacagcagctgtggcaccggctatgagctgacagaggacaacagctgcaaggacattgatgaatgtgagagcggcatccacaactgcctgcctgacttcatctgccagaacaccctgggcagcttccgctgccggcccaagctgcagtgcaagagcggcttcatccaggatgccctgggcaactgcatcgacatcaatgaatgtctgagcatcagcgccccctgccccatcggccacacctgcatcaacacagagggcagctacacctgccagaagaatgtgcccaactgtggccggggctaccacctgaatgaggagggcacccgctgtgtggatgtggatgaatgtgcccccccagctgagccctgtgggaagggccaccgctgtgtgaacagccctggcagcttccgctgtgagtgcaagacaggctactactttgatggcatcagcaggatgtgtgtggatgtgaatgaatgccagcgctacccaggccgcctgtgtggccacaagtgtgagaacaccctgggcagctacctgtgcagctgcagcgtgggcttccggctgtctgtggatggccgcagctgtgaggacatcaatgaatgtagcagcagcccctgcagccaggagtgtgccaacgtgtatggcagctaccagtgctactgccggcggggctaccagctgagtgatgtggatggagtgacctgtgaggacattgatgaatgtgccctgcccactggaggccacatctgcagctaccgctgcatcaacatccctggcagcttccagtgcagctgccccagcagcggctaccgcctggccccaaatggaagaaactgccaggacattgatgaatgtgtgacaggcatccacaactgcagcatcaatgagacctgcttcaacatccagggcggcttccgctgcctggcctttgaatgtcctgagaactacagaagatctgctgccaccctgcagcaggagaagacagacacagtgcgctgcatcaagagctgccggcccaatgatgtgacctgtgtgtttgatcctgtgcacaccatcagccacacagtcatcagcctgcccaccttccgggagttcaccaggcctgaggagatcatcttcctgcgggccatcaccccaccccacccagccagccaggccaacatcatctttgacatcacagagggcaacctgcgggacagctttgacatcatcaagcgctacatggatggcatgacagtgggcgtggtgcggcaggtgcggcccatcgtgggccccttccacgctgtgctgaagctggagatgaactacgtggtgggcggcgtggtgagccacagaaatgtggtgaatgtgcacatctttgtgtctgagtactggttctag

SEQ ID NO: 165518 - DNA, 2112 bp, Artificial Sequence
  derived and/or modified sequence
atggagcgggccgcccccagccggcgggtgcccctgcccctgctgctgctgggcggcctggccctgctggccgccggcgtggatgctgatgtgctgctggaggcctgctgtgctgatggccacaggatggccacccaccagaaggactgcagcctgccctatgccacagagagcaaggagtgcaggatggtgcaggagcagtgctgccacagccagctggaggagctgcactgtgccaccggcatcagcctggccaatgagcaggacagatgtgccacccctcatggagacaatgccagcctggaggccacctttgtgaagcgctgctgccactgctgcctgctgggccgggccgcccaggcccagggccagagctgtgagtacagcctgatggtgggctaccagtgtggccaggtgttccaggcctgctgcgtgaagagccaggagaccggggacctggatgtgggcggcctgcaggagacagacaagatcatcgaggtggaggaggagcaggaggacccctacctgaatgaccgctgccggggcggcggcccctgcaagcagcagtgccgggacacaggagatgaggtggtgtgcagctgctttgtgggctaccagctgctgagtgatggagtgtcctgtgaagatgtgaatgaatgcatcaccggcagccacagctgccgcctgggggagagctgcatcaacacagtgggcagcttccgctgccagagggacagcagctgtggcaccggctatgagctgacagaggacaacagctgcaaggacattgatgaatgtgagagcggcatccacaactgcctgcctgacttcatctgccagaacaccctgggcagcttccgctgccggcccaagctgcagtgcaagagcggcttcatccaggatgccctgggcaactgcatcgacatcaatgaatgtctgagcatcagcgccccctgccccatcggccacacctgcatcaacacagagggcagctacacctgccagaagaatgtgcccaactgtggccggggctaccacctgaatgaggagggcacccgctgtgtggatgtggatgaatgtgcccccccagctgagccctgtgggaagggccaccgctgtgtgaacagccctggcagcttccgctgtgagtgcaagacaggctactactttgatggcatcagcaggatgtgtgtggatgtgaatgaatgccagcgctacccaggccgcctgtgtggccacaagtgtgagaacaccctgggcagctacctgtgcagctgcagcgtgggcttccggctgtctgtggatggccgcagctgtgaggacatcaatgaatgtagcagcagcccctgcagccaggagtgtgccaacgtgtatggcagctaccagtgctactgccggcggggctaccagctgagtgatgtggatggagtgacctgtgaggacattgatgaatgtgccctgcccactggaggccacatctgcagctaccgctgcatcaacatccctggcagcttccagtgcagctgccccagcagcggctaccgcctggccccaaatggaagaaactgccaggacattgatgaatgtgtgacaggcatccacaactgcagcatcaatgagacctgcttcaacatccagggcggcttccgctgcctggcctttgaatgtcctgagaactacagaagatctgctgccacccagaagagcaagaagggccggcagaacaccccagctggcagcagcaaagaagactgccgggtgctgccctggaagcagggcctggaggacacccacctggatgcctacctgccctgctgccgccgcttcaccaggcctgaggagatcatcttcctgcgggccatcaccccaccccacccagccagccaggccaacatcatctttgacatcacagagggcaacctgcgggacagctttgacatcatcaagcgctacatggatggcatgacagtgggcgtggtgcggcaggtgcggcccatcgtgggccccttccacgctgtgctgaagctggagatgaactacgtggtgggcggcgtggtgagccacagaaatgtggtgaatgtgcacatctttgtgtctgagtactggttctag

SEQ ID NO: 165519 - DNA, 81 bp, Artificial Sequence
  derived and/or modified sequence
atggccacccaccagaaggactgcagcctgccctatgccacagagagcaaggagtgcaggatggtgcaggagcagtgctag

SEQ ID NO: 165520 - DNA, 2112 bp, Artificial Sequence
  derived and/or modified sequence
atggagcgggccgcccccagccggcgggtgcccctgcccctgctgttactgggtgggctggccttgctcgcggctggcgtcgatgctgacgtactgctggaggcgtgttgtgccgatggtcacagaatggccacacaccaaaaggactgcagtctgccatatgctacggagagtaaagagtgtaggatggtgcaagaacagtgttgtcatagtcaactcgaggaacttcactgcgccactggaatttccctggcaaacgaacaggaccgctgtgcaactccgcatggtgacaacgcttctttggaagccaccttcgtcaagcgttgttgccactgctgccttttgggcagggctgcccaggctcagggccagtcatgcgaatattctctgatggtcggctatcagtgtggacaggtattccaggcctgctgtgtcaagtcccaggagacgggtgaccttgatgtgggcggactgcaagaaaccgataagattatcgaggtggaagaggagcaggaggatccatacctgaatgacaggtgcaggggagggggaccatgcaaacagcagtgtagagacaccggagacgaggtagtctgcagctgtttcgttggctaccagcttctgtcggatggggtgtcctgcgaagacgtgaatgaatgtattacaggcagccactcttgtaggttaggggaaagctgtattaacacggtgggatcatttaggtgccaacgggattcgtcatgtggcactgggtacgagctaactgaggataattcatgcaaagacattgatgagtgtgagtcaggaattcacaattgtttaccagactttatttgccagaatacgctcggtagttttcgatgtcgtccaaagctgcagtgtaagtcaggattcatacaggacgcgctgggcaattgcattgacattaatgagtgcttgtccattagcgcaccctgccccattggccacacatgtatcaataccgaaggctcctacacgtgccaaaagaacgtccctaattgcggcagaggctaccatctgaacgaagagggaactcgctgcgtcgacgtcgacgagtgtgctccccctgccgaaccttgcgggaagggacacagatgtgtgaatagccctggatctttcaggtgcgagtgtaagaccggatactatttcgacggcattagtaggatgtgcgtagatgtgaacgaatgccaaagatatcctggtcgactctgcggtcacaaatgtgaaaacacgttaggctcttatctttgttcatgctccgttggattccgactttccgtagatgggcgtagctgtgaggacatcaatgagtgctcatcctccccgtgttcccaggagtgtgcaaatgtgtacggatcataccagtgctactgtagacggggataccagttgtcggacgtggatggcgtgacttgtgaagatatcgacgagtgtgccctcccaaccggtggacatatatgtagctaccggtgtataaacattcctggctcatttcagtgctcgtgtccatctagcgggtatcgtctcgccccaaatgggagaaattgccaagacatagatgaatgcgtgacagggatccacaattgtagcattaatgaaacgtgtttcaatattcaaggcggttttcgctgccttgcttttgagtgccccgagaattataggaggtcagccgccaccctgcaacaggaaaaaacagacaccgtgcgttgcattaaatcctgccgcccaaatgacgtcacatgtgtcttcgatcctgtccatactatttctcataccgttatttccctcccgacgtttcgagagtttacccgccccgaggaaatcatctttcttagggcaattactcctccccatcctgcgtcacaggcaaacatcatctttgatatcaccgaaggcaacctgagggacagttttgacataatcaaacgctacatggacggtatgactgtcggcgtcgttaggcaagtgcgcccaatcgttggcccctttcatgcagtcttgaagctagaaatgaattatgtggtggggggtgtggttagccatcgaaatgttgtgaacgtccacatctttgtaagcgaatactggttctag

SEQ ID NO: 165521 - DNA, 2112 bp, Artificial Sequence
  derived and/or modified sequence
atggagcgggccgcccccagccggcgggtgcccctgcccctgctgctgttaggaggactggctctgcttgcagccggggttgatgctgatgtgttactggaggcgtgttgtgcagatggccatagaatggccactcaccagaaagattgtagtctcccctacgcgaccgagtctaaggagtgtcgcatggtgcaagaacagtgttgtcactcccaattggaggaactgcactgcgctacagggatcagtctggcaaatgagcaggacaggtgcgctactccacacggcgataacgcgtctctcgaagccactttcgtgaagcgatgctgccattgttgtctcctcgggagggccgcccaggctcaggggcagtcttgcgagtattcgttaatggtaggctatcagtgtggccaggtgttccaggcatgctgtgtgaagtcgcaggaaaccggtgatctggacgtgggcgggttgcaggaaacagataagatcatcgaagtagaggaggagcaggaagacccctatctgaatgacagatgcagaggaggcggtccctgcaagcaacaatgtagggataccggggacgaggtcgtgtgttcttgctttgtggggtaccaactcctatctgacggggtgagttgcgaggatgtaaacgaatgtattacaggctcacactcatgccgcctgggcgagtcatgcataaatacagtgggatcatttcgctgccagagggatagctcttgcggcacaggatatgaattgaccgaggataattcctgtaaagatatcgacgagtgcgagtctggcattcacaactgcctaccagatttcatttgccagaatacactaggaagtttcagatgtagaccgaagttgcagtgtaagagcggttttattcaggacgccctggggaattgcatcgacatcaacgagtgtcttagcattagcgccccttgccccatcggacatacctgtataaacactgaaggatcgtacacctgccagaaaaacgtgccgaactgtgggaggggatatcatctcaatgaggaggggacaaggtgcgttgacgtggatgagtgtgccccccctgcagagccgtgcggtaaaggccacaggtgcgtcaacagtcctgggtcattccggtgtgaatgcaaaaccgggtactactttgacggaatttcgcgaatgtgcgtcgatgtcaatgaatgccagaggtacccaggtcggctgtgcggtcataagtgcgaaaacacgttgggttcatatctgtgctcttgcagtgtgggattccgcctatccgttgatggacgctcatgcgaagatataaacgagtgtagctccagtccttgttctcaagagtgtgccaatgtctatggctcgtatcagtgctactgtaggcgcgggtatcagttatctgatgtggatggtgtgacctgtgaagatatagacgagtgcgcgctgcccaccggaggacatatctgctcctaccggtgtattaacatacccggctccttccaatgttcgtgcccgagctctggctatagactggcccccaatggtaggaattgccaggatatagatgagtgtgtcactggaattcataactgtagtatcaacgagacctgctttaacatccagggtgggttcagatgtttggcttttgagtgtcctgaaaactacagaaggagtgctgctactcaaaaatctaaaaaaggaagacagaacacacctgcaggcagttccaaggaggattgtcgggtgctgccctggaaacagggtctggaggacacacacctggacgcatatctgccctgctgccggcgttttacgaggcccgaggaaattatattcttgcgagctatcacaccgcctcatcccgcatcacaggctaacattatattcgacattaccgaggggaacttacgtgatagctttgatattattaaaagatacatggacgggatgactgtgggggtggtcagacaagtgcgccctatagtcggaccatttcacgcagtcctgaagttagaaatgaactatgtggtgggtggggtggtatcccacagaaatgtggtcaacgtgcatatttttgtctccgagtactggttctag

SEQ ID NO: 165522 - DNA, 81 bp, Artificial Sequence
  derived and/or modified sequence
atggccacccaccagaaggactgcagcctgccctacgccaccgagagtaaagagtgccggatggttcaggaacagtgctag

SEQ ID NO: 165523 - DNA, 2112 bp, Artificial Sequence
  derived and/or modified sequence
atggagagggccgctcctagtcggagggtgcccctgcctttactgctcctcggtggcctggcgctcctggccgcaggggttgatgcagatgtgctcctggaggcttgttgcgccgacggtcataggatggccactcaccagaaggattgttccctgccatatgctacagagtccaaggagtgtcgcatggtgcaagaacaatgttgccactcccagctggaggaactccactgtgcaacaggcatctccttagctaatgagcaagacaggtgcgctaccccccatggggacaatgcatccttggaggctacattcgtgaagcgttgctgtcactgctgtctgctgggccgtgccgcacaggcacaaggccagtcctgcgaatattcactgatggtaggttaccaatgcggacaagtgttccaggcctgttgtgtgaagtcccaagaaaccggcgacctggatgttgggggactccaggagaccgacaaaattatcgaagttgaagaggagcaagaagatccatacctgaatgatagatgtcgcggtggtggaccttgcaagcaacagtgccgcgataccggcgacgaagtggtctgctcctgtttcgtgggctatcagctgttgtcagacggtgtgtcttgtgaagacgttaatgagtgtataacgggatctcacagctgcagactcggggaaagctgcatcaacacggtgggctctttcagatgtcaacgggattcctcatgcggtacaggatacgagctgacagaagataactcctgtaaggatattgacgagtgcgagagcggaattcacaattgcctgcccgacttcatttgtcaaaatacattggggagcttcaggtgccggcctaagcttcaatgcaaatccggattcatccaagatgccctgggaaattgtatcgacattaacgagtgtttgtccatctctgctccatgtccaatcggacatacttgcattaacacggagggcagctatacttgtcagaagaacgtgccaaactgtggcagaggataccacctaaacgaagaggggactcggtgcgtagacgtggacgagtgtgcccctcctgctgagccctgcggaaaaggtcaccgctgtgtcaatagccccggatctttcaggtgtgaatgcaagacaggatactactttgacggtatttctaggatgtgtgtcgacgtgaacgaatgtcagaggtatccaggtcggctctgcggccacaagtgcgaaaacacactgggatcttacctgtgctcctgcagtgtcgggttcagactctccgtggatgggaggtcatgcgaagacatcaacgaatgtagttccagtccatgctcacaggaatgcgcgaatgtgtacggaagctatcagtgctattgtcgcagagggtaccagctctcggatgtcgacggcgtgacatgcgaagacattgacgagtgcgcattacccactggcggacatatctgcagttaccggtgtatcaacattcctggtagttttcagtgcagttgcccaagctccggctaccgcctggctccgaatggccgtaactgtcaggatatagatgagtgtgtgactgggattcataactgttctatcaacgagacgtgctttaatatacaggggggtttccggtgcctggcttttgagtgccccgagaactatcggagatccgcagccacgctgcaacaggagaaaaccgacactgtcaggtgtattaagtcctgcaggccaaatgacgtgacatgcgttttcgatccagtgcacaccataagccacacagtcatctccttgccaactttcagagagtttacaaggcccgaggagattatattcctccgagccattactcctccacaccccgcttcacaggccaacatcatattcgacatcacagagggcaacctgcgggatagttttgacatcattaagcgttacatggacggaatgactgtgggagtggtgagacaggttaggcctatagtcggtcctttccacgccgtactgaaattagagatgaactatgtggtgggaggcgtcgtttcccaccggaacgtcgtgaatgtgcatatatttgtgtcagaatactggttttag

SEQ ID NO: 165524 - DNA, 2112 bp, Artificial Sequence
  derived and/or modified sequence
atggagcgcgcagcgccatccaggcgggtaccgttgccactcctactactggggggattggccctcctggccgcaggtgtcgatgcggacgtcctattggaagcatgctgcgcggatggccatcgcatggcaactcatcagaaagactgctcactcccttatgctacagaatccaaggaatgccgcatggtgcaggaacagtgttgccattctcagctggaggaactgcactgtgccaccgggatttccttggccaatgagcaggacaggtgtgcaaccccgcacggggataacgcaagcctggaagccaccttcgtcaagagatgctgccactgttgtctgctgggccgtgccgctcaggctcagggtcagtcctgtgaatactccctgatggtcggctaccaatgtggacaggtgttccaggcgtgctgcgtgaagagtcaggagaccggcgatctggacgtcggcggtttgcaagaaaccgacaagattatcgaggtagaagaggagcaggaagacccctacctgaacgacaggtgtagggggggaggaccctgtaaacagcagtgcagggacaccggtgacgaagtagtgtgttcctgcttcgttgggtatcagctactctcagatggggtgtcctgtgaggacgtgaacgagtgcattacggggtcccattcctgtcgtcttggcgaatcatgcatcaacacggtgggctctttcaggtgtcagcgggattcatcctgtggcacggggtacgagctgacagaagacaactcctgcaaagatattgatgaatgtgagagtggcatccacaactgtctgccagactttatctgccagaataccctggggtcattccggtgtcgcccaaagctgcaatgtaagtcaggatttatccaggacgcactaggcaactgcatcgacattaatgagtgcctttctataagcgccccatgccctattgggcatacatgtatcaatacagagggatcatacacctgccagaagaacgtgcctaactgtggtcggggatatcacttgaatgaagagggcaccaggtgtgtcgacgtggatgagtgcgcaccccctgcggaaccttgcgggaagggccatcgctgcgtcaatagccctggatcctttagatgtgagtgtaaaactggctattactttgacggtatcagccgcatgtgtgtcgacgtgaatgagtgtcagcgctatcctggtcgcctctgtggtcacaagtgcgagaacaccctgggaagttacttgtgttcctgctccgttggttttagacttagcgtggacggacgcagctgcgaggacataaacgaatgctccagctctccctgctcccaggagtgcgcaaacgtttatgggtcttaccagtgctattgtcggaggggataccagctttctgacgtcgatggcgtcacctgcgaggacatagatgagtgtgcgctgcctactggtggccacatctgctcctaccgctgcattaacatccctggatcgtttcaatgtagctgcccgagcagcggatatcgcctggcgcctaatggcagaaattgccaggacatagacgagtgtgtgacaggcatccataattgcagtatcaacgaaacttgtttcaacatccagggcggattccggtgtttggcatttgagtgccccgagaattaccgcagatccgcggctacccaaaagtctaagaagggtcgccagaatacacctgcaggttcaagcaaagaggattgtcgtgtcctgccatggaaacaaggcctcgaggacacccaccttgatgcctatctgccgtgctgccggaggttcacacggcctgaggaaatcatttttctaagggcaattacacccccacacccagcgtctcaggctaacataatctttgacattaccgaggggaatctcagagactccttcgacattattaagcgttacatggacggtatgacagtgggcgtcgtacgacaagtgaggcctatcgtggggccatttcatgccgtgcttaaactggaaatgaactatgtggtgggtggagtggtttcccaccgaaacgtggtcaacgtccatatatttgtcagtgagtattggttctag

SEQ ID NO: 165525 - DNA, 81 bp, Artificial Sequence
  derived and/or modified sequence
atggcgacccaccagaaggattgctctctcccttatgctacagagagtaaggagtgcagaatggtgcaagaacagtgctag

SEQ ID NO: 165526 - DNA, 2112 bp, Artificial Sequence
  derived and/or modified sequence
atggagagagccgccccctcccgaagggttcccctgccgctactgctgcttggaggactagctctacttgctgctggggtggacgccgacgtgctgttggaagcctgttgtgcagacggccatcgaatggctactcaccagaaagactgctccctcccctatgccaccgaatccaaggagtgtcgtatggttcaggagcagtgttgtcacagccagctggaggagctacattgtgccaccggcatatcattagcaaatgaacaggaccgttgcgccactccccatggcgataacgcttcactggaagcgacattcgtgaagagatgttgtcactgttgtctgctcggtagagctgcccaggcgcaggggcagtcctgcgagtactcactgatggttggctaccagtgcggccaggttttccaggcttgttgtgtaaagtcccaagaaactggtgatctggacgttggaggattgcaggaaacagacaagataatcgaggtggaggaggaacaggaggatccttaccttaatgacaggtgtcggggagggggaccttgcaaacaacagtgccgcgacaccggtgacgaggtcgtttgctcctgcttcgtcggataccagctgctgagcgacggagtgtcttgtgaggacgtaaatgaatgtataacaggcagccatagttgtagattgggggaaagttgcatcaatactgtcggcagtttccggtgtcagcgcgactcttcatgtggcacaggatacgaacttaccgaggacaactcgtgtaaggatatagatgaatgcgaatccggcatccacaactgtctgccagacttcatttgccagaataccctgggctcattccgctgccgccctaaactgcaatgtaagtctggttttatccaggatgctttaggtaattgtattgatattaacgaatgtctgagtatttccgcaccctgcccgattggccacacctgtataaatacagagggatcttacacttgtcaaaagaatgtccctaattgtggtagaggataccaccttaatgaggaggggacccggtgcgtggacgtcgacgagtgtgcacctcctgccgagccttgcggaaaagggcatcgttgtgttaacagccctgggagtttccggtgtgaatgcaagactggctactactttgatggcattagtcgaatgtgcgtcgatgtcaatgaatgtcaaagataccccgggagactctgcggccataaatgcgaaaatacactaggaagttatctgtgctcttgcagcgtcggtttccgattgagcgtagacggtaggtcctgtgaggacatcaacgaatgcagcagctccccttgctcgcaagaatgcgccaacgtatacggcagttatcaatgctattgtcgaagggggtaccaattgtcagacgtagacggtgtcacctgcgaggacattgacgagtgcgccttacccaccggaggacatatttgttcttaccgttgcataaacattcctggctcgttccagtgctcctgcccttcatctggatataggcttgccccgaatggaaggaattgccaagacattgatgagtgcgtaacagggattcataactgcagcattaacgagacgtgcttcaacatccaggggggttttaggtgtctagccttcgagtgccctgagaactacaggagatccgccgccactcttcaacaggaaaagactgatactgtgcgctgcatcaaatcctgccgtcccaatgatgtcacgtgtgtcttcgatcctgtgcacaccatctcacacacagtgatctcactaccgacgtttcgcgagttcacaagaccggaggaaattatctttttgagggcaataacaccacctcatccggccagtcaggccaacattattttcgatattacagaaggcaacctcagggactcgtttgacatcatcaagcgttacatggacggcatgactgtcggggtggttcgccaggtccgacccatcgtgggcccttttcacgccgtgctgaagttagaaatgaattacgtggtcggaggtgtcgtatctcacaggaatgtggtaaacgtccacatcttcgtgagcgaatactggttttag

SEQ ID NO: 165527 - DNA, 2112 bp, Artificial Sequence
  derived and/or modified sequence
atggaacgcgccgctcccagtagacgggtgccattgccgctgctactccttgggggattagcgcttctcgccgctggagtggatgcagatgtgttgcttgaggcttgttgcgcggatggacatcgtatggcaacgcaccagaaggattgcagcctcccttacgcaaccgaatccaaggagtgcagaatggttcaagaacaatgctgccactcccagcttgaagagttgcattgtgctacaggaatctccctggctaatgaacaagaccgctgtgctacacctcacggggataatgcttcactggaagcgacctttgtcaaacgctgttgccattgttgcctgctgggacgggccgcacaggcacaaggtcagagttgtgagtactctcttatggtgggctaccagtgtggccaagtatttcaggcctgctgcgtaaagagccaggaaacaggggaccttgacgtgggggggctacaggaaaccgacaagattatcgaagtagaggaggaacaggaagatccatatcttaacgatcgctgccggggtggcggaccatgcaagcagcagtgtcgcgatacaggggacgaagtcgtgtgcagctgttttgtcggatatcaactcctctctgacggagtctcatgtgaggacgtgaacgagtgtatcactggttctcactcctgtcgactcggtgaatcatgtataaacaccgttgggagcttccgctgccagcgcgacagtagctgtggcaccggttacgagctaacagaggataactcatgcaaagatatcgatgaatgcgaatctggaatacacaattgcttaccagactttatctgccaaaacacgctgggcagcttccgatgccggccaaagttacaatgtaagtcaggatttatacaggatgccctgggtaattgtatcgatataaacgagtgtctttcaattagcgcgccctgcccgattggacatacctgtattaatacagagggctcctacacttgtcagaagaacgttcccaattgtggcaggggataccatcttaatgaggaaggaactcgatgtgtcgacgtggatgagtgtgccccacccgctgaaccgtgcggaaaagggcaccgttgcgtgaattccccgggctcatttagatgcgaatgtaaaacaggttactatttcgacggcatcagcaggatgtgtgtggatgttaatgagtgccagaggtatccggggcgactatgtgggcacaaatgcgaaaacaccctggggtcttacctgtgcagttgcagcgtgggctttagactatctgtcgacggacggagctgtgaagacataaatgagtgcagtagctcaccctgctctcaggagtgcgccaatgtgtacgggtcataccaatgttactgccgcagaggatatcagttgtcagacgtggatggggtgacttgtgaggacatcgatgaatgcgcgctccccaccggaggacacatatgcagttacaggtgcatcaatataccaggtagcttccagtgctcatgcccgtcctccggatatcggttagcaccaaatgggagaaattgtcaagacattgacgagtgtgttacaggaattcacaattgctctatcaatgagacttgctttaacatccagggaggattcaggtgtctagctttcgagtgtcctgagaattatagacgcagcgccgcaacccaaaagagcaagaaaggaaggcaaaacacccccgctggctcttctaaagaggactgtcgtgtcctaccctggaagcaggggttagaagacactcatctggatgcttatctgccctgttgtcgccgtttcacgcgacctgaggaaatcatctttttaagggccattacccccccacacccggcgagtcaggccaacataatcttcgacatcactgaaggcaacctaagggacagtttcgatattatcaagagatacatggatggcatgacagttggagtggtgcggcaggtgaggcccattgtgggtccatttcatgccgtcttaaagctcgagatgaactatgtcgtagggggggtcgttagtcaccgcaatgtggtgaatgtgcatatttttgtgtcagagtattggttctag

SEQ ID NO: 165528 - DNA, 81 bp, Artificial Sequence
  derived and/or modified sequence
atggcgactcaccagaaagactgtagccttccatacgcaactgagagcaaagaatgcagaatggtccaagaacagtgctag

SEQ ID NO: 165529 - DNA, 2112 bp, Artificial Sequence
  derived and/or modified sequence
atggaacgagcggcaccgtcgcggcgtgttcccctacctctattattgctgggaggactcgccttacttgccgcgggcgtggacgcagacgtgctcctggaggcctgctgcgccgacggtcatagaatggctacccaccaaaaggattgttcattaccttacgctaccgaatccaaagagtgcaggatggtgcaggagcagtgctgccactctcaactggaagagttacactgtgctacaggaatcagtttggcaaacgaacaggataggtgcgcaaccccccacggcgacaatgcgagcctcgaggctacgtttgtgaaaagatgctgccattgttgcctgcttgggcgtgcagctcaggcacaggggcaaagttgtgagtatagtttgatggtggggtaccaatgcggccaggttttccaagcttgttgcgtcaaaagtcaagagacaggtgatcttgatgttggtggcttacaggaaacagacaaaattatcgaggtggaagaggaacaggaggatccatacttaaatgaccgatgcaggggtgggggtccatgtaagcagcaatgtcgagatacgggggatgaggtggtgtgttcatgttttgttggataccaactgttgtcagacggcgtttcatgcgaggacgtcaacgaatgcattaccggtagccattcctgtagactgggagagagctgtatcaataccgtaggaagcttccgctgtcagagggactctagctgtgggaccggatacgaactaactgaggacaatagttgcaaggatattgacgagtgtgaatccggcatacacaactgtctgcctgattttatatgtcagaatacacttggctcattccggtgtcggcccaagctacaatgcaaaagcggattcatacaggacgcgctgggcaattgcatcgatattaacgagtgcttgagtatctctgccccctgccctatcggccacacctgcattaacaccgaaggttcatatacttgccagaagaatgtccctaactgcggccgtggctaccacctgaatgaggaaggaaccagatgcgtggacgttgatgaatgtgccccgcctgcggaaccctgcggaaagggccaccgctgcgtgaatagtcctgggtcctttagatgcgaatgtaaaactggttactatttcgatggcatttctcggatgtgcgtggatgttaatgaatgtcaaagataccccgggagactctgcggccataaatgcgaaaatacactaggaagttatctgtgctcttgcagcgtcggtttccgattgagcgtagacggtaggtcctgtgaggacatcaacgaatgcagcagctccccttgctcgcaagaatgcgccaacgtatacggcagttatcaatgctattgtcgaagggggtaccaattgtcagacgtagacggtgtcacctgcgaggacattgacgagtgcgccttacccaccggaggacatatttgttcttaccgttgcataaacatccccggatccttccaatgttcatgtcctagcagtggatataggctggcaccgaacggaaggaattgccaagatatcgatgaatgcgtcacaggaatacacaattgctctataaatgaaacctgctttaacattcagggtggctttagatgcttggccttcgagtgcccagagaactatcgacgatccgccgccaccctgcagcaggaaaaaaccgataccgttcgttgtattaaatcttgtagacctaacgatgtgacatgcgtcttcgaccccgtgcacaccatttcccacacagtgattagcctcccaacctttcgcgagttcaccaggcccgaggagatcatttttttacgagccattactcccccacaccccgcctctcaagccaacataatttttgacattactgagggaaacctgcgagactcgttcgacatcatcaaacggtatatggatggaatgactgtgggcgttgttcgacaagtgaggcctatcgttggaccctttcacgcagtgcttaaactcgaaatgaactatgtggtcggcggggtcgtcagtcacagaaacgtggtcaatgtgcatattttcgtcagcgagtattggttttag

SEQ ID NO: 165530 - DNA, 2112 bp, Artificial Sequence
  derived and/or modified sequence
atggagagagcagctccgtcaagacgcgtcccactccccctgttactactaggaggccttgcgctgttggcagcaggcgttgacgccgacgtattgcttgaagcctgctgcgctgatggccacaggatggcaacgcaccagaaagattgtagtctgccgtacgccactgagtcaaaggaatgtaggatggtccaggaacagtgttgccacagtcaactagaggaacttcattgcgctacgggaatttcactcgctaatgagcaggacaggtgcgccacacctcatggcgataatgccagcttagaggcgacgttcgtgaagaggtgctgtcactgttgcctgctcggacgggccgcacaagctcaaggccagtcatgcgagtactctttgatggtcggataccagtgtggccaggtatttcaagcatgttgcgtcaagtcgcaggaaacaggggatttggacgtcggaggcctgcaagaaacagacaaaataatagaagtggaagaagaacaggaggacccctatttaaatgacagatgtcgcggcggcggtccctgtaaacaacagtgcagggacacgggagacgaggtggtgtgtagctgtttcgtaggataccagcttctgtccgatggagtgtcttgtgaggacgtcaacgagtgtatcacagggagccacagctgccgactgggagaaagctgcattaataccgttggaagcttccgctgtcagcgcgactcttcctgtgggaccgggtatgaacttactgaagataatagctgcaaagacatcgatgaatgtgagtctgggattcacaactgcctgcctgatttcatttgtcagaacacattaggaagctttcgttgccgaccaaaactgcagtgtaagtctggattcatccaagatgcactcggcaattgtattgatataaatgagtgcctgtccattagtgctccatgtccaataggccacacctgtatcaacactgaaggatcatatacctgccagaaaaatgtgcctaattgtggaagaggttatcatttgaatgaggaggggacacggtgcgtcgacgtggatgaatgcgccccaccagcggaaccctgtgggaaaggacatcgctgtgttaattctcccggctcgtttagatgcgaatgcaaaacgggatactatttcgatgggatcagcagaatgtgtgtggatgtaaatgagtgtcaacgttaccccggtcgtctgtgcggacataagtgcgagaacacccttggctcatatctttgctcctgttcggtaggctttaggctgagtgtcgatggaaggtcgtgtgaagacatcaacgagtgttccagttctccctgttcccaagaatgtgccaatgtctatggctcataccagtgttactgccgtagaggctaccaactgtcagacgtagatggagtgacctgcgaggacatcgacgagtgtgccctacctactgggggacacatctgctcctatcgctgcatcaatatccccggttcgtttcaatgttcttgtccctcaagcggctataggctcgcacccaacggccgcaattgccaggacattgatgaatgcgttaccggcatccacaattgctcaataaatgaaacttgtttcaacattcaaggcggctttagatgtctggcatttgaatgtcccgagaattatcgacggtccgcagcaacccagaaaagtaagaaaggacgacaaaacaccccagcaggcagctctaaggaggattgtcgtgtcctcccatggaagcagggcttagaagatacacacctcgatgcttatcttccctgctgtcgccgtttcacaagaccagaagaaatcatcttcctacgggctattacacctccacatcccgctagccaagccaatattatattcgacatcaccgaaggcaatcttcgcgattcattcgacattatcaagcggtacatggacggtatgacagtcggcgtggtaaggcaggttcgaccgatagtgggcccattccacgcagttcttaagctggaaatgaattacgtggttgggggtgtggtttctcaccgaaatgttgtcaacgttcatatctttgttagtgagtattggttctag

SEQ ID NO: 165531 - DNA, 2112 bp, Artificial Sequence
  derived and/or modified sequence
atggagagagccgcccccagcagaagagtgcccctgcccctgctgctgctgggcggcctggccctgctggccgccggcgtggacgccgacgtgctgctggaggcctgctgcgccgacggccacagaatggccacccaccagaaggactgcagcctgccctacgccaccgagagcaaggagtgcagaatggtgcaggagcagtgctgccacagccagctggaggagctgcactgcgccaccggcatcagcctggccaacgagcaggacagatgcgccaccccccacggcgacaacgccagcctggaggccaccttcgtgaagagatgctgccactgctgcctgctgggcagagccgcccaggcccagggccagagctgcgagtacagcctgatggtgggctaccagtgcggccaggtgttccaggcctgctgcgtgaagagccaggagaccggcgacctggacgtgggcggcctgcaggagaccgacaagatcatcgaggtggaggaggagcaggaggacccctacctgaacgacagatgcagaggcggcggcccctgcaagcagcagtgcagagacaccggcgacgaggtggtgtgcagctgcttcgtgggctaccagctgctgagcgacggcgtgagctgcgaggacgtgaacgagtgcatcaccggcagccacagctgcagactgggcgagagctgcatcaacaccgtgggcagcttcagatgccagagagacagcagctgcggcaccggctacgagctgaccgaggacaacagctgcaaggacatcgacgagtgcgagagcggcatccacaactgcctgcccgacttcatctgccagaacaccctgggcagcttcagatgcagacccaagctgcagtgcaagagcggcttcatccaggacgccctgggcaactgcatcgacatcaacgagtgcctgagcatcagcgccccctgccccatcggccacacctgcatcaacaccgagggcagctacacctgccagaagaacgtgcccaactgcggcagaggctaccacctgaacgaggagggcaccagatgcgtggacgtggacgagtgcgccccccccgccgagccctgcggcaagggccacagatgcgtgaacagccccggcagcttcagatgcgagtgcaagaccggctactacttcgacggcatcagcagaatgtgcgtggacgtgaacgagtgccagagataccccggcagactgtgcggccacaagtgcgagaacaccctgggcagctacctgtgcagctgcagcgtgggcttcagactgagcgtggacggcagaagctgcgaggacatcaacgagtgcagcagcagcccctgcagccaggagtgcgccaacgtgtacggcagctaccagtgctactgcagaagaggctaccagctgagcgacgtggacggcgtgacctgcgaggacatcgacgagtgcgccctgcccaccggcggccacatctgcagctacagatgcatcaacatccccggcagcttccagtgcagctgccccagcagcggctacagactggcccccaacggcagaaactgccaggacatcgacgagtgcgtgaccggcatccacaactgcagcatcaacgagacctgcttcaacatccagggcggcttcagatgcctggccttcgagtgccccgagaactacagaagaagcgccgccaccctgcagcaggagaagaccgacaccgtgagatgcatcaagagctgcagacccaacgacgtgacctgcgtgttcgaccccgtgcacaccatcagccacaccgtgatcagcctgcccaccttcagagagttcaccagacccgaggagatcatcttcctgagagccatcacccccccccaccccgccagccaggccaacatcatcttcgacatcaccgagggcaacctgagagacagcttcgacatcatcaagagatacatggacggcatgaccgtgggcgtggtgagacaggtgagacccatcgtgggccccttccacgccgtgctgaagctggagatgaactacgtggtgggcggcgtggtgagccacagaaacgtggtgaacgtgcacatcttcgtgagcgagtactggttctag

SEQ ID NO: 165532 - DNA, 2112 bp, Artificial Sequence
  derived and/or modified sequence
atggagagagccgcccccagcagaagagtgcccctgcccctgctgctgctgggcggcctggccctgctggccgccggcgtggacgccgacgtgctgctggaggcctgctgcgccgacggccacagaatggccacccaccagaaggactgcagcctgccctacgccaccgagagcaaggagtgcagaatggtgcaggagcagtgctgccacagccagctggaggagctgcactgcgccaccggcatcagcctggccaacgagcaggacagatgcgccaccccccacggcgacaacgccagcctggaggccaccttcgtgaagagatgctgccactgctgcctgctgggcagagccgcccaggcccagggccagagctgcgagtacagcctgatggtgggctaccagtgcggccaggtgttccaggcctgctgcgtgaagagccaggagaccggcgacctggacgtgggcggcctgcaggagaccgacaagatcatcgaggtggaggaggagcaggaggacccctacctgaacgacagatgcagaggcggcggcccctgcaagcagcagtgcagagacaccggcgacgaggtggtgtgcagctgcttcgtgggctaccagctgctgagcgacggcgtgagctgcgaggacgtgaacgagtgcatcaccggcagccacagctgcagactgggcgagagctgcatcaacaccgtgggcagcttcagatgccagagagacagcagctgcggcaccggctacgagctgaccgaggacaacagctgcaaggacatcgacgagtgcgagagcggcatccacaactgcctgcccgacttcatctgccagaacaccctgggcagcttcagatgcagacccaagctgcagtgcaagagcggcttcatccaggacgccctgggcaactgcatcgacatcaacgagtgcctgagcatcagcgccccctgccccatcggccacacctgcatcaacaccgagggcagctacacctgccagaagaacgtgcccaactgcggcagaggctaccacctgaacgaggagggcaccagatgcgtggacgtggacgagtgcgccccccccgccgagccctgcggcaagggccacagatgcgtgaacagccccggcagcttcagatgcgagtgcaagaccggctactacttcgacggcatcagcagaatgtgcgtggacgtgaacgagtgccagagataccccggcagactgtgcggccacaagtgcgagaacaccctgggcagctacctgtgcagctgcagcgtgggcttcagactgagcgtggacggcagaagctgcgaggacatcaacgagtgcagcagcagcccctgcagccaggagtgcgccaacgtgtacggcagctaccagtgctactgcagaagaggctaccagctgagcgacgtggacggcgtgacctgcgaggacatcgacgagtgcgccctgcccaccggcggccacatctgcagctacagatgcatcaacatccccggcagcttccagtgcagctgccccagcagcggctacagactggcccccaacggcagaaactgccaggacatcgacgagtgcgtgaccggcatccacaactgcagcatcaacgagacctgcttcaacatccagggcggcttcagatgcctggccttcgagtgccccgagaactacagaagaagcgccgccacccagaagagcaagaagggcagacagaacacccccgccggcagcagcaaggaggactgcagagtgctgccctggaagcagggcctggaggacacccacctggacgcctacctgccctgctgcagaagattcaccagacccgaggagatcatcttcctgagagccatcacccccccccaccccgccagccaggccaacatcatcttcgacatcaccgagggcaacctgagagacagcttcgacatcatcaagagatacatggacggcatgaccgtgggcgtggtgagacaggtgagacccatcgtgggccccttccacgccgtgctgaagctggagatgaactacgtggtgggcggcgtggtgagccacagaaacgtggtgaacgtgcacatcttcgtgagcgagtactggttctag

SEQ ID NO: 165533 - DNA, 81 bp, Artificial Sequence
  derived and/or modified sequence
atggccacccaccagaaggactgcagcctgccctacgccaccgagagcaaggagtgcagaatggtgcaggagcagtgctag

SEQ ID NO: 165534 - RNA, 81 nt, Artificial Sequence
  derived and/or modified sequence
auggcgacucaccagaaagacuguagccuuccauacgcaacugagagcaaagaaugcagaaugguccaagaacagugcuag

SEQ ID NO: 165535 - DNA, 568 bp, Artificial Sequence
  derived and/or modified sequence
atgaattcctatacaagaggctcccgcaggcccagcgccaaagctgcctcccctgcagcctcggtgacttcccgggtctctccctccggccctggtgtcccggtggacgcggatgtcctcctggaggcctgctgtgcggacggacaccggatggccactcatcagaaggactgctcgctgccatatgctacggaatccaaagaatgcaggatggtgcaggagcagtgctgccacagccagctggaggagctgcactgtgccacgggcatcagcctggccaacgagcaggaccgctgtgccacgccccacggtgacaacgccagcctggaggccacatttgtgaagaggtgctgccattgctgtctgctggggagggcggcccaggcccagggccagagctgcgagtacagcctcatggttggctaccagtgtggacaggtcttccaggcatgctgtgtcaagagccaggagaccggagatttggatgtcgggggcctccaagaaacggataagatcattgaggttgaggaggaacaagaggacccatatctgaatgaccgctgccgag

SEQ ID NO: 165536 - DNA, 572 bp, Artificial Sequence
  derived and/or modified sequence
gcgctgctggcggccggaggtaggggcgtcccgggtccgccgccccagcttagggtcccgaccccctcggcctcgcgctccctgcgagtttcggaaccacggggactcggagtccgtgcgttgccctgcgcggcgcccccggactgtcagcgccgaggcctcggcgacgcccccctcccccacggccagctccggtcctcatctcctccccggcctggggacttgtttcaaaaccggattcccccacccctcaaacacaccgtcctaccccagtcctagcaaatccagccggctccgggggccgcatcccgggccctgggggttcaggggcgctagctgggctgggggacgctggctgggggttaccgagcccagggcgccttgcacttgacgctggaagcgccctcggctatctttcctcaccgcttcccgcctccacccccagtggacgcggatgtcctcctggaggcctgctgtgcggacggacaccggatggccactcatcagaaggactgctcgctgccatatgctacggaatccaaagaatgcaggatggtgcaggagcagtgctg

SEQ ID NO: 165537 - DNA, 512 bp, Artificial Sequence
  derived and/or modified sequence
aaagctgcctcccctgcagcctcggtgacttcccgggtctctccctccggccctggtgtcccgggtgagcccagcacacgttgggattttggttgtttgttggcctggcccgactgtccctgtctctgagggcagagtcgggtcccatcccgggacacgcctggggttagccaccgacctgcagcctcccggccgagggtgcggggttggcgtcctgtcctcaccagacttctcacaggtccccgtttctgtggaagaggggatcttgtgtggacgcggatgtcctcctggaggcctgctgtgcggacggacaccggatggccactcatcagaaggactgctcgctgccatatgctacggaatccaaagaatgcaggatggtgcaggagcagtgctgccacagccagctggaggagctgcactgtgccacgggcatcagcctggccaacgagcaggaccgctgtgccacgccccacggtgacaacgccagcctggaggccacatttgtgaag

SEQ ID NO: 165538 - DNA, 544 bp, Artificial Sequence
  derived and/or modified sequence
tgcaggatggtgcaggagcagtgctgccacagccagctggaggagctgcactgtgccacgggcatcagcctggccaacgagcaggaccgctgtgccacgccccacggtgacaacgccagcctggaggccacatttgtgaagaggtgctgccattgctgtctgctggggagggcggcccaggcccagggccagagctgcgagtacagcctcatggttggctaccagtgtggacaggtcttccaggcatgctgtgtcaagagccaggagaccggagatttggatgtcgggggcctccaagaaacgggaggcgggccctgcaagcagcagtgccgagacacgggtgacgaggtggtctgctcctgcttcgtgggctaccagctgctgtctgatggtgtctcctgtgaagatgtcaatgaatgcatcacgggcagccacagctgccggcttggagaatcctgcatcaacacagtgggctctttccgctgccagcgggacagcagctgcgggactggctatgagctcacagaggacaatagctgcaaag

SEQ ID NO: 165539 - DNA, 565 bp, Artificial Sequence
  derived and/or modified sequence
tcaagacagaaggacgtgcgtgtcctggtggtgcatctgggagggccctccacccgctgagtggtgagccacctctcagcttgttctcttccctgcacagtggacgcggatgtcctcctggaggcctgctgtgcggacggacaccggatggccactcatcagaaggactgctcgctgccatatgctacggaatccaaagaatgcaggatggtgcaggagcagtgctgccacagccagctggaggagctgcactgtgccacgggcatcagcctggccaacgagcaggaccgctgtgccacgccccacggtgacaacgccagcctggaggccacatttgtgaagaggtgctgccattgctgtctgctggggagggcggcccaggcccagggccagagctgcgagtacagcctcatggttggctaccagtgtggacaggtcttccaggcatgctgtgtcaagagccaggagaccggagatttggatgtcgggggcctccaagaaacggataagatcattgaggttgaggaggaacaagaggacccatatctgaatgaccgctgccgag

SEQ ID NO: 165540 - DNA, 671 bp, Artificial Sequence
  derived and/or modified sequence
ccgcgccctcctcccgggcgggataattgaacggcgcggccctggcccagcgttggctgccgaggctcggccggagcgtggagcccgcgccgctgccccaggaccgcgcccgcgcctttgtccgccgccgcccaccgcccgtcgcccgccgcccatggagcgcgccgcgccgtcgcgccgggtcccgcttccgctgctgctgctcggcggccttgcgctgctggcggccggagtggacgcggatgtcctcctggaggcctgctgtgcggacggacaccggatggccactcatcagaaggactgctcgctgccatatgctacggaatccaaagaatgcaggatggtgcaggagcagtgctgccacagccagctggaggagctgcactgtgccacgggcatcagcctggccaacgagcaggaccgctgtgccacgccccacggtgacaacgccagcctggaggccacatttgtgaagaggtgctgccattgctgtctgctggggagggcggcccaggcccagggccagagctgcgagtacagcctcatggttggctaccagtgtggacaggtcttccaggcatgctgtgtcaagagccaggagaccggagatttggatgtcgggggcctccaagaaacgggaggcgggccctgcaagcagcagtgccgagaca

SEQ ID NO: 165541 - DNA, 570 bp, Artificial Sequence
  derived and/or modified sequence
atgaactcttatactcgaggctcccgacgacctagcgctaaggcagcctcccctgcggcctccgtgactagccgagttagcccaagtggtcctggggtgcctgtggatgctgatgtcctccttgaagcttgctgtgcggatggacaccggatggccacccatcaaaaagactgctcgttgccatatgccaccgaatctaaagagtgtcgcatggttcaagaacagtgctgtcactcacaactggaggagctccactgcgcgacagggataagcctggctaacgaacaggatagatgtgccaccccccacggagacaatgctagtctcgaggccactttcgtgaaaaggtgctgtcactgctgtctgctcggtcgcgccgctcaggcccagggtcagagctgtgaatacagcctgatggtggggtatcagtgtggccaagtgttccaggcctgttgcgtcaagtcacaggaaacaggagacctggacgtcgggggtctccaggaaacagataaaattattgaggtggaggaggaacaggaagatccttacttaaacgaccggtgtcgctag

SEQ ID NO: 165542 - DNA, 198 bp, Artificial Sequence
  derived and/or modified sequence
atggccactcaccagaaggactgttcactaccttacgcaaccgagtctaaagagtgccgcatggttcaagaacagtgctgtcacagtcaacttgaggagctgcattgcgcgaccggcataagcctagctaacgagcaggatcgttgcgctactccacacggcgataacgcttctttggaggctacgtttgtcaaatag

SEQ ID NO: 165543 - DNA, 546 bp, Artificial Sequence
  derived and/or modified sequence
tgtaggatggtccaggaacagtgttgtcattcacaacttgaggagctgcactgcgctactgggatctcgctggcgaacgagcaggatcggtgtgctacaccacacggcgataatgcgtccctggaagcgaccttcgtgaagcgttgttgccactgctgcttacttggacgtgccgctcaggctcaaggacagtcctgtgaatactcactcatggtgggatatcagtgtgggcaagtgttccaggcctgctgcgtcaaatcacaagaaactggcgatcttgatgtgggcggccttcaggagacaggcggcggtccctgcaagcagcaatgtcgcgatacaggagatgaagtcgtgtgttcatgttttgttggataccaactgctgtccgacggtgtatcatgcgaagatgtcaacgaatgcatcaccggcagtcactcatgtcgcctgggcgaatcttgtattaatacagtgggttcctttaggtgccagagggattcctcatgtggcaccggctacgagctgacagaagataacagttgcaagtag

SEQ ID NO: 165544 - DNA, 420 bp, Artificial Sequence
  derived and/or modified sequence
atggctacacaccagaaagattgcagcctcccatatgcaacggagtccaaagaatgccgaatggtccaggaacagtgctgccacagccagttggaggagttgcattgtgcgacaggtattagcctggcaaatgagcaggaccggtgcgccacccctcacggggacaatgcatcacttgaggccaccttcgtgaagagatgttgccactgctgcctcctgggcagggcagcacaggctcagggacagtcttgtgagtattctctaatggtcggctaccagtgcggtcaggtgttccaggcatgttgcgtaaagagccaggagacgggcgatctcgatgtgggaggcttgcaggagaccgataagataatcgaagttgaagaggaacaggaggacccatatctcaacgatcgctgtcggtag

SEQ ID NO: 165545 - DNA, 519 bp, Artificial Sequence
  derived and/or modified sequence
atggaaagggccgccccctcccgccgcgtgcctctaccgctgctgctgttaggcggcctcgcccttctggctgccggagtagatgctgatgtactgctggaagcctgctgcgcagatggacatcgtatggcaacccaccagaaggattgtagcctgccttatgccactgaaagtaaggagtgccgtatggtgcaggagcaatgctgccattcacagctggaggagctccattgcgccacaggaatatccctggccaacgaacaggacaggtgtgccactccacacggtgacaacgcctcgctcgaggctacgtttgtgaagagatgctgtcattgttgcctgctcggccgcgcagcccaagcacaggggcagtcatgcgagtactcactgatggtgggctaccaatgcgggcaggtgttccaggcttgctgtgtgaagtcccaggaaacaggtgacctcgacgttggagggctacaggagacagggggtggaccctgcaaacaacaatgccgagactag

SEQ ID NO: 165546 - DNA, 570 bp, Artificial Sequence
  derived and/or modified sequence
atgaacagctacacccggggcagcagaagacccagcgccaaggccgccagccctgctgcctctgtgaccagccgggtgagccccagcggccctggggtgcctgtggatgctgatgtgctgctggaggcctgctgtgctgatggccacaggatggccacccaccagaaggactgcagcctgccctatgccacagagagcaaggagtgcaggatggtgcaggagcagtgctgccacagccagctggaggagctgcactgtgccaccggcatcagcctggccaatgagcaggacagatgtgccacccctcatggagacaatgccagcctggaggccacctttgtgaagcgctgctgccactgctgcctgctgggccgggccgcccaggcccagggccagagctgtgagtacagcctgatggtgggctaccagtgtggccaggtgttccaggcctgctgcgtgaagagccaggagaccggggacctggatgtgggcggcctgcaggagacagacaagatcatcgaggtggaggaggagcaggaggacccctacctgaatgaccgctgcaggtag

SEQ ID NO: 165547 - DNA, 198 bp, Artificial Sequence
  derived and/or modified sequence
atggccacccaccagaaggactgcagcctgccctatgccacagagagcaaggagtgcaggatggtgcaggagcagtgctgccacagccagctggaggagctgcactgtgccaccggcatcagcctggccaatgagcaggacagatgtgccacccctcatggagacaatgccagcctggaggccacctttgtgaagtag

SEQ ID NO: 165548 - DNA, 546 bp, Artificial Sequence
  derived and/or modified sequence
tgcaggatggtgcaggagcagtgctgccacagccagctggaggagctgcactgtgccaccggcatcagcctggccaatgagcaggacagatgtgccacccctcatggagacaatgccagcctggaggccacctttgtgaagcgctgctgccactgctgcctgctgggccgggccgcccaggcccagggccagagctgtgagtacagcctgatggtgggctaccagtgtggccaggtgttccaggcctgctgcgtgaagagccaggagaccggggacctggatgtgggcggcctgcaggagactggaggcggcccctgcaagcagcagtgccgggacacaggagatgaggtggtgtgcagctgctttgtgggctaccagctgctgagtgatggagtgtcctgtgaagatgtgaatgaatgcatcaccggcagccacagctgccgcctgggggagagctgcatcaacacagtgggcagcttccgctgccagagggacagcagctgtggcaccggctatgagctgacagaggacaacagctgcaagtag

SEQ ID NO: 165549 - DNA, 420 bp, Artificial Sequence
  derived and/or modified sequence
atggccacccaccagaaggactgcagcctgccctatgccacagagagcaaggagtgcaggatggtgcaggagcagtgctgccacagccagctggaggagctgcactgtgccaccggcatcagcctggccaatgagcaggacagatgtgccacccctcatggagacaatgccagcctggaggccacctttgtgaagcgctgctgccactgctgcctgctgggccgggccgcccaggcccagggccagagctgtgagtacagcctgatggtgggctaccagtgtggccaggtgttccaggcctgctgcgtgaagagccaggagaccggggacctggatgtgggcggcctgcaggagacagacaagatcatcgaggtggaggaggagcaggaggacccctacctgaatgaccgctgcaggtag

SEQ ID NO: 165550 - DNA, 519 bp, Artificial Sequence
  derived and/or modified sequence
atggagcgggccgcccccagccggcgggtgcccctgcccctgctgctgctgggcggcctggccctgctggccgccggcgtggatgctgatgtgctgctggaggcctgctgtgctgatggccacaggatggccacccaccagaaggactgcagcctgccctatgccacagagagcaaggagtgcaggatggtgcaggagcagtgctgccacagccagctggaggagctgcactgtgccaccggcatcagcctggccaatgagcaggacagatgtgccacccctcatggagacaatgccagcctggaggccacctttgtgaagcgctgctgccactgctgcctgctgggccgggccgcccaggcccagggccagagctgtgagtacagcctgatggtgggctaccagtgtggccaggtgttccaggcctgctgcgtgaagagccaggagaccggggacctggatgtgggcggcctgcaggagactggaggcggcccctgcaagcagcagtgccgggactag

SEQ ID NO: 165551 - DNA, 570 bp, Artificial Sequence
  derived and/or modified sequence
atgaacagctacacccggggcagccggcggcccagcgccaaggccgctagccctgctgccagcgtgacgtctcgggtgtcacccagcggccctggcgtgcctgtggacgcagacgtcctgctggaggcatgctgcgcagatggtcaccggatggctacccaccagaaggactgcagtctaccctacgccaccgagtctaaagagtgtcggatggtccaggaacagtgctgtcattcccagctagaggagctgcattgtgccacaggcataagtttagccaacgagcaggatcgttgtgccacccctcatggagacaatgctagtctggaggccacctttgtaaaacggtgttgccactgttgtctgctgggccgggcggcacaggcccagggccaatcttgtgagtactctctaatggtgggttaccaatgtggccaggtctttcaggcctgctgcgtgaagagccaggaaacgggggacctggacgtgggcgggctacaggaaactgataaaataattgaagtagaggaagagcaggaagatccctatttgaacgaccgctgtaggtag

SEQ ID NO: 165552 - DNA, 198 bp, Artificial Sequence
  derived and/or modified sequence
atggccacccaccagaaggactgcagcctgccctacgccaccgagtccaaggagtgtcggatggtgcaggagcagtgctgccattcccagctggaggagttgcattgtgccaccggaatcagcctggccaatgaacaggatcgctgtgcaaccccccatggggacaatgcttcccttgaggcgacctttgtgaagtag

SEQ ID NO: 165553 - DNA, 546 bp, Artificial Sequence
  derived and/or modified sequence
tgccggatggtgcaggagcagtgctgccacagccagctggaggagcttcattgcgcaactggcatctctctggccaacgaacaggacaggtgcgctactccgcacggagacaacgccagccttgaggccaccttcgtgaagcgatgctgccactgttgcctcctagggcgggccgctcaggctcaggggcagtcctgtgagtacagccttatggttggataccagtgtgggcaggtgttccaggcttgctgtgtgaaatcccaggaaacgggcgaccttgacgttggcggactgcaggagaccggaggcggcccttgcaaacaacaatgtcgagatacaggagacgaagtggtgtgttcgtgctttgtgggttaccagttgttgtccgacggggtatcctgtgaggatgtcaatgagtgtataaccggtagccactcctgtaggctgggtgagtcatgcatcaatacggtgggtagcttccggtgccagagggactctagttgcggcaccggctatgagctgaccgaggacaatagctgcaaatag

SEQ ID NO: 165554 - DNA, 420 bp, Artificial Sequence
  derived and/or modified sequence
atggccacccaccagaaggactgcagcctgccctacgccaccgagtcaaaggagtgtagaatggtccaggaacagtgctgtcatagccagctcgaggagctgcattgtgcaacggggatatccctcgcaaacgaacaggaccgctgcgccaccccacacggtgacaatgcaagccttgaagctactttcgtgaaacggtgttgccattgttgtctgttgggacgtgccgcgcaggcacagggacaatcctgtgaatactcactaatggtgggctaccaatgcgggcaggtgttccaggcatgttgcgttaagtctcaggaaaccggtgacctggatgttggtggacttcaagaaacagacaaaattatagaagtggaggaagagcaagaggacccttacctaaacgataggtgccgctag

SEQ ID NO: 165555 - DNA, 519 bp, Artificial Sequence
  derived and/or modified sequence
atggagcgggccgcccccagccggcgggtgcccctgcccctgctgctgctcggcggacttgcgttactggccgcaggggttgatgcggatgtgctgctggaggcctgttgcgccgatggccatcggatggccactcaccagaaggactgcagcttgccttacgctaccgagtccaaagaatgtcggatggtgcaagaacagtgctgccactcccaattggaggagctgcactgtgcgaccggcattagtctggcaaacgagcaagacaggtgcgctaccccacatggcgacaacgcaagcttggaagccaccttcgtcaaaagatgctgccattgctgtctcctgggacgggcagcccaggcccaaggacagtcctgtgagtacagccttatggtcggataccagtgtggtcaagtttttcaggcctgttgcgttaagtcccaggagaccggagatctggacgtcgggggcttgcaggagacgggcgggggcccttgtaagcagcagtgcagagactag

SEQ ID NO: 165556 - DNA, 570 bp, Artificial Sequence
  derived and/or modified sequence
atgaatagctacacaaggggatcccggcgtcccagcgctaaagccgcatctccagcggcatcggtcacatcccgtgtgtccccctcaggaccaggcgtgcctgtcgatgctgatgtgttgttggaggcttgctgtgctgatgggcaccggatggctacccatcagaaagactgttcccttccctacgcgaccgaaagtaaggagtgcaggatggttcaggagcagtgctgccacagtcagctggaggaattgcattgtgccactggtatctccttagccaatgaacaggatcgatgcgctactcctcatggcgataatgcctccctagaggcaactttcgttaaaaggtgctgccattgttgtttgctgggacgagccgctcaggcccaaggccagagttgcgagtactcattaatggtggggtaccagtgtggacaggtcttccaggcctgctgcgtgaaaagtcaggagactggcgacctggacgtgggcggtctgcaagagaccgataagatcatcgaagtggaagaagagcaggaggacccctatctgaacgatcgctgccggtag

SEQ ID NO: 165557 - DNA, 198 bp, Artificial Sequence
  derived and/or modified sequence
atggctacccaccagaaagattgcagcctgccctatgccaccgagtcgaaagagtgtcgcatggtgcaagaacagtgttgtcattcacagctggaagagcttcattgcgccacgggtatatctctcgcgaacgagcaagatcgctgtgctacaccccatggcgacaacgcctccctagaagctacattcgtgaaatag

SEQ ID NO: 165558 - DNA, 546 bp, Artificial Sequence
  derived and/or modified sequence
tgccggatggtgcaggaacaatgttgtcactcccagcttgaggagttacactgtgccaccgggattagcctggccaacgaacaagatcggtgcgcaacccctcacggagataacgcctctttggaggctacttttgtcaagagatgctgccactgctgtctgctgggcagagctgcacaagcacagggacagagctgtgaatactccttaatggttggctaccagtgcggccaggtgttccaggcttgctgcgtgaagagtcaggagaccggtgacctcgacgtggggggactccaggagacaggcggaggaccatgcaagcagcagtgtcgtgacacgggggacgaagtggtgtgtagctgctttgttgggtatcagctccttagtgatggcgtgtcttgtgaggacgtaaacgagtgtatcacggggtcccattcctgtaggttgggcgaatcctgtattaacaccgttggctccttccgttgtcagcgtgatagctcttgtggcacagggtacgaactgacagaggataactcgtgtaaatag

SEQ ID NO: 165559 - DNA, 420 bp, Artificial Sequence
  derived and/or modified sequence
atggcaacgcatcagaaagattgctctctgccatatgccacggagagtaaggagtgccgaatggtccaagagcagtgctgccactctcaacttgaggagctgcactgtgctacaggaattagtctcgctaacgaacaggaccgctgcgctaccccccacggagataacgctagtctcgaagcgaccttcgtgaagcgatgttgtcattgttgtcttctcggcagagccgcacaggctcaaggacaatcatgcgagtactctcttatggtaggctaccaatgtgggcaagtctttcaggcgtgttgcgtgaagtcccaggagactggcgatctggacgtgggcggtctgcaggaaacagataagataattgaggtcgaagaggaacaggaagatccatatcttaacgatcgctgccgctag

SEQ ID NO: 165560 - DNA, 519 bp, Artificial Sequence
  derived and/or modified sequence
atggaacgtgccgctcctagccgccgtgtgcctctcccccttcttctcctggggggtcttgccctcctcgccgctggggtggacgccgatgttttactggaagcgtgttgtgctgatggccacaggatggctacacatcaaaaggactgctctctgccctacgccactgagagcaaggagtgcaggatggtccaggagcagtgctgtcattcacaactggaggagctacattgtgcaacaggaatttctctcgccaacgagcaggaccggtgtgcaaccccccacggcgacaacgctagcctcgaagctacatttgttaagcgatgctgtcactgctgcctgcttggacgggctgcgcaggcacaggggcagagctgcgagtatagtctcatggtcggttaccaatgcggacaagtcttccaggcttgttgcgtgaagtctcaagaaacaggagatctggatgtaggaggtcttcaggaaactggcggaggaccctgtaagcaacagtgcagagattag

SEQ ID NO: 165561 - DNA, 570 bp, Artificial Sequence
  derived and/or modified sequence
atgaatagctacacccgagggagccgccggccatcagccaaagctgctagtcctgcagcatccgtaacctcacgcgtttccccgagtggaccgggcgtacccgtggacgcagatgttctgctagaagcatgctgcgcagatgggcacaggatggctacccatcagaaagattgcagcctgccatatgcaacggagtccaaagaatgcagaatggtccaggaacagtgctgccactcccagttagaagagttacactgtgccactgggatatcactcgcaaatgaacaggaccggtgcgctactccacacggcgacaacgctagcctggaagctacttttgtgaagaggtgctgtcattgctgcctgttgggtagagctgcccaggcccagggtcagtcctgcgagtacagtctgatggtagggtatcagtgtggccaggtcttccaagcgtgttgtgtaaaaagtcaggaaaccggcgatctggacgtgggaggcctgcaggagaccgataaaatcatcgaggtggaagaagagcaagaagacccttaccttaatgatagatgccgctag

SEQ ID NO: 165562 - DNA, 198 bp, Artificial Sequence
  derived and/or modified sequence
atggctacccaccagaaggactgtagtctgccgtatgctactgaatccaaagaatgccggatggtacaggaacaatgctgccacagccagctcgaggaacttcactgcgcaaccgggatctcactggcaaatgaacaggataggtgtgccacaccccacggagataacgccagcttagaagcaacctttgtcaaatag

SEQ ID NO: 165563 - DNA, 546 bp, Artificial Sequence
  derived and/or modified sequence
tgccggatggtccaggaacagtgttgtcactcacaacttgaggaactgcactgtgcaacaggaatttccttagctaatgaacaggacaggtgtgcaaccccacacggggacaatgccagcctagaagctacattcgtcaagcggtgctgtcattgctgccttctgggacgagccgcccaggcacaaggtcagagttgcgagtacagtctaatggttgggtatcagtgcggccaggtgtttcaagcttgttgcgtgaaatcccaggaaacaggcgatttagacgtaggaggactgcaagaaacaggcggcgggccttgcaaacagcagtgtagggacacaggggatgaagtggtgtgtagttgtttcgtcggttaccaacttctttctgacggagtttcatgcgaagacgtgaacgagtgtataactggtagccacagctgccgactcggggagagctgtataaacactgtagggtcattccgttgccagagagattcctcctgtggtactggatatgagctgacagaagataactcatgcaaatag

SEQ ID NO: 165564 - DNA, 420 bp, Artificial Sequence
  derived and/or modified sequence
atggcaactcaccagaaggactgttctctaccttatgctacggagtccaaagagtgccggatggtccaggaacagtgttgccattcccagctggaagaactgcattgtgctacaggcattagtctcgctaacgaacaggatagatgcgctaccccccatggcgacaatgcctccttggaagcaaccttcgtgaaacgctgctgtcactgttgtttattaggtagagccgctcaggcccagggacagtcctgcgagtattctctgatggtcggatatcagtgcggacaggtctttcaagcatgctgtgtgaaatcgcaggagacaggagatctggacgttggtgggttgcaagaaaccgacaaaataattgaagtagaggaggaacaggaagatccatacttgaacgaccggtgcaggtag

SEQ ID NO: 165565 - DNA, 519 bp, Artificial Sequence
  derived and/or modified sequence
atggaaagagccgcgccttctaggagagtaccactgcccctgctgttacttggaggcttagcgcttctggccgccggtgtggacgctgatgtcttattagaggcgtgttgtgccgacggtcacagaatggctacgcaccagaaagattgtagtcttccatacgcaacagaaagtaaagagtgccggatggtgcaggagcagtgctgtcactcccagctggaagagctgcactgtgccacgggcataagcctcgccaacgagcaggataggtgcgccacccctcatggagataatgcttcactcgaggccacattcgtaaaacggtgttgccattgctgcctcctgggccgcgcagctcaagctcagggtcagtcctgcgagtatagcctaatggtgggataccagtgcggccaggtgttccaggcttgttgtgtgaagagccaggagaccggagatctggacgtcggaggactccaggagacagggggagggccatgcaaacagcagtgtagggattag

SEQ ID NO: 165566 - DNA, 570 bp, Artificial Sequence
  derived and/or modified sequence
atgaatagttacacccgtggttcaaggcggccatcagcgaaagccgcatctccggctgcatcagttacttctcgagtgtctccatccggcccgggcgtgcccgtagacgcggacgtgctcctggaagcctgttgtgctgacggtcatagaatggccacgcatcaaaaagactgtagccttccatatgccacagagtcaaaagagtgcaggatggtccaagagcagtgttgtcactcacaactagaagagctgcactgtgctactggcatctcattagcaaatgagcaagatagatgcgcaaccccccatggagataacgcctctttggaagccaccttcgtaaaaagatgttgccactgctgtttgctaggcagggccgcccaagcccagggccaatcatgtgaatatagtttgatggtcggatatcaatgtggacaagtcttccaggcgtgctgtgtgaagtcccaggagacaggggatctggatgttggtggactgcaggaaacagataaaatcatagaagtagaggaggaacaggaagatccatatctgaacgacagatgccggtag

SEQ ID NO: 165567 - DNA, 546 bp, Artificial Sequence
  derived and/or modified sequence
tgtaggatggttcaggaacagtgttgtcactcacaactcgaagagctccactgcgccacaggcatcagtctcgccaatgagcaagatcgatgtgccactccccacggcgacaacgcaagcctggaggctacctttgttaaaagatgctgccactgttgtctgctgggtagagcagctcaggcccagggacagagttgcgaatattcacttatggttggataccaatgtgggcaagtttttcaggcgtgttgcgtgaagagtcaagaaaccggcgaccttgacgttggcggtctgcaggagacaggcggcggcccatgtaaacaacagtgtcgggacacgggagatgaagtagtgtgttcttgcttcgttggatatcaacttctctcagatggtgtctcttgcgaggacgtcaatgagtgcatcactggaagccactcctgcagattgggggagtcttgtattaatacagtcgggtcattcaggtgccagagagattcatcctgcggtactggatatgaactgaccgaagacaatagctgtaaatag

SEQ ID NO: 165568 - DNA, 420 bp, Artificial Sequence
  derived and/or modified sequence
atggccacacaccagaaagattgctctcttccctacgccaccgagagtaaggaatgcagaatggtgcaggagcagtgctgtcattctcagctggaagagttacactgcgctacggggatttcgctcgctaacgagcaggaccgatgcgctacaccccacggcgacaatgccagtttagaggctaccttcgtcaaaaggtgctgtcattgctgtctcctaggacgtgccgctcaagctcagggtcagtcttgcgaatacagtctcatggtcgggtatcagtgcggacaggtttttcaagcctgttgtgtcaagagtcaggagaccggggatctggacgttggcggcctgcaagagacagacaaaatcatcgaagtggaagaagagcaagaggacccttacttgaacgataggtgccggtag

SEQ ID NO: 165569 - DNA, 519 bp, Artificial Sequence
  derived and/or modified sequence
atggaaagggcagcgccttccaggagggttcctctccctcttctattactcggaggactggccctgcttgcagctggtgtcgacgctgatgtgcttcttgaagcctgttgcgccgatggtcaccggatggcaacacaccaaaaggactgcagtctgccatacgcgaccgaatcaaaagaatgtagaatggtccaggagcagtgttgtcacagccagctcgaggaactccattgcgctaccggcatatccctggccaacgagcaggacagatgcgccacaccgcacggcgacaatgcttctttagaagccactttcgtgaagagatgctgccactgttgcctgcttggcagggcggctcaggcccaggggcagtcctgtgaatactctttgatggtcggttatcagtgtggccaggttttccaagcatgctgtgtcaaatcccaagagacgggtgacctagatgtaggcggcttacaggaaaccggaggaggaccttgcaaacaacagtgtcgggactag

SEQ ID NO: 165570 - DNA, 570 bp, Artificial Sequence
  derived and/or modified sequence
atgaacagctacaccagaggcagcagaagacccagcgccaaggccgccagccccgccgccagcgtgaccagcagagtgagccccagcggccccggcgtgcccgtggacgccgacgtgctgctggaggcctgctgcgccgacggccacagaatggccacccaccagaaggactgcagcctgccctacgccaccgagagcaaggagtgcagaatggtgcaggagcagtgctgccacagccagctggaggagctgcactgcgccaccggcatcagcctggccaacgagcaggacagatgcgccaccccccacggcgacaacgccagcctggaggccaccttcgtgaagagatgctgccactgctgcctgctgggcagagccgcccaggcccagggccagagctgcgagtacagcctgatggtgggctaccagtgcggccaggtgttccaggcctgctgcgtgaagagccaggagaccggcgacctggacgtgggcggcctgcaggagaccgacaagatcatcgaggtggaggaggagcaggaggacccctacctgaacgacagatgcagatag

SEQ ID NO: 165571 - DNA, 198 bp, Artificial Sequence
  derived and/or modified sequence
atggccacccaccagaaggactgcagcctgccctacgccaccgagagcaaggagtgcagaatggtgcaggagcagtgctgccacagccagctggaggagctgcactgcgccaccggcatcagcctggccaacgagcaggacagatgcgccaccccccacggcgacaacgccagcctggaggccaccttcgtgaagtag

SEQ ID NO: 165572 - DNA, 546 bp, Artificial Sequence
  derived and/or modified sequence
tgcagaatggtgcaggagcagtgctgccacagccagctggaggagctgcactgcgccaccggcatcagcctggccaacgagcaggacagatgcgccaccccccacggcgacaacgccagcctggaggccaccttcgtgaagagatgctgccactgctgcctgctgggcagagccgcccaggcccagggccagagctgcgagtacagcctgatggtgggctaccagtgcggccaggtgttccaggcctgctgcgtgaagagccaggagaccggcgacctggacgtgggcggcctgcaggagaccggcggcggcccctgcaagcagcagtgcagagacaccggcgacgaggtggtgtgcagctgcttcgtgggctaccagctgctgagcgacggcgtgagctgcgaggacgtgaacgagtgcatcaccggcagccacagctgcagactgggcgagagctgcatcaacaccgtgggcagcttcagatgccagagagacagcagctgcggcaccggctacgagctgaccgaggacaacagctgcaagtag

SEQ ID NO: 165573 - DNA, 420 bp, Artificial Sequence
  derived and/or modified sequence
atggccacccaccagaaggactgcagcctgccctacgccaccgagagcaaggagtgcagaatggtgcaggagcagtgctgccacagccagctggaggagctgcactgcgccaccggcatcagcctggccaacgagcaggacagatgcgccaccccccacggcgacaacgccagcctggaggccaccttcgtgaagagatgctgccactgctgcctgctgggcagagccgcccaggcccagggccagagctgcgagtacagcctgatggtgggctaccagtgcggccaggtgttccaggcctgctgcgtgaagagccaggagaccggcgacctggacgtgggcggcctgcaggagaccgacaagatcatcgaggtggaggaggagcaggaggacccctacctgaacgacagatgcagatag

SEQ ID NO: 165574 - DNA, 519 bp, Artificial Sequence
  derived and/or modified sequence
atggagagagccgcccccagcagaagagtgcccctgcccctgctgctgctgggcggcctggccctgctggccgccggcgtggacgccgacgtgctgctggaggcctgctgcgccgacggccacagaatggccacccaccagaaggactgcagcctgccctacgccaccgagagcaaggagtgcagaatggtgcaggagcagtgctgccacagccagctggaggagctgcactgcgccaccggcatcagcctggccaacgagcaggacagatgcgccaccccccacggcgacaacgccagcctggaggccaccttcgtgaagagatgctgccactgctgcctgctgggcagagccgcccaggcccagggccagagctgcgagtacagcctgatggtgggctaccagtgcggccaggtgttccaggcctgctgcgtgaagagccaggagaccggcgacctggacgtgggcggcctgcaggagaccggcggcggcccctgcaagcagcagtgcagagactag

SEQ ID NO: 165575 - RNA, 198 nt, Artificial Sequence
  derived and/or modified sequence
auggcuacccaccagaaggacuguagucugccguaugcuacugaauccaaagaaugccggaugguacaggaacaaugcugccacagccagcucgaggaacuucacugcgcaaccgggaucucacuggcaaaugaacaggauaggugugccacaccccacggagauaacgccagcuuagaagcaaccuuugucaaauag

SEQ ID NO: 165576 - protein, 298 aa, Artificial Sequence
  derived and/or modified sequence
MEEKQILCVGLVVLDVISLVDKYPKEDSEIRCLSQRWQRGGNASNSCTVLSLLGAPCAFMGSMAPGHVADFLVADFRRRGVDVSQVAWQSKGDTPSSCCIINNSNGNRTIVLHDTSLPDVSATDFEKVDLTQFKWIHIEGRNASEQVKMLQRIDAHNTRQPPEQKIRVSVEVEKPREELFQLFGYGDVVFVSKDVAKHLGFQSAEEALRGLYGRVRKGAVLVCAWAEEGADALGPDGKLLHSDAFPPPRVVDTLGAGDTFNASVIFSLSQGRSVQEALRFGCQVAGKKCGLQGFDGIV

SEQ ID NO: 165577 - DNA, 897 bp, Artificial Sequence
  derived and/or modified sequence
atggaagagaaacagatcctctgcgtgggccttgtcgtgctcgatgtaatctctcttgtcgacaaatacccgaaggaagatagcgaaattcgctgcctgagccagcgctggcagcgcgggggcaacgccagtaatagttgcaccgtcctgagtttgctgggagcgccgtgcgctttcatgggcagcatggccccaggacacgtggcagatttcctggtggcggattttaggcggaggggagtcgacgtgagtcaggtcgcatggcagagtaagggggacacacccagctcttgttgtatcataaacaattccaacggcaacaggacgatcgtgctgcatgacacgtccctgcccgatgtgagcgcgacagactttgagaaagtggacctgacacagtttaaatggatccacattgaaggcagaaacgcgagtgaacaggtcaagatgttgcagcgcatcgatgctcacaacacacgacagccccctgaacagaaaatccgagtctcggtggaggtagaaaagcccagggaggaactctttcagctgtttggctacggggatgttgtgttcgtatcgaaagatgtcgccaagcatctgggcttccagtcagccgaagaagcactgcgtggcctgtatgggcgtgtgaggaaaggcgcggtgctcgtttgtgcttgggctgaggaaggcgccgatgcattaggtccagacggcaagctgctccacagcgatgcctttcccccccctagagtggtcgacaccctgggagctggagatacatttaacgcatcagtaattttcagcctgagccagggcagatcggtccaggaggctctgaggttcggatgtcaggtggctggaaagaaatgcgggctgcaagggttcgacggcattgtctag

SEQ ID NO: 165578 - DNA, 2397 bp, Artificial Sequence
  derived and/or modified sequence
gcagatgcgaggcccagctgtacctcgcgtgtcccgggtcgggagtcggagacgcaggtgcaggagagtgcggggcaagtagcgcattttctctttgcattctcgagatcgcttagccgcgctttaaaaaggtttgcatcagctgtgagtccatctgacaagcgaggaaactaaggctgagaagtgggaggcgttgccatctgcaggcccaggcaacctgctacgggaagaccggggaccaagacctctgggttggctttcctagacccgctcgggtcttcgggtgtcgcgaggaagggccctgctcctttcgttccctgcacccctggccgctgcaggtggctccctggaggaggagctcccacgcggaggaggagccagggcagctgggagcggggacaccatcctcctggataagaggcagaggccgggaggaaccccgtcagccgggcgggcaggaagctctgggagtagcctcatggaagagaagcagatcctgtgcgtggggctagtggtgctggacgtcatcagcctggtggacaagtaccctaaggaggactcggagataaggtgtttgtcccagagatggcagcgcggaggcaacgcgtccaactcctgcaccgttctctccctgctcggagccccctgtgccttcatgggctcaatggctcctggccatgttgctgacttcctggtggccgacttcaggcggcggggcgtggacgtgtctcaggtggcctggcagagcaagggggacacccccagctcctgctgcatcatcaacaactccaatggcaaccgtaccattgtgctccatgacacgagcctgccagatgtgtctgctacagactttgagaaggttgatctgacccagttcaagtggatccacattgagggccggaacgcatcggagcaggtgaagatgctgcagcggatagacgcacacaacaccaggcagcctccagagcagaagatccgggtgtccgtggaggtggagaagccacgagaggagctcttccagctgtttggctacggagacgtggtgtttgtcagcaaagatgtggccaagcacttggggttccagtcagcagaggaagccttgaggggcttgtatggtcgtgtgaggaaaggggctgtgcttgtctgtgcctgggctgaggagggcgccgacgccctgggccctgatggcaaattgctccactcggatgctttcccgccaccccgcgtggtggatacactgggagctggagacaccttcaatgcctccgtcatcttcagcctctcccaggggaggagcgtgcaggaagcactgagattcgggtgccaggtggccggcaagaagtgtggcctgcagggctttgatggcatcgtgtgagagcaggtgccggctcctcacacaccatggagactaccattgcggctgcatcgccttctcccctccatccagcctggcgtccaggttgccctgttcaggggacagatgcaagctgtggggaggactctgcctgtgtcctgtgttccccacagggagaggctctggggggatggctgggggatgcagagcctcagagcaaataaatcttcctcagagccagcttctcctctcaatgtctgaactgctctggctgggcattcctgaggctctgactcttcgatcctccctctttgtgtccattccccaaattaacctctccgcccaggcccagaggaggggctgcctgggctagagcagcgagaagtgccctgggcttgccaccagctctgccctggctggggaggacactcggtgccccacacccagtgaacctgccaaagaaaccgtgagagctcttcggggccctgcgttgtgcagactctattcccacagctcagaagctgggagtccacaccgctgagctgaactgacaggccagtggggggcaggggtgcgcctcctctgccctgcccaccagcctgtgatttgatggggtcttcattgtccagaaatacctcctcccgctgactgccccagagcctgaaagtctcacccttggagcccaccttggaattaagggcgtgcctcagccacaaatgtgacccaggatacagagtgttgctgtcctcagggaggtccgatctggaacacatattggaattggggccaactccaatatagggtgggtaaggccttataatgtaaagagcatataatgtaaagggctttagagtgagacagacctggattaaaatctgccatttaattagctgcatatcaccttagggtacagcacttaacgcaatctgcctcaatttcttcatctgtcaaatggaaccaattctgcttggctacagaattattgtgaggataaaatcatatataaaatgcccagcatgatgcctgatgtgtacaaggctctc

SEQ ID NO: 165579 - DNA, 897 bp, Artificial Sequence
  derived and/or modified sequence
atggaggagaagcagatcctgtgtgtgggcctggtggtgctggatgtgatcagcctggtggacaagtaccccaaggaggacagcgagatccgctgcctgagccagcgctggcagaggggcggcaatgccagcaacagctgcaccgtgctgagcctgctgggcgccccctgtgccttcatgggctccatggcccctggccacgtggccgacttcctggtggccgacttcagaagaagaggagtggatgtgtcccaggtggcctggcagagcaaaggagacacccccagcagctgctgcatcatcaacaacagcaatggaaacagaaccatcgtgctgcatgacaccagcctgcctgatgtgtctgccacagactttgagaaggtggacctgacccagttcaagtggatccacatcgagggcagaaatgccagcgagcaggtgaagatgctgcagagaattgatgcccacaacacccggcagcccccagagcagaagatccgggtgtctgtggaggtggagaagccccgggaggagctgttccagctgtttggctatggagatgtggtgtttgtgtccaaggatgtggccaagcacctgggcttccagagcgctgaggaggccctgcggggcctgtatggccgggtgaggaaaggagctgtgctggtgtgtgcctgggccgaggagggcgcagatgccctgggcccagatggcaagctgctgcacagtgatgccttccccccaccccgggtggtggacaccctgggcgctggggacaccttcaatgccagcgtcatcttcagcctgagccagggccgctctgtgcaggaggccctgcgcttcggctgccaggtggccggcaagaagtgtggcctgcagggctttgatggcatcgtgtag

SEQ ID NO: 165580 - DNA, 897 bp, Artificial Sequence
  derived and/or modified sequence
atggaggagaagcagatcctgtgcgtgggcctggtggtgctggacgtgatcagcctcgttgacaaatatccaaaggaggactcagagattagatgcctgtcccagaggtggcagcggggcgggaatgcatcaaatagttgtacagtgctctcactgctgggcgcaccatgtgcctttatgggctccatggcccccggtcatgtcgctgactttcttgtcgctgatttccggcgcagaggtgtagatgtatcacaggtggcatggcagagcaaaggagacaccccaagctcttgctgtattattaataattccaacggcaacaggaccattgtccttcacgacactagcctgcccgacgtctcggccaccgatttcgagaaagtggacctaacccagtttaagtggattcacatcgaggggcgcaacgcctcagagcaggtgaaaatgcttcagcggattgacgcccacaacacaagacagcctcctgagcaaaaaattagggtgtcagtggaggtcgagaaacccagagaggagctctttcaactcttcggctatggggacgtggtgtttgtgagcaaggatgtcgccaagcaccttggattccaaagtgctgaagaagctctacgcggcctctacggcagagtgcgaaagggagccgtgctggtatgcgcttgggccgaagaaggcgctgacgctctcggccccgatgggaagttgctgcatagtgatgcgttcccgcctcctcgggtggtggacacccttggcgccggtgatacttttaatgcctcagtgattttttccctgagtcaggggagatctgtgcaagaggccctgcgctttggctgtcaagtcgccggaaaaaaatgcggtttacaggggttcgatggcatcgtgtag

SEQ ID NO: 165581 - DNA, 897 bp, Artificial Sequence
  derived and/or modified sequence
atggaagaaaagcaaattctgtgcgttgggctggtagtgctcgatgtaataagcctggtagataagtaccccaaagaagatagtgaaattcggtgtctcagtcaaagatggcagcgagggggaaacgctagcaactcctgcacagtgctgtctctccttggtgcaccctgcgcctttatgggatccatggcccctggacatgtggctgattttcttgtggctgactttagaagacgcggtgttgacgtatcccaggttgcctggcagtccaagggagacacaccctcttcctgttgcattatcaataactctaatggaaaccggacaatcgtactacatgacacttcactcccagatgtaagcgctaccgatttcgagaaggtcgacttgactcagttcaaatggattcacatcgaggggaggaacgcttctgaacaagtgaaaatgctgcaaagaattgatgcccacaacacgaggcaacctccagaacagaagatcagagtgtctgtggaagtggagaagccacgtgaggaactttttcagctcttcggttatggggatgtggtgttcgtgagcaaagatgtggccaagcacctggggttccaaagtgctgaggaagctctgcggggattgtacggtagagtgcggaaaggggcagtgctggtgtgtgcctgggccgaagagggcgcagacgcactgggtccggacggcaaactgctgcactctgatgccttcccaccgcctcgcgtcgtggacaccttgggtgctggggatacctttaatgcctccgtgatcttcagcctgtctcagggccgaagcgtacaagaggctctgcgtttcgggtgtcaagtcgcaggaaagaagtgtggcctgcagggattcgacggaatagtatag

SEQ ID NO: 165582 - DNA, 897 bp, Artificial Sequence
  derived and/or modified sequence
atggaggagaagcagatcctgtgcgtgggcctggtggtgctggacgtgatcagcctggtggacaagtaccccaaggaggacagcgagatcagatgcctgagccagagatggcagagaggcggcaacgccagcaacagctgcaccgtgctgagcctgctgggcgccccctgcgccttcatgggcagcatggcccccggccacgtggccgacttcctggtggccgacttcagaagaagaggcgtggacgtgagccaggtggcctggcagagcaagggcgacacccccagcagctgctgcatcatcaacaacagcaacggcaacagaaccatcgtgctgcacgacaccagcctgcccgacgtgagcgccaccgacttcgagaaggtggacctgacccagttcaagtggatccacatcgagggcagaaacgccagcgagcaggtgaagatgctgcagagaatcgacgcccacaacaccagacagccccccgagcagaagatcagagtgagcgtggaggtggagaagcccagagaggagctgttccagctgttcggctacggcgacgtggtgttcgtgagcaaggacgtggccaagcacctgggcttccagagcgccgaggaggccctgagaggcctgtacggcagagtgagaaagggcgccgtgctggtgtgcgcctgggccgaggagggcgccgacgccctgggccccgacggcaagctgctgcacagcgacgccttccccccccccagagtggtggacaccctgggcgccggcgacaccttcaacgccagcgtgatcttcagcctgagccagggcagaagcgtgcaggaggccctgagattcggctgccaggtggccggcaagaagtgcggcctgcagggcttcgacggcatcgtgtag

SEQ ID NO: 165583 - protein, 483 aa, Artificial Sequence
  derived and/or modified sequence
MMAAAPIQQNGTHTGVPIDLDPPDSRKRPLEAPPEAGSTKRTNTGEDGQYFLKVLIPSYAAGSIIGKGGQTIVQLQKETGATIKLSKSKDFYPGTTERVCLIQGTVEALNAVHGFIAEKIREMPQNVAKTEPVSILQPQTTVNPDRIKQVKIIVPNSTAGLIIGKGGATVKAVMEQSGAWVQLSQKPDGINLQERVVTVSGEPEQNRKAVELIIQKIQEDPQSGSCLNISYANVTGPVANSNPTGSPYANTAEVLPTAAAAAGLLGHANLAGVAAFPAVLSGFTGNDLVAITSALNTLASYGYNLNTLGLGLSQAAATGALAAAAASANPAAAAANLLATYASEASASGSTAGGTAGTFALGSLAAATAATNGYFGAASPLAASAILGTEKSTDGSKDVVEIAVPENLVGAILGKGGKTLVEYQELTGARIQISKKGEFVPGTRNRKVTITGTPAATQAAQYLITQRITYEQGVRAANPQKVG

SEQ ID NO: 165584 - DNA, 1452 bp, Artificial Sequence
  derived and/or modified sequence
atgatggcagctgctccaatccaacaaaacgggacccacactggggtcccaattgaccttgacccacctgacagcagaaagcggcctctcgaagctccccctgaagccggcagcacaaaaagaacgaatacaggtgaagacgggcagtacttcctcaaggtccttatcccttcgtacgccgctggcagtataatcggtaagggcggacagaccattgtgcagctccaaaaagagacaggggccaccatcaagctatctaagtctaaagacttctacccaggcaccacagagagagtgtgtttgatacagggcaccgtggaggccttgaacgcagtccacgggttcatcgctgagaagatccgggaaatgcctcagaatgttgccaagacggagcctgtttccatcctgcagccgcagaccaccgtgaatcctgatcgaattaaacaggtgaagattatagtgccaaactccaccgccggcttgattattggaaagggaggcgctaccgttaaagctgtgatggaacagtcaggtgcctgggtgcagctctcgcagaagccagacggaattaacctgcaagagcgagttgtaacggttagcggggagcccgaacaaaacagaaaggcagttgagctcataatccagaagatccaggaagatccccagtccggctcctgcttaaacatctcctatgccaacgtgacaggtccagtcgcaaacagtaatcctacaggttccccctacgccaacacggccgaagttctacctaccgcagctgccgcagctggtcttttgggccatgccaacctggccggcgtggccgcattccccgccgtgctgtctggtttcaccggcaatgatctggtcgccatcacaagcgcactcaacacgctggcgtcatatggttacaacctcaatacactaggattggggttgagccaggcagcagccactggagctctcgcggctgcggcggcaagcgccaaccccgctgcggctgccgctaacctactggcgacttacgccagtgaggcctcagcatcaggaagtaccgccgggggtacggcaggcacctttgcactgggaagtctcgcagcagctaccgccgcaacaaatggatactttggcgccgccagcccactggcagcttcagcgattctgggaacggaaaaatccacagatgggagcaaggacgtcgtggaaatcgccgtgcccgaaaatttagtaggagcaatcctggggaagggcggcaaaacccttgtcgagtaccaggaattgacaggtgctcggatacaaatctcgaaaaagggtgagtttgtaccagggacccggaaccgcaaggtcaccattacgggcaccccggccgccacacaggcggcgcaatatctgattacccagcggattacctacgaacagggagtaagagctgccaaccctcagaaggtgggttag

SEQ ID NO: 165585 - DNA, 3573 bp, Artificial Sequence
  derived and/or modified sequence
aaaacaaaagggagaaccttctcccggtagcagcggcaggaactgcaaacatgatggcggcagctcccatccagcagaacgggacccacactggggttcccatagacctggacccgccggactcgcggaaaaggccgctggaagccccccctgaagccggcagcaccaagaggaccaatacgggcgaagacggccagtattttctaaaggttctcatacctagttatgctgctggatctataattgggaagggaggacagacaattgttcagttgcaaaaagaaactggagccaccatcaagctgtctaagtccaaagatttttacccaggtactactgagcgagtgtgcttgatccagggaacggttgaagcactgaatgcagttcatggattcattgcagaaaaaattcgagaaatgccccaaaatgtggccaagacagaaccagtcagcattctacaaccccagaccaccgttaatccagatcgcatcaaacaagtaaagattatagttcccaacagcacagcaggtctgataatagggaagggaggtgctactgtgaaggctgtaatggagcagtcaggggcttgggtgcagctttcccagaaacctgatgggatcaacttgcaagagagggttgtcactgtgagtggagaacctgaacaaaaccgaaaagctgttgaacttatcatccagaagatacaagaggatccacaaagtggcagctgtctcaatatcagttatgccaatgtgacaggtccagtggcaaattccaatccaaccggatctccttatgcaaacactgctgaagtgttaccaactgctgcagcagctgcagggctattaggacatgctaaccttgctggcgttgcagcctttccagcagttttatctggcttcacaggcaatgacctggtggccatcacctctgcacttaatacattagccagctatggatataatctcaacactttaggtttaggtctcagtcaagcagcagcaacaggggctttggctgcagcagctgccagtgccaacccagcagcagcagcagccaatttattggccacctatgccagtgaagcctcagccagtggcagcacagctggtggtacggcggggacatttgcattaggtagcctggctgctgctactgctgcaaccaatggatattttggagctgcttctcccctagctgccagtgccattctaggaacagaaaagtccacagatggatccaaggatgtagttgaaatagcagtgccagaaaacttagttggtgcaatacttggcaaaggagggaaaacattagtggaataccaggagttgactggtgcaaggatacagatctccaaaaaaggagaattcgtacctggcacaaggaatcggaaggtaaccattactggaacaccagctgcaacacaggctgctcaatatttaattacacaaaggatcacatatgagcaaggagttcgggctgccaatcctcagaaagtgggttgagtgccccagttacacatcagattgttttaacccctcctttaccccattttcaagaaggatgtactgtactttgcagaagtgaagtttttctgttattaatatataattatgcaaatgaatgcgactatgttgacaatgtgtatatgtaaataatatgtgttttaccagatgtttcatagaaagaattttttcttgatctgttttgttctctatactttgcttgtgtatatttgtcagaggtgtttctagtgtaagatttaagcctgccattttaccagcattattgtagtttaatgattgaatgtagacagggatatgcgtatagttttcagtattagttctagataacactaaattaactactgttaggttgagtatggtggggtcagtgacctaaaatggagtgaggccaaagcactgtcctgtaagtcttacttcctgcttagggcacagtgaagtaggaaacaatattttgaaaataagttttaaatttaaaatgatcaaaaagcaatatagttgcataaaagcactgtaaaatatttaaaaggttaaaactgtggaaaattatattggtaagtttacagatcaataaaagcacctgttctccatctgaactagacaatggaaataatgctgcatgctggccatggcccattcttcatcatttgtaagttcaacaaaagttctcacatggagtcccacctcttcagaggtttgtacatttgtttttaagcactgaattcactactgatcccatcgcctggccagtagaacagtcattactccattaacatcctcactgtttagacacataactgtggtacagtgtattggaaattttataaacaaaagtgaaagtgccaacaaattattgatagctgataatgtttcattatctgcaactgcttgataagtatgttgcattttaagagcttataattgtgtataatttgttaacactagaaacctattagtattgtgaatgtagattttactgtgaagctatctgtgatttagctgtttgctcccatgatggagtctttgcagcatggcgctagcagccaatgcagtttctaatactcggtaatttgcatgttttgtggagcatttttatgtcaccaaccagacagtatttcctgcatgcttatttagaagaggcagcttatcttgagaggtagtgttatctacctttgtcaggctttttgacaggtcatttcagagtaagcctttgttcccaagacccaacaactgtcaccctcttctgtacctctcctgagtgccaactgtccaggccatttgacacaccatctgttaacctctgagtttgcccactcaaggccactcataggggcatccatccccaagcacctcctcatgctgtgcatgcagtcttaaattcaatggacaaaaataaaatgctggctacctctggatcatctggctgagcaactgaattacaaaagagaattacttccatctcaacttcaacccattgattacgtccatcctagcaagctaaatggcatcccagctgctcctttctgtgcaaccaattaaagaacaatgagtgtgatgctccatgtctgaatttcgtccagcctctctctgaactgtgatctttgtcctcatgaactttcccttttgttcattgaactatatggactcttcatttcatattgatttactgtgcaatttacttttggacattgagaacttgaaattatttcctgatcccttccccttccactattaataattcatttctgtcaaactgtaagagtagactcatttttttttttttagtttttaacattggactgttatttcatttagagttctctatctctaaatatttatttagagaatgattttaaaagggaatgatatgcttgtttaaatgaaagagaaaagctgtagtaaactgtgttaattggtaatgactatttatcgtcgatactctgtagctgtgtaagttttgacaaatagtgtatctcgtggaatcagtggttagcattgccgctattatatttactcattttatcattataaatgtgcttagttcatcatgtag

SEQ ID NO: 165586 - DNA, 1452 bp, Artificial Sequence
  derived and/or modified sequence
atgatggccgccgcccccatccagcagaatggcacccacactggagtgcccatcgacctggaccccccagacagcaggaagaggcccctggaggcccctcctgaggccggcagcaccaagaggaccaacacaggagaagatggccagtacttcctgaaggtgctgatccccagctatgctgctggcagcatcattggaaaaggaggccagaccatcgtgcagctgcagaaggagactggagccaccatcaagctgagcaagagcaaggacttctacccaggcaccacagagcgggtgtgcctgatccagggcaccgtggaggccctgaatgctgtgcacggcttcatcgccgagaagatccgggagatgccccagaatgtggccaagacagagcctgtgtccatcctgcagccccagaccaccgtgaacccagaccgcatcaagcaggtgaagatcatcgtgcccaacagcacagctggcctcatcattggaaaaggaggagccaccgtgaaggctgtgatggagcagagcggggcctgggtgcagctgagccagaagccagatggcatcaacctgcaggagcgggtggtgacagtgtctggagagcctgagcagaacaggaaggctgtggagctgatcatccagaagatccaggaggacccccagagcggcagctgcctgaacatctcctatgccaacgtgactggacctgtggccaacagcaaccccaccggcagcccctatgccaacacagctgaggtgctgcccacagctgctgctgctgctggcctgctgggccacgccaacctggccggcgtggccgccttccctgctgtgctgagcggcttcaccggaaatgacctggtggccatcaccagcgccctgaacaccctggccagctatggctacaacctgaacaccctgggcctgggcctgagccaggccgccgccaccggggccctggccgctgctgctgccagcgccaacccagctgctgctgctgccaacctgctggccacctacgccagcgaggccagcgccagcggcagcacagctgggggcacagctggcacctttgccctgggcagcctggccgccgccacagctgccaccaacggctactttggagctgccagccccctggccgccagcgccatcctgggcacagagaagagcacagatggcagcaaggatgtggtggagattgctgtgcctgagaacctggtgggcgccatcctgggcaaaggaggcaagaccctggtggagtaccaggagctgactggagcccgcatccagatcagcaagaagggggagtttgtgcccggcaccaggaacaggaaggtgaccatcaccggcaccccagctgccacccaggccgcccagtacctgatcacccagaggatcacctatgagcagggcgtgcgggccgccaacccccagaaggtgggctag

SEQ ID NO: 165587 - DNA, 1452 bp, Artificial Sequence
  derived and/or modified sequence
atgatggccgccgcccccatccagcagaacggcacccacaccggcgtgcccatcgacctggatccccccgacagcaggaagcggcctctggaggcacccccagaagctggctcaacaaaaaggacaaatacaggggaagacggacaatattttctcaaagtcctgattccttcctacgccgccgggtctattatcgggaaaggaggacagaccattgttcaattgcagaaggaaactggtgctaccattaagctcagcaaaagcaaagacttttaccctggcacaaccgaacgcgtctgcctcattcaggggactgtggaagccttaaatgccgtccacggattcattgccgaaaaaatcagggagatgccccagaatgttgcgaaaaccgaacctgtgagcattctgcaacctcagaccaccgttaacccagacaggatcaagcaggtgaagatcatagtccctaacagcacagcgggtttaataatcggtaaaggaggggctacagtgaaagccgtgatggagcaaagcggggcctgggtgcagctgtcacagaagcccgacgggatcaacctgcaggagagggtggtgactgttagcggcgaacccgaacaaaaccggaaggccgttgagctcatcattcagaagatacaggaagatcctcagtccggctcttgcttgaacatcagctacgctaatgtgacgggccccgtcgcaaatagcaatcccacgggttctccgtatgctaatacagccgaggtgctacctacagccgcggctgccgccgggctgctgggccacgccaatctggctggcgtcgcggcatttccagcagtgttgtctggcttcacgggtaacgacctcgttgccatcacctctgccctcaacacactcgcatcatatggctataacctaaacaccctaggcttgggactgtcccaggccgctgcgactggagctctagccgctgctgccgcaagcgccaatcccgcagcagccgcagcaaacctgctggcaacctacgccagtgaggcctcagcctccgggtcaacggcaggcgggactgcgggaacctttgctctcggctccttagcagctgccacagccgcgactaatggctatttcggggccgcatctcctctcgctgcctcggctatcctcggcaccgagaaatcaacagatggaagcaaagacgtggttgagatcgctgtccctgaaaatctggtaggcgccattctgggcaagggaggaaagacgctcgtagagtaccaggagctgactggcgcaaggatccagatttccaaaaagggcgagtttgtgccggggacaaggaaccggaaggtcacgatcaccgggacccctgcagcgacccaggctgcccagtatctcattacccagcgcatcacctatgaacagggggtgcgtgcagcaaatccccagaaggtgggatag

SEQ ID NO: 165588 - DNA, 1452 bp, Artificial Sequence
  derived and/or modified sequence
atgatggctgccgcaccgatccagcaaaacggtactcataccggcgttcccatagacttggatcctccagattcccggaagagaccactggaggctccacctgaggctggatcaacaaaaaggactaacaccggggaagatggacagtattttctgaaggtcctaatcccgagctatgctgcgggatcaattatcggcaagggaggacaaacaattgtgcagctgcagaaagagacgggggctactatcaaacttagtaagagcaaagacttctaccctgggactactgagagagtttgtctgattcaggggaccgttgaagcattaaacgcagtccatggcttcatcgcagagaagattcgtgagatgccacagaacgtcgctaagaccgaacctgtctctatcttgcagccgcagaccacagtgaatcctgatcgaatcaaacaggttaagatcatcgtcccgaatagcacagccggacttatcattggaaaaggcggagccacagtcaaggccgtaatggaacagtctggtgcttgggtgcagctgagccagaaacccgacgggatcaacctgcaggaaagggtggttacagtgtctggtgagcccgaacagaatcgaaaagccgtcgagctgattatccagaagatccaggaagacccacagagcggcagctgcttaaacataagttatgcaaatgtgaccggaccggtcgccaacagtaacccaaccggcagcccctatgccaacacagcggaggtcctgcctactgccgcagcagccgcaggactactcggtcatgccaacttagcaggcgttgcggcatttcccgcagttctatccggctttactggaaatgacttggtcgccataactagtgccctcaatactcttgctagctacggttacaatctgaatactctgggcctggggctcagtcaagctgccgctaccggggcactagcggcagcagcggctagtgcaaatccagcagccgcagctgccaatctcctggccacttacgcttccgaggcctctgcttccggaagcaccgcagggggtaccgccggaaccttcgctttagggtcacttgccgctgcaaccgctgccaccaatggctatttcggcgctgcttctccactggctgcaagcgcgatcttgggcacagaaaaaagcacagacgggagcaaagatgtagtggagattgctgtgcccgagaatctggtgggtgctatccttggaaagggcggtaaaactctggtggaatatcaggagcttacaggcgctcggattcaaatctctaaaaaaggcgagttcgtaccagggactagaaaccggaaagtgaccataaccgggacccctgctgcaacccaggctgcgcaatacctgatcacccagagaataacttacgagcagggcgttcgggctgccaatcctcagaaagttgggtag

SEQ ID NO: 165589 - DNA, 1452 bp, Artificial Sequence
  derived and/or modified sequence
atgatggccgccgcccccatccagcagaacggcacccacaccggcgtgcccatcgacctggacccccccgacagcagaaagagacccctggaggccccccccgaggccggcagcaccaagagaaccaacaccggcgaggacggccagtacttcctgaaggtgctgatccccagctacgccgccggcagcatcatcggcaagggcggccagaccatcgtgcagctgcagaaggagaccggcgccaccatcaagctgagcaagagcaaggacttctaccccggcaccaccgagagagtgtgcctgatccagggcaccgtggaggccctgaacgccgtgcacggcttcatcgccgagaagatcagagagatgccccagaacgtggccaagaccgagcccgtgagcatcctgcagccccagaccaccgtgaaccccgacagaatcaagcaggtgaagatcatcgtgcccaacagcaccgccggcctgatcatcggcaagggcggcgccaccgtgaaggccgtgatggagcagagcggcgcctgggtgcagctgagccagaagcccgacggcatcaacctgcaggagagagtggtgaccgtgagcggcgagcccgagcagaacagaaaggccgtggagctgatcatccagaagatccaggaggacccccagagcggcagctgcctgaacatcagctacgccaacgtgaccggccccgtggccaacagcaaccccaccggcagcccctacgccaacaccgccgaggtgctgcccaccgccgccgccgccgccggcctgctgggccacgccaacctggccggcgtggccgccttccccgccgtgctgagcggcttcaccggcaacgacctggtggccatcaccagcgccctgaacaccctggccagctacggctacaacctgaacaccctgggcctgggcctgagccaggccgccgccaccggcgccctggccgccgccgccgccagcgccaaccccgccgccgccgccgccaacctgctggccacctacgccagcgaggccagcgccagcggcagcaccgccggcggcaccgccggcaccttcgccctgggcagcctggccgccgccaccgccgccaccaacggctacttcggcgccgccagccccctggccgccagcgccatcctgggcaccgagaagagcaccgacggcagcaaggacgtggtggagatcgccgtgcccgagaacctggtgggcgccatcctgggcaagggcggcaagaccctggtggagtaccaggagctgaccggcgccagaatccagatcagcaagaagggcgagttcgtgcccggcaccagaaacagaaaggtgaccatcaccggcacccccgccgccacccaggccgcccagtacctgatcacccagagaatcacctacgagcagggcgtgagagccgccaacccccagaaggtgggctag

SEQ ID NO: 165590 - protein, 181 aa, Artificial Sequence
  derived and/or modified sequence
MMAAAPIQQNGTHTGVPIDLDPPDSRKRPLEAPPEAGSTKRTNTGEDGQYFLKVLIPSYAAGSIIGKGGQTIVQLQKETGATIKLSKSKDFYPGTTERVCLIQGTVEALNAVHGFIAEKIREMPQNVAKTEPVSILQPQTTVNPDRIKQTLPSSPTTTKSSPSDPMTTSRANQKHNISWIS

SEQ ID NO: 165591 - DNA, 546 bp, Artificial Sequence
  derived and/or modified sequence
atgatggctgcagcccccattcagcagaacggaacccacacaggcgtccccattgacctcgatccccccgattctcggaagagacccctcgaggccccacccgaagcaggctcaaccaaacggactaacacaggtgaggacgggcaatattttctgaaagtgctgatccctagttatgctgccggttcaattattggcaaaggcgggcaaactattgtccagctgcaaaaagagacgggggcaactatcaagctgtctaagtctaaagatttttacccaggcaccaccgagagagtgtgtctgatccaaggcacagtcgaagctctgaacgcagtacatgggtttatagctgagaaaatccgtgaaatgcctcagaacgttgccaagacagaaccagtgagcatcttacaaccccagacgaccgtgaatcccgacaggataaaacagacactgccgagcagccccaccacaaccaagtcgtctccaagtgaccccatgaccacctcgagagccaatcagaagcataacatttcctggatttcttag

SEQ ID NO: 165592 - DNA, 896 bp, Artificial Sequence
  derived and/or modified sequence
aaacatgatggcggcagctcccatccagcagaacgggacccacactggggttcccatagacctggacccgccggactcgcggaaaaggccgctggaagccccccctgaagccggcagcaccaagaggaccaatacgggcgaagacggccagtattttctaaaggttctcatacctagttatgctgctggatctataattgggaagggaggacagacaattgttcagttgcaaaaagaaactggagccaccatcaagctgtctaagtccaaagatttttacccaggtactactgagcgagtgtgcttgatccagggaacggttgaagcactgaatgcagttcatggattcattgcagaaaaaattcgagaaatgccccaaaatgtggccaagacagaaccagtcagcattctacaaccccagaccaccgttaatccagatcgcatcaaacaaacattgccatcttccccaactaccaccaagtcctctccatctgatcccatgaccacctccagagctaatcagaagcataatatctcctggatatcatgaagcaagatataagagaagaacaaaacaaaatccgtaattcattgaaagaattgtaatcatcaatctttcatattattaatactttgtaattattttctccccaacagtattttccagtagattctaatcatgtggtagggcagaaggaaatgtgttttttgttgttcatttgtttcttgtcaatagtcctgattaatttagctttgctatactgacttatatctggaagtatataaccaagataagaaaataggttttaatatgatcatcttaagctaattgtaatgaaaagaactaatggactgtcaatattcagaaaaccaaaaataaaaaatacagaaaacta

SEQ ID NO: 165593 - DNA, 546 bp, Artificial Sequence
  derived and/or modified sequence
atgatggccgccgcccccatccagcagaatggcacccacactggagtgcccatcgacctggaccccccagacagcaggaagaggcccctggaggcccctcctgaggccggcagcaccaagaggaccaacacaggagaagatggccagtacttcctgaaggtgctgatccccagctatgctgctggcagcatcattggaaaaggaggccagaccatcgtgcagctgcagaaggagactggagccaccatcaagctgagcaagagcaaggacttctacccaggcaccacagagcgggtgtgcctgatccagggcaccgtggaggccctgaatgctgtgcacggcttcatcgccgagaagatccgggagatgccccagaatgtggccaagacagagcctgtgtccatcctgcagccccagaccaccgtgaacccagaccgcatcaagcagaccctgcccagcagccccaccaccaccaagagcagccccagcgaccccatgaccaccagccgggccaaccagaagcacaacatctcctggatctcctag

SEQ ID NO: 165594 - DNA, 546 bp, Artificial Sequence
  derived and/or modified sequence
atgatggccgccgcccccatccagcagaacggcacccacaccggcgtccccattgaccttgatccaccagacagccgcaagagaccgctggaggctccgcccgaggctggatcaacaaagagaactaatacgggagaagatggacagtactttctcaaggtgctgattccttcctatgctgcaggatctataattgggaagggtggtcagacaatcgtacagttacagaaggaaaccggcgctacgattaagttgagcaagagcaaagacttctaccctggaaccacggagcgcgtgtgcctgattcagggaacagtggaagcactcaacgctgtgcatggtttcattgcggagaaaattcgggaaatgccgcaaaacgtggccaagacggaacccgtcagcattctgcaaccacagaccaccgttaatcccgatcgcatcaagcagacgttaccctcctcgccgacgacgacaaagtccagccctagtgatcccatgaccacatccagggcaaatcaaaaacacaatatcagctggataagctag

SEQ ID NO: 165595 - DNA, 546 bp, Artificial Sequence
  derived and/or modified sequence
atgatggcggcagcgccaatccagcagaacgggacgcatactggagtacccattgaccttgacccccctgacagccggaagagacccctggaggccccacccgaggctggctcaacaaagcgtacaaacacaggtgaagatggacaatatttcctgaaggtgctgatccccagctacgcagcgggatctatcattgggaaaggcggacagaccattgttcaactgcagaaagagactggagcaacaattaaactatccaaatctaaggacttctacccaggaactactgagcgcgtgtgcctgatacaagggacggttgaggccttgaatgctgtgcacggcttcatcgctgagaagatccgtgagatgcctcaaaacgttgcaaagactgagccagtctctatcttgcagccacagactaccgttaacccagacagaatcaaacagaccttgccctcttctccgactaccactaagagctctccttctgatccaatgacaacttcacgagccaaccagaagcacaacatctcttggatctcttag

SEQ ID NO: 165596 - DNA, 546 bp, Artificial Sequence
  derived and/or modified sequence
atgatggccgccgcccccatccagcagaacggcacccacaccggcgtgcccatcgacctggacccccccgacagcagaaagagacccctggaggccccccccgaggccggcagcaccaagagaaccaacaccggcgaggacggccagtacttcctgaaggtgctgatccccagctacgccgccggcagcatcatcggcaagggcggccagaccatcgtgcagctgcagaaggagaccggcgccaccatcaagctgagcaagagcaaggacttctaccccggcaccaccgagagagtgtgcctgatccagggcaccgtggaggccctgaacgccgtgcacggcttcatcgccgagaagatcagagagatgccccagaacgtggccaagaccgagcccgtgagcatcctgcagccccagaccaccgtgaaccccgacagaatcaagcagaccctgcccagcagccccaccaccaccaagagcagccccagcgaccccatgaccaccagcagagccaaccagaagcacaacatcagctggatcagctag

SEQ ID NO: 165597 - protein, 407 aa, Artificial Sequence
  derived and/or modified sequence
MRRNLRLGPSSGADAQGQGAPRPGLAAPRMLLPPASQASRGSGSTGCSLMAQEVDTAQGAEMRRGAGAARGRASWCWALALLWLAVVPGWSRVSGIPSRRHWPVPYKRFDFRPKPDPYCQAKYTFCPTGSPIPVMEGDDDIEVFRLQAPVWEFKYGDLLGHLKIMHDAIGFRSTLTGKNYTMEWYELFQLGNCTFPHLRPEMDAPFWCNQGAACFFEGIDDVHWKENGTLVQVATISGNMFNQMAKWVKQDNETGIYYETWNVKASPEKGAETWFDSYDCSKFVLRTFNKLAEFGAEFKNIETNYTRIFLYSGEPTYLGNETSVFGPTGNKTLGLAIKRFYYPFKPHLPTKEFLLSLLQIFDAVIVHKQFYLFYNFEYWFLPMKFPFIKITYEEIPLPIRNKTLSGL

SEQ ID NO: 165598 - protein, 273 aa, Artificial Sequence
  derived and/or modified sequence
MEGDDDIEVFRLQAPVWEFKYGDLLGHLKIMHDAIGFRSTLTGKNYTMEWYELFQLGNCTFPHLRPEMDAPFWCNQGAACFFEGIDDVHWKENGTLVQVATISGNMFNQMAKWVKQDNETGIYYETWNVKASPEKGAETWFDSYDCSKFVLRTFNKLAEFGAEFKNIETNYTRIFLYSGEPTYLGNETSVFGPTGNKTLGLAIKRFYYPFKPHLPTKEFLLSLLQIFDAVIVHKQFYLFYNFEYWFLPMKFPFIKITYEEIPLPIRNKTLSGL

SEQ ID NO: 165599 - protein, 358 aa, Artificial Sequence
  derived and/or modified sequence
MAQEVDTAQGAEMRRGAGAARGRASWCWALALLWLAVVPGWSRVSGIPSRRHWPVPYKRFDFRPKPDPYCQAKYTFCPTGSPIPVMEGDDDIEVFRLQAPVWEFKYGDLLGHLKIMHDAIGFRSTLTGKNYTMEWYELFQLGNCTFPHLRPEMDAPFWCNQGAACFFEGIDDVHWKENGTLVQVATISGNMFNQMAKWVKQDNETGIYYETWNVKASPEKGAETWFDSYDCSKFVLRTFNKLAEFGAEFKNIETNYTRIFLYSGEPTYLGNETSVFGPTGNKTLGLAIKRFYYPFKPHLPTKEFLLSLLQIFDAVIVHKQFYLFYNFEYWFLPMKFPFIKITYEEIPLPIRNKTLSGL

SEQ ID NO: 165600 - DNA, 1224 bp, Artificial Sequence
  derived and/or modified sequence
atgcggaggaatctgaggctgggcccctcctctggagccgacgcacaaggacagggcgcccccagacctggactggctgcgccacgtatgctgctcccccccgcgtctcaggcatcccgcggtagtggatcaactgggtgtagcctcatggcccaggaagtcgacacagctcagggtgcggaaatgagacgaggagctggagccgcccggggcagggccagctggtgttgggcattggccctcctgtggctagccgttgtgcctggctggagtcgcgtgtccgggatcccctctcgacggcactggccagtgccctataaaagattcgacttccggcccaagcccgatccatattgccaggcaaagtacaccttctgccctactgggtcacccataccggtgatggagggagacgatgacattgaggtcttccgtctacaggcccccgtgtgggaatttaagtatggggacttgctcggacacctgaagatcatgcacgacgccattgggttcaggagcaccctaacaggtaagaattatacaatggaatggtatgagctgttccagttgggcaattgcactttcccacacttgagacccgaaatggacgctccattctggtgtaaccaaggggctgcctgttttttcgaggggattgatgacgtccactggaaggaaaatggcacactggttcaggtggcaactatcagcgggaatatgtttaaccagatggccaagtgggtaaagcaggacaatgaaaccggaatttattatgagacttggaacgtgaaggcatctcccgagaagggcgctgaaacctggtttgattcttacgactgcagtaagttcgtgctgcgcacttttaacaaactcgctgagttcggggccgaatttaaaaacattgagacgaactacacacgcatcttcctgtattctggagaaccaacctaccttggtaacgagacatctgtgtttgggccaacagggaataagaccctgggactcgctatcaaacggttctactatccttttaagccacacctccccactaaagagtttctcctcagcctcctgcagatcttcgacgccgtaatcgtgcacaagcagttctatctgttttacaattttgaatactggtttctgccaatgaaattcccttttatcaagataacgtacgaagaaattcctctcccaatcagaaacaagacactcagcggcttatag

SEQ ID NO: 165601 - DNA, 822 bp, Artificial Sequence
  derived and/or modified sequence
atggagggcgacgatgacatcgaagtctttcgcttacaggcccccgtctgggaatttaagtacggggaccttctgggacatctgaaaattatgcatgatgctattggctttcggtccaccctcactgggaagaattatactatggagtggtatgagctgtttcagctcggaaactgcacttttccccacctgaggcccgaaatggacgcccctttctggtgtaatcaaggcgcagcatgcttcttcgagggtattgacgatgtacattggaaggagaacggaaccctggtgcaggttgctacaatctccggtaatatgttcaatcagatggcgaaatgggtgaagcaggataatgagaccgggatctattacgaaacctggaacgttaaggccagccccgaaaagggcgctgagacctggttcgatagttacgactgctccaaattcgtgttacgcacctttaacaagttagccgaatttggagccgagttcaagaacatagagaccaactataccagaatctttctctactcaggcgagcctacatacctaggcaacgagacatctgtgtttggacccacgggcaacaaaactcttggactggctattaaacgcttttattacccgtttaagccgcatctcccgacaaaagagttcctgctgtccttgctccagatcttcgatgccgtcatcgttcacaaacagttctacctgttttacaactttgaatactggtttctgcctatgaagttcccattcatcaaaataacgtatgaggaaatccccctgcctataagaaacaaaacactgtccgggctgtag

SEQ ID NO: 165602 - DNA, 1077 bp, Artificial Sequence
  derived and/or modified sequence
atggcccaggaagttgacaccgctcagggtgccgagatgcggagaggggccggagcggctcgagggagggctagctggtgctgggctctcgcactgctctggctcgctgtggtgcccggatggtcacgggtttcaggaatcccaagtaggcgccactggcctgttccatacaagagattcgactttaggccgaaacccgacccgtactgccaggctaaatacaccttctgtccaacaggtagcccaatcccggtgatggagggtgacgacgatatcgaagtattccgtcttcaggctccagtctgggagttcaaatatggagacctactcggtcaccttaaaataatgcatgacgctattggttttagaagcaccctgaccgggaagaactatacgatggaatggtacgagctgttccagctggggaactgcacctttccacatttgcggcccgaaatggacgcccctttttggtgcaatcagggagctgcctgtttcttcgagggcattgatgacgtgcattggaaggaaaacggaactttagtgcaagtcgctaccatttccggaaatatgttcaatcaaatggccaaatgggttaaacaggacaacgaaacaggaatctactacgaaacttggaacgttaaggcgtcaccggagaagggcgctgaaacttggttcgactcttacgactgctctaagttcgtgttaagaacctttaacaaactcgcggagttcggcgcagagttcaagaacattgaaaccaactatacccggatcttcctctattccggcgaacccacctatctgggtaacgagacaagcgtcttcgggcccaccggtaacaaaacgctgggccttgctattaaacgattctactatccctttaagccccacctccctacaaaagagtttctgctctcactgcttcagatcttcgacgctgtcatcgtacacaagcagttttatctgttctacaacttcgagtactggttcttgcccatgaaattcccgtttatcaagatcacttacgaggagatacccctacccatcaggaataaaactctttctgggttgtag

SEQ ID NO: 165603 - DNA, 1224 bp, Artificial Sequence
  derived and/or modified sequence
atgagaagaaacctgcggctgggccccagcagtggagcagatgcccagggccagggcgcccccaggcctggcctggccgcccccaggatgctgctgcccccagccagccaggccagccggggcagcggcagcacaggctgcagcctgatggcccaggaggtggacacagcccagggcgctgagatgagaagaggagctggggccgcccggggccgggcctcctggtgctgggccctggccctgctgtggctggccgtggtgcccggctggagccgggtgtctggcatccccagcagaagacactggcctgtgccctacaagagatttgacttccggcccaagccagacccctactgccaggccaagtacaccttctgccccaccggcagccccatccctgtgatggagggagatgatgacatcgaggtgttccggctgcaggcccctgtgtgggagttcaagtatggagacctgctgggccacctgaagatcatgcatgatgccatcggcttccgcagcaccctgaccgggaagaactacaccatggagtggtatgagctgttccagctgggcaactgcaccttcccccacctgcggcctgagatggatgcccccttctggtgcaaccagggcgccgcctgcttctttgagggcattgatgatgtgcactggaaggaaaatggcaccctggtgcaggtggccaccatcagcggcaacatgttcaaccagatggccaagtgggtgaagcaggacaatgagaccggcatctactatgagacctggaatgtgaaggccagccctgagaagggagctgagacctggtttgacagctatgactgcagcaagtttgtgctgcggaccttcaacaagctggccgagtttggagctgagttcaagaacatcgagaccaactacacccgcatcttcctgtacagcggggagcccacctacctgggcaatgagacctctgtgtttggccccaccggcaacaagaccctgggcctggccatcaagcgcttctactaccccttcaagccccacctgcccaccaaggagttcctgctgagcctgctgcagatctttgatgctgtgattgtgcacaagcagttctacctgttctacaactttgagtactggttcctgcccatgaagttccccttcatcaagatcacctatgaggagatccccctgcccatccggaacaagaccctgagcggcctgtag

SEQ ID NO: 165604 - DNA, 822 bp, Artificial Sequence
  derived and/or modified sequence
atggagggagatgatgacatcgaggtgttccggctgcaggcccctgtgtgggagttcaagtatggagacctgctgggccacctgaagatcatgcatgatgccatcggcttccgcagcaccctgaccgggaagaactacaccatggagtggtatgagctgttccagctgggcaactgcaccttcccccacctgcggcctgagatggatgcccccttctggtgcaaccagggcgccgcctgcttctttgagggcattgatgatgtgcactggaaggaaaatggcaccctggtgcaggtggccaccatcagcggcaacatgttcaaccagatggccaagtgggtgaagcaggacaatgagaccggcatctactatgagacctggaatgtgaaggccagccctgagaagggagctgagacctggtttgacagctatgactgcagcaagtttgtgctgcggaccttcaacaagctggccgagtttggagctgagttcaagaacatcgagaccaactacacccgcatcttcctgtacagcggggagcccacctacctgggcaatgagacctctgtgtttggccccaccggcaacaagaccctgggcctggccatcaagcgcttctactaccccttcaagccccacctgcccaccaaggagttcctgctgagcctgctgcagatctttgatgctgtgattgtgcacaagcagttctacctgttctacaactttgagtactggttcctgcccatgaagttccccttcatcaagatcacctatgaggagatccccctgcccatccggaacaagaccctgagcggcctgtag

SEQ ID NO: 165605 - DNA, 1077 bp, Artificial Sequence
  derived and/or modified sequence
atggcccaggaggtggacacagcccagggcgctgagatgagaagaggagctggagctgcccggggccgggcctcctggtgctgggccctggccctgctgtggctggccgtggtgcccggctggagccgggtgtctggcatccccagccgccgccactggcctgtgccctacaagagatttgacttccggcccaagccagacccctactgccaggccaagtacaccttctgccccaccggcagccccatccctgtgatggagggagatgatgacatcgaggtgttccggctgcaggcccctgtgtgggagttcaagtacggggacctgctgggccacctgaagatcatgcatgatgccatcggcttccgcagcaccctgaccgggaagaactacaccatggagtggtatgagctgttccagctgggcaactgcaccttcccccacctgcggcctgagatggatgcccccttctggtgcaaccagggcgccgcctgcttctttgagggcattgatgatgtgcactggaaggaaaatggcaccctggtgcaggtggccaccatcagcggcaacatgttcaaccagatggccaagtgggtgaagcaggacaatgaaacaggcatctactatgagacctggaatgtgaaggccagccctgagaagggagctgagacctggtttgacagctatgactgcagcaagtttgtgctgcggaccttcaacaagctggccgagtttggagctgagttcaagaacatcgagaccaactacacccgcatcttcctgtacagcggggagcccacctacctgggcaatgagacctctgtgtttggccccactggaaacaagaccctgggcctggccatcaagcgcttctactaccccttcaagccccacctgcccaccaaggagttcctgctgagcctgctgcagatctttgatgctgtgattgtgcacaagcagttctacctgttctacaactttgagtactggttcctgcccatgaagttccccttcatcaagatcacctatgaggagatccccctgcccatccggaacaagaccctgagcggcctgtag

SEQ ID NO: 165606 - DNA, 1224 bp, Artificial Sequence
  derived and/or modified sequence
atgcggcggaacctgcggctgggccccagcagcggcgccgacgcccagggccaaggggcgccaagaccagggctggcagcccctcggatgttactgccgccagcttcgcaggctagccggggatcaggcagtacgggctgctccttgatggcccaggaggtggatacagcccagggcgccgagatgcgccgtggcgcaggggctgctagaggaagggcctcctggtgttgggcactggctctgctatggctggctgtcgtccccggatggtctcgggtgtcggggattccctcacgtcgtcactggccggtaccctataaacgtttcgattttagacctaagccagatccatactgccaagctaagtataccttttgtccaacgggatctcctatccccgtgatggagggggacgatgatattgaggtgtttagactgcaggcccccgtatgggaattcaagtacggggacctcctgggtcatcttaaaattatgcacgatgccattgggtttcgctcgaccttaacaggcaaaaattacaccatggagtggtacgagctgtttcagctggggaattgcacgtttccccacctgcggcccgaaatggatgcacctttttggtgtaaccagggtgctgcctgctttttcgaaggcattgatgatgtgcactggaaggagaacggcactctggttcaagttgcaacgatctctggtaacatgtttaatcagatggctaaatgggtaaagcaggataatgagacaggcatttactacgagacctggaacgtgaaggccagccctgagaaaggggccgaaacttggtttgattcttacgactgttctaagttcgtgctcaggacctttaacaagttggcggaattcggcgccgaatttaagaacatcgaaacaaattacacccggatattcctgtactctggggagcccacttacctgggcaacgagaccagcgtgttcgggcctacagggaataagactctgggtctggctatcaaaaggttctactatccatttaaaccacacctgcctacaaaggagttcttactgtctttgctgcagatattcgatgcagtgatcgtgcacaaacagttctacctattttacaatttcgaatattggtttctgcctatgaaatttcccttcattaagattacctacgaagaaattcctttgcccatccggaacaagaccctgtcagggctctag

SEQ ID NO: 165607 - DNA, 822 bp, Artificial Sequence
  derived and/or modified sequence
atggagggcgacgacgacatcgaggtgttccggctgcaggcccccgtgtgggagtttaaatacggtgacctcttgggccaccttaagatcatgcacgatgccattggatttagatctactctgaccgggaagaattatactatggagtggtacgagttgtttcagctcggcaactgcacgttcccccacctgaggcccgaaatggatgccccgttttggtgcaatcaaggcgctgcatgcttttttgaggggatcgacgatgtgcactggaaagagaacggaactcttgttcaggttgccacaatatctggcaacatgttcaatcaaatggctaaatgggtgaagcaagacaatgagaccggaatatactatgagacctggaacgtgaaggccagtccggagaagggtgcggagacttggttcgactcctacgactgttctaagttcgtcctgaggaccttcaataagctggccgaatttggggccgagttcaagaatattgaaaccaattacacccgaatttttctctactctggcgaacccacctacttggggaatgagacttctgttttcggccctactgggaataagaccctaggcctggccatcaagcgtttctactacccatttaagccacaccttcccacgaaggagttcttgctgagcctgttacaaattttcgatgccgtgatcgtacacaagcaattttacttgttctacaactttgagtactggttccttccaatgaagttccccttcatcaaaatcacatacgaagaaatcccactcccaattcgaaataaaaccctgtccggcctgtag

SEQ ID NO: 165608 - DNA, 1077 bp, Artificial Sequence
  derived and/or modified sequence
atggcccaggaggtggacaccgcccagggcgccgagatgcggcggggagctggagccgcgcgcggacgcgctagttggtgctgggcattggcactgttgtggctcgccgtggttcccgggtggtcacgcgtgtcaggaatccccagtcgaagacactggcccgtgccctataagcggttcgactttagacccaagcccgatccgtactgccaggccaagtatacattctgccctactgggtctcccatcccagtgatggagggggatgatgatattgaagtgttccgccttcaggcacctgtgtgggagtttaagtacggcgacctcctgggacatctcaaaatcatgcatgacgccatcggattcaggagtaccctgacaggtaaaaattacacaatggagtggtacgagctgttccagcttgggaactgcacattccctcatctgcgcccggagatggacgcccccttttggtgtaatcagggcgccgcttgtttctttgaaggtatcgatgatgtacactggaaagaaaacggaacgctcgttcaggtcgccaccatctcaggcaatatgttcaatcagatggctaaatgggtcaagcaggataacgaaactggcatctattacgaaacatggaatgtgaaggcttcacccgagaagggggcggagacctggttcgacagctatgattgttcgaaatttgtgctcaggacctttaacaaactggccgagttcggcgcggaatttaaaaacattgaaaccaattacactcgcatattcctctactccggcgaaccgacctatctgggaaacgagacgagcgtgttcgggcccacaggtaataaaactttaggcctagccatcaagcgtttctactaccctttcaagccccatctccccaccaaggaattcctgctatccctcctccaaattttcgacgctgtaattgtccacaagcagttctatcttttttacaattttgaatattggtttctgcctatgaagttcccatttatcaagatcacttatgaagaaattcctctcccaattcgcaacaagacactttccggcctatag

SEQ ID NO: 165609 - DNA, 1224 bp, Artificial Sequence
  derived and/or modified sequence
atgcgaagaaatctgcggctgggaccatccagcggggcagacgcccagggacagggagccccacgtcccggactggccgctccccgaatgttattacctcctgcctcgcaggcaagcagggggtcaggaagcactggttgcagtttgatggctcaggaagtcgacacagcccagggggctgaaatgaggcgaggcgctggagctgcacggggtcgcgctagctggtgttgggctctggccctcttgtggttagccgtcgtacctggatggtcaagggttagcggaatccccagcaggcgtcactggccagtaccctataagagattcgattttcggccaaaacctgatccatattgtcaggcaaagtacaccttttgcccgactggaagtcccatccccgtcatggaaggcgacgatgatatagaggtttttaggttgcaggctccagtatgggaatttaagtatggcgatcttctcggtcacttgaagattatgcatgatgccatcggcttccgatccactcttaccggtaaaaattatactatggagtggtatgagctatttcagctgggaaattgcaccttccctcatttgcggcctgagatggacgccccattttggtgcaatcagggcgcagcttgttttttcgaggggattgatgatgtacattggaaggaaaatggtactcttgtgcaggttgcgaccatctctggtaacatgttcaaccagatggccaaatgggttaagcaggacaacgagaccgggatctattacgagacctggaacgttaaggcttcacctgagaagggagctgaaacatggtttgactcgtacgactgcagtaagtttgtgctcaggactttcaataagttggctgaatttggagctgagttcaagaacattgagaccaattatacccgaattttcctttattctggagaaccaacatacctcggaaatgagaccagcgtcttcggacccactgggaacaagactctgggcttggcaataaagcgattttactacccattcaagccccaccttcctaccaaggaattcctcctgagtctactgcaaatctttgatgctgtgattgtacacaagcaattttaccttttctacaactttgagtactggttcctccccatgaaatttccgtttattaaaatcacatacgaggagattccactccctattagaaataagacactcagcggactgtag

SEQ ID NO: 165610 - DNA, 822 bp, Artificial Sequence
  derived and/or modified sequence
atggagggagatgatgacatcgaggtctttagacttcaggctcctgtctgggagtttaagtatggcgatctcctcggccacctgaagatcatgcatgacgccattggattccgctctacactcacaggcaagaactacacgatggaatggtacgaactgttccaactgggtaactgtacctttccccacctcagaccggagatggacgcaccattctggtgtaatcagggcgcagcctgtttcttcgagggaattgacgatgtgcattggaaggaaaatggaaccctcgtgcaagtggctacaatatctggcaatatgtttaaccagatggccaaatgggtaaaacaggataatgaaaccggcatttattacgaaacatggaacgtcaaggcgtcacctgaaaagggcgctgaaacatggtttgacagttacgactgctctaaattcgtgctacggactttcaacaagcttgctgagttcggcgctgaattcaaaaacattgagactaattacactcgcatctttctgtactcaggagagccgacctatctgggaaacgagacaagcgtgtttggacccactggcaataagactctgggactagccattaagcgattttattatcctttcaagccccatctgcccaccaaggaattcctcttgagcttactccagatttttgatgcagtaatcgtgcataaacagttctacctgttctataactttgaatactggtttctgcccatgaagttcccttttatcaaaattacatatgaggagattccactccccatccgcaacaaaacactgtccggactttag

SEQ ID NO: 165611 - DNA, 1077 bp, Artificial Sequence
  derived and/or modified sequence
atggcgcaggaggtggataccgcacaaggagctgaaatgcgcagaggtgcaggagcggcacgcggacgagcgtcatggtgttgggctctggcgttgttgtggcttgcagtggtccctggatggtcccgggtcagtgggattccatctcggcgtcattggcccgtgccttataaacgatttgattttagaccaaaacccgacccatactgccaggccaaatatacattttgtccaacgggctcacccatccccgtgatggaaggggatgacgacatcgaagtgttccgacttcaggcccctgtatgggagttcaaatatggagatctgttgggccatttgaaaatcatgcacgatgcaattggcttccgatccacactgacaggtaaaaactataccatggaatggtatgaactctttcagctcggcaactgtacattccctcacctccgtcccgaaatggatgcccctttctggtgcaatcagggagccgcttgcttttttgagggaattgatgacgttcactggaaagaaaacgggactttagttcaagtggccacaatttccgggaatatgttcaatcagatggccaagtgggtgaaacaggacaacgaaactgggatctactacgagacttggaacgtcaaggcctccccggagaagggggctgaaacatggtttgactcctatgactgttctaagtttgtgctgcgcacctttaataaattggctgagttcggagccgaattcaaaaatatcgaaacaaattacacgcgcatttttttgtatagcggcgaacctacctacctcggtaacgaaacatcggtgttcggccctactggcaataaaacacttggactggccattaaaagattctactacccctttaaaccacacttacctacgaaagaatttctcctgagccttctgcagattttcgatgctgttattgtgcataagcagttctacctgttttataactttgaatactggtttctgcctatgaaattcccatttatcaagatcacgtatgaggaaatccccttgcccattcggaacaagacactgtcggggctttag

SEQ ID NO: 165612 - DNA, 4064 bp, Artificial Sequence
  derived and/or modified sequence
tttttttttttttttaaagctgttcctgctgattgctttttaagctaggctcaagtgtggggccacggaatccttcaggtgcccttcaaatcagacattacatttcagctctcagggctagaatgcttccccctcttatcttgggcaggtctttgaagaagccagtttagccttggtaattttgaatttggccatagtatacggaggagagctaggtagctatcaaaacgcttagacaaacgtatggtaaaatgcagcccagcctgaacctccgcaaaacccccaaacctggagcagcaagtgggcaaaggagtgtgtgtttggggcagggtactgagtcccatatgtaatcaagagacctggagggcccaaggaagtcagtgacacccccacaagctacatatcctccaatggattgtggtggtcatctccggctaccgaagccaccttgcttattcccataggcttacaaacattatgatgcttcacacgagttgtgggtgaagtgaaggaattggaaagtcccggtctaaggccctgcaaaactgctgtctggtaaaaacaagtgactatggcaaggccctgaatgtactacgtatagacttaagtcagtatttgtgcctaacagcaaagcatgccacaagaggctcctcaaaagccgggtaattgatgccattgttttcttgacctagttgaagagtcaaagaagagaaggtgatgcagaaacttctttccagtgaagtgacagatccaagcaaggaacacctgcctgtgaggggagcggtaggggagggggtagattcggcagcactcgggtagtggcagggaccacatattgtcggtgttaaccactgttatcactggcccaggtcgagtgaggacgagtcatttccccactaagcacttggggagtggcagggaccacatattgtcagtgttaaccactgttatgactggcccaggtcgggtgacgacgagccatttccgcactattgtcccttcttcctcactgcacccccagccctgcaccctcagctccaaatacacattctcgttcactcaacgtttgttgacacctagcgtgggccctgtgggatggggtaaaagttcggtgttgggaggagccccggtgacagatttttggttttggtggtggcttttgggcaaggacaggtcaattcataaaagatgacgccccaggtctggatcgaattctcctgggagccagaccaaagcaccttcctggactgcaaagtgtggaagccgccgcgggccgggcgcggggaggtgtcatgcgccggaacctgcgcttggggccaagctctggagctgacgcgcaggggcaaggcgccccgcgtcccggactggcggctccgcgcatgctcctcccaccggcgtcgcaggcctcgagaggctccggaagtactgggtgcagcctgatggcgcaggaggtagacacggcacagggcgccgagatgcggcggggcgcgggcgcggctcggggacgcgcttcctggtgctgggccctggcgctgctttggctcgcggtggttccgggctggtcccgggtctcgggcatcccctcccggcgccactggccggtgccctacaagcgctttgacttccgtccaaaacctgatccttattgtcaagctaagtatactttctgtccaactggctcacctatcccagttatggagggtgatgatgacattgaagtttttcgattacaagccccagtatgggaatttaaatatggagacctcctgggacacttgaaaattatgcatgatgccattggattcagaagtacattaactggcaagaactacacaatggaatggtatgaacttttccaacttggcaactgtacatttccccatctccgacctgaaatggatgcccctttctggtgtaatcaaggcgctgcctgcttttttgagggaattgatgatgttcactggaaggaaaatgggacattagttcaagtagcaactatatcaggaaacatgttcaaccaaatggcaaagtgggtgaaacaggacaatgaaacaggaatttattatgagacatggaatgtaaaagccagcccagaaaagggggcagagacatggtttgattcctacgactgttccaaatttgtgttaaggacctttaacaagttggctgaatttggagcagagttcaagaacatagaaaccaactatacaagaatatttctttacagtggagaacctacttatctgggaaatgaaacatctgtttttgggccaacaggaaacaagactcttggtttagccataaaaagattttattaccccttcaaaccacatttgccaactaaagaatttctgttgagtctcttgcaaatttttgatgcagtgattgtgcacaaacagttctatttgttttataattttgaatattggtttttacctatgaaattcccttttattaaaataacatatgaagaaatccctttacctatcagaaacaaaacactctctggtttataaaacaccttaattctactgctcttttttctccaatcaccagcatctgtttttcagggggtgattttacttttgtgaattccttagcctttcttccttggtgcataaagttaaaatgcacatcagcagaattgctgcatattaacatctcaggactcttctcttgtaaagaagctgaaattcgtactatattggccaaagtgagcgagttaggtgatcttggtttcaatttccgagcctttgttaatatggagaattatggttcatatcagttatgtaggacctttggacccagggtcctacagatagatatggtgtgcccagattttaaaaataccttcaaaaataaaaaatacattcagtgacattttcatggtgggagctcttctttctgatatggcagttacactttttcacttaagtgctttagtttagactaactttacaacttctataacttttggaaccaagtttagtatagtctgattacattccattcacctaactttagacattcgtttagacaccataactggagtgattgtgcttctagatgtggcaaatccagtgttaacacatatttctggctgagattttggaactagctagtaactggcttgtgttctttaagcatactaacatcactaaatcttaggatttaggattgctgtaaagatgtaagttgtgtatgtttggcaggtcacattgaatggcagtgataatgattaatcaaagaacaaatgtcatccttgatcttgcctaatgtagtttatgtgccaaactttccagggttttgtagtcacctagattttaagctgatagcatagtgcttcagcggttcttctaaccggggtatgcaggaacatggctgcagacacgtttgggtaaacaggcaccttctgacttcttcattgtttcctgtagttctccctcttcccacaaagctgtcagcgcagtggaagaggttgcacttctccgagagaggacaggtttctgttaagatcaccaagtagctgtgctttaattagagccagacaagctttcaaggtcctttaagtatttgatgatcaactgaacacgtttctattcaaggagaaaacaccattcagtaagaagatggagtagatatcagataaaacaattcacgtttaatatgtaaatgtaccaattatgtgattcagtttcaactttcaagtacttcctgagaggttagtacattattattgagctctcacagaaagcttaatcatagatataattaacctgatccaaatgagtaaagtggaccttagaaaggctaagtgatctttctctggctatccagctagtagtaatgaagtcaggtcttgaaccccggttctgctgactgaattggatgcactatagtacaggcttttagcaccgaagtgtggtcctcagaccagtgcctgccaaccagatgttactggtctgtgaggaaataagtacagatactgacaggaagcttttataaacaatttattggagtgtttttgtttctgttgggtctaattaaaaaaattggagcttgta

SEQ ID NO: 165613 - DNA, 1407 bp, Artificial Sequence
  derived and/or modified sequence
actgggtgcagcctgatggcgcaggaggtagacacggcacagggcgccgagatgcggcggggcgcgggcgcggctcggggacgcgcttcctggtgccctacaagcgctttgacttccgtccaaaacctgatccttattgtcaagctaagtatactttctgtccaactggctcacctatcccagttatggagggtgatgatgacattgaagtttttcgattacaagccccagtatgggaatttaaatatggagacctcctgggacacttgaaaattatgcatgatgccattggattcagaagtacattaactggcaagaactacacaatggaatggtatgaacttttccaacttggcaactgtacatttccccatctccgacctgaaatggatgcccctttctggtgtaatcaaggcgctgcctgcttttttgagggaattgatgatgttcactggaaggaaaatgggacattagttcaagtagcaactatatcaggaaacatgttcaaccaaatggcaaagtgggtgaaacaggacaatgaaacaggaatttattatgagacatggaatgtaaaagccagcccagaaaagggggcagagacatggtttgattcctacgactgttccaaatttgtgttaaggacctttaacaagttggctgaatttggagcagagttcaagaacatagaaaccaactatacaagaatatttctttacagtggagaacctacttatctgggaaatgaaacatctgtttttgggccaacaggaaacaagactcttggtttagccataaaaagattttattaccccttcaaaccacatttgccaactaaagaatttctgttgagtctcttgcaaatttttgatgcagtgattgtgcacaaacagttctatttgttttataattttgaatattggtttttacctatgaaattcccttttattaaaataacatatgaagaaatccctttacctatcagaaacaaaacactctctggtttataaaacaccttaattctactgctcttttttctccaatcaccagcatctgtttttcagggggtgattttacttttgtgaattccttagcctttcttccttggtgcataaagttaaaatgcacatcagcagaattgctgcatattaacatctcaggactcttctcttgtaaagaagctgaaattcgtactatattggccaaagtgagcgagttaggtgatcttggtttcaatttccgagcctttgttaatatggagaattatggttcatatcagttatgtaggacctttggacccagggtcctacagatagatatggtgtgcccagattttaaaaataccttcaaaaataaaaaatacattcagtgacattttcatggtgggagctcttctttctgatatggcag

SEQ ID NO: 165614 - DNA, 2120 bp, Artificial Sequence
  derived and/or modified sequence
actgggtgcagcctgatggcgcaggaggtagacacggcacagggcgccgagatgcggcggggcgcgggcgcggctcggggacgcgcttcctggtgctgggccctggcgctgctttggctcgcggtggttccgggctggtcccgggtctcgggcatcccctcccggcgccactggccggtgccctacaagcgctttgacttccgtccaaaacctgatccttattgtcaagctaagtatactttctgtccaactggctcacctatcccagttatggagggtgatgatgacattgaagtttttcgattacaagccccagtatgggaatttaaatatggagacctcctgggacacttgaaaattatgcatgatgccattggattcagaagtacattaactggcaagaactacacaatggaatggtatgaacttttccaacttggcaactgtacatttccccatctccgacctgaaatggatgcccctttctggtgtaatcaaggcgctgcctgcttttttgagggaattgatgatgttcactggaaggaaaatgggacattagttcaagtagcaactatatcaggaaacatgttcaaccaaatggcaaagtgggtgaaacaggacaatgaaacaggaatttattatgagacatggaatgtaaaagccagcccagaaaagggggcagagacatggtttgattcctacgactgttccaaatttgtgttaaggacctttaacaagttggctgaatttggagcagagttcaagaacatagaaaccaactatacaagaatatttctttacagtggagaacctacttatctgggaaatgaaacatctgtttttgggccaacaggaaacaagactcttggtttagccataaaaagattttattaccccttcaaaccacatttgccaactaaagaatttctgttgagtctcttgcaaatttttgatgcagtgattgtgcacaaacagttctatttgttttataattttgaatattggtttttacctatgaaattcccttttattaaaataacatatgaagaaatccctttacctatcagaaacaaaacactctctggtttataaaacaccttaattctactgctcttttttctccaatcaccagcatctgtttttcagggggtgattttacttttgtgaattccttagcctttcttccttggtgcataaagttaaaatgcacatcagcagaattgctgcatattaacatctcaggactcttctcttgtaaagaagctgaaattcgtactatattggccaaagtgagcgagttaggtgatcttggtttcaatttccgagcctttgttaatatggagaattatggttcatatcagttatgtaggacctttggacccagggtcctacagatagatatggtgtgcccagattttaaaaataccttcaaaaataaaaaatacattcagtgacattttcatggtgggagctcttctttctgatatggcagttacactttttcacttaagtgctttagtttagactaactttacaacttctataacttttggaaccaagtttagtatagtctgattacattccattcacctaactttagacattcgtttagacaccataactggagtgattgtgcttctagatgtggcaaatccagtgttaacacatatttctggctgagattttggaactagctagtaactggcttgtgttctttaagcatactaacatcactaaatcttaggatttaggattgctgtaaagatgtaagttgtgtatgtttggcaggtcacattgaatggcagtgataatgattaatcaaagaacaaatgtcatccttgatcttgcctaatgtagtttatgtgccaaactttccagggttttgtagtcacctagattttaagctgatagcatagtgcttcagcggttctgctgactgaattggatgcactatagtacaggcttttagcaccgaagtgtggtcctcagaccagtgcctgccaaccagatgttactggtctgtgaggaaataagtacagatactgacaggaagcttttataaacaatttattggagtgtttttgtttctgttgggtctaattaaaaaaattggagcttgt

SEQ ID NO: 165615 - DNA, 1224 bp, Artificial Sequence
  derived and/or modified sequence
atgagaagaaacctgagactgggccccagcagcggcgccgacgcccagggccagggcgcccccagacccggcctggccgcccccagaatgctgctgccccccgccagccaggccagcagaggcagcggcagcaccggctgcagcctgatggcccaggaggtggacaccgcccagggcgccgagatgagaagaggcgccggcgccgccagaggcagagccagctggtgctgggccctggccctgctgtggctggccgtggtgcccggctggagcagagtgagcggcatccccagcagaagacactggcccgtgccctacaagagattcgacttcagacccaagcccgacccctactgccaggccaagtacaccttctgccccaccggcagccccatccccgtgatggagggcgacgacgacatcgaggtgttcagactgcaggcccccgtgtgggagttcaagtacggcgacctgctgggccacctgaagatcatgcacgacgccatcggcttcagaagcaccctgaccggcaagaactacaccatggagtggtacgagctgttccagctgggcaactgcaccttcccccacctgagacccgagatggacgcccccttctggtgcaaccagggcgccgcctgcttcttcgagggcatcgacgacgtgcactggaaggagaacggcaccctggtgcaggtggccaccatcagcggcaacatgttcaaccagatggccaagtgggtgaagcaggacaacgagaccggcatctactacgagacctggaacgtgaaggccagccccgagaagggcgccgagacctggttcgacagctacgactgcagcaagttcgtgctgagaaccttcaacaagctggccgagttcggcgccgagttcaagaacatcgagaccaactacaccagaatcttcctgtacagcggcgagcccacctacctgggcaacgagaccagcgtgttcggccccaccggcaacaagaccctgggcctggccatcaagagattctactaccccttcaagccccacctgcccaccaaggagttcctgctgagcctgctgcagatcttcgacgccgtgatcgtgcacaagcagttctacctgttctacaacttcgagtactggttcctgcccatgaagttccccttcatcaagatcacctacgaggagatccccctgcccatcagaaacaagaccctgagcggcctgtag

SEQ ID NO: 165616 - DNA, 822 bp, Artificial Sequence
  derived and/or modified sequence
atggagggcgacgacgacatcgaggtgttcagactgcaggcccccgtgtgggagttcaagtacggcgacctgctgggccacctgaagatcatgcacgacgccatcggcttcagaagcaccctgaccggcaagaactacaccatggagtggtacgagctgttccagctgggcaactgcaccttcccccacctgagacccgagatggacgcccccttctggtgcaaccagggcgccgcctgcttcttcgagggcatcgacgacgtgcactggaaggagaacggcaccctggtgcaggtggccaccatcagcggcaacatgttcaaccagatggccaagtgggtgaagcaggacaacgagaccggcatctactacgagacctggaacgtgaaggccagccccgagaagggcgccgagacctggttcgacagctacgactgcagcaagttcgtgctgagaaccttcaacaagctggccgagttcggcgccgagttcaagaacatcgagaccaactacaccagaatcttcctgtacagcggcgagcccacctacctgggcaacgagaccagcgtgttcggccccaccggcaacaagaccctgggcctggccatcaagagattctactaccccttcaagccccacctgcccaccaaggagttcctgctgagcctgctgcagatcttcgacgccgtgatcgtgcacaagcagttctacctgttctacaacttcgagtactggttcctgcccatgaagttccccttcatcaagatcacctacgaggagatccccctgcccatcagaaacaagaccctgagcggcctgtag

SEQ ID NO: 165617 - DNA, 1077 bp, Artificial Sequence
  derived and/or modified sequence
atggcccaggaggtggacaccgcccagggcgccgagatgagaagaggcgccggcgccgccagaggcagagccagctggtgctgggccctggccctgctgtggctggccgtggtgcccggctggagcagagtgagcggcatccccagcagaagacactggcccgtgccctacaagagattcgacttcagacccaagcccgacccctactgccaggccaagtacaccttctgccccaccggcagccccatccccgtgatggagggcgacgacgacatcgaggtgttcagactgcaggcccccgtgtgggagttcaagtacggcgacctgctgggccacctgaagatcatgcacgacgccatcggcttcagaagcaccctgaccggcaagaactacaccatggagtggtacgagctgttccagctgggcaactgcaccttcccccacctgagacccgagatggacgcccccttctggtgcaaccagggcgccgcctgcttcttcgagggcatcgacgacgtgcactggaaggagaacggcaccctggtgcaggtggccaccatcagcggcaacatgttcaaccagatggccaagtgggtgaagcaggacaacgagaccggcatctactacgagacctggaacgtgaaggccagccccgagaagggcgccgagacctggttcgacagctacgactgcagcaagttcgtgctgagaaccttcaacaagctggccgagttcggcgccgagttcaagaacatcgagaccaactacaccagaatcttcctgtacagcggcgagcccacctacctgggcaacgagaccagcgtgttcggccccaccggcaacaagaccctgggcctggccatcaagagattctactaccccttcaagccccacctgcccaccaaggagttcctgctgagcctgctgcagatcttcgacgccgtgatcgtgcacaagcagttctacctgttctacaacttcgagtactggttcctgcccatgaagttccccttcatcaagatcacctacgaggagatccccctgcccatcagaaacaagaccctgagcggcctgtag

SEQ ID NO: 165618 - protein, 548 aa, Artificial Sequence
  derived and/or modified sequence
MKTPADTGFAFPDWAYKPESSPGSRQIQLWHFILELLRKEEYQGVIAWQGDYGEFVIKDPDEVARLWGVRKCKPQMNYDKLSRALRYYYNKRILHKTKGKRFTYKFNFNKLVLVNYPFIDVGLAGGAVPQSAPPVPSGGSHFRFPPSTPSEVLSPTEDPRSPPACSSSSSSLFSAVVARRLGRGSVSDCSDGTSELEEPLGEDPRARPPGPPDLGAFRGPPLARLPHDPGVFRVYPRPRGGPEPLSPFPVSPLAGPGSLLPPQLSPALPMTPTHLAYTPSPTLSPMYPSGGGGPSGSGGGSHFSFSPEDMKRYLQAHTQSVYNYHLSPRAFLHYPGLVVPQPQRPDKCPLPPMAPETPPVPSSASSSSSSSSSPFKFKLQPPPLGRRQRAAGEKAVAGADKSGGSAGGLAEGAGALAPPPPPPQIKVEPISEGESEEVEVTDISDEDEEDGEVFKTPRAPPAPPKPEPGEAPGASQCMPLKLRFKRRWSEDCRLEGGGGPAGGFEDEGEDKKVRGEGPGEAGGPLTPRRVSSDLQHATAQLSLEHRDS

SEQ ID NO: 165619 - protein, 473 aa, Artificial Sequence
  derived and/or modified sequence
MNYDKLSRALRYYYNKRILHKTKGKRFTYKFNFNKLVLVNYPFIDVGLAGGAVPQSAPPVPSGGSHFRFPPSTPSEVLSPTEDPRSPPACSSSSSSLFSAVVARRLGRGSVSDCSDGTSELEEPLGEDPRARPPGPPDLGAFRGPPLARLPHDPGVFRVYPRPRGGPEPLSPFPVSPLAGPGSLLPPQLSPALPMTPTHLAYTPSPTLSPMYPSGGGGPSGSGGGSHFSFSPEDMKRYLQAHTQSVYNYHLSPRAFLHYPGLVVPQPQRPDKCPLPPMAPETPPVPSSASSSSSSSSSPFKFKLQPPPLGRRQRAAGEKAVAGADKSGGSAGGLAEGAGALAPPPPPPQIKVEPISEGESEEVEVTDISDEDEEDGEVFKTPRAPPAPPKPEPGEAPGASQCMPLKLRFKRRWSEDCRLEGGGGPAGGFEDEGEDKKVRGEGPGEAGGPLTPRRVSSDLQHATAQLSLEHRDS

SEQ ID NO: 165620 - DNA, 2705 bp, Artificial Sequence
  derived and/or modified sequence
attaacccgggaggcggcggcggggaggggagaggctctgagaggcgaggccgggtgaggcggcgagggcggcccgacgggcgcgggacgggacggggcagcgagggcgccgggagccgcggcccggaatcggggcgcttcgccccgggccccccagcatgaagaccccggcggacacagggtttgccttcccggattgggcctacaagccagagtcgtcccctggctcaaggcagatccagctgtggcactttatcctggagctgctgcggaaggaggagtaccagggcgtcattgcctggcagggggactacggggaattcgtcatcaaagaccctgatgaggtggcccggctgtggggcgttcgcaagtgcaagccccagatgaattacgacaagctgagccgggccctgcgctattactataacaagcgcattctgcacaagaccaaggggaaacggttcacctacaagttcaatttcaacaaactggtgctggtcaattacccattcattgatgtggggttggctgggggtgcagtgccccagagtgccccgccagtgccgtcgggtggtagccacttccgcttccctccctcaacgccctccgaggtgctgtcccccaccgaggacccccgctcaccaccagcctgctcttcatcttcatcttccctcttctcggctgtggtggcccgccgcctgggccgaggctcagtcagtgactgtagtgatggcacgtcagagctggaggaaccgctgggagaggatccccgcgcccgaccacccggccctccggatctgggtgccttccgagggcccccgctggcccgcctgccccatgaccctggtgtcttccgagtctatccccggcctcggggtggccctgaacccctcagccccttccctgtgtcgcctctggccggtcctggatccctgctgccccctcagctctccccggctctgcccatgacgcccacccacctggcctacactccctcgcccacgctgagcccgatgtaccccagtggtggcggggggcccagcggctcagggggaggctcccacttctccttcagccctgaggacatgaaacggtacctgcaggcccacacccaaagcgtctacaactaccacctcagcccccgcgccttcctgcactaccctgggctggtggtgccccagccccagcgccctgacaagtgcccgctgccgcccatggcacccgagaccccaccggtcccctcctcggcctcgtcatcctcttcttcttcttcctccccattcaagtttaagctccagccgcccccactcggacgccggcagcgggcagctggggagaaggccgtagccggtgctgacaagagcggtggcagtgcaggcgggctggctgagggggcaggggcgctagccccaccgcccccgccaccacagatcaaggtggagcccatctcggaaggcgagtcggaggaggtagaggtgactgacatcagtgatgaggatgaggaagacggggaggtgttcaagacgccccgtgccccacctgcaccccctaagcctgagcccggcgaggcacccggggcatcccagtgcatgcccctcaagctacgctttaagcggcgctggagtgaagactgtcgcctcgaagggggtgggggccccgctgggggctttgaggatgagggtgaggacaagaaggtgcgtggggaggggcctggggaggctggggggcccctcaccccaaggcgggtgagctctgacctccagcatgccacggcccagctctccctggagcaccgagactcctgagggctgtgggcaggggacctgtgtgccccgcaccccccatgcttcttttgctgccttaagccccctatgccctggaggtgagggcagctctcttgtctcttccctgcctcctcccttttccctccccacattttgtataaaactttaatttcttttttttaaaaatggtgggggtgggtgggtgcccagggctaggggctattccctgtctctgtgggtttctaagctctgggcaaagtggtggtagggggagggagggggaagttaagggggtcacctccattctggggaatttatatttgaattgaggctttggccttaacacccaggaacttttctattacaatcgcttaggaagtaaagccttgtctccctccctgttctctgcctcttgtacccctctgacccacccgctctgccccactcccagccctcctcagccccagccctgcctgccctgcccctccagggggccatgagtgcctaggtttctcataccccacaaggtcacagcaggggagggagggacaattttataatgaaccaaaaattccatgtgttggggggtggggggcggaggagggtgaggggtgccgcccatgggccacaaatctctacaagtgcctgctatccctctcccactccccaccccagcaccggtccaaccccttcatccccagctgctcctaggactggcccatgggcaggcgggtggggggatgggaagggggtgccctgaaaccaaactggaagccccctctgcctcccagctggggcctctggggtggggtggggggctgtggtcaagccttattctgtattggggactgagggtggggggagtagaggggccgctggagaatgtattcaaaacaataaaactttggacctttggatgca

SEQ ID NO: 165621 - DNA, 1647 bp, Artificial Sequence
  derived and/or modified sequence
atgaaaaccccagcggacacagggttcgcatttcccgattgggcttacaagccagaatccagcccaggcagcagacagatacaactttggcacttcattctggagcttcttcgaaaggaggaatatcagggcgtcattgcttggcaaggtgactatggcgaattcgtgatcaaagaccccgatgaggtcgcccgcctctggggtgtgagaaaatgtaagccgcaaatgaattacgacaaattgtctagggctttgagatactactacaataagaggatcctgcacaaaacaaagggcaaaagattcacttataaattcaattttaacaaactagttctcgttaactatccatttattgacgtgggcctcgccggaggtgcagtccctcagtccgcccctccagttccgagcggggggtctcactttaggttcccaccctctacaccatccgaggtattgagcccaaccgaggatccgcgctccccgccggcctgctcatcttcgtcgtcgtcactcttcagtgccgtcgtggcgaggcggttgggacgggggtccgtttccgattgcagcgatggaacctctgagctcgaggaacccctcggcgaagacccgcgtgcccggccccccggcccaccggatctgggagctttcaggggacctcctttagcaaggctgccacacgaccctggcgtcttccgggtctacccgcggccacgagggggccccgaacccctctccccctttcctgtgagccctttggctggccctggctcattgctgcccccccagctctctcctgcactgcccatgactcctacccatctggcctacacccctagccccactttgagccctatgtatccctccgggggcggtggcccttcgggaagcggcggtgggagccatttctcttttagtccggaggatatgaagcgctacctgcaggcgcacactcagtctgtgtacaattatcatctgagcccacgggctttcctacactacccaggactggttgttccgcagccgcagcggccggacaagtgtccgcttcccccgatggcccccgaaacccctccggtgccctcgtctgcatcctctagctccagctccagcagtagtccattcaagtttaagcttcagccaccacctctcgggagacggcaaagggctgctggcgaaaaggccgtggccggcgcggacaagagtggaggatctgctggaggactggctgaaggggccggagcactcgcacccccgcctccgccaccccagatcaaagttgaaccaatatcagaaggcgaaagcgaagaagtcgaggtgaccgatatcagcgatgaagacgaggaggatggcgaggtgttcaaaacacccagggcgccgccagctcctccaaaaccagagcctggcgaagcccctggtgcctcccaatgcatgcccttgaagctacggtttaagagacgctggagtgaggactgcaggttggaaggtgggggtggaccagccggaggcttcgaggacgaaggtgaggacaagaaagtgcggggtgaagggcccggggaagccggcggcccgctgaccccgagacgggtgtcctcagatctgcagcacgccaccgcccaactgtccttggagcaccgagactcttag

SEQ ID NO: 165622 - DNA, 1647 bp, Artificial Sequence
  derived and/or modified sequence
atgaagaccccagctgacaccggctttgccttcccagactgggcctacaagccagagagcagccctggcagccggcagatccagctgtggcacttcatcctggagctgctgaggaaggaggagtaccagggcgtcatcgcctggcagggcgactatggagaatttgtgatcaaggaccctgatgaggtggcccggctgtggggcgtgaggaagtgcaagccccagatgaactatgacaagctgagccgggccctgcgctactactacaacaagaggatcctgcacaagaccaagggcaagcgcttcacctacaagttcaacttcaacaagctggtgctggtgaactaccccttcattgatgtgggcctggccggcggcgctgtgccccagagcgcccctcctgtgcccagcggcggcagccacttccgcttcccccccagcacccccagcgaggtgctgagccccacagaggaccccaggagccccccagcctgcagcagcagcagcagcagcctcttctctgctgtggtggcccggcggctgggccggggctctgtgtctgactgcagtgatggcaccagcgagctggaggagcccctgggggaggacccccgggcccggcccccaggccccccagacctgggcgccttccggggcccccccctggcccggctgccccatgaccccggggtcttccgggtgtacccccggccccggggcggccctgagcccctgagccccttccctgtgagccccctggccggccctggcagcctgctgcccccccagctgagccctgccctgcccatgacccccacccacctggcctacacccccagccccaccctgagccccatgtaccccagcggcggcggcggccccagcggcagcggcggcggcagccacttctccttcagccctgaggacatgaagcgctacctgcaggcccacacccagagcgtgtacaactaccacctgagcccccgggccttcctgcactacccaggcctggtggtgccccagccccagaggccagacaagtgccccctgccccccatggcccctgagaccccacctgtgcccagcagcgccagcagcagcagcagcagcagcagcagccccttcaagttcaagctgcagcccccacccctgggccggcggcagagagctgctggggagaaggctgtggccggggctgacaagagcggcggcagcgctgggggcctggccgagggcgctggggccctggcccctcctcctcctccaccccagatcaaggtggagcccatcagcgagggggagagcgaggaggtggaggtgacagacatcagtgatgaagatgaagaagatggagaggtgttcaagaccccccgggcccccccagccccacccaagccagagcccggggaggcccctggggccagccagtgcatgcccctgaagctgcgcttcaagaggcgctggagcgaggactgccgcctggagggcggcggcggccctgctgggggctttgaagatgaaggagaggacaagaaggtgcggggggagggccctggagaggccggcggccccctgaccccccggcgggtgtccagtgacctgcagcacgccacagcccagctgagcctggagcaccgggacagctag

SEQ ID NO: 165623 - DNA, 1647 bp, Artificial Sequence
  derived and/or modified sequence
atgaagacccccgccgacaccggcttcgccttccccgactgggcctacaagccagagagctcgcccggttcaaggcaaatccagctttggcactttatattggagcttttacgaaaggaagagtaccagggagttatcgcgtggcagggcgactacggcgagtttgtaatcaaggaccctgacgaggtggccaggctctggggggtacgtaagtgtaagcctcaaatgaattacgacaagctctctagagccctccggtattattacaacaagcggattctacataaaacaaaaggtaagcggttcacttataaatttaattttaacaagctggtgctggttaactacccttttattgacgttggcctcgctggaggagctgtgccgcagagcgcaccccccgtgccctctggcgggtctcattttagatttcccccttctaccccctccgaggtactgtccccgacagaagacccgcggtcccctccagcttgtagcagcagttccagcagcctgttttcggccgttgtagccaggcgactgggaagaggctcagtgagtgactgttcggacggtacgagcgaactggaggagccgcttggtgaagacccaagagcccgtccgcccgggccacctgatctcggcgcctttcgcggcccccctctcgcacggttaccccacgaccccggcgtattcagagtttacccacgcccacgaggcggtcccgaacccttgtcgccgttccctgtgtccccgctagctggacctgggagcctgctgccaccacagctctctccagccttacctatgactcccacccacctggcctataccccttctcctacactgtcacccatgtatccttctggggggggtgggccgtcaggctctggcggcgggtctcacttcagctttagccccgaagacatgaaacgatatctacaggcacacacccagtctgtgtataactatcacctttccccccgggcttttcttcactacccaggactggttgtgccacagccccaacgcccagacaaatgtccactccctccaatggctcccgagacacctcccgtgcctagctcagcatcaagcagttcttcaagttccagtagccccttcaaatttaaattgcagcccccaccactaggacgcagacagagagcagctggggaaaaggccgtggcaggagccgacaaatcaggaggcagtgccggtgggctcgcagaaggggcaggcgcactcgccccccccccaccccctcctcagatcaaagtggagccgatcagcgaaggcgaaagcgaagaggttgaagttacagacatctccgatgaggatgaagaggacggagaagtattcaaaacccccagggccccccctgccccaccaaaacctgagcccggcgaagctcccggagctagccagtgcatgccactcaagctgagattcaaaagacggtggtccgaagattgcaggctggaggggggtgggggccccgcaggagggttcgaagatgaaggagaggataaaaaggtgcggggcgagggaccaggggaagcaggcgggcctctgactcctagacgtgtttcttccgacctgcagcatgccacagcccaattgtcccttgaacaccgcgattcctag

SEQ ID NO: 165624 - DNA, 1647 bp, Artificial Sequence
  derived and/or modified sequence
atgaagacacctgcagacaccggtttcgcgttcccagactgggcgtataagccggagagcagcccagggagccgtcagatacagctctggcacttcattctggagttactgcggaaggaggagtaccagggtgttatagcatggcagggcgactatggggaattcgtgattaaggaccctgatgaggttgctaggctctggggcgttagaaagtgtaaaccgcagatgaactatgacaaactgagtcgcgcattgcggtattactacaacaagaggattctgcataagactaaggggaaacgatttacttataaatttaattttaataagctcgtattggtgaattacccgttcattgacgtaggactagccggaggtgcagtgccccaaagcgccccacccgtcccaagcggcggatcccacttccggtttccgccttcaactccttccgaggtgttatcacctacagaggaccctagatccccacccgcatgctcttcctcgagctccagcttgttctctgccgtcgtagctagaagactgggtaggggctcggtcagcgactgtagtgatggcacctctgagcttgaagaacctctgggggaggacccacgtgcccgacctccagggccacctgacctaggggcatttcggggaccgcctctggccagattaccccacgatcctggcgtgtttagagtgtacccaagacctcgaggcggacccgaacccttgtcgccttttcccgtctccccactagccggtcctgggagtctgctgccgccacagctatcacccgcactgccaatgactcccacccatttggcctacaccccgtcccctacactatctcctatgtatcccagtgggggtggagggcctagtggcagcggcggtggctctcatttttcatttagccctgaagacatgaaacgctacctccaagcccacacccaatccgtgtataactaccatctttctccacgagcattcctgcactatcctgggttggtggtaccacagccccaaaggcctgataagtgtccgcttcctcctatggcacccgagactccccctgtgccatccagcgccagtagctctagctcttcctcgtcttctccatttaaattcaagctacagccccctccgttggggagaaggcagagggcggcaggggaaaaagcagtcgctggagccgataagtcgggcggatcagccggagggctcgctgaaggcgcaggggctctcgctcctccaccccctccgcctcaaatcaaggtggaacctatctccgagggcgaaagtgaggaagtagaagtcactgacatcagcgacgaggacgaggaggacggggaggttttcaagaccccccgagcccctcccgcaccccctaaacccgagcctggagaggctcctggggcttcacaatgtatgcccctcaaactgagattcaagaggcgctggagtgaagactgccgcctggagggagggggaggacctgcagggggattcgaggatgagggggaagacaagaaagtacgcggagaaggtcccggtgaggcgggaggcccacttacgccaagacgcgtaagctctgatcttcagcacgcaacagctcagctgtcattggagcatagggactcttag

SEQ ID NO: 165625 - DNA, 1647 bp, Artificial Sequence
  derived and/or modified sequence
atgaagacccccgccgacaccggcttcgccttccccgactgggcctacaagcccgagagcagccccggcagcagacagatccagctgtggcacttcatcctggagctgctgagaaaggaggagtaccagggcgtgatcgcctggcagggcgactacggcgagttcgtgatcaaggaccccgacgaggtggccagactgtggggcgtgagaaagtgcaagccccagatgaactacgacaagctgagcagagccctgagatactactacaacaagagaatcctgcacaagaccaagggcaagagattcacctacaagttcaacttcaacaagctggtgctggtgaactaccccttcatcgacgtgggcctggccggcggcgccgtgccccagagcgccccccccgtgcccagcggcggcagccacttcagattcccccccagcacccccagcgaggtgctgagccccaccgaggaccccagaagcccccccgcctgcagcagcagcagcagcagcctgttcagcgccgtggtggccagaagactgggcagaggcagcgtgagcgactgcagcgacggcaccagcgagctggaggagcccctgggcgaggaccccagagccagaccccccggcccccccgacctgggcgccttcagaggcccccccctggccagactgccccacgaccccggcgtgttcagagtgtaccccagacccagaggcggccccgagcccctgagccccttccccgtgagccccctggccggccccggcagcctgctgcccccccagctgagccccgccctgcccatgacccccacccacctggcctacacccccagccccaccctgagccccatgtaccccagcggcggcggcggccccagcggcagcggcggcggcagccacttcagcttcagccccgaggacatgaagagatacctgcaggcccacacccagagcgtgtacaactaccacctgagccccagagccttcctgcactaccccggcctggtggtgccccagccccagagacccgacaagtgccccctgccccccatggcccccgagaccccccccgtgcccagcagcgccagcagcagcagcagcagcagcagcagccccttcaagttcaagctgcagcccccccccctgggcagaagacagagagccgccggcgagaaggccgtggccggcgccgacaagagcggcggcagcgccggcggcctggccgagggcgccggcgccctggcccccccccccccccccccccagatcaaggtggagcccatcagcgagggcgagagcgaggaggtggaggtgaccgacatcagcgacgaggacgaggaggacggcgaggtgttcaagacccccagagccccccccgccccccccaagcccgagcccggcgaggcccccggcgccagccagtgcatgcccctgaagctgagattcaagagaagatggagcgaggactgcagactggagggcggcggcggccccgccggcggcttcgaggacgagggcgaggacaagaaggtgagaggcgagggccccggcgaggccggcggccccctgacccccagaagagtgagcagcgacctgcagcacgccaccgcccagctgagcctggagcacagagacagctag

SEQ ID NO: 165626 - DNA, 2032 bp, Artificial Sequence
  derived and/or modified sequence
gtgcggggcgggggggctcgtccaccgggcccgctatccctggttctgcgctgcgcggtcctgctggtgaccttcacggcggcgcgtgccctgcaccagggtttgccttcccggattgggcctacaagccagagtcgtcccctggctcaaggcagatccagctgtggcactttatcctggagctgctgcggaaggaggagtaccagggcgtcattgcctggcagggggactacggggaattcgtcatcaaagaccctgatgaggtggcccggctgtggggcgttcgcaagtgcaagccccagatgaattacgacaagctgagccgggccctgcgctattactataacaagcgcattctgcacaagaccaaggggaaacggttcacctacaagttcaatttcaacaaactggtgctggtcaattacccattcattgatgtggggttggctgggggtgcagtgccccagagtgccccgccagtgccgtcgggtggtagccacttccgcttccctccctcaacgccctccgaggtgctgtcccccaccgaggacccccgctcaccaccagcctgctcttcatcttcatcttccctcttctcggctgtggtggcccgccgcctgggccgaggctcagtcagtgactgtagtgatggcacgtcagagctggaggaaccgctgggagaggatccccgcgcccgaccacccggccctccggatctgggtgccttccgagggcccccgctggcccgcctgccccatgaccctggtgtcttccgagtctatccccggcctcggggtggccctgaacccctcagccccttccctgtgtcgcctctggccggtcctggatccctgctgccccctcagctctccccggctctgcccatgacgcccacccacctggcctacactccctcgcccacgctgagcccgatgtaccccagtggtggcggggggcccagcggctcagggggaggctcccacttctccttcagccctgaggacatgaaacggtacctgcaggcccacacccaaagcgtctacaactaccacctcagcccccgcgccttcctgcactaccctgggctggtggtgccccagccccagcgccctgacaagtgcccgctgccgcccatggcacccgagaccccaccggtcccctcctcggcctcgtcatcctcttcttcttcttcctccccattcaagtttaagctccagccgcccccactcggacgccggcagcgggcagctggggagaaggccgtagccggtgctgacaagagcggtggcagtgcaggcgggctggctgagggggcaggggcgctagccccaccgcccccgccaccacagatcaaggtggagcccatctcggaaggcgagtcggaggaggtagaggtgactgacatcagtgatgaggatgaggaagacggggaggtgttcaagacgccccgtgccccacctgcaccccctaagcctgagcccggcgaggcacccggggcatcccagtgcatgcccctcaagctacgctttaagcggcgctggagtgaagactgtcgcctcgaagggggtgggggccccgctgggggctttgaggatgagggtgaggacaagaaggtgcgtggggaggggcctggggaggctggggggcccctcaccccaaggcgggtgagctctgacctccagcatgccacggcccagctctccctggagcaccgagactcctgagggctgtgggcaggggacctgtgtgccccgcaccccccatgcttcttttgctgccttaagccccctatgccctggaggtgagggcagctctcttgtctcttccctgcctcctcccttttccctccccacattttgtataaaactttaatttcttttttttaaaaatggtgggggtgggtgggtgcccagggctaggggctattccctgtctctgtgggtttctaagctctgggcaaagtggtggtagggggagggagggggaagttaagggggtcacctccattctggggaatttatatttgaattga

SEQ ID NO: 165627 - DNA, 1347 bp, Artificial Sequence
  derived and/or modified sequence
atggacccaaagtacttcattctaatcctcttctgtggccacctgaataatacttttttcagcaaaacagaaactatcacaaccgagaagcagagccagccaacgctctttacaagttctatgtcgcaggtcctggcaaacagtcagaacacaacaggaaatccgttggggcagcccacccagttttctgacactttctccgggcaatccatctcacccgccaaagtgactgctggacagccaaccccagcagtatacacgagttcagaaaaacctgaggctcacaccagtgccggacaacccctcgcctataacaccaagcagcccaccccaatagcaaatacatcttcacaacaagccgtgtttacaagtgccagacagctgcccagcgctagaacttctactacgcagcctcccaagtcctttgtttataccttcacgcagcaatcctcctctgttcagattccgagcagaaaacagatcacagtgcataacccgagtacacagccgacaagcaccgtgaagaactctcccagaagcacacccggattcatactggacaccacttctaataaacagacgcctcagaaaaacaattataattccattgccgctatattaatcggagtgctcttgacctctatgctggtcgccattataataatagtactgtggaagtgtctgcgtaagccagtcttaaatgaccaaaactgggccggtagatccccattcgccgatggcgaaacccccgatatctgtatggataacattagagagaatgagattagcacaaaaagaacaagcattatcagcttgacaccctggaagccatccaagagcaccctgcttgctgacgacctcgagattaagcttttcgaatcatctgagaacatagaagattctaacaatccaaagaccgagaagatcaaggatcaggtgaatggaactagcgaagattccgcggacggttccaccgtggggacagccgtgtcgagcagcgacgacgccgatcttccgcctccccctcctttgctagatctggaggggcaggagtcaaatcagtccgacaaacccaccatgactattgtgtctcccctgcccaacgacagtacaagtttgccaccctcactggattgcctgaaccaggactgcggagaccacaagtccgaaatcattcagtctttccccccgctggactctctcaacctgcctcttccccccgtagatttcatgaaaaaccaggaagatagcaacttggagatccagtgtcaggaattctccattccccccaactcagatcaagatcttaatgaatccctgcccccacctccggcagagctgctatag

SEQ ID NO: 165628 - DNA, 1347 bp, Artificial Sequence
  derived and/or modified sequence
atggaccccaagtacttcatcctgatcctcttctgtggccacctgaacaacaccttcttcagcaagacagagaccatcaccacagagaagcagagccagcccaccctcttcaccagctccatgagccaggtgctggccaacagccagaacaccaccggcaaccccctgggccagcccacccagttcagtgacaccttcagcggccagagcatcagccctgccaaggtgacagctggccagcccaccccagctgtgtacaccagcagcgagaagccagaggcccacaccagcgctggccagcccctggcctacaacaccaagcagcccacccccatcgccaacaccagcagccagcaggccgtgttcaccagcgcccggcagctgcccagcgcccggaccagcaccacccagccccccaagagctttgtgtacaccttcacccagcagagcagctctgtgcagatccccagcaggaagcagatcaccgtgcacaaccccagcacccagcccaccagcacagtgaagaacagccccaggagcaccccaggcttcatcctggacaccaccagcaacaagcagaccccccagaagaacaactacaacagcattgctgccatcctgattggagtgctgctgacctccatgctggtggccatcatcatcatcgtgctgtggaagtgcctgaggaagcctgtgctgaatgaccagaactgggccggccgcagcccctttgctgatggagagaccccagacatctgcatggacaacatcagagaaaatgagatcagcaccaagaggaccagcatcatcagcctgaccccctggaagcccagcaagagcaccctgctggctgatgacctggagatcaagctgtttgagagcagcgagaacatcgaggacagcaacaaccccaagacagagaagatcaaggaccaggtgaatggcaccagcgaggacagcgcagatggcagcacagtgggcacagctgtgagcagcagtgatgatgctgacctgcccccacctccacccctgctggacctggagggccaggagagcaaccagagcgacaagcccaccatgaccatcgtgagccccctgcccaatgacagcaccagcctgccccccagcctggactgcctgaaccaggactgtggggaccacaagtctgagatcatccagagcttcccccccctggacagcctgaacctgcccctgccccctgtggacttcatgaagaaccaggaggacagcaacctggagatccagtgccaggagttcagcatcccccccaacagcgaccaggacctgaatgaaagcctgcccccacctcctgctgagctgctgtag

SEQ ID NO: 165629 - DNA, 1347 bp, Artificial Sequence
  derived and/or modified sequence
atggaccccaagtacttcatcctgatcctgttctgcggccacctgaacaatactttcttctctaaaaccgagaccatcacaaccgaaaaacagagccaacctaccctgttcaccagctcaatgtcccaggttctggcaaattcccagaataccaccggtaatcctctggggcagccgactcagttcagcgacaccttctcaggccaatcgatctcccccgctaaagtcacagcaggccaaccaacacctgcagtttataccagcagcgaaaaacccgaggcacacacgtccgctgggcagccgctcgcctataatactaagcagccaacacccatcgccaatacctccagccagcaggccgtgtttacgtccgcccgccagcttccgtctgctcggaccagtactacccaacctccaaaaagttttgtctacacatttacccagcagtcatcttcagtccaaatcccaagcagaaaacagattacggtgcataatcctagcactcagcccaccagcaccgtaaaaaattctcctaggagcactccaggctttattctggatactaccagtaacaaacagactccacagaaaaataattataactcgattgccgccatcttaatcggagtcctgctgaccagtatgcttgtcgcgattatcatcatcgtgttatggaagtgcctcaggaagcctgtgctcaatgaccagaattgggcaggcaggtctccgttcgctgacggggagacccctgatatctgcatggacaacattcgtgagaatgaaatcagcacgaagagaacatccataatctctctgactccatggaagccatctaaatcaacccttctggcggatgatctcgaaattaagctcttcgaatcttccgaaaacatagaggactctaacaacccaaagaccgaaaagatcaaggatcaggtaaatggtacttcagaggacagtgctgacggttccaccgtcggtactgctgtaagtagttctgacgacgcggatctgcctcctcccccccccctcttagaccttgagggccaggaatcaaatcagtcagataaacccacgatgacaatcgtatcaccgcttcctaatgactctactagcctgcctcccagtctcgactgcttgaaccaggattgtggagaccataaaagcgaaatcatacaatccttcccaccacttgatagccttaacctgcccttacctccagtggattttatgaaaaaccaagaagactcaaacttggagattcaatgccaggagttctccatcccacctaattccgaccaggacttgaacgaatctctgccacctcccccagccgagctcctctag

SEQ ID NO: 165630 - DNA, 1347 bp, Artificial Sequence
  derived and/or modified sequence
atggatcctaagtacttcatcctcattctcttctgtggccacctaaacaatacattcttcagcaagactgagacaatcactaccgaaaagcagagccagcctactctttttacatcatccatgagtcaggtcctggcgaattctcagaacactacaggcaatccgctgggtcagccgacccagttttcagacacttttagtggccagtccatttcgcctgctaaggtgaccgctggccaacctactcctgccgtctacacaagcagcgaaaaaccagaggcccacacatccgcgggacagccacttgcctacaacaccaaacagcctacaccgattgccaatacatcaagccagcaggccgtgtttaccagcgccagacagttgccctccgccagaacgagcaccacccagccgcctaaatcttttgtgtacacctttacacagcaatcctccagcgtgcaaattcccagccggaaacagataaccgtgcataacccctctactcaacctacatctactgtgaagaattctcctcgctctacaccgggttttatactggacacaactagcaataagcagactccccagaagaataactacaacagcatcgctgccatccttataggagtgttgctgacttcgatgctggttgccatcatcattatcgtcctgtggaagtgcctacgcaagccagtgctgaacgaccagaattgggcgggacgaagcccttttgccgatggcgaaactcccgatatctgtatggataacatacgggagaatgagatttctaccaaacggacttcaatcatttcccttaccccttggaaaccctctaaatctactttgttagctgacgacctcgagatcaaattgttcgaatcttcagagaatatagaggattccaacaatcccaaaacggagaaaatcaaggatcaggtcaacgggacctccgaggacagcgctgatgggagcacagtcggtactgccgtgtcgtctagcgacgatgcagacttgcccccacccccaccactgttggatctggaagggcaggagagcaaccagtctgacaaaccaacaatgactattgtgagccccctaccaaacgatagcacttcactgcccccatccctcgactgtttaaatcaggattgcggggatcataagagtgagattatccagtccttccccccacttgatagcctgaacttgcccctacccccagttgatttcatgaagaatcaggaagatagtaacctggaaattcagtgtcaggagttcagcattccacctaatagcgatcaggacctgaatgagtcgctgccccctccccctgccgagctgctgtag

SEQ ID NO: 165631 - DNA, 1347 bp, Artificial Sequence
  derived and/or modified sequence
atggaccccaagtacttcatcctgatcctgttctgcggccacctgaacaacaccttcttcagcaagaccgagaccatcaccaccgagaagcagagccagcccaccctgttcaccagcagcatgagccaggtgctggccaacagccagaacaccaccggcaaccccctgggccagcccacccagttcagcgacaccttcagcggccagagcatcagccccgccaaggtgaccgccggccagcccacccccgccgtgtacaccagcagcgagaagcccgaggcccacaccagcgccggccagcccctggcctacaacaccaagcagcccacccccatcgccaacaccagcagccagcaggccgtgttcaccagcgccagacagctgcccagcgccagaaccagcaccacccagccccccaagagcttcgtgtacaccttcacccagcagagcagcagcgtgcagatccccagcagaaagcagatcaccgtgcacaaccccagcacccagcccaccagcaccgtgaagaacagccccagaagcacccccggcttcatcctggacaccaccagcaacaagcagaccccccagaagaacaactacaacagcatcgccgccatcctgatcggcgtgctgctgaccagcatgctggtggccatcatcatcatcgtgctgtggaagtgcctgagaaagcccgtgctgaacgaccagaactgggccggcagaagccccttcgccgacggcgagacccccgacatctgcatggacaacatcagagagaacgagatcagcaccaagagaaccagcatcatcagcctgaccccctggaagcccagcaagagcaccctgctggccgacgacctggagatcaagctgttcgagagcagcgagaacatcgaggacagcaacaaccccaagaccgagaagatcaaggaccaggtgaacggcaccagcgaggacagcgccgacggcagcaccgtgggcaccgccgtgagcagcagcgacgacgccgacctgcccccccccccccccctgctggacctggagggccaggagagcaaccagagcgacaagcccaccatgaccatcgtgagccccctgcccaacgacagcaccagcctgccccccagcctggactgcctgaaccaggactgcggcgaccacaagagcgagatcatccagagcttcccccccctggacagcctgaacctgcccctgccccccgtggacttcatgaagaaccaggaggacagcaacctggagatccagtgccaggagttcagcatcccccccaacagcgaccaggacctgaacgagagcctgccccccccccccgccgagctgctgtag

SEQ ID NO: 165632 - DNA, 2145 bp, Artificial Sequence
  derived and/or modified sequence
atgctggacaccatggaggcccccggccacagcagacagctgctgctgcagctgaacaaccagagaaccaagggcttcctgtgcgacgtgatcatcgtggtgcagaacgccctgttcagagcccacaagaacgtgctggccgccagcagcgcctacctgaagagcctggtggtgcacgacaacctgctgaacctggaccacgacatggtgagccccgccgtgttcagactggtgctggacttcatctacaccggcagactggccgacggcgccgaggccgccgccgccgccgccgtggcccccggcgccgagcccagcctgggcgccgtgctggccgccgccagctacctgcagatccccgacctggtggccctgtgcaagaagagactgaagagacacggcaagtactgccacctgagaggcggcggcggcggcggcggcggctacgccccctacggcagacccggcagaggcctgagagccgccacccccgtgatccaggcctgctaccccagccccgtgggccccccccccccccccgccgccgagccccccagcggccccgaggccgccgtgaacacccactgcgccgagctgtacgccagcggccccggccccgccgccgccctgtgcgccagcgagagaagatgcagccccctgtgcggcctggacctgagcaagaagagcccccccggcagcgccgcccccgagagacccctggccgagagagagctgccccccagacccgacagcccccccagcgccggccccgccgcctacaaggagccccccctggccctgcccagcctgccccccctgcccttccagaagctggaggaggccgccccccccagcgaccccttcagaggcggcagcggcagccccggccccgagccccccggcagacccgacggccccagcctgctgtacagatggatgaagcacgagcccggcctgggcagctacggcgacgagctgggcagagagagaggcagccccagcgagagatgcgaggagagaggcggcgacgccgccgtgagccccggcggcccccccctgggcctggcccccccccccagataccccggcagcctggacggccccggcgccggcggcgacggcgacgactacaagagcagcagcgaggagaccggcagcagcgaggaccccagcccccccggcggccacctggagggctacccctgcccccacctggcctacggcgagcccgagagcttcggcgacaacctgtacgtgtgcatcccctgcggcaagggcttccccagcagcgagcagctgaacgcccacgtggaggcccacgtggaggaggaggaggccctgtacggcagagccgaggccgccgaggtggccgccggcgccgccggcctgggcccccccttcggcggcggcggcgacaaggtggccggcgcccccggcggcctgggcgagctgctgagaccctacagatgcgccagctgcgacaagagctacaaggaccccgccaccctgagacagcacgagaagacccactggctgaccagaccctacccctgcaccatctgcggcaagaagttcacccagagaggcaccatgaccagacacatgagaagccacctgggcctgaagcccttcgcctgcgacgcctgcggcatgagattcaccagacagtacagactgaccgagcacatgagaatccacagcggcgagaagccctacgagtgccaggtgtgcggcggcaagttcgcccagcagagaaacctgatcagccacatgaagatgcacgccgtgggcggcgccgccggcgccgccggcgccctggccggcctgggcggcctgcccggcgtgcccggccccgacggcaagggcaagctggacttccccgagggcgtgttcgccgtggccagactgaccgccgagcagctgagcctgaagcagcaggacaaggccgccgccgccgagctgctggcccagaccacccacttcctgcacgaccccaaggtggccctggagagcctgtaccccctggccaagttcaccgccgagctgggcctgagccccgacaaggccgccgaggtgctgagccagggcgcccacctggccgccggccccgacggcagaaccatcgacagattcagccccacctag

SEQ ID NO: 165633 - DNA, 2145 bp, Artificial Sequence
  derived and/or modified sequence
atgctcgataccatggaggccccagggcattcacgccagttactgctccagctcaataatcaaaggacaaaagggttcctgtgcgacgtaattattgtagtgcagaacgcactgttccgtgcacataagaatgtcctagccgccagttctgcgtatctcaagtctctggtagtccatgacaacctccttaatctggatcacgatatggtatcaccagctgtattccgattagtgcttgactttatatacaccggaagacttgcggacggagccgaggctgccgctgccgcagcagtggctccaggggcagagccttcattgggcgccgtactggccgccgcctcctatctgcagattccagacctggtggccctgtgtaagaagcgtctcaagaggcatggcaaatattgccatcttcgaggtggaggaggtgggggtggagggtatgctccttatggtcgacccgggcgcgggctccgagccgccacccctgtaattcaagcatgttaccctagccccgtgggcccacctccccccccagctgccgagcctccctccggacccgaagctgctgtgaacacccactgcgcagagctgtacgcatccggaccagggcccgctgccgcattgtgtgcaagtgagcggcgatgctcgccgctgtgcggccttgatctgagcaaaaagagccctcccggtagtgcagctcccgaacgaccattggcagagcgagagctgccgccccgccccgattctccaccatctgccgggcctgccgcctataaggaaccaccgctagccttgccctctctgccgccccttcccttccagaaactggaggaggctgccccacctagcgaccccttcagaggcgggtcagggtccccagggcctgaaccccctggccgtccagatgggccttctctgttatatcgctggatgaagcacgaacccgggctcggttcctacggagatgagctgggaagggagcgtggttccccctccgagaggtgcgaggaacgaggcggggacgctgccgtgagtcctggcggaccaccgttgggcctggctcctcctccgcgttaccccgggagcctcgacggacccggggctggtggtgacggagatgactacaaatccagctctgaagagaccgggtcctccgaagatccatcccctcctgggggccatctggagggctacccatgtccacaccttgcctatggcgagcccgagagtttcggggacaacctttacgtgtgcatcccttgtgggaaggggttcccctccagtgagcaactgaatgcccatgtggaggctcatgtcgaagaagaggaagctctttatggccgggccgaggcagccgaggtcgcggccggcgcggcaggactggggcccccttttggaggcggcggagacaaagtcgcaggtgccccagggggcctgggggagctgctgcggccttatcgatgtgcctcttgtgacaagagttacaaagacccggctactctgaggcaacatgagaaaacccactggcttacaagaccttacccctgcactatctgcggaaaaaagtttacccagagaggtacaatgactcgacacatgcggtcacatcttggcctgaagccttttgcatgcgatgcgtgtggaatgcggttcacccggcagtataggctgactgagcatatgcggattcatagcggggaaaaaccctacgaatgccaggtctgcggtggtaagtttgctcaacagagaaatcttatctcccatatgaagatgcatgccgtgggcggtgcggcaggcgccgctggcgcgctcgccggcctcgggggcctgcctggggtaccaggccctgatggaaagggcaagctagattttccagaaggggtatttgccgtggcgcgcctgacagccgagcaactttctttgaagcaacaagataaggccgcagcggctgaactactcgctcagaccacccatttcttgcacgacccgaaagtggccttagagtctctgtacccgttggccaagtttactgccgaactcgggctgtcgccagacaaagcggccgaggtcctcagccaaggcgctcatctcgcagctggtcctgacggccggacaatcgatcggttctcaccaacttag

SEQ ID NO: 165634 - DNA, 2145 bp, Artificial Sequence
  derived and/or modified sequence
atgctggacaccatggaggcccctggccacagccggcagctgctgctgcagctgaacaaccagaggaccaagggcttcctgtgtgatgtgatcatcgtggtgcagaatgccctcttccgggcccacaagaatgtgctggccgccagcagcgcctacctgaagagcctggtggtgcatgacaacctgctgaacctggaccatgacatggtgtccccagctgtgttccggctggtgctggacttcatctacacaggccgcctggctgatggagctgaggccgctgctgctgctgctgtggcccctggagctgagcccagcctgggcgctgtgctggccgccgccagctacctgcagatcccagacctggtggccctgtgcaagaagaggctgaagagacatggcaagtactgccacctgcggggcggcggcggcggcggcggcggctacgccccctacggccggcccggccggggcctgcgggccgccacccctgtgatccaggcctgctaccccagccctgtgggccccccacctcctcctgctgctgagccccccagcggccctgaggccgctgtgaacacccactgtgccgagctgtatgccagcggccctggccctgctgctgccctgtgtgccagcgagcggcgctgcagccccctgtgtggcctggacctgagcaagaagagccccccaggcagcgctgcccctgagcggcccctggccgagcgggagctgccccccaggccagacagcccccccagcgctggccctgctgcctacaaggagccccccctggccctgcccagcctgccccccctgcccttccagaagctggaggaggccgcccccccaagtgaccccttccggggcggcagcggcagccctggccctgagcccccaggccgcccagatggccccagcctgctgtaccgctggatgaagcatgagcccggcctgggcagctatggagatgagctgggccgggagcggggcagccccagcgagcgctgtgaggagagaggaggagatgctgctgtgtcccctgggggcccccccctgggcctggcccccccaccccgctacccaggcagcctggatggccctggagctggaggagatggagatgactacaagagcagcagcgaggagaccggcagcagcgaggaccccagccccccaggcggccacctggagggctacccctgcccccacctggcctatggagagcctgagagctttggagacaacctgtatgtgtgcatcccctgtgggaagggcttccccagcagcgagcagctgaatgcccacgtggaggcccacgtggaggaggaggaggccctgtatggccgggcagaggccgctgaggtggccgccggggctgctggcctgggccccccatttggaggcggcggggacaaggtggccggggcccctgggggcctgggggagctgctgcggccctaccgctgtgccagctgtgacaagagctacaaggaccctgccaccctgcggcagcacgagaagacccactggctgacccggccctacccctgcaccatctgtgggaagaagttcacccagaggggcaccatgaccaggcacatgaggagccacctgggcctgaagccctttgcctgtgatgcctgtggcatgaggttcacccggcagtaccgcctgacagagcacatgaggatccacagcggggagaagccctatgagtgccaggtgtgtggcggcaagtttgcccagcagaggaacctgatcagccacatgaagatgcatgctgtgggcggggccgccggggctgctggggccctggccggcctgggcggcctgcccggggtgcccggcccagatggcaagggcaagctggacttccctgagggcgtgtttgctgtggcccggctgacagctgagcagctgagcctgaagcagcaggacaaggctgctgctgctgagctgctggcccagaccacccacttcctgcatgaccccaaggtggccctggagagcctgtaccccctggccaagttcaccgctgagctgggcctgagcccagacaaggctgctgaggtgctgagccagggcgcccacctggccgccggcccagatggccgcaccatcgaccgcttcagccccacctag

SEQ ID NO: 165635 - DNA, 2145 bp, Artificial Sequence
  derived and/or modified sequence
atgctggacaccatggaggcccccggccacagccggcagctgctgctccagctgaataaccagcggactaaagggtttctctgtgatgttatcatcgtggtgcagaatgccctgttccgagcccataagaacgtgctggctgcgagctccgcgtacctaaagagcctggttgtgcacgataaccttctcaacttagaccacgacatggtgtctcctgctgtgttcaggctggtccttgattttatatatacagggaggctagccgacggcgcggaagcagccgctgcagcggccgtggcccctggtgccgagccatctctcggcgccgttttagccgcagccagctacttacagattcctgacctagtcgctctctgtaaaaaaagattaaaacgacacggcaagtattgccatttgcgaggtgggggcggcggcggggggggctacgctccttatggaagacctgggagggggctgagggctgcgacccccgtgatccaagcttgctacccatctcctgtgggtccaccccccccaccagctgccgaacctcctagcggtcccgaagctgccgtaaacacccactgtgcagaattgtacgctagcggacccggcccagcggccgccctgtgcgcatcagaacggaggtgctcacccctgtgtggcctcgacctgagcaagaaaagccctcccggcagcgccgcaccagagcgccctctcgcagagagagaactgccgccccggcccgatagcccgcctagtgccgggccagccgcatataaggaaccacctctcgctctgccctccctgcctccgctgccgtttcagaaattggaagaagctgctcccccttcagacccttttagaggcgggtcaggctcccccggtccggagcctccaggccggccagacgggccctccttattgtaccgctggatgaagcatgagcctggcctggggtcgtacggcgacgagcttgggagggagcgaggtagcccttccgaacgctgcgaagagagaggcggcgatgccgcggtttctcccggcggcccacccctcgggctggccccccccccccgttaccctggtagtctggacggacccggcgcaggaggcgacggtgatgattacaagtccagcagcgaagaaactggcagttccgaggaccctagccctcctggtgggcatttagaaggatatccctgcccccatctggcctacggggaacccgagtccttcggcgacaatctttatgtttgtataccttgcggaaaaggcttcccctcaagtgaacaactcaacgctcatgtagaagcgcatgtggaagaggaagaagccctgtacggccgtgcagaagcagccgaggtggccgctggggccgcaggcctgggacctccattcgggggggggggcgataaggtcgccggcgccccaggaggattgggagagctattaaggccttacagatgcgcgagctgtgataaatcttacaaggaccctgccacgctgaggcagcacgagaaaactcactggctgacacgtccctacccctgtactatctgcggaaaaaaatttactcaacgcggcaccatgacccggcacatgcggtcccacctggggctcaagccttttgcttgtgacgcatgcggcatgcgattcacccgacagtacagactaaccgagcacatgcgaattcacagtggagagaagccttatgaatgccaggtctgtggcggcaagtttgcacaacagcgcaatctgatatctcatatgaaaatgcacgccgtgggaggcgcagctggagccgcgggggccttagccggcctgggaggcctgcccggtgttcccggtcccgacggaaagggaaagctcgacttccccgagggcgtgttcgctgtcgctagactgaccgctgaacagttgtctctcaagcaacaggataaagctgcggccgctgaattgttggcccagaccacacactttctgcacgaccccaaagtggcccttgagagtctttatcctctcgcgaagtttacggcagaactcgggttaagcccagataaggccgcagaggtcttatcgcagggcgcgcacctcgcagccggtcctgatgggagaaccattgacaggtttagcccaacttag

SEQ ID NO: 165636 - DNA, 2145 bp, Artificial Sequence
  derived and/or modified sequence
atgttggatactatggaggcacctggacactctagacagctgctgctacagctaaacaaccagcggacgaaagggtttttgtgtgatgtcataatcgtcgtgcagaacgcgttattcagggcgcacaaaaacgttctggctgcttccagcgcctacctgaaatcactggttgtccacgacaatctcctaaaccttgaccacgacatggtttcgccagctgttttcagactggtcttggatttcatatacaccggccgtctcgcagatggcgcagaagctgctgccgcagctgcagtcgcccctggagcagagccttccctgggcgcagtcctggccgcagcgagctacctccagatccccgacctggtggcactgtgcaagaaaaggctcaaaaggcatggtaaatattgtcacctgcggggtgggggaggaggtgggggtggctatgctccctacggccgtccaggtcgtggcctacgggcagccacaccagtaattcaggcttgctacccctcccctgttggccctcctcccccaccggcagctgagcccccttcaggcccagaagctgccgtgaatacccactgcgcagagctgtacgcctccggccctgggcctgctgctgctctctgcgccagtgaaaggcggtgctctccactgtgtgggttggatctatccaagaagagtccccctggttccgccgcaccagagaggccgctcgccgagcgcgaactgccacccaggcccgattctccaccctccgctggacccgcagcctacaaggagccacccctcgcactgccctccctgccgcctctgccttttcagaagttggaggaagcagcccctcccagtgacccgttccgaggtggatcgggatcccccggacctgaacccccaggaaggccggatggtccctcccttctctaccggtggatgaagcatgagcctggactgggtagttacggagatgagctgggtcgcgaaagagggtccccaagtgaacgttgtgaggagaggggcggtgatgcggcagtgagcccgggaggtccacctctgggcctggctcctccaccacgatatcctggctcgctcgacggcccaggtgccggtggagacggagatgattacaagtcttctagtgaagagaccggttcctcagaggacccgagtcctcccggagggcatttagagggatatccatgcccacatctggcctacggggaaccagaatccttcggcgacaacctgtatgtgtgcatcccatgcggcaagggctttccctcctcggagcagttgaatgcgcatgtcgaggcgcatgtggaggaggaagaagccctgtatgggagggcagaggctgcggaggtggctgctggcgcagccggtctcgggccaccctttggcggaggaggcgataaagttgctggggctcctgggggtctgggggagctgctgcgtccctaccgatgcgctagctgcgataagtcttacaaggaccccgctacgctccgtcagcacgagaagactcactggctgacgcgcccttatccgtgtactatttgcggcaagaaatttacccagaggggtacaatgacgagacacatgagatcccacctggggttgaagccattcgcatgtgacgcttgtggcatgaggttcacacgacagtatagactcactgagcacatgcgcatccactccggcgagaagccttacgaatgccaggtgtgcggaggcaaattcgcccagcaaagaaacctgatatcccacatgaaaatgcacgccgttggcggtgccgcaggcgctgccggagccctggccggtttgggcggtttgcccggagtccccggtcccgatggcaagggcaagctcgattttcccgagggagttttcgccgtggccagacttaccgcagaacaactatccttaaaacaacaggataaagccgctgccgctgaactgctcgcccaaacaacacattttctccacgacccaaaagtggcacttgagagtttgtacccgcttgctaaattcacagctgagttggggttgtcgccagacaaggccgctgaagtcctttcccagggcgcacatctggctgcaggaccagacgggaggactatcgataggttctccccaacatag

SEQ ID NO: 165637 - protein, 132 aa, Artificial Sequence
  derived and/or modified sequence
MTGELEVKNMDMKPGSTLKITGSIADGTDGFVINLGQGTDKLNLHFNPRFSESTIVCNSLDGSNWGQEQREDHLCFSPGSEVKFTVTFESDKFKVKLPDGHELTFPNRLGHSHLSYLSVRGGFNMSSFKLKE

SEQ ID NO: 165638 - protein, 30 aa, Artificial Sequence
  derived and/or modified sequence
MTGELEVKNMDMKPGSTLKITGSIADGTDG

SEQ ID NO: 165639 - DNA, 399 bp, Artificial Sequence
  derived and/or modified sequence
atgaccggcgagctggaggtgaagaacatggacatgaagcccggcagcaccctgaagatcaccggcagcatcgccgacggcaccgacggcttcgtgatcaacctgggccagggcaccgacaagctgaacctgcacttcaaccccagattcagcgagagcaccatcgtgtgcaacagcctggacggcagcaactggggccaggagcagagagaggaccacctgtgcttcagccccggcagcgaggtgaagttcaccgtgaccttcgagagcgacaagttcaaggtgaagctgcccgacggccacgagctgaccttccccaacagactgggccacagccacctgagctacctgagcgtgagaggcggcttcaacatgagcagcttcaagctgaaggagtag

SEQ ID NO: 165640 - DNA, 399 bp, Artificial Sequence
  derived and/or modified sequence
atgaccggtgaactggaggttaagaacatggatatgaagcccggctcgacactgaagattacaggatcaatcgctgacggcacggacggttttgtgatcaacctcggacaggggacggacaagctgaacttacattttaatccccgcttctcggagtcgaccattgtgtgcaactctcttgacggatccaattggggacaagaacaaagggaggatcatctgtgcttctccccaggcagtgaggtcaaattcaccgtgacatttgagtcagacaaatttaaagtgaaacttcctgatgggcatgagctgacattcccaaatagactcgggcattctcacctgagctatctatccgtgaggggcggttttaacatgtcttcttttaagctgaaggagtag

SEQ ID NO: 165641 - DNA, 399 bp, Artificial Sequence
  derived and/or modified sequence
atgaccggggagctggaggtgaagaacatggacatgaagccaggcagcaccctgaagatcaccggcagcattgctgatggaacagatggctttgtgatcaacctgggccagggcacagacaagctgaacctgcacttcaacccccgcttcagcgagagcaccatcgtgtgcaacagcctggatggcagcaactggggccaggagcagcgggaggaccacctgtgcttcagccctggcagcgaggtgaagttcaccgtgacctttgaaagtgacaagttcaaggtgaagctgcctgatggccacgagctgaccttccccaaccggctgggccacagccacctgagctacctgtctgtgcggggcggcttcaacatgagcagcttcaagctgaaggagtag

SEQ ID NO: 165642 - DNA, 399 bp, Artificial Sequence
  derived and/or modified sequence
atgaccggcgagctggaggtgaagaacatggacatgaagcccggctctacactgaagatcaccgggtccattgcagacgggacagatgggtttgtgataaatctgggccagggcacagataaactcaatctgcactttaacccgagattttccgagtccacgatcgtgtgcaattccttggacggcagtaactggggacaggagcagcgggaagaccatctctgtttctcaccgggctcagaggttaagtttactgtaacatttgaatccgacaagttcaaggtgaagttgcccgatggacatgagctcaccttcccaaacagactcggccattctcacctgagctatctgtccgtgcggggggggtttaacatgtcttccttcaaactgaaggagtag

SEQ ID NO: 165643 - DNA, 399 bp, Artificial Sequence
  derived and/or modified sequence
atgaccggggaactggaggtcaaaaatatggacatgaagcccggtagcaccttgaaaatcacgggatcaattgctgatggcacggatggattcgtgattaatctagggcagggaaccgataagttaaatctgcacttcaacccgaggttttctgaatctacaatcgtgtgcaatagcctggacggatctaactggggccaagagcagagggaagatcatctgtgtttcagcccgggttcggaagtaaagtttactgtgacgttcgagagcgataagtttaaggttaagttaccagatgggcacgaactgactttccctaacaggctggggcacagtcatctgagctatttgtcagtgcgcggaggcttcaatatgtcatccttcaagctcaaggagtag

SEQ ID NO: 165644 - DNA, 93 bp, Artificial Sequence
  derived and/or modified sequence
atgactggagagctggaggtgaagaacatggatatgaagcccggatccactcttaaaataaccggttcaatcgcggatgggactgatggctag

SEQ ID NO: 165645 - DNA, 93 bp, Artificial Sequence
  derived and/or modified sequence
atgaccggggagctggaggtgaagaacatggacatgaagccaggcagcaccctgaagatcaccggcagcattgctgatggaacagatggatag

SEQ ID NO: 165646 - DNA, 589 bp, Artificial Sequence
  derived and/or modified sequence
tgctgggtactgggagatgcaggcggggagacacaaggtagaaggggcaaagtcctcacctaggaccttgagggagttaatgtgtaatattctaggatataagcttgaccacgagttgagaccctgagcacaggcctccaggagccgctgggagctgccgccaggagctgtcaccatgacgggggaacttgaggttaagaacatggacatgaagccggggtcaaccctgaagatcacaggcagcatcgccgatggcactgatggctttgtaattaatctgggccaggggacagacaagctgaacctgcatttcaaccctcgcttcagcgaatccaccattgtctgcaactcattggacggcagcaactgggggcaagaacaacgggaagatcacctgtgcttcagcccagggtcagaggtcaagttcacagtgacctttgagagtgacaaattcaaggtgaagctgccagatgggcacgagctgacttttcccaacaggctgggtcacagccacctgagctacctgagcgtaaggggcgggttcaacatgtcctctttcaagttaaaagaataaaagacttccagccga

SEQ ID NO: 165647 - DNA, 406 bp, Artificial Sequence
  derived and/or modified sequence
actttctagttgcgtgagtcctgggatccctaattccccacctgaaaaatggggtgagaacagaggttcccttgagaatgtactatgagcttataacgatgagggctgaagaaagtggtttgcaaagtgcagaatgcccttcagaaggtagccattgttaagaggacaaggttacagatgcaaggaagctgggctaagtgagggaggctgggagagctgtcaagcggctgcattgcggatataagcttgaccacgagttgagaccctgagcacaggcctccaggagccgctgggagctgccgccaggagctgtcaccatgacgggggaacttgaggttaagaacatggacatgaagccggggtcaaccctgaagatcacaggcagcatcgccgatggcactgatgg

SEQ ID NO: 165648 - DNA, 93 bp, Artificial Sequence
  derived and/or modified sequence
atgaccggcgagctggaggtgaagaacatggacatgaagcccggctccactttgaaaattactggttcaatcgctgacggcacggatggttag

SEQ ID NO: 165649 - DNA, 93 bp, Artificial Sequence
  derived and/or modified sequence
atgaccggggagctggaggtgaagaatatggacatgaaacctggcagcacattgaaaatcaccggcagtatagcggatggcaccgacggctag

SEQ ID NO: 165650 - DNA, 93 bp, Artificial Sequence
  derived and/or modified sequence
atgaccggcgagctggaggtgaagaacatggacatgaagcccggcagcaccctgaagatcaccggcagcatcgccgacggcaccgacggctag

SEQ ID NO: 165651 - protein, 359 aa, Artificial Sequence
  derived and/or modified sequence
MMLSLNNLQNIIYNPVIPFVGTIPDQLDPGTLIVIRGHVPSDADRFQVDLQNGSSMKPRADVAFHFNPRFKRAGCIVCNTLINEKWGREEITYDTPFKREKSFEIVIMVLKDKFQVAVNGKHTLLYGHRIGPEKIDTLGIYGKVNIHSIGFSFSSDLQSTQASSLELTEISRENVPKSGTPQLPSNRGGDISKIAPRTVYTKSKDSTVNHTLTCTKIPPMNYVSKRLPFAARLNTPMGPGRTVVVKGEVNANAKSFNVDLLAGKSKDIALHLNPRLNIKAFVRNSFLQESWGEEERNITSFPFSPGMYFEMIIYCDVREFKVAVNGVHSLEYKHRFKELSSIDTLEINGDIHLLEVRSW

SEQ ID NO: 165652 - protein, 358 aa, Artificial Sequence
  derived and/or modified sequence
MMLSLNNLQNIIYNPVIPFVGTIPDQLDPGTLIVIRGHVPSDADRFQVDLQNGSSMKPRADVAFHFNPRFKRAGCIVCNTLINEKWGREEITYDTPFKREKSFEIVIMVLKDKFQVAVNGKHTLLYGHRIGPEKIDTLGIYGKVNIHSIGFSFSSDLQSTQASSLELTEISRENVPKSGTPQLRLSLPSWDLQGHGSETFRSVLWTRVFEIAFCRPLGTVASFQRLPFAARLNTPMGPGRTVVVKGEVNANAKSFNVDLLAGKSKDIALHLNPRLNIKAFVRNSFLQESWGEEERNITSFPFSPGMYFEMIIYCDVREFKVAVNGVHSLEYKHRFKELSSIDTLEINGDIHLLEVRSW

SEQ ID NO: 165653 - protein, 208 aa, Artificial Sequence
  derived and/or modified sequence
MMLSLNNLQNIIYNPVIPFVGTIPDQLDPGTLIVIRGHVPSDADRFQVDLQNGSSMKPRADVAFHFNPRFKRAGCIVCNTLINEKWGREEITYDTPFKREKSFEIVIMVLKDKFQVAVNGKHTLLYGHRIGPEKIDTLGIYGKVNIHSIGFSFSSDLQSTQASSLELTEISRENVPKSGTPQLPSNRGGDISKIAPRTVYTKSKDSTV

SEQ ID NO: 165654 - protein, 43 aa, Artificial Sequence
  derived and/or modified sequence
MMLSLNNLQNIIYNPVIPFVGTIPDQLDPGTLIVIRGHVPSDA

SEQ ID NO: 165655 - DNA, 1080 bp, Artificial Sequence
  derived and/or modified sequence
atgatgttgagtttaaacaacttgcagaacatcatttataatcctgttatcccatttgtcggcaccatcccggatcaattggatccaggaactctaatcgtgatccggggacacgtcccaagtgacgccgatcgattccaagtggatctgcagaacgggtcttctatgaagcctcgtgcagatgtcgcgtttcatttcaaccctcggtttaaaagggccggctgtatcgtgtgcaatacgttaatcaacgaaaagtggggaagagaggagataacttatgacactccatttaagcgggaaaagagttttgaaatcgtgatcatggtgttgaaggataaatttcaggtggctgtcaatgggaaacacacactgctctatggacataggatcggccctgagaagatagatacattaggtatctacggcaaagtgaacatccactccataggcttcagtttttcctccgatctgcagtccacgcaggccagtagtctagaattgactgaaatttcccgggagaatgtgcccaagtctggcacaccccagctgccttccaacaggggtggcgatatcagtaagattgcccctaggacagtttatacaaagtccaaggacagcacagtcaatcacacgttgacttgtaccaagatccctcctatgaattacgtgtctaagagacttcctttcgctgctcgcctcaacactcccatgggtcccgggaggactgtggtggtcaaaggcgaggtcaacgccaacgcaaaaagcttcaacgtggatctacttgcagggaaatccaaggatattgccctccacctgaaccccagactaaacatcaaggccttcgtccgcaatagctttctgcaggaaagttggggcgaagaggaacggaacattactagttttccattctctcctggcatgtacttcgagatgatcatctactgcgacgtcagggagttcaaagtggccgttaacggtgtgcacagcttggagtataaacaccgatttaaagagctatcatcaattgacaccctggagattaacggtgatatacatttgctggaagtgcggagttggtag

SEQ ID NO: 165656 - DNA, 1077 bp, Artificial Sequence
  derived and/or modified sequence
atgatgctcagccttaataatctgcagaatataatctacaatccggttattccgttcgtggggacgatacccgatcagctggaccccggaactctgatagtcattcggggccacgtcccctccgacgccgaccgtttccaggtggatctacagaatggctcatccatgaaaccgcgcgctgacgtcgccttccacttcaatccaagatttaaaagggcagggtgtatcgtttgcaataccttgataaatgaaaagtggggccgcgaggagattacttatgataccccctttaagcgcgagaagagcttcgagatcgtgattatggttctgaaggacaagtttcaagtggccgtgaacggcaagcacacattactgtacggccaccgcatcggtccagaaaagatcgacacgctagggatttatgggaaagtcaatattcacagtatcggattttcattctctagcgacctgcagtctactcaagctagtagcctcgaattgaccgaaatctcgcgggagaacgtgcctaagtctggcacaccccagctccgactctctttgccctcttgggaccttcaggggcatgggtccgagaccttcaggtctgtcctgtggacacgcgtcttcgagatagccttctgccggcctctggggacggtcgcgtccttccagcgtctgccattcgcagcccgccttaacacacccatgggacctggtagaactgtggtggtgaagggagaggtgaacgccaacgcaaagagcttcaacgtggacttactcgcagggaagtctaaggacatcgccctccacctgaatcctcgtctgaatatcaaggcatttgtgagaaactcctttcttcaagaatcttggggcgaggaagaacggaatattacctccttcccattttctccaggcatgtatttcgagatgataatctactgtgatgtcagagagttcaaagtcgcagttaacggagtgcactctttagagtacaagcaccggtttaaagagttgtcctcaatcgatacactggagatcaatggtgatatccatttattggaggttaggtcatggtag

SEQ ID NO: 165657 - DNA, 1080 bp, Artificial Sequence
  derived and/or modified sequence
atgatgctgtccctgaacaacctccagaacattatatacaatccagtcatccccttcgttgggacaataccagatcagctcgatcccggaactttgatagttatccgcggtcacgtgccttccgatgccgaccgatttcaagttgacctccagaacggctctagcatgaagccgcgcgccgacgtcgccttccactttaatccaagatttaagcgagcgggctgcattgtgtgcaacacccttattaacgaaaagtggggccgggaggaaattacatacgacactccatttaagcgtgaaaagtcattcgagatagttataatggtgctcaaggacaaattccaggtagctgtcaatggaaagcacactctgttgtatggccaccggattgggccggagaagatcgacacgttaggcatttacgggaaggtgaacattcactcgattggattctcctttagctctgacctccagtctacgcaagccagtagtttggagctcaccgagatttcaagagaaaacgttcctaagtccgggaccccccagctgcccagcaatcgcggcggtgacatatcaaagattgcaccaaggacagtttacaccaagtcaaaggattctaccgtgaaccacaccttgacctgtactaaaattccacccatgaactatgtttccaaacggctcccttttgcagcacggctaaatactcctatggggccgggcaggacagttgttgtgaagggcgaagtgaatgcaaatgccaagagctttaacgtggatctcctcgcaggcaaaagcaaggatatagcactgcacctgaaccctaggctgaacatcaaggccttcgtccgcaactcctttttacaggaatcatggggagaagaagagcgtaatattacctccttccccttttcccctgggatgtacttcgaaatgatcatttactgcgacgtgagagagtttaaagttgcagtcaacggagttcactccttggagtataaacatagattcaaagagctcagtagtatcgataccttagagattaacggtgacatccacttgcttgaagtgaggtcctggtag

SEQ ID NO: 165658 - DNA, 1080 bp, Artificial Sequence
  derived and/or modified sequence
atgatgctgtcgcttaacaatctgcagaacataatttataatcctgtcattccattcgtggggactataccagatcaactcgatcccggtaccctgattgtcatcagaggccacgtaccatctgatgctgaccggtttcaggtcgacttacagaacgggagtagtatgaaaccacgggcggatgttgcttttcatttcaatccacgctttaaaagagcaggatgtattgtttgtaacacactgatcaacgaaaaatgggggcgggaggagatcacatacgatactccgttcaaacgtgaaaagtcctttgaaattgtgatcatggtgctcaaggataaattccaggtggctgtgaatggcaagcacaccctactctacggacatcggatcggcccggagaagattgacacactgggaatttacggcaaggtcaacatccactctatcgggttttcattttcatccgatctccaatctactcaggctagctcgcttgaactgacagaaatctcacgggaaaatgtccccaaatcaggaactccacagctcccctcaaacagggggggtgatataagcaagattgccccacgtaccgtctataccaagtcaaaagatagcaccgtgaaccacactctgacatgcaccaagatccctcctatgaattacgtgtccaaacgtttgcccttcgccgcacgcctcaatacacccatgggacctgggagaaccgttgttgtgaaaggagaggtcaacgcaaatgccaaatctttcaatgtcgacttactcgccggaaaatctaaggacatcgcactccacctgaatccccgcctcaacataaaggcgttcgtgcgcaattctttcctgcaagagtcttggggggaggaggagagaaatatcacgagctttccattcagccccggcatgtacttcgaaatgattatctactgcgatgtacgggaatttaaagtagcagtgaatggtgtacacagtctcgaatataaacacagattcaaggagctgtcgagtatcgacacacttgagatcaatggcgatattcacctgcttgaggtcaggagttggtag

SEQ ID NO: 165659 - DNA, 1080 bp, Artificial Sequence
  derived and/or modified sequence
atgatgctttccctcaataatctccaaaacattatctataatcccgtcattccattcgtagggactatcccagatcagctcgacccaggtacacttatcgtgattcgaggacacgtaccgagcgacgccgatagatttcaagttgatctgcagaacgggtctagtatgaaaccaagggctgacgttgcctttcactttaaccctcggttcaaaagagccggatgtatcgtgtgcaacactttaatcaacgaaaagtggggcagagaagagattacatacgataccccctttaagcgcgaaaagtccttcgagatcgtcatcatggtgttgaaagataagttccaggtagccgtgaacggaaaacacaccctcttatatggacatagaatcgggcctgagaagatcgacaccttagggatttatggcaaggtgaacattcactccatcggtttttcattctcgtctgatctgcagtctacacaggcctccagcctggagctgacggaaatctctcgcgagaacgtgccgaagagtggaaccccccagttaccttctaatagagggggcgatatctctaagatcgctcccaggaccgtatacacaaagtccaaagattcaaccgtgaaccacactctgacatgtactaaaattccaccaatgaactacgtcagcaaaagactaccttttgctgccaggcttaacacacccatgggcccaggacggaccgtggtggttaagggcgaggtgaatgctaatgccaaatcatttaacgttgatctgctggctggaaaatccaaagacatagcactgcatctcaacccccgactgaacattaaggcatttgtccgtaacagctttctccaggagtcctggggagaggaggagagaaacataacatcgttccccttttcaccgggcatgtattttgaaatgatcatttactgcgatgtgagagaattcaaagtcgccgttaacggagtacacagtctggagtacaagcataggtttaaagaactatcctcaatcgataccttagaaatcaacggagatatccacttactggaggttcggtcctggtag

SEQ ID NO: 165660 - DNA, 1080 bp, Artificial Sequence
  derived and/or modified sequence
atgatgctgagcctgaacaacctgcagaacatcatctacaaccctgtgatcccctttgtgggcaccatcccagaccagctggaccccggcaccctgattgtcatccggggccacgtgcccagtgatgctgaccgcttccaggtggacctgcagaatggcagctccatgaagcccagggcagatgtggccttccacttcaacccccgcttcaagagagctggctgcatcgtgtgcaacaccctcatcaatgagaagtggggccgggaggagatcacctatgacacccccttcaagcgggagaagagctttgaaattgtcatcatggtgctgaaggacaagttccaggtggccgtgaatggcaagcacaccctgctgtatggccaccgcatcggccctgagaagattgacaccctgggcatctacggcaaggtgaacatccacagcatcggcttctccttcagcagtgacctgcagagcacccaggccagcagcctggagctgacagagatcagcagagaaaatgtgcccaagagcggcaccccccagctgcccagcaacagaggaggagacatcagcaagatcgcccccaggacagtgtacaccaagagcaaggacagcacagtgaaccacaccctgacctgcaccaagatcccccccatgaactacgtgtccaagaggctgccctttgctgcccggctgaacacccccatgggccctggccgcacagtggtggtgaagggggaggtgaatgccaatgccaagagcttcaacgtggacctgctggccggcaagagcaaggacatcgccctgcacctgaacccccggctgaacatcaaggcctttgtgagaaattccttcctgcaggagagctggggcgaggaggagaggaacatcaccagcttccccttcagccctggcatgtactttgagatgatcatctactgtgatgtgcgggagttcaaggtggccgtgaatggagtgcacagcctggagtacaagcaccgcttcaaggagctgagcagcattgacaccctggagatcaacggggacatccacctgctggaggtgcgctcctggtag

SEQ ID NO: 165661 - DNA, 1077 bp, Artificial Sequence
  derived and/or modified sequence
atgatgctgagcctgaacaacctgcagaacatcatctacaaccctgtgatcccctttgtgggcaccatcccagaccagctggaccccggcaccctgattgtcatccggggccacgtgcccagtgatgctgaccgcttccaggtggacctgcagaatggcagctccatgaagcccagggcagatgtggccttccacttcaacccccgcttcaagagagctggctgcatcgtgtgcaacaccctcatcaatgagaagtggggccgggaggagatcacctatgacacccccttcaagcgggagaagagctttgaaattgtcatcatggtgctgaaggacaagttccaggtggccgtgaatggcaagcacaccctgctgtatggccaccgcatcggccctgagaagattgacaccctgggcatctacggcaaggtgaacatccacagcatcggcttctccttcagcagtgacctgcagagcacccaggccagcagcctggagctgacagagatcagcagagaaaatgtgcccaagagcggcaccccccagctgcggctgagcctgcccagctgggacctgcagggccacggcagcgagaccttccgctctgtgctgtggaccagggtgtttgaaattgccttctgccggcccctgggcaccgtggccagcttccagaggctgccctttgctgcccggctgaacacccccatgggccctggccgcacagtggtggtgaagggggaggtgaatgccaatgccaagagcttcaacgtggacctgctggccggcaagagcaaggacatcgccctgcacctgaacccccggctgaacatcaaggcctttgtgaggaacagcttcctgcaggagagctggggcgaggaggagaggaacatcaccagcttccccttcagccctggcatgtactttgagatgatcatctactgtgatgtgcgggagttcaaggtggccgtgaatggagtgcacagcctggagtacaagcaccgcttcaaggagctgagcagcattgacaccctggagatcaatggagacatccacctgctggaggtgcgctcctggtag

SEQ ID NO: 165662 - DNA, 1402 bp, Artificial Sequence
  derived and/or modified sequence
gatcctgtagaacttcggagattggggaagataatcggaagaggtagaagacaccgtccatgacacttcctggggaagcagatgtatgtataaggatggccagtgcctcagtttcaatccaggtaacctttaaatgaaacttgcctaaaatcttaggtcatacacagaagagactccaatcgacaagaagctggaaaagaatgatgttgtccttaaacaacctacagaatatcatctataacccggtaatcccgtttgttggcaccattcctgatcagctggatcctggaactttgattgtgatacgtgggcatgttcctagtgacgcagacagattccaggtggatctgcagaatggcagcagcatgaaacctcgagccgatgtggcctttcatttcaatcctcgtttcaaaagggccggctgcattgtttgcaatactttgataaatgaaaaatggggacgggaagagatcacctatgacacgcctttcaaaagagaaaagtcttttgagatcgtgattatggtgctgaaggacaaattccaggtggctgtaaatggaaaacatactctgctctatggccacaggatcggcccagagaaaatagacactctgggcatttatggcaaagtgaatattcactcaattggttttagcttcagctcggacttacaaagtacccaagcatctagtctggaactgacagagataagtagagaaaatgttccaaagtctggcacgccccagcttcctagtaatagaggaggagacatttctaaaatcgcacccagaactgtctacaccaagagcaaagattcgactgtcaatcacactttgacttgcaccaaaataccacctatgaactatgtgtcaaagaggctgccattcgctgcaaggttgaacacccccatgggccctggacgaactgtcgtcgttaaaggagaagtgaatgcaaatgccaaaagctttaatgttgacctactagcaggaaaatcaaaggatattgctctacacttgaacccacgcctgaatattaaagcatttgtaagaaattcttttcttcaggagtcctggggagaagaagagagaaatattacctctttcccatttagtcctgggatgtactttgagatgataatttattgtgatgttagagaattcaaggttgcagtaaatggcgtacacagcctggagtacaaacacagatttaaagagctcagcagtattgacacgctggaaattaatggagacatccacttactggaagtaaggagctggtagcctacctacacagctgctacaaaaaccaaaatacagaatggcttctgtgatactggccttgctgaaacgcatctcactgtcattctattgtttatattgttaaaatgagcttgtgcaccatt

SEQ ID NO: 165663 - DNA, 1284 bp, Artificial Sequence
  derived and/or modified sequence
aaacaacctgctccgtggagcgcctgaaacaccagtctttggggccagtgcctcagtttcaatccaggtaacctttaaatgaaacttgcctaaaatcttaggtcatacacagaagagactccaatcgacaagaagctggaaaagaatgatgttgtccttaaacaacctacagaatatcatctataacccggtaatcccgtttgttggcaccattcctgatcagctggatcctggaactttgattgtgatacgtgggcatgttcctagtgacgcagacagattccaggtggatctgcagaatggcagcagcatgaaacctcgagccgatgtggcctttcatttcaatcctcgtttcaaaagggccggctgcattgtttgcaatactttgataaatgaaaaatggggacgggaagagatcacctatgacacgcctttcaaaagagaaaagtcttttgagatcgtgattatggtgctgaaggacaaattccaggtggctgtaaatggaaaacatactctgctctatggccacaggatcggcccagagaaaatagacactctgggcatttatggcaaagtgaatattcactcaattggttttagcttcagctcggacttacaaagtacccaagcatctagtctggaactgacagagataagtagagaaaatgttccaaagtctggcacgccccagcttagactgtctctcccctcctgggatttacagggtcatggctctgaaacattccgtagtgttctttggacacgagttttcgagatcgctttctgcaggcctcttggtactgtggcttcttttcagaggctgccattcgctgcaaggttgaacacccccatgggccctggacgaactgtcgtcgttaaaggagaagtgaatgcaaatgccaaaagctttaatgttgacctactagcaggaaaatcaaaggatattgctctacacttgaacccacgcctgaatattaaagcatttgtaagaaattcttttcttcaggagtcctggggagaagaagagagaaatattacctctttcccatttagtcctgggatgtactttgagatgataatttattgtgatgttagagaattcaaggttgcagtaaatggcgtacacagcctggagtacaaacacagatttaaagagctcagcagtattgacacgctggaaattaatggagacatccacttactggaagtaaggagctggtagcctacctacacagctgctacaaaaaccaaaatacagaatggcttctgtgatactggccttgc

SEQ ID NO: 165664 - DNA, 2996 bp, Artificial Sequence
  derived and/or modified sequence
tggacttggatccgaggcagacgaggaagctgagaaaaccctggcgttgaccccgtggacctgggcgccccgggaaggccagcgcttggtccaggcaggcggggcctgtgcggtgaccaccctggtcctgaaaagtcccagccccgagcgccctccctcctagacctggaggcctggaacagccagccgcccacggacgccagagccgggaaccctgacggcacttagctgctgacaaacaacctgctccgtggagcgcctgaaacaccagtctttggggccagtgcctcagtttcaatccaggtaacctttaaatgaaacttgcctaaaatcttaggtcatacacagaagagactccaatcgacaagaagctggaaaagaatgatgttgtccttaaacaacctacagaatatcatctataacccggtaatcccgtttgttggcaccattcctgatcagctggatcctggaactttgattgtgatacgtgggcatgttcctagtgacgcagacagattccaggtggatctgcagaatggcagcagcatgaaacctcgagccgatgtggcctttcatttcaatcctcgtttcaaaagggccggctgcattgtttgcaatactttgataaatgaaaaatggggacgggaagagatcacctatgacacgcctttcaaaagagaaaagtcttttgagatcgtgattatggtgctgaaggacaaattccaggtggctgtaaatggaaaacatactctgctctatggccacaggatcggcccagagaaaatagacactctgggcatttatggcaaagtgaatattcactcaattggttttagcttcagctcggacttacaaagtacccaagcatctagtctggaactgacagagataagtagagaaaatgttccaaagtctggcacgccccagcttcctagtaatagaggaggagacatttctaaaatcgcacccagaactgtctacaccaagagcaaagattcgactgtcaatcacactttgacttgcaccaaaataccacctatgaactatgtgtcaaagaggctgccattcgctgcaaggttgaacacccccatgggccctggacgaactgtcgtcgttaaaggagaagtgaatgcaaatgccaaaagctttaatgttgacctactagcaggaaaatcaaaggatattgctctacacttgaacccacgcctgaatattaaagcatttgtaagaaattcttttcttcaggagtcctggggagaagaagagagaaatattacctctttcccatttagtcctgggatgtactttgagatgataatttattgtgatgttagagaattcaaggttgcagtaaatggcgtacacagcctggagtacaaacacagatttaaagagctcagcagtattgacacgctggaaattaatggagacatccacttactggaagtaaggagctggtagcctacctacacagctgctacaaaaaccaaaatacagaatggcttctgtgatactggccttgctgaaacgcatctcactgtcattctattgtttatattgttaaaatgagcttgtgcaccattaggtcctgctgggtgttctcagtccttgccatgaagtatggtggtgtctagcactgaatggggaaactgggggcagcaacacttatagccagttaaagccactctgccctctctcctactttggctgactcttcaagaatgccattcaacaagtatttatggagtacctactataatacagtagctaacatgtattgagcacagattttttttggtaaaactgtgaagagctaggatatatacttggtgaaacaaaccagtatgttccctgttctcttgagcttcgactcttctgtgcgctactgctgcgcactgctttttctacaggcattacatcaactcctaaggggtcctctgggattagttatgcagatattaaatcacccgaagacactaacttacagaagacacaactccttccccagtgatcactgtcataaccagtgctctaccgtatcccatcactgaggactgatgttgactgacatcattttctttatcgtaataaacatgtggctctattagctgcaagctttaccaagtaattggcatgacatctgagcacagaaattaaggcaaaaaaccaaagcaaaacaaatacatggtgctgaaattaacttgatgccaagcccaaggcagctgatttctgtgtatttgaacttagggcaaatcagagtctacacagacgcctacagaaagtttcaggaagaggcaagatgcattcaatttgaaagatatttatgggcaacaaagtaaggtcaggattagacttcaggcattcataaggcaggcactatcagaaagtgtacgccaactaagggacccacaaagcaggcagaggtaatgcagaaatctgttttgttcccatgaaatcaccaatcaaggcctccgttcttctaaagattagtccatcatcattagcaactgagatcaaagcactcttccactttacgtgattaaaatcaaacctgtatcagcaagttaaatggttccatttctgtgatttttctattatttgaggggagttggcagaagttccatgtatatgggatctttacaggtcagatcttgttacaggaaatttcaaaggtttgggagtggggagggaaaaaagctcagtcagtgaggatcattttatcacattagactggggcagaactctgccaggatttaggaatattttcagaacagattttagatattatttctatccatatattgaaaagaataccattgtcaatcttatttttttaaaagtactcagtgtagaaatcgctagcccttaattcttttccagcttttcatattaatgtatgcagagtctcaccaagctcaaagacactggttgggggtggagggtgccacagggaaagctgtagaaggcaagaagactcgagaatcccccagagttat

SEQ ID NO: 165665 - DNA, 6420 bp, Artificial Sequence
  derived and/or modified sequence
agaacttcggagattggggaagataatcggaagaggtagaagacaccgtccatgacacttcctggggaagcagatgtatgtataaggataggtgtgtactgtcaaaaagcagcgcctccaagtctcttctggcactgtctggacttggatccgaggcagacgaggaagctgagaaaaccctggcgttgaccccgtggacctgggcgccccgggaaggccagcgcttggtccaggcaggcggggcctgtgcggtgaccaccctggtcctgaaaagtcccagccccgagcgccctccctcctagacctggaggcctggaacagccagccgcccacggacgccagagccgggaaccctgacggcacttagctgctgacaaacaacctgctccgtggagcgcctgaaacaccagtctttggggccagtgcctcagtttcaatccaggtaacctttaaatgaaacttgcctaaaatcttaggtcatacacagaagagactccaatcgacaagaagctggaaaagaatgatgttgtccttaaacaacctacagaatatcatctataacccggtaatcccgtttgttggcaccattcctgatcagctggatcctggaactttgattgtgatacgtgggcatgttcctagtgacgcagacagattccaggtggatctgcagaatggcagcagcatgaaacctcgagccgatgtggcctttcatttcaatcctcgtttcaaaagggccggctgcattgtttgcaatactttgataaatgaaaaatggggacgggaagagatcacctatgacacgcctttcaaaagagaaaagtcttttgagatcgtgattatggtgctgaaggacaaattccaggtggctgtaaatggaaaacatactctgctctatggccacaggatcggcccagagaaaatagacactctgggcatttatggcaaagtgaatattcactcaattggttttagcttcagctcggacttacaaagtacccaagcatctagtctggaactgacagagataagtagagaaaatgttccaaagtctggcacgccccagcttcctagtaatagaggaggagacatttctaaaatcgcacccagaactgtctacaccaagagcaaagattcgactgtcaatcacactttgacttgcaccaaaataccacctatgaactatgtgtcaaagaggctgccattcgctgcaaggttgaacacccccatgggccctggacgaactgtcgtcgttaaaggagaagtgaatgcaaatgccaaaagctttaatgttgacctactagcaggaaaatcaaaggatattgctctacacttgaacccacgcctgaatattaaagcatttgtaagaaattcttttcttcaggagtcctggggagaagaagagagaaatattacctctttcccatttagtcctgggatgtactttgagatgataatttattgtgatgttagagaattcaaggttgcagtaaatggcgtacacagcctggagtacaaacacagatttaaagagctcagcagtattgacacgctggaaattaatggagacatccacttactggaagtaaggagctggtagcctacctacacagctgctacaaaaaccaaaatacagaatggcttctgtgatactggccttgctgaaacgcatctcactgtcattctattgtttatattgttaaaatgagcttgtgcaccattaggtcctgctgggtgttctcagtccttgccatgaagtatggtggtgtctagcactgaatggggaaactgggggcagcaacacttatagccagttaaagccactctgccctctctcctactttggctgactcttcaagaatgccattcaacaagtatttatggagtacctactataatacagtagctaacatgtattgagcacagattttttttggtaaaactgtgaagagctaggatatatacttggtgaaacaaaccagtatgttccctgttctcttgagcttcgactcttctgtgcgctactgctgcgcactgctttttctacaggcattacatcaactcctaaggggtcctctgggattagttatgcagatattaaatcacccgaagacactaacttacagaagacacaactccttccccagtgatcactgtcataaccagtgctctaccgtatcccatcactgaggactgatgttgactgacatcattttctttatcgtaataaacatgtggctctattagctgcaagctttaccaagtaattggcatgacatctgagcacagaaattaaggcaaaaaaccaaagcaaaacaaatacatggtgctgaaattaacttgatgccaagcccaaggcagctgatttctgtgtatttgaacttagggcaaatcagagtctacacagacgcctacagaaagtttcaggaagaggcaagatgcattcaatttgaaagatatttatgggcaacaaagtaaggtcaggattagacttcaggcattcataaggcaggcactatcagaaagtgtacgccaactaagggacccacaaagcaggcagaggtaatgcagaaatctgttttgttcccatgaaatcaccaatcaaggcctccgttcttctaaagattagtccatcatcattagcaactgagatcaaagcactcttccactttacgtgattaaaatcaaacctgtatcagcaagttaaatggttccatttctgtgatttttctattatttgaggggagttggcagaagttccatgtatatgggatctttacaggtcagatcttgttacaggaaatttcaaaggtttgggagtggggagggaaaaaagctcagtcagtgaggatcattttatcacattagactggggcagaactctgccaggatttaggaatattttcagaacagattttagatattatttctatccatatattgaaaagaataccattgtcaatcttatttttttaaaagtactcagtgtagaaatcgctagcccttaattcttttccagcttttcatattaatgtatgcagagtctcaccaagctcaaagacactggttgggggtggagggtgccacagggaaagctgtagaaggcaagaagactcgagaatcccccagagttatttttctccataaagaccatcagagtgcttaactgagctgttggagactgtgaggcatttaggaaaaaaatagcccactcacatcattccttgtaagtcttaagttcattttcattttacgtggaggaaaaaaatttaaaaagctattagtatttattaatgaattttactgagacatttcttagaaatatgcacttctatactagcaagctctgtctctaaaatgcaagttggccttttgcttgccacatttctgcattaaacttctatattagcttcaaaggcttttaaactcaatgcgaacattctacgggatgttcttagatgcctttaaaaagggggcagatctaattttatttgaaccctcactttccaacttcaccatgacccagtactagagattagggcacttcaaagcattgaaaaaaatctactgatacttactttcttagacaagtagttcttagttaaccaccaatggaactgggttcattctgaatcctggaggagcttcctcgtgccacccagtgtttctgggccctctgtgtgagcagccaggtgtgagctgttttagaagcagcgtgttgccttcatctctcccgtttcccaaaagaacaaaggataaaggtgacagtcacactcctgggttaaaaaaagcattccagaaccacttctctttatgggcacaacaaagaaacgaaggctgaagttcgcctacccaaaatgaaaagtaggctttacagtcaaaagtacttctgttgattgctaaataacttcattttcttgaaatagagcaactttgagtgaaatctgcaacatggataccatgtatgtaagatactgctgtacagaagagttaaggcttacagtgcaaatgaggcgtcagctttgggtgctaaaattaacaagtctaatattattaccatcaatcaggaagagaataataaatgtttaaacaaacacagcagtctgtataaaaataccgtgtatcatttactctttctgcagctctatacgataggcaggagaggcttatgtggcagcacaagccaggtggggattttgtaaagaagtgataaaacatttgtaagtaatccaagtaggtgtattaaggcaccaaaagtaacatggcacccaacacccaaaaataaaaatatgaaatatgagtgtgaactctgagtagagtatgaaacaccacagaaagtcttagaaatagctctggagtggctctcccaggacagtttccagttgctgaatagtcttttggcactgatgttctacttcttcacattcatctaaaaaaaaaaaaaaaaaatcaaaattaaaatctgagtcagtccgcctgcctcggttctcattagtttaattcttaatgccttgcactttccggcaatcattcaatcaaaagagtgaaatgaagcacattaacaaagcaggaggcgccacggaccgcctccctccacaccgctccttccgccttcattccttgcccacaggcttgcactggaagctgaataagaatccccaaaactcaaacttcctagggatgccacccctttagtagctcacacctcccccctccaagagctaagaaacaaaggagaatgtacttttgtagcttagataagcaatgaatcagtaaaggactgatctacttgctccaccacccctcccttaataataacatttactgttatttcctgggcctaagactctatgttccagaactgtcacagctccccatgtcacactcactagcttgtgatctttgtcaaataactgaaatcttttaagcctctagtttcttcctttgtaaaacagagataaaatgttgtggtttttaagtgagataatccaagtaaagcacctaacatggagtagtgaatgaacatcggttgctactaaaagtggacatcctactgcatccttaatgccactaggcatttccatacaatctggggaccaaaacttcaatcatataaatgtatgaggttaattaaaaacactactgtaatctgcttgtatgatcacaaaccaccacaaaagaaaagatcgtgaagattacactgtaaacggactctcaaatgatcaggaggtggtcacttcgcaacttgctccctccacccaactcaaaacaggagctcgagcctgcctgtatttgagactggagctgcctgtatgaggactggatcaactgctagtcacgttatatccaaatctgcattatcattgggcacattttcacagaattttactgaattattccttaattgtttaatggttgggaatagtttgggaattaccttccatcaactctgctaagaaaggaatggattctggtagcaagacaatataattctcctttagtttttcagccagtgctaacacagtaatcaaagcagcaaatcgaacctgaaagggataaaagagcaaagaaataaaaagtagtgttactgtatttattatcttaagagctgtactgacttgagacaagctctaactttttaaacattagttcacatgcgtttattcacttcattatgttcattaagctttcatcttagaataccagtttcaccatttgggagctgtttgtaatatgtgcaaccttataaatagtgttttccaaactgtgtcccaggactgcaaatctttaatgtgaaatgtctttttataatctcttcctttaaaaaaaaccaataaaataaaatgccgcatgcaaactcaagtgtgtcaccagattttacttcattggcgctcgccagcccgccaggctggcaataaagtgcctccagccacctctggcaggtctcctcacccacagcccctgactggtcaccactataattgtatgaggggccaggacagtcgcttgggataaactcccatctcagcactgaataaaaaacattctgtgtcacaatatcctagttttggggctttaaaaacgtctaggtgttcctcacatgccttgtctataataaggaaagcaagcagtagttgggtattgttagcttttgaaacaaaagccctactggtcttctaattttggatattttaattaaagaatatctggacagtacaaagtgaattattaaaaaaccatttgtaactacctagattcaatcaggatttccttgatttgtgcaaagtaaaatattacaataaatttgatactgctacttgtataaaaacctatggtttaaaatgtgggggttcatcataatagtctcattgttagcatatcctaataaagaatttgaactaataaatcctattaataaaa

SEQ ID NO: 165666 - DNA, 1349 bp, Artificial Sequence
  derived and/or modified sequence
acctgaaaagactggatttgggacatgatcctgtagaacttcggagggccagtgcctcagtttcaatccaggtaacctttaaatgaaacttgcctaaaatcttaggtcatacacagaagagactccaatcgacaagaagctggaaaagaatgatgttgtccttaaacaacctacagaatatcatctataacccggtaatcccgtttgttggcaccattcctgatcagctggatcctggaactttgattgtgatacgtgggcatgttcctagtgacgcagacagattccaggtggatctgcagaatggcagcagcatgaaacctcgagccgatgtggcctttcatttcaatcctcgtttcaaaagggccggctgcattgtttgcaatactttgataaatgaaaaatggggacgggaagagatcacctatgacacgcctttcaaaagagaaaagtcttttgagatcgtgattatggtgctgaaggacaaattccaggtggctgtaaatggaaaacatactctgctctatggccacaggatcggcccagagaaaatagacactctgggcatttatggcaaagtgaatattcactcaattggttttagcttcagctcggacttacaaagtacccaagcatctagtctggaactgacagagataagtagagaaaatgttccaaagtctggcacgccccagcttcctagtaatagaggaggagacatttctaaaatcgcacccagaactgtctacaccaagagcaaagattcgactgtcaatcacactttgacttgcaccaaaataccacctatgaactatgtgtcaaagaggctgccattcgctgcaaggttgaacacccccatgggccctggacgaactgtcgtcgttaaaggagaagtgaatgcaaatgccaaaagctttaatgttgacctactagcaggaaaatcaaaggatattgctctacacttgaacccacgcctgaatattaaagcatttgtaagaaattcttttcttcaggagtcctggggagaagaagagagaaatattacctctttcccatttagtcctgggatgtactttgagatgataatttattgtgatgttagagaattcaaggttgcagtaaatggcgtacacagcctggagtacaaacacagatttaaagagctcagcagtattgacacgctggaaattaatggagacatccacttactggaagtaaggagctggtagcctacctacacagctgctacaaaaaccaaaatacagaatggcttctgtgatactggccttgctgaaacgcatctcactgtcattctattgtttatattgttaaaatgagcttgtgcacca

SEQ ID NO: 165667 - DNA, 1080 bp, Artificial Sequence
  derived and/or modified sequence
atgatgctgagcctgaacaacctgcagaacatcatctacaaccccgtgatccccttcgttggcactataccagatcagctggatcccggaaccttaatcgtgattcgcgggcacgtgccttccgatgcagatcggtttcaggtcgatctccaaaatggctctagcatgaagccccgcgctgacgtcgcatttcactttaatccaagattcaagcgagcaggctgtattgtatgcaacactctcattaacgagaagtggggacgggaggagatcacttacgacactccctttaagcgggaaaaatcatttgaaattgttatcatggtgcttaaggataaatttcaggtggcggtcaacgggaaacatacccttctgtatggtcaccgcatagggccagaaaaaattgacacactgggcatttacggaaaggtgaatattcattccatcggattctccttctcatcagatctgcagtccacccaggctagctctcttgagcttaccgaaattagccgcgagaatgtccccaagtctggtactcctcaacttccttccaaccggggaggcgacatctccaagatagcacctcgtactgtctatacgaaatcaaaggattccacggtcaatcacacacttacttgcaccaaaattccccccatgaactatgtctcgaaacggctacctttcgctgctagactcaatacgcccatgggcccgggacgcaccgtggtggtcaaaggagaggtgaacgccaacgcaaagagcttcaatgttgacctgttagcagggaagtcgaaggatatagcactccacctgaaccctcgtctaaatattaaagcctttgtgcggaacagcttcctccaggagtcatggggggaagaggagaggaatatcacatcattcccattttcccccggtatgtactttgaaatgatcatctactgcgatgttagggagtttaaagtcgctgttaatggtgtgcacagcctggagtacaagcaccgctttaaggaactgagctcaatagataccctcgagatcaatggagatattcacctgctggaggtaaggagctggtag

SEQ ID NO: 165668 - DNA, 1077 bp, Artificial Sequence
  derived and/or modified sequence
atgatgctgagcctgaacaacctgcagaacatcatctacaaccccgtgattcctttcgtgggcaccatcccagaccaattggaccccggaactttgattgtgatccgtggacatgtgccttctgatgctgatagatttcaagtggacctccaaaacgggtcttccatgaaacctcgagccgacgttgcgtttcatttcaatccaagattcaagcgcgcgggctgtatcgtgtgcaacacactgattaacgagaagtgggggcgggaagagattacctatgatacaccattcaaaagagagaaatccttcgaaattgtgattatggtcctgaaggataagtttcaggtcgcagtgaatggcaagcacactttgctctatggtcacaggattggccctgagaagatcgacactttggggatctacgggaaagtaaacattcatagtattggcttcagtttttcaagtgacttacagtcgacacaggccagcagcctcgagttgacggagatcagccgcgagaacgtgccaaaatcgggcacacctcagcttagacttagtttgccttcttgggatctgcaaggccatggatcggaaaccttccgttctgtattatggacgcgcgtgttcgagattgccttctgtcggcccctgggaacagtggcaagcttccagaggttgccatttgctgccaggttaaacacccccatgggcccgggccggaccgtggtggtgaaaggcgaggtgaacgctaatgcaaagagttttaacgtcgacctgctcgcaggcaagagtaaggacatcgctctccatctcaaccctcgtctaaacatcaaagccttcgtccgaaacagtttcctgcaggaatcttggggcgaagaggagcgaaatataaccagtttcccattttcgcctggcatgtacttcgagatgattatttattgtgatgtcagagagtttaaggttgccgtcaacggggtccactctctcgagtacaagcaccgcttcaaggaattgtcttccatcgatacacttgagattaatggcgatatacacctcctggaggtccgtagctggtag

SEQ ID NO: 165669 - DNA, 1080 bp, Artificial Sequence
  derived and/or modified sequence
atgatgctgagcctgaacaacctgcagaacatcatctacaaccccgtcattccttttgtgggcaccattcccgatcagttggatcctgggacactaatcgtcatccgtggtcatgtacctagcgatgccgatcgtttccaggtggatttgcagaatggctcatctatgaagccacgcgcggatgtggctttccatttcaacccacgctttaaacgtgccggatgcatcgtatgtaacacccttatcaacgaaaaatggggacgagaagagatcacctacgatacgccatttaaacgtgagaagagcttcgagatagtcatcatggtactgaaagacaagtttcaggtagccgtcaacggtaagcatacgcttttatatggccatcgaatcggacccgagaagatcgacactctgggaatttatggaaaagtcaacatacacagtattggttttagcttcagcagcgatctacagtccactcaggcctcatccctagagctcactgagatcagcagggaaaatgtgcccaagtccgggaccccacagctaccttcaaacagaggtggcgacatcagtaaaatagccccccgaacagtgtatacaaaatccaaagactcaacagtaaaccacacattgacatgtactaagatcccacccatgaactacgtctctaagagactgccattcgccgcccggctgaatactcccatgggcccaggccgcactgtggtggttaagggcgaggtgaacgcaaatgccaagtcatttaacgttgacctcctggcaggcaagtctaaggacatcgccctccacctcaatccaaggctcaatatcaaggcttttgtgagaaattcttttctgcaggagtcctggggcgaggaagagcgaaacattacttcttttccattctcccctggtatgtactttgaaatgattatatattgcgacgtgagagaattcaaagtagctgtgaacggggttcacagcttggagtataaacaccgattcaaggagttgtcctcgattgacaccctggagatcaatggggacatacatctactggaggtgcgaagttggtag

SEQ ID NO: 165670 - DNA, 1080 bp, Artificial Sequence
  derived and/or modified sequence
atgatgctgagcctgaacaacctgcagaacatcatctacaaccccgtgatcccttttgttggcaccattcctgatcagttggacccaggtactctgatcgtgatcaggggccacgtaccttccgatgcagaccgcttccaggtagatttgcaaaatggcagcagcatgaaaccacgggctgacgtggcatttcacttcaaccctagattcaagcgcgctggttgcattgtttgcaacactcttattaatgagaagtgggggcgcgaggaaattacctatgatacaccattcaaacgagagaaaagtttcgagattgttattatggttttgaaagataaatttcaagtggccgtgaacggaaaacatacacttctgtatgggcaccgcatcggtccagagaagatagacacattagggatttacgggaaagtcaatatccattccattggattttcttttagcagtgacctccagagtacacaagcctctagtcttgagctgaccgagatctccagagagaatgtccccaaatccggcaccccccaactgccttctaaccgaggaggtgatatttccaagattgctcccaggacagtctataccaagagcaaagactctacggtgaatcacacactgacctgcactaagatccctcctatgaactatgtatcaaagcgcctaccattcgcggctaggctgaatacacccatgggacctggccggactgtggttgtgaaaggagaagttaatgccaacgctaagtctttcaacgtggatctgctggccggaaaaagcaaagatatagcccttcatctgaaccctagacttaacattaaggccttcgtgcgaaactcttttttacaagagtcatggggggaagaggaacgtaatatcacctccttccctttttctcctggaatgtactttgagatgataatttattgtgatgttagagaatttaaagtcgccgtgaatggtgtgcatagtctcgagtacaaacacagattcaaggaactttctagtattgatactctggagataaacggagacatccacctattagaggtgaggtcttggtag

SEQ ID NO: 165671 - DNA, 1080 bp, Artificial Sequence
  derived and/or modified sequence
atgatgctgagcctgaacaacctgcagaacatcatctacaaccccgtgatcccatttgtcgggacaataccagaccagcttgacccaggcaccctcatcgtgatcagagggcacgttccatccgatgcagaccggttccaggtagaccttcagaatgggtcttccatgaagcctcgggccgacgttgctttccacttcaatcctagattcaagcgggccggctgcatcgtatgtaatactctgatcaacgaaaagtggggccgtgaagagattacctacgacacaccttttaaacgcgaaaagtctttcgagatagttattatggttttaaaggataaatttcaggtggccgttaatgggaaacacactctgctttatggccaccgcattggacctgaaaagatcgacactctcggaatttacgggaaggtaaacattcattcgatcggattctcctttagctccgatttgcagagtacccaagccagcagcctcgaactgacagaaatttcaagggaaaacgtgccaaaaagtggcacaccacaactgccttccaatagaggtggggacatctcaaagattgcgccccggacagtgtacaccaaaagcaaggattctaccgtgaaccataccctcacctgcactaagatcccccccatgaactacgtgtccaaacgactgcccttcgccgcgcggctgaacactcctatgggcccaggccgcactgttgtagtgaagggggaagtcaacgctaacgctaagagttttaacgtggacctgctcgccggtaaatctaaagacattgctctacacctcaaccccaggctcaacatcaaggcgttcgttagaaactcattcttgcaggaaagttggggtgaagaggagcgcaacatcacgtcatttccattctcgcccggaatgtattttgagatgatcatctattgcgacgtgcgcgagtttaaggtggctgtgaatggggtccactcactggaatataagcatcgcttcaaagaactgtcctctatagacactctggagataaatggggacattcatctgctcgaggtacgctcttggtag

SEQ ID NO: 165672 - DNA, 1080 bp, Artificial Sequence
  derived and/or modified sequence
atgatgctgtctctgaacaatttgcagaacatcatctacaaccccgttattccgtttgtaggcacaatcccagaccaactcgaccctggtacgctgatagtgattagagggcacgtgccttccgatgcagaccgcttccaggtggatttgcagaatggctccagcatgaaaccaagggccgatgttgctttccatttcaaccccaggttcaaacgagctgggtgcatcgtgtgtaacactctcattaatgagaaatgggggagagaggagatcacatatgacactcccttcaagcgcgagaagagcttcgagatcgtgattatggtactgaaagacaaatttcaggtagcggtgaatggcaaacacactctgctttacggacaccgtattggcccagagaaaatcgatacccttggaatttatggcaaggtgaatatacactccatcgggttttccttctcttctgatctgcagagtacacaggctagttccctcgaactgaccgaaatctcacgcgagaatgtgccaaaatctggaacacctcagctgccttcaaacagaggcggtgatatatcaaagatagcacctcgcacagtgtacactaaatctaaggacagtaccgtaaatcataccttaacctgtactaagatcccccctatgaattatgtgagtaaacgcctgccctttgccgcacggctgaacaccccaatggggcctggcaggaccgtagtcgtaaaaggtgaggtgaatgcgaatgcaaaatcattcaacgtggacctgctagccggtaagagcaaggacatcgccttgcacctgaaccctcgcctgaatatcaaggccttcgtgcgcaactcctttctacaggagagctggggcgaggaagaaaggaatattaccagttttccgttctctccaggcatgtactttgagatgatcatttattgcgacgtgagggagttcaaagtagcagttaatggcgtgcacagtttggaatataaacatagattcaaagaactgagtagtattgacacattagagatcaatggggacatacacctgctagaagtgaggtcttggtag

SEQ ID NO: 165673 - DNA, 1077 bp, Artificial Sequence
  derived and/or modified sequence
atgatgcttagtctgaacaatcttcaaaacataatctacaatcctgtgattcccttcgtgggcaccattcctgaccagctcgacccgggaacccttattgtgataagaggccatgtgcccagcgacgccgaccgatttcaagtcgatctgcagaatggaagctcgatgaagccaagagcggacgtcgcctttcacttcaatcctagatttaagcgagcaggctgtattgtgtgcaataccctgatcaacgaaaaatggggtagagaggaaattacatatgacactcccttcaaacgagagaaatccttcgagatcgttatcatggtactgaaagacaaatttcaagtggcagtcaacggcaaacatacactgctctacggtcaccggatcggacccgagaagattgataccctggggatctatgggaaggtgaatatacactctatcggattttctttcagttccgatctccaatccacccaggcttcttcactggaattaaccgagatatctcgggagaacgtcccaaagagcggaactccccagctgcgtctctctctgccttcatgggacctacagggccatggttctgagacattcaggtctgtactttggaccagagtctttgagatcgctttttgcagaccactgggtacagtggccagcttccagcgccttcccttcgctgctcgactgaatacccctatgggtccgggtcgtactgtggtggtgaagggcgaggtcaacgctaacgccaagtcctttaacgtggacctgctcgcgggaaagtcgaaagatatcgcactccatttgaaccctcgattgaatataaaagcctttgtccggaactctttcctccaagagtcctggggtgaagaggagaggaacatcacctccttccctttctctccaggaatgtatttcgagatgattatctattgcgatgtgcgagagttcaaggtggccgtgaatggggtccattctcttgaatataaacataggttcaaggaactgtcttctatcgacacactggaaattaatggggacatccatctgctggaagttcggagttggtag

SEQ ID NO: 165674 - DNA, 1080 bp, Artificial Sequence
  derived and/or modified sequence
atgatgcttagcttgaataaccttcagaatatcatatacaaccctgtgattccctttgtgggcactattcctgatcaacttgatcccggaactttaatcgtgatcaggggacacgtgcccagcgacgctgacagattccaagtggacctccaaaatggaagctccatgaaaccaagggcagacgtggcttttcacttcaaccctcgctttaagagggctggttgtattgtatgcaacactttgattaacgaaaagtggggacgggaagagataacatatgacacgccttttaagcgggagaaatcattcgagatcgtgatcatggtgctgaaggacaagtttcaggtggcagtcaacggcaagcatacattgctgtatggccacaggatcggcccagagaagatcgacacactcggcatctatgggaaggtcaacattcatagcatcggcttttctttcagttccgacttgcaaagtacccaggcatcctcccttgagctcaccgagatctctagagagaatgtcccaaaatctgggacaccacaactgcccagcaaccgcggtggagacatctcaaaaatcgccccacggacggtgtacaccaaatctaaagactctactgtcaaccacacgttaacatgtacaaagattccccctatgaactatgtctccaaaaggttgcccttcgccgctaggttgaacactcctatgggacctggacggaccgtggttgtcaaaggcgaggtgaacgccaacgccaagtcctttaatgttgatctcctggccggaaaaagcaaagacattgcactgcacctgaatcctcggcttaacattaaagctttcgttaggaactcattcctgcaagagtcttggggtgaggaggagagaaacatcacttcctttccattttccccaggcatgtacttcgaaatgatcatatactgcgatgtgagggaatttaaggtggctgtcaacggtgttcacagcctggaatacaaacacagattcaaggagctttcaagcatcgatactctcgaaatcaacggtgacattcatctactagaggtacgttcttggtag

SEQ ID NO: 165675 - DNA, 1080 bp, Artificial Sequence
  derived and/or modified sequence
atgatgctatcactcaataatctgcaaaatataatctacaacccagtcatcccatttgtgggtactattcccgatcagctcgaccccggaaccctcatcgtcatccgagggcacgtgccaagtgacgcagatcgctttcaggtggacctgcagaatggctcctctatgaagccaagggctgatgtggctttccacttcaatccgagatttaagagggctggatgtatcgtgtgcaacacattaatcaacgaaaaatggggcagagaagagattacatacgatacccctttcaagcgtgagaagagttttgagatcgtgatcatggttttgaaagacaagttccaggttgccgtgaacggcaaacataccctgttgtatggtcacagaatcggccctgaaaaaattgataccctcggcatctacggaaaagtgaatattcatagtatagggttttccttctcatctgacctgcagagcactcaagcctctagcctagagcttaccgaaatttcccgggaaaacgtccccaagagcggtacaccacagctgccctctaatcgcggaggagacatatctaagatcgccccacgtaccgtttacacgaagagcaaggacagtactgtgaatcacacattgacatgtaccaaaattcctccgatgaactacgtctccaagcgactcccgttcgcagctagactcaacacccccatgggaccagggaggaccgtggtggtcaagggggaagtgaacgcaaacgccaagtctttcaacgtggacttgctcgcaggcaagtccaaagatatagctttacacttgaacccaaggctcaatattaaggctttcgtccgaaatagttttctgcaagaatcctggggggaagaagaacggaatatcacatcgttcccattctcgcccggaatgtacttcgagatgatcatctattgcgatgtccgggaattcaaggtcgccgttaacggtgttcacagcctggagtacaaacacaggttcaaggaactaagtagcatcgatacacttgaaatcaacggagacatccacctcctggaggttcgcagttggtag

SEQ ID NO: 165676 - DNA, 1080 bp, Artificial Sequence
  derived and/or modified sequence
atgatgctctcactgaataacttacagaacataatctacaatcccgtcattccctttgtgggaactatcccagatcagctagaccccggtactctgatagtcatcagaggtcacgttccttctgacgccgatcggttccaggtggacctacagaatggatcgtctatgaagcccagggcagatgtggccttccacttcaacccacggttcaagcgcgcaggatgtatcgtttgcaacaccctaatcaatgaaaagtggggaagggaggaaatcacatatgatacacccttcaaaagggagaagagctttgaaattgtaataatggtactgaaagacaaattccaggttgcggttaacggaaagcatacgctgctttatggccacagaattgggccagagaagattgacacgctagggatttacggcaaggtgaacatccacagtatagggttctctttcagctcagatttacagtctacccaggccagttctctcgagctgaccgagatctctcgggagaacgtaccgaaatccgggactccccagttacccagcaaccgcggaggagatatctctaaaatcgcacccagaactgtgtataccaagtccaaggactctactgtgaatcataccctgacgtgtacaaaaattccccctatgaattacgtcagtaaacggctcccctttgctgcaaggttgaatacaccgatgggccctggacgtacggtggtcgtgaaaggcgaggtgaacgccaatgcaaagagctttaatgtggatctgttagcgggaaaatcaaaggatatagcattacatctgaatcccaggcttaacattaaggcctttgtgagaaatagctttctccaggaatcatggggagaggaagagagaaacattacttcgtttcctttctctcctggaatgtatttcgaaatgattatttactgtgatgttcgagaattcaaggttgccgtgaacggagtacactcacttgagtataagcataggtttaaggagttaagctcaatcgataccctggagatcaatggcgatattcacctgctggaagtccgcagttggtag

SEQ ID NO: 165677 - DNA, 1080 bp, Artificial Sequence
  derived and/or modified sequence
atgatgctgagcctgaacaacctgcagaacatcatctacaaccccgtgatccccttcgtgggcaccatccccgaccagctggaccccggcaccctgatcgtgatcagaggccacgtgcccagcgacgccgacagattccaggtggacctgcagaacggcagcagcatgaagcccagagccgacgtggccttccacttcaaccccagattcaagagagccggctgcatcgtgtgcaacaccctgatcaacgagaagtggggcagagaggagatcacctacgacacccccttcaagagagagaagagcttcgagatcgtgatcatggtgctgaaggacaagttccaggtggccgtgaacggcaagcacaccctgctgtacggccacagaatcggccccgagaagatcgacaccctgggcatctacggcaaggtgaacatccacagcatcggcttcagcttcagcagcgacctgcagagcacccaggccagcagcctggagctgaccgagatcagcagagagaacgtgcccaagagcggcaccccccagctgcccagcaacagaggcggcgacatcagcaagatcgcccccagaaccgtgtacaccaagagcaaggacagcaccgtgaaccacaccctgacctgcaccaagatcccccccatgaactacgtgagcaagagactgcccttcgccgccagactgaacacccccatgggccccggcagaaccgtggtggtgaagggcgaggtgaacgccaacgccaagagcttcaacgtggacctgctggccggcaagagcaaggacatcgccctgcacctgaaccccagactgaacatcaaggccttcgtgagaaacagcttcctgcaggagagctggggcgaggaggagagaaacatcaccagcttccccttcagccccggcatgtacttcgagatgatcatctactgcgacgtgagagagttcaaggtggccgtgaacggcgtgcacagcctggagtacaagcacagattcaaggagctgagcagcatcgacaccctggagatcaacggcgacatccacctgctggaggtgagaagctggtag

SEQ ID NO: 165678 - DNA, 1077 bp, Artificial Sequence
  derived and/or modified sequence
atgatgctgagcctgaacaacctgcagaacatcatctacaaccccgtgatccccttcgtgggcaccatccccgaccagctggaccccggcaccctgatcgtgatcagaggccacgtgcccagcgacgccgacagattccaggtggacctgcagaacggcagcagcatgaagcccagagccgacgtggccttccacttcaaccccagattcaagagagccggctgcatcgtgtgcaacaccctgatcaacgagaagtggggcagagaggagatcacctacgacacccccttcaagagagagaagagcttcgagatcgtgatcatggtgctgaaggacaagttccaggtggccgtgaacggcaagcacaccctgctgtacggccacagaatcggccccgagaagatcgacaccctgggcatctacggcaaggtgaacatccacagcatcggcttcagcttcagcagcgacctgcagagcacccaggccagcagcctggagctgaccgagatcagcagagagaacgtgcccaagagcggcaccccccagctgagactgagcctgcccagctgggacctgcagggccacggcagcgagaccttcagaagcgtgctgtggaccagagtgttcgagatcgccttctgcagacccctgggcaccgtggccagcttccagagactgcccttcgccgccagactgaacacccccatgggccccggcagaaccgtggtggtgaagggcgaggtgaacgccaacgccaagagcttcaacgtggacctgctggccggcaagagcaaggacatcgccctgcacctgaaccccagactgaacatcaaggccttcgtgagaaacagcttcctgcaggagagctggggcgaggaggagagaaacatcaccagcttccccttcagccccggcatgtacttcgagatgatcatctactgcgacgtgagagagttcaaggtggccgtgaacggcgtgcacagcctggagtacaagcacagattcaaggagctgagcagcatcgacaccctggagatcaacggcgacatccacctgctggaggtgagaagctggtag

SEQ ID NO: 165679 - protein, 646 aa, Artificial Sequence
  derived and/or modified sequence
MGLPRLVCAFLLAACCCCPRVAGVPGEAEQPAPELVEVEVGSTALLKCGLSQSQGNLSHVDWFSVHKEKRTLIFRVRQGQGQSEPGEYEQRLSLQDRGATLALTQVTPQDERIFLCQGKRPRSQEYRIQLRVYKAPEEPNIQVNPLGIPVNSKEPEEVATCVGRNGYPIPQVIWYKNGRPLKEEKNRVHIQSSQTVESSGLYTLQSILKAQLVKEDKDAQFYCELNYRLPSGNHMKESREVTVPVFYPTEKVWLEVEPVGMLKEGDRVEIRCLADGNPPPHFSISKQNPSTREAEEETTNDNGVLVLEPARKEHSGRYECQGLDLDTMISLLSEPQELLVNYVSDVRVSPAAPERQEGSSLTLTCEAESSQDLEFQWLREETGQVLERGPVLQLHDLKREAGGGYRCVASVPSIPGLNRTQLVNVAIFGPPWMAFKERKVWVKENMVLNLSCEASGHPRPTISWNVNGTASEQDQDPQRVLSTLNVLVTPELLETGVECTASNDLGKNTSILFLELVNLTTLTPDSNTTTGLSTSTASPHTRANSTSTERKLPEPESRGVVIVAVIVCILVLAVLGAVLYFLYKKGKLPCRRSGKQEITLPPSRKSELVVEVKSDKLPEEMGLLQGSSGDKRAPGDQGEKYIDLRH

SEQ ID NO: 165680 - protein, 527 aa, Artificial Sequence
  derived and/or modified sequence
MVYIVRQFLLYNVSGSVYLDQLIVLLTAKFSILRIAGSRVHHSPFSGHLDGCSFLSLQHSLHTSLDMSRHENVFLGLTLSSKSAGLKGFQLAFVPGLLQGTGGYLDGPLPTPVDNPRVGLEVGLRLSLPPLPPCPGVHIQSSQTVESSGLYTLQSILKAQLVKEDKDAQFYCELNYRLPSGNHMKESREVTVPVFYPTEKVWLEVEPVGMLKEGDRVEIRCLADGNPPPHFSISKQNPSTREAEEETTNDNGVLVLEPARKEHSGRYECQGLDLDTMISLLSEPQELLVNYVSDVRVSPAAPERQEGSSLTLTCEAESSQDLEFQWLREETGQVLERGPVLQLHDLKREAGGGYRCVASVPSIPGLNRTQLVNVAIFGPPWMAFKERKVWVKENMVLNLSCEASGHPRPTISWNVNGTASEQDQDPQRVLSTLNVLVTPELLETGVECTASNDLGKNTSILFLELVNLTTLTPDSNTTTGLSTSTASPHTRANSTSTGKPGLAREQGCARASFLPCPSPESPVQKGE

SEQ ID NO: 165681 - protein, 46 aa, Artificial Sequence
  derived and/or modified sequence
GVVIVAVIVCILVLAVLGAVLYFLYKKGKLPCRRSGKQEMERNTSI

SEQ ID NO: 165682 - DNA, 1941 bp, Artificial Sequence
  derived and/or modified sequence
atgggcctgcccagactggtgtgcgccttcctgctggccgcctgctgctgctgccccagagtggccggcgtgcccggcgaggccgagcagcccgcccccgagctggtggaggtggaggtgggcagcaccgccctgctgaagtgcggcctgagccagagccagggcaacctgagccacgtggactggttcagcgtgcacaaggagaagagaaccctgatcttcagagtgagacagggccagggccagagcgagcccggcgagtacgagcagagactgagcctgcaggacagaggcgccaccctggccctgacccaggtgaccccccaggacgagagaatcttcctgtgccagggcaagagacccagaagccaggagtacagaatccagctgagagtgtacaaggcccccgaggagcccaacatccaggtgaaccccctgggcatccccgtgaacagcaaggagcccgaggaggtggccacctgcgtgggcagaaacggctaccccatcccccaggtgatctggtacaagaacggcagacccctgaaggaggagaagaacagagtgcacatccagagcagccagaccgtggagagcagcggcctgtacaccctgcagagcatcctgaaggcccagctggtgaaggaggacaaggacgcccagttctactgcgagctgaactacagactgcccagcggcaaccacatgaaggagagcagagaggtgaccgtgcccgtgttctaccccaccgagaaggtgtggctggaggtggagcccgtgggcatgctgaaggagggcgacagagtggagatcagatgcctggccgacggcaacccccccccccacttcagcatcagcaagcagaaccccagcaccagagaggccgaggaggagaccaccaacgacaacggcgtgctggtgctggagcccgccagaaaggagcacagcggcagatacgagtgccagggcctggacctggacaccatgatcagcctgctgagcgagccccaggagctgctggtgaactacgtgagcgacgtgagagtgagccccgccgcccccgagagacaggagggcagcagcctgaccctgacctgcgaggccgagagcagccaggacctggagttccagtggctgagagaggagaccggccaggtgctggagagaggccccgtgctgcagctgcacgacctgaagagagaggccggcggcggctacagatgcgtggccagcgtgcccagcatccccggcctgaacagaacccagctggtgaacgtggccatcttcggccccccctggatggccttcaaggagagaaaggtgtgggtgaaggagaacatggtgctgaacctgagctgcgaggccagcggccaccccagacccaccatcagctggaacgtgaacggcaccgccagcgagcaggaccaggacccccagagagtgctgagcaccctgaacgtgctggtgacccccgagctgctggagaccggcgtggagtgcaccgccagcaacgacctgggcaagaacaccagcatcctgttcctggagctggtgaacctgaccaccctgacccccgacagcaacaccaccaccggcctgagcaccagcaccgccagcccccacaccagagccaacagcaccagcaccgagagaaagctgcccgagcccgagagcagaggcgtggtgatcgtggccgtgatcgtgtgcatcctggtgctggccgtgctgggcgccgtgctgtacttcctgtacaagaagggcaagctgccctgcagaagaagcggcaagcaggagatcaccctgccccccagcagaaagagcgagctggtggtggaggtgaagagcgacaagctgcccgaggagatgggcctgctgcagggcagcagcggcgacaagagagcccccggcgaccagggcgagaagtacatcgacctgagacactag

SEQ ID NO: 165683 - DNA, 1584 bp, Artificial Sequence
  derived and/or modified sequence
atggtgtacatcgtgagacagttcctgctgtacaacgtgagcggcagcgtgtacctggaccagctgatcgtgctgctgaccgccaagttcagcatcctgagaatcgccggcagcagagtgcaccacagccccttcagcggccacctggacggctgcagcttcctgagcctgcagcacagcctgcacaccagcctggacatgagcagacacgagaacgtgttcctgggcctgaccctgagcagcaagagcgccggcctgaagggcttccagctggccttcgtgcccggcctgctgcagggcaccggcggctacctggacggccccctgcccacccccgtggacaaccccagagtgggcctggaggtgggcctgagactgagcctgccccccctgcccccctgccccggcgtgcacatccagagcagccagaccgtggagagcagcggcctgtacaccctgcagagcatcctgaaggcccagctggtgaaggaggacaaggacgcccagttctactgcgagctgaactacagactgcccagcggcaaccacatgaaggagagcagagaggtgaccgtgcccgtgttctaccccaccgagaaggtgtggctggaggtggagcccgtgggcatgctgaaggagggcgacagagtggagatcagatgcctggccgacggcaacccccccccccacttcagcatcagcaagcagaaccccagcaccagagaggccgaggaggagaccaccaacgacaacggcgtgctggtgctggagcccgccagaaaggagcacagcggcagatacgagtgccagggcctggacctggacaccatgatcagcctgctgagcgagccccaggagctgctggtgaactacgtgagcgacgtgagagtgagccccgccgcccccgagagacaggagggcagcagcctgaccctgacctgcgaggccgagagcagccaggacctggagttccagtggctgagagaggagaccggccaggtgctggagagaggccccgtgctgcagctgcacgacctgaagagagaggccggcggcggctacagatgcgtggccagcgtgcccagcatccccggcctgaacagaacccagctggtgaacgtggccatcttcggccccccctggatggccttcaaggagagaaaggtgtgggtgaaggagaacatggtgctgaacctgagctgcgaggccagcggccaccccagacccaccatcagctggaacgtgaacggcaccgccagcgagcaggaccaggacccccagagagtgctgagcaccctgaacgtgctggtgacccccgagctgctggagaccggcgtggagtgcaccgccagcaacgacctgggcaagaacaccagcatcctgttcctggagctggtgaacctgaccaccctgacccccgacagcaacaccaccaccggcctgagcaccagcaccgccagcccccacaccagagccaacagcaccagcaccggcaagcccggcctggccagagagcagggctgcgccagagccagcttcctgccctgccccagccccgagagccccgtgcagaagggcgagtag

SEQ ID NO: 165684 - DNA, 141 bp, Artificial Sequence
  derived and/or modified sequence
ggcgtggtgatcgtggccgtgatcgtgtgcatcctggtgctggccgtgctgggcgccgtgctgtacttcctgtacaagaagggcaagctgccctgcagaagaagcggcaagcaggagatggagagaaacaccagcatctag

SEQ ID NO: 165685 - DNA, 1941 bp, Artificial Sequence
  derived and/or modified sequence
atgggtctgcctaggctcgtgtgcgctttcttgcttgccgcgtgctgctgctgcccccgcgttgctggggtccctggcgaggcggaacagccagcaccggagcttgtggaggtggaggtgggcagcacagccctgcttaagtgcggactgtctcaatctcagggcaacttatcccacgtcgactggttttccgtgcataaggaaaagcgaacgctcatctttagggtgcgtcagggtcaaggtcagtccgagcccggtgagtatgaacagcgcctcagtctgcaggacaggggcgccacccttgcgttgacacaagtgacacctcaagatgagcggatctttctatgccagggcaagaggccaagatcacaagaatatagaatccagctccgagtctacaaagctcccgaagaacccaatattcaggtgaaccccttgggaatccccgtgaactccaaagagcctgaggaggtggctacttgtgtgggcaggaacggatatcccataccacaagtcatctggtacaagaatggaagacccctgaaggaagaaaagaacagagtgcatatccaaagcagccagacggtcgaatcaagtggtctatataccctgcagagcattctcaaagcacagcttgtcaaggaggataaggacgcccagttttattgcgagctaaattaccgactgcctagcggcaatcatatgaaggaaagcagagaggttacggttccagtcttctatcctacagagaaggtttggctggaggtggaaccagttggaatgctgaaagaaggagaccgcgtcgaaattcggtgcctggctgacggaaatcctccgccacatttctccatttcaaaacagaaccctagcacccgggaggccgaggaggaaacaacaaacgacaatggcgttctggtgctggaaccagcccgcaaggagcactctgggcgatatgaatgtcagggtctcgatctggacactatgatctccctgctcagcgagccccaggaactgctggtcaactacgtttctgatgtcagggtgtctcctgctgctcccgaaaggcaggaaggatcaagtctgactctgacgtgtgaggcggagtcatcccaggacctggagttccagtggctgcgtgaagagacaggtcaggttcttgagaggggcccggtcctgcagttgcatgacctgaaaagagaggccggaggcggttacagatgcgtggcctcagtcccttccatacctgggctgaatcggacacaactggtgaatgtagccatctttggaccaccctggatggccttcaaggagcgcaaggtctgggttaaggaaaacatggtgctgaacctttcttgcgaggccagcggacatccaaggccgacgatctcatggaacgttaatggcaccgcctctgaacaggatcaagacccgcagagggtcttatcaactctgaacgttttggtgacacctgaactgctggagactggcgtcgaatgtaccgcctcaaatgacctgggcaagaacacaagtatcttgttcctcgaactggtcaatctcaccacactgacacccgatagcaacactacaaccggattatctacctccacagcgtcaccacacacccgtgcgaattccacttcaacagagcggaagctgcctgaaccggagagccgaggcgttgtcattgtggccgttattgtttgtatcttggtcctcgccgtcctgggggcggttctgtatttcctgtacaagaaaggcaaactgccatgtagacgcagtggaaagcaagaaatcactctgcccccatctagaaaatccgagctcgtcgttgaggtcaagtcggacaagctgcctgaggagatgggcctgctgcagggtagttcgggggataaaagagctcccggtgatcagggcgagaagtacatcgacttgcggcactag

SEQ ID NO: 165686 - DNA, 1584 bp, Artificial Sequence
  derived and/or modified sequence
atggtgtacatcgtgcgccagtttctgctttacaatgtaagcgggagtgtgtatctggatcaactgatcgtgcttctgaccgcaaagttttctatcctgagaattgcaggaagccgagtgcatcacagccctttttcaggtcacctggatgggtgttcctttctgtccttgcagcatagtctgcacacctccctcgacatgtctagacatgagaacgtctttctgggactgacattaagctctaaatctgctggcctaaagggattccaacttgctttcgtccctggcttgctacagggcaccggtggctatcttgatgggccacttcccaccccagtcgacaatcccagggtgggattggaagttggcttacgcctgagcctgcccccgttgcccccttgtcctggtgtgcacattcagagtagtcaaacagttgagtctagcggactatacacgttacagagcattctgaaggctcagctcgtgaaggaggacaaagatgcccaattttactgcgaattaaattacaggctcccgtctggcaatcacatgaaggaaagccgcgaagtgactgttcccgttttctaccctaccgaaaaggtgtggctggaagttgagcccgtaggcatgctgaaggagggtgatagagtagagataagatgcttggccgatggaaacccacctccccatttcagcatctctaagcagaatccttctacccgcgaagcagaggaggaaaccaccaatgacaacggagtcctggttcttgagcccgcccgtaaggagcactcaggcagatacgagtgccaaggtctggaccttgacacaatgatcagccttctttctgaaccccaggagctgctcgtgaattatgtttctgacgtgagagtgagtcccgcggctccggaaagacaggagggttcctctctgaccctgacctgtgaggcagaatcttcacaggatctggaattccagtggcttcgggaagaaaccggccaggtgctagagcgcgggccggtgctccagctgcatgatctgaagcgcgaggccggcggtggctatagatgtgtggcctccgttccttctattcctggtcttaatcgtacccagctggtgaatgtggctatattcggacccccctggatggcattcaaagagcgtaaggtgtgggtgaaagagaatatggtgctgaacctgagctgtgaggcttccggtcacccgcgcccaacaatatcctggaatgtgaacgggacagcgtcagagcaggaccaagacccgcaaagggtgctctccactttaaacgtgctggtgacaccagagctccttgaaactggggtggagtgcaccgcttcgaatgaccttggtaagaatacaagcattctattcctggaactcgtaaacttaactacgctgacgcccgactcaaatactactacaggattgtctacatcaaccgcctctccacatactcgcgccaacagcacaagcacaggcaagcccggactggctagggagcagggctgcgccagggccagttttctgccttgcccctctcccgagtcgcccgttcagaagggtgaatag

SEQ ID NO: 165687 - DNA, 141 bp, Artificial Sequence
  derived and/or modified sequence
ggagtggtcatcgtggccgtcatcgtttgcattctggtgctcgcagtgctgggcgctgtactgtatttcctctataagaagggcaaactcccttgtaggagatctggaaagcaggaaatggagcgtaatacctccatctag

SEQ ID NO: 165688 - DNA, 1941 bp, Artificial Sequence
  derived and/or modified sequence
atgggcctgccccggctggtgtgtgccttcctgctggccgcctgctgctgctgcccccgggtggccggcgtgcctggagaggccgagcagcctgcccctgagctggtggaggtggaggtgggcagcacagccctgctgaagtgtggcctgagccagagccagggcaacctgagccacgtggactggttctctgtgcacaaggagaagaggaccctcatcttccgggtgcggcagggccagggccagagcgagcctggagaatatgagcagaggctgagcctgcaggacagaggagccaccctggccctgacccaggtgaccccccaggatgagcgcatcttcctgtgccagggcaagaggcccaggagccaggagtaccgcatccagctgcgggtgtacaaggcccctgaggagcccaacatccaggtgaaccccctgggcatccctgtgaacagcaaggagcctgaggaggtggccacctgtgtgggcagaaatggctaccccatcccccaggtgatctggtacaagaatggccggcccctgaaggaggagaagaacagagtgcacatccagagcagccagacagtggagagcagcggcctgtacaccctgcagagcatcctgaaggcccagctggtgaaggaggacaaggatgcccagttctactgtgagctgaactaccgcctgcccagcggcaaccacatgaaggagagccgggaggtgacagtgcctgtgttctaccccacagagaaggtgtggctggaggtggagcctgtgggcatgctgaaggagggggacagagtggagatccgctgcctggctgatggcaaccccccaccccacttcagcatcagcaagcagaaccccagcacccgggaggccgaggaggagaccaccaatgacaacggggtgctggtgctggagcccgccaggaaggagcacagcggccgctatgagtgccagggcctggacctggacaccatgatcagcctgctgtctgagccccaggagctgctggtgaactacgtgtctgatgtgcgggtgtccccagctgcccctgagcggcaggagggcagcagcctgaccctgacctgtgaggccgagagcagccaggacctggagttccagtggctgcgggaggagaccggccaggtgctggagcggggccctgtgctgcagctgcatgacctgaagcgggaggccggcggcggctaccgctgtgtggcctctgtgcccagcatccctggcctgaacagaacccagctggtgaatgtggccatcttcggccccccctggatggccttcaaggagaggaaggtgtgggtgaaggagaacatggtgctgaacctgagctgtgaggccagcggccacccccggcccaccatctcctggaatgtgaatggaacagccagcgagcaggaccaggacccccagagggtgctgagcaccctgaatgtgctggtgaccccagagctgctggagactggagtggagtgcacagccagcaatgacctgggcaagaacaccagcatcctcttcctggagctggtgaacctgaccaccctgaccccagacagcaacaccaccaccggcctgagcaccagcacagccagcccccacacccgggccaacagcaccagcacagagaggaagctgcctgagcctgagagcagaggagtggtgattgtggccgtcatcgtgtgcatcctggtgctggccgtgctgggcgctgtgctgtacttcctgtacaagaagggcaagctgccctgcagaagaagtggcaagcaggagatcaccctgccccccagcaggaagtctgagctggtggtggaggtgaagagtgacaagctgcctgaggagatgggcctgctgcagggcagcagcggggacaagagggcccctggggaccagggcgagaagtacatcgacctgcggcactag

SEQ ID NO: 165689 - DNA, 1584 bp, Artificial Sequence
  derived and/or modified sequence
atggtgtacatcgtgcggcagttcctgctgtacaacgtgtctggctctgtgtacctggaccagctgattgtgctgctgacagccaagttcagcatcctgagaattgctggcagccgggtgcaccacagccccttcagcggccacctggatggctgcagcttcctgagcctgcagcacagcctgcacaccagcctggacatgagcagacatgaaaatgtgttcctgggcctgaccctgagcagcaagtctgctggcctgaagggcttccagctggcctttgtgcccggcctgctgcagggcactggaggctacctggatggccccctgcccacccctgtggacaacccccgggtgggcctggaggtgggcctgcggctgagcctgccccccctgcccccctgccctggggtgcacatccagagcagccagacagtggagagcagcggcctgtacaccctgcagagcatcctgaaggcccagctggtgaaggaggacaaggatgcccagttctactgtgagctgaactaccgcctgcccagcggcaaccacatgaaggagagccgggaggtgacagtgcctgtgttctaccccacagagaaggtgtggctggaggtggagcctgtgggcatgctgaaggagggggacagagtggagatccgctgcctggctgatggcaaccccccaccccacttcagcatcagcaagcagaaccccagcacccgggaggccgaggaggagaccaccaatgacaatggagtgctggtgctggagcccgccaggaaggagcacagcggccgctatgagtgccagggcctggacctggacaccatgatcagcctgctgtctgagccccaggagctgctggtgaactacgtgtctgatgtgcgggtgtccccagctgcccctgagcggcaggagggcagcagcctgaccctgacctgtgaggccgagagcagccaggacctggagttccagtggctgcgggaggagaccggccaggtgctggagcggggccctgtgctgcagctgcatgacctgaagcgggaggccggcggcggctaccgctgtgtggcctctgtgcccagcatccctggcctgaacagaacccagctggtgaatgtggccatctttggaccaccctggatggccttcaaggagaggaaggtgtgggtgaaggagaacatggtgctgaacctgagctgtgaggccagcggccacccccggcccaccatctcctggaatgtgaatggaacagccagcgagcaggaccaggacccccagagggtgctgagcaccctgaatgtgctggtgaccccagagctgctggagaccggggtggagtgcacagccagcaatgacctgggcaagaacaccagcatcctcttcctggagctggtgaacctgaccaccctgaccccagacagcaacaccaccaccggcctgagcaccagcacagccagcccccacacccgggccaacagcaccagcacaggcaagccaggcctggcccgggagcagggctgtgcccgggccagcttcctgccctgccccagccctgagagccctgtgcagaagggggagtag

SEQ ID NO: 165690 - DNA, 141 bp, Artificial Sequence
  derived and/or modified sequence
ggtgtggtgattgtggccgtcatcgtgtgcatcctggtgctggccgtgctgggcgctgtgctgtacttcctgtacaagaagggcaagctgccctgcagaagaagtggcaagcaggagatggagaggaacaccagcatctag

SEQ ID NO: 165691 - DNA, 3311 bp, Artificial Sequence
  derived and/or modified sequence
ctccggccgggaagcatggggcttcccaggctggtctgcgccttcttgctcgccgcctgctgctgctgtcctcgcgtcgcgggtgtgcccggagaggctgagcagcctgcgcctgagctggtggaggtggaagtgggcagcacagcccttctgaagtgcggcctctcccagtcccaaggcaacctcagccatgtcgactggttttctgtccacaaggagaagcggacgctcatcttccgtgtgcgccagggccagggccagagcgaacctggggagtacgagcagcggctcagcctccaggacagaggggctactctggccctgactcaagtcaccccccaagacgagcgcatcttcttgtgccagggcaagcgccctcggtcccaggagtaccgcatccagctccgcgtctacaaagctccggaggagccaaacatccaggtcaaccccctgggcatccctgtgaacagtaaggagcctgaggaggtcgctacctgtgtagggaggaacgggtaccccattcctcaagtcatctggtacaagaatggccggcctctgaaggaggagaagaaccgggtccacattcagtcgtcccagactgtggagtcgagtggtttgtacaccttgcagagtattctgaaggcacagctggttaaagaagacaaagatgcccagttttactgtgagctcaactaccggctgcccagtgggaaccacatgaaggagtccagggaagtcaccgtccctgttttctacccgacagaaaaagtgtggctggaagtggagcccgtgggaatgctgaaggaaggggaccgcgtggaaatcaggtgtttggctgatggcaaccctccaccacacttcagcatcagcaagcagaaccccagcaccagggaggcagaggaagagacaaccaacgacaacggggtcctggtgctggagcctgcccggaaggaacacagtgggcgctatgaatgtcagggcctggacttggacaccatgatatcgctgctgagtgaaccacaggaactactggtgaactatgtgtctgacgtccgagtgagtcccgcagcccctgagagacaggaaggcagcagcctcaccctgacctgtgaggcagagagtagccaggacctcgagttccagtggctgagagaagagacaggccaggtgctggaaagggggcctgtgcttcagttgcatgacctgaaacgggaggcaggaggcggctatcgctgcgtggcgtctgtgcccagcatacccggcctgaaccgcacacagctggtcaacgtggccatttttggccccccttggatggcattcaaggagaggaaggtgtgggtgaaagagaatatggtgttgaatctgtcttgtgaagcgtcagggcacccccggcccaccatctcctggaacgtcaacggcacggcaagtgaacaagaccaagatccacagcgagtcctgagcaccctgaatgtcctcgtgaccccggagctgttggagacaggtgttgaatgcacggcctccaacgacctgggcaaaaacaccagcatcctcttcctggagctggtcaatttaaccaccctcacaccagactccaacacaaccactggcctcagcacttccactgccagtcctcataccagagccaacagcacctccacagagagaaagctgccggagccggagagccggggcgtggtcatcgtggctgtgattgtgtgcatcctggtcctggcggtgctgggcgctgtcctctatttcctctataagaagggcaagctgccgtgcaggcgctcagggaagcaggagatcacgctacccccgtctcgtaagagcgaacttgtagttgaagttaagtcagataagctcccagaagagatgggcctcctgcagggcagcagcggtgacaagagggctccgggagaccagggagagaaatacatcgatctgaggcattagccccgaatcacttcagctcccttccctgcctggaccattcccagctccctgctcactcttctctcagccaaagcctccaaagggactagagagaagcctcctgctcccctcgcctgcacaccccctttcagagggccactgggttaggacctgaggacctcacttggccctgcaaggcccgcttttcagggaccagtccaccaccatctcctccacgttgagtgaagctcatcccaagcaaggagccccagtctcccgagcgggtaggagagtttcttgcagaacgtgttttttctttacacacattatggctgtaaatacctggctcctgccagcagctgagctgggtagcctctctgagctggtttcctgccccaaaggctggcttccaccatccaggtgcaccactgaagtgaggacacaccggagccaggcgcctgctcatgttgaagtgcgctgttcacacccgctccggagagcaccccagcagcatccagaagcagctgcagtgttgctgccaccaccctcctgtctgcctcttcaaagtctcctgtgacattttttctttggtcagaagccaggaactggtgtcattccttaaaagatacgtgccggggccaggtgtggtggctcacgcctgtaatcccagcactttgggaggccgaggcgggcggatcacaaagtcaggacgagaccatcctggctaacacggtgaaaccctgtctctactaaaaatacaaaaaaaaattagctaggcgtagtggttggcacctatagtcccagctactcggaaggctgaagcaggagaatggtatgaatccaggaggtggagcttgcagtgagccgagaccgtgccactgcactccagcctgggcaacacagcgagactccgtctcgaggaaaaaaaaagaaaagatacgtgcctgcggtgaggaagctgggcgctgttttcgagttcaggtgaattagcctcaatcccccgtgttcacttggctcccatagccctcttgatggatcacgtaaaactgaaaggcagcggggagcagacaaagatgaggtctacactgtccttcatggggattaaagctatggttatattagcaccaaacttctacaaaccaagctcagggccccaaccctagaagggcccaaatgagagaatggtacttagggatggaaaacgggcctggctagagcttcgggtgtgtgtgtctgtctgtgtgtatgcatacatatgtgtgtatatatggttttgtcaggtgtgtaaatttgcaaattgtttcctttatatatgtatgtatatatatatatgaaaatatatatatatatgaaaaataaagcttaattgtcccaga

SEQ ID NO: 165692 - DNA, 3487 bp, Artificial Sequence
  derived and/or modified sequence
ttgaaaatattttcatgagaatttaaactgacaaaaaatctagaagtttcttcttgcctgagaccccccctcccagaaataatctctgctatcagggtgtgttctttcaagcctatttctatgtatttgctcatatatagaaatatttctagaatgatataggcttctgtgttttattatctaaatcagtcattcttaaccaggggtgattttgtaccccctcctcctaggagatacttggcaatgtctggagatatttttggttgtcacacatagagggggtgctactgccatctagtaggtagagagaccaaggatgttgctaacatcctatagggcacaggacagcccccacaataaagaatcaacgtggcctaaaacatcagtagtgctggctgggctcacgcctgtaatcccagcacttttggaggccaaggtgggcggatcacctgaggtcgggagttcaagaccagcctgtccaacacggagaaaccccatctctactgaaaatacaaaagtagccgggcgtggtggcgcatgtctgtaatcccagctactcaggaggctgaggcaggagaatcacttgaagccgggagggaggtggaggttgcggtgagccgagattgtaccactgcactccagcctgggcaacaagagtgaaactctgtctgaaaaaaaaaaaaaaaaaattatcagtagtgctgagaaaccctggtctaagtggtggtgtatggtatacattgttagacaatttcttttatacaatgtttctgggtcagtctatttagatcaactgatcgttttgcttactgccaagttttccatactacgcatagcaggtagtcgagttcaccattccccatttagtggacatctagacggctgctcgtttttatcattgcagcattctttgcacacatccttggatatgagcagacatgaaaatgtttttctagggttgacactgagcagtaaaagtgctgggttgaagggtttccagcttgcatttgtacctggccttctacaggggacagggggctatttagatggtcccctgccaaccccagtggacaaccctagggtggggctggaggtggggctgaggctgagtcttcctccccttcctccctgcccaggggtccacattcagtcgtcccagactgtggagtcgagtggtttgtacaccttgcagagtattctgaaggcacagctggttaaagaagacaaagatgcccagttttactgtgagctcaactaccggctgcccagtgggaaccacatgaaggagtccagggaagtcaccgtccctgttttctacccgacagaaaaagtgtggctggaagtggagcccgtgggaatgctgaaggaaggggaccgcgtggaaatcaggtgtttggctgatggcaaccctccaccacacttcagcatcagcaagcagaaccccagcaccagggaggcagaggaagagacaaccaacgacaacggggtcctggtgctggagcctgcccggaaggaacacagtgggcgctatgaatgtcagggcctggacttggacaccatgatatcgctgctgagtgaaccacaggaactactggtgaactatgtgtctgacgtccgagtgagtcccgcagcccctgagagacaggaaggcagcagcctcaccctgacctgtgaggcagagagtagccaggacctcgagttccagtggctgagagaagagacaggccaggtgctggaaagggggcctgtgcttcagttgcatgacctgaaacgggaggcaggaggcggctatcgctgcgtggcgtctgtgcccagcatacccggcctgaaccgcacacagctggtcaacgtggccatttttggccccccttggatggcattcaaggagaggaaggtgtgggtgaaagagaatatggtgttgaatctgtcttgtgaagcgtcagggcacccccggcccaccatctcctggaacgtcaacggcacggcaagtgaacaagaccaagatccacagcgagtcctgagcaccctgaatgtcctcgtgaccccggagctgttggagacaggtgttgaatgcacggcctccaacgacctgggcaaaaacaccagcatcctcttcctggagctggtcaatttaaccaccctcacaccagactccaacacaaccactggcctcagcacttccactgccagtcctcataccagagccaacagcacctccacaggtaagccaggcctggcaagagaacagggctgtgccagggcatcctttctgccctgtccctccccagagagccctgtccagaaaggtgagtagcagccccatcttgtcggccctggactggctgggccaacgatggtgacgaagtggcctggggcagggagtgacgaggagtgtctttgtggcgcagagagaaagctgccggagccggagagccggggcgtggtcatcgtggctgtgattgtgtgcatcctggtcctggcggtgctgggcgctgtcctctatttcctctataagaagggcaagctgccgtgcaggcgctcagggaagcaggagatcacgctacccccgtctcgtaagagcgaacttgtagttgaagttaagtcagataagctcccagaagagatgggcctcctgcagggcagcagcggtgacaagagggctccgggagaccagggagagaaatacatcgatctgaggcattagccccgaatcacttcagctcccttccctgcctggaccattcccagctccctgctcactcttctctcagccaaagcctccaaagggactagagagaagcctcctgctcccctcgcctgcacaccccctttcagagggccactgggttaggacctgaggacctcacttggccctgcaaggcccgcttttcagggaccagtccaccaccatctcctccacgttgagtgaagctcatcccaagcaaggagccccagtctcccgagcgggctggcttccaccatccaggtgcaccactgaagtgaggacacaccggagccaggcgcctgctcatgttgaagtgcgctgttcacacccgctccggagagcaccccagcagcatccagaagcagctgcagtgttgctgccaccaccctcctgtctgcctcttcaaagtctcctgtgacattttttctttggtcagaagccaggaactggtgtcattccttaaaagatacgtgccggggccaggtgtggtggctcacgcctgtaatcccagcactttgggaggccgaggcgggcggatcacaaagtcaggacgagaccatcctggctaacacggtgaaaccctgtctctactaaaaatacaaaaaaaaattagctaggcgtagtggttggcacctatagtcccagctactcggaaggctgaagcaggagaatggtatgaatccaggaggtggagcttgcagtgagccgagaccgtgccactgcactccagcctgggcaacacagcgagactccgtctcgagg

SEQ ID NO: 165693 - DNA, 141 bp, Artificial Sequence
  derived and/or modified sequence
ggcgtggtcatcgtggctgtgattgtgtgcatcctggtcctggcggtgctgggcgctgtcctctatttcctctataagaagggcaagctgccgtgcaggcgctcagggaagcaggagatggagagaaatacatcgatctga

SEQ ID NO: 165694 - DNA, 1941 bp, Artificial Sequence
  derived and/or modified sequence
atgggcctgccccggctggtgtgcgccttcctgctggccgcctgctgctgttgtccaagggtggcaggcgtgccaggagaggcagagcagccagcacccgagctggtcgaagtcgaggtgggaagcacagcattactcaaatgcggcttgtctcagtcccagggaaatctgtctcacgtagattggtttagcgtccataaggaaaaacggaccctgatttttcgcgtgagacagggccaggggcagagtgaacccggcgagtacgagcagcgactgagtctgcaggacaggggagcgacactggccctgacacaagtcaccccccaagacgaacggatcttcttgtgccagggtaaaagacctcggtcacaggagtacagaattcagctgcgggtctacaaagctccagaggagccaaacatccaggtgaaccccctgggtatccccgttaactctaaggaacctgaggaggttgcgacctgcgtaggcagaaatggctatcccatcccgcaggttatatggtacaagaacgggcggcccctcaaagaggagaagaaccgggtgcacatccaaagttctcagacagtagagtcaagcggcctgtacaccctccaaagtatcctcaaggcgcaactggtaaaggaagataaggacgcgcaattttactgcgagctcaactacaggctgcctagcgggaaccacatgaaggagagtagagaggtcacagtgcccgtcttttaccccaccgagaaagtgtggctagaagttgagcctgtcgggatgttgaaggagggggacagggtagaaattcgatgtctcgctgatgggaatccgcccccccacttctcaatctccaagcaaaacccttctactagggaggccgaagaggagaccaccaacgacaatggggtgttggtgcttgagccagcccgaaaggagcactcaggcagatacgagtgtcaaggcctggatttagacaccatgatctcactgttatctgaaccgcaggagttgctcgtgaactacgtgtccgacgtccgagtctcacctgccgcaccagaacgacaggaggggagttcgcttaccttgacatgtgaagctgaatcctcccaggatttagagttccaatggctgcgggaagaaaccgggcaggtcctagaacggggtcctgtgctgcagctgcatgatttgaagagggaagcaggcggaggataccgttgtgtcgcttcagtgccttcgatcccgggattgaacagaacacaactcgtcaatgtagcaatttttggcccaccatggatggcttttaaggaacgcaaggtatgggtgaaggaaaacatggtcttaaacctgagttgcgaagctagtggccacccgcggcccaccatctcgtggaacgtcaatgggacagccagtgagcaggaccaggacccccagcgcgtgttatcaactcttaacgtgctggtcactcccgagctgctggagactggtgtagagtgcaccgccagtaacgaccttggcaaaaacacatccatcttgttcctcgaacttgtgaatcttaccactctgacccctgattccaatactaccaccggtctttctacatccaccgcatcccctcacacacgtgcaaatagcacgtcgacagaacggaaactgcctgagcccgagagccggggcgtcgtgattgtagcagtcattgtgtgcattctagttctcgcagttcttggggcggtcctctatttcctgtacaagaagggcaagctaccttgtcgacgatctgggaagcaagagattactctgcctcccagcaggaagagtgagcttgtggtggaggttaaatctgacaaactacccgaagagatgggcttgctgcagggcagctctggggacaaacgagcgcctggcgaccaaggcgagaagtacatcgatttgagacattag

SEQ ID NO: 165695 - DNA, 1584 bp, Artificial Sequence
  derived and/or modified sequence
atggtgtacatcgtgcggcagttcctgctgtacaacgtgagcggcagcgtctatttggatcagctgatcgtgctgttgaccgctaagttttccatcctgcgcattgccgggagccgggtacaccacagtcccttctcagggcatctcgatgggtgtagtttcctgtccctgcaacactccctacatacaagtctggatatgagcagacatgaaaatgtgtttctgggcctgacgctcagctccaaatccgccggtcttaaagggtttcagctagccttcgtacccgggctattacagggaacaggcggatatctcgacgggcccctgcccacacctgtcgataacccccgtgttgggttggaggtcgggctgcgattgtcgctaccgccactgcctccctgcccgggcgtacatatccaatcaagccaaactgtggaaagctcaggcctgtacaccctgcaatctatcctgaaggcacagctggtgaaagaagacaaagacgcacaattctattgcgagctgaattaccgtctgccgtccggaaaccacatgaaagagtcccgtgaggtaacagtacctgtgttctacccaactgagaaggtttggctggaggttgaaccagtggggatgctgaaagagggagaccgggtggagattcgttgcctcgccgatggaaatccacccccccatttttcgatctccaaacagaaccccagcaccagggaggctgaggaagagacaaccaatgacaacggtgtgctggtgttggaacccgcacgtaaggagcattcgggccgatacgaatgccagggcctggatctcgataccatgatctcgctgctttcagagcctcaggagttgctggtgaactacgtgagcgatgtgagggtgagtcccgccgcccctgaacgtcaggaaggttcttccctgacactgacatgtgaagctgagagcagccaggacctggaattccagtggttgcgtgaagagactggccaggtcctcgaaagaggccccgttttacaactgcacgatcttaagcgagaggcgggaggaggttatcgctgtgttgccagcgtcccaagcattcctggactgaatcgcactcagctggtgaatgtcgccatcttcgggccgccctggatggcatttaaggaacgaaaggtttgggtgaaagaaaatatggtgttgaaccttagttgtgaggcgtctggtcacccacgcccgaccatctcctggaacgtcaacgggacagcatcggagcaagaccaagacccccaaagggtcctctccacactgaatgtgctggtgacaccagaactattggagactggtgtcgaatgtaccgcctctaacgatcttggcaaaaacacgagcatcctgtttttggagctcgtgaacctaaccacacttactcccgatagcaatacaaccacgggcttgtctacatcaaccgcctcaccccacactcgcgcaaacagcacgagcaccggcaagcctgggttagctagggaacagggttgcgcacgggcctccttcctcccgtgcccatctcccgaaagtcccgtccagaaaggggagtag

SEQ ID NO: 165696 - DNA, 141 bp, Artificial Sequence
  derived and/or modified sequence
ggcgtggtgatcgtggccgtgatcgtgtgcatcctggtgctggccgtgctgggcgccgtgctctacttcctgtataaaaaaggcaaacttccctgcaggagatcaggtaagcaggagatggaaagaaacacatccatatag

SEQ ID NO: 165697 - DNA, 1941 bp, Artificial Sequence
  derived and/or modified sequence
atgggtctaccccgtctggtgtgtgctttccttctggcggcttgttgttgctgccctagggtggctggcgttccaggtgaggcagaacagccagcacccgagctggtggaggtggaagtgggtagcacagctctgctgaagtgtggcttaagccagtctcaggggaatctgagtcacgtggattggttcagtgtccacaaagagaagaggacactgatctttagagtgaggcagggccaggggcagtcagagcctggcgagtacgaacaacgtttgtccctccaggataggggagcaacattagctctgactcaagtgactccacaggatgaaagaatcttcctgtgtcaaggaaagcggcctaggagtcaggagtacagaattcagctccgggtatataaggcccctgaagagccaaacattcaagttaacccactcgggatccctgtgaatagcaaggagccggaagaagtggctacatgcgtaggccgaaatggataccctatccctcaggtgatttggtacaaaaacggacgtcctcttaaggaggaaaaaaaccgtgtgcatatccagtcctcgcagacagtcgagtcatccggcctatacaccctgcagtctatccttaaggcccagctggttaaggaggataaagatgcacagttttattgcgaacttaactaccgactcccatctggcaaccacatgaaagaatccagagaagtaacagtccctgtcttttacccaaccgaaaaagtctggctggaagtggaaccagtgggtatgctgaaagaaggtgacagagtggagattcgttgtctggctgatggtaaccctccacctcacttctccataagtaagcagaacccaagcacacgggaagcagaggaagagaccaccaatgacaatggggtgcttgtcctcgagcccgctaggaaagaacatagcgggagatacgagtgccagggcttagatctggacaccatgatctctttgttatcagaaccccaggagctgctggtgaattatgtctccgacgtgcgggtgagtcccgctgcgcctgagcggcaggagggatcttccctcacactcacctgcgaggcagagagctcccaggacttggagttccagtggcttcgagaagagacagggcaggtgttggagcgcggtcccgtcctgcaactgcatgaccttaagcgcgaagctgggggtggatacaggtgcgtggctagcgtaccatctatcccaggcctgaaccgtacccaattggtcaatgtggcaatctttgggcctccttggatggcctttaaagaaagaaaggtgtgggtcaaggagaacatggtgcttaatttgagttgcgaggcatctggccatccccgacctaccataagctggaacgtgaatggaactgcatcagagcaagatcaggacccccaaagagtgttaagcaccctgaacgtgctagtaacccctgaacttctcgagaccggagtcgagtgcactgcctcaaacgatttgggcaaaaacacttcaattctatttctagaactcgttaatctgaccacactcacccctgatagcaataccaccaccggactgtctacgtcaaccgcctcaccacacactcgagctaattccacctccacagaaaggaagctgccagaaccggagagccggggagtggttatagttgcagtcattgtctgcatactggttctggctgtcctcggcgcagttttgtactttctgtataagaaaggaaaacttccctgccgcaggtctggcaaacaggaaatcaccctgccgccttcccgcaagtctgagctcgtcgtcgaggttaaatccgacaagctcccagaggagatgggtctgctgcaagggagttctggagacaagcgcgcaccaggagaccagggtgagaagtacattgatctcaggcactag

SEQ ID NO: 165698 - DNA, 1584 bp, Artificial Sequence
  derived and/or modified sequence
atggtgtacattgtccggcagtttctcctctacaacgttagcggtagtgtttacctggatcaactcatcgtgttactgacagccaagttctcgattctccgcattgccggaagcagggtgcatcactccccatttagtggccatttggatggctgcagtttcctcagccttcagcacagcctgcacacgtctcttgatatgtcacggcacgaaaatgtgttcctgggactgacactctcctcaaagagcgcgggactgaagggtttccagttggcattcgtgccaggactactgcagggaaccggcggatatttagacggaccccttccaactccagttgacaaccctagggtgggcctggaggtgggcttgaggcttagcctcccaccactcccaccctgtcctggagtgcatatccagtctagtcagaccgtcgagtcttcggggctgtacacactgcagtcaatcctaaaagcacagctcgtgaaggaagacaaggacgcacaattctattgcgagctgaactatcgactgccctcgggaaaccacatgaaagagagtagggaggttacggttccagtcttctatcccaccgagaaggtgtggctggaagttgagcctgtcggcatgctcaaggaaggcgacagggttgagattaggtgtctagccgacggcaacccccctccccattttagcatatctaagcagaacccatcaacgcgggaggctgaggaggagacaacaaatgacaacggcgtactagttctcgaacccgctagaaaagagcacagtggcaggtacgagtgtcagggcttggatctagatactatgatctcacttctaagcgagccgcaagaactgctggtaaactacgtctcagacgtccgggtcagccctgctgctcccgagaggcaggagggtagctccttaacactgacctgtgaagccgagagttcccaggacttggagttccagtggctgcgcgaagagacaggccaggtgttagaaagggggccagtgttgcaactgcatgatctgaagcgggaagccggagggggttaccgctgcgtggctagcgtgcccagcatcccaggcctgaaccggacacaactcgtgaacgtcgccatcttcggccctccatggatggcattcaaggaaagaaaggtgtgggtgaaagaaaatatggtactgaatctcagctgcgaggctagtggccacccacggcctacgattagttggaacgttaatggaacggcctctgaacaagatcaggatccccaacgagtgctgtccaccctcaacgtgttggttacaccagagctcctcgagacgggtgtcgagtgtacggcatccaatgatctcgggaagaatacttccatactgttcttggagttagtgaacttgaccacactaacgccagactccaatacgaccaccggcttatctacctccacggcatcgccacacacaagagctaattcaaccagcactggaaaacccggacttgccagggagcaggggtgtgccagggccagctttctcccctgtccttccccagagtctcctgttcagaaaggtgagtag

SEQ ID NO: 165699 - DNA, 141 bp, Artificial Sequence
  derived and/or modified sequence
ggtgtggtgatcgtcgcagtcattgtttgcattctggttctcgccgttttaggggctgttctgtatttcctctacaaaaagggcaagttgccatgtaggcgttccgggaaacaagaaatggaacgcaacacctctatttag

SEQ ID NO: 165700 - protein, 414 aa, Artificial Sequence
  derived and/or modified sequence
MATGQDRVVALVDMDCFFVQVEQRQNPHLRNKPCAVVQYKSWKGGGIIAVSYEARAFGVTRSMWADDAKKLCPDLLLAQVRESRGKANLTKYREASVEVMEIMSRFAVIERASIDEAYVDLTSAVQERLQKLQGQPISADLLPSTYIEGLPQGPTTAEETVQKEGMRKQGLFQWLDSLQIDNLTSPDLQLTVGAVIVEEMRAAIERETGFQCSAGISHNKVLAKLACGLNKPNRQTLVSHGSVPQLFSQMPIRKIRSLGGKLGASVIEILGIEYMGELTQFTESQLQSHFGEKNGSWLYAMCRGIEHDPVKPRQLPKTIGCSKNFPGKTALATREQVQWWLLQLAQELEERLTKDRNDNDRVATQLVVSIRVQGDKRLSSLRRCCALTRYDAHKMSHDAFTVIKNCNTSGIQTE

SEQ ID NO: 165701 - protein, 713 aa, Artificial Sequence
  derived and/or modified sequence
MATGQDRVVALVDMDCFFVQVEQRQNPHLRNKPCAVVQYKSWKGGGIIAVSYEARAFGVTRSMWADDAKKLCPDLLLAQVRESRGKANLTKYREASVEVMEIMSRFAVIERASIDEAYVDLTSAVQERLQKLQGQPISADLLPSTYIEGLPQGPTTAEETVQKEGMRKQGLFQWLDSLQIDNLTSPDLQLTVGAVIVEEMRAAIERETGFQCSAGISHNKVLAKLACGLNKPNRQTLVSHGSVPQLFSQMPIRKIRSLGGKLGASVIEILGIEYMGELTQFTESQLQSHFGEKNGSWLYAMCRGIEHDPVKPRQLPKTIGCSKNFPGKTALATREQVQWWLLQLAQELEERLTKDRNDNDRVATQLVVSIRVQGDKRLSSLRRCCALTRYDAHKMSHDAFTVIKNCNTSGIQTEWSPPLTMLFLCATKFSASAPSSSTDITSFLSSDPSSLPKVPVTSSEAKTQGSGPAVTATKKATTSLESFFQKAAERQKVKEASLSSLTAPTQAPMSNSPSKPSLPFQTSQSTGTEPFFKQKSLLLKQKQLNNSSVSSPQQNPWSNCKALPNSLPTEYPGCVPVCEGVSKLEESSKATPAEMDLAHNSQSMHASSASKSVLEVTQKATPNPSLLAAEDQVPCEKCGSLVPVWDMPEHMDYHFALELQKSFLQPHSSNPQVVSAVSHQGKRNPKSPLACTNKRPRPEGMQTLESFFKPLTH

SEQ ID NO: 165702 - protein, 651 aa, Artificial Sequence
  derived and/or modified sequence
MWADDAKKLCPDLLLAQVRESRGKANLTKYREASVEVMEIMSRFAVIERASIDEAYVDLTSAVQERLQKLQGQPISADLLPSTYIEGLPQGPTTAEETVQKEGMRKQGLFQWLDSLQIDNLTSPDLQLTVGAVIVEEMRAAIERETGFQCSAGISHNKVLAKLACGLNKPNRQTLVSHGSVPQLFSQMPIRKIRSLGGKLGASVIEILGIEYMGELTQFTESQLQSHFGEKNGSWLYAMCRGIEHDPVKPRQLPKTIGCSKNFPGKTALATREQVQWWLLQLAQELEERLTKDRNDNDRVATQLVVSIRVQGDKRLSSLRRCCALTRYDAHKMSHDAFTVIKNCNTSGIQTEWSPPLTMLFLCATKFSASAPSSSTDITSFLSSDPSSLPKVPVTSSEAKTQGSGPAVTATKKATTSLESFFQKAAERQKVKEASLSSLTAPTQAPMSNSPSKPSLPFQTSQSTGTEPFFKQKSLLLKQKQLNNSSVSSPQQNPWSNCKALPNSLPTEYPGCVPVCEGVSKLEESSKATPAEMDLAHNSQSMHASSASKSVLEVTQKATPNPSLLAAEDQVPCEKCGSLVPVWDMPEHMDYHFALELQKSFLQPHSSNPQVVSAVSHQGKRNPKSPLACTNKRPRPEGMQTLESFFKPLTH

SEQ ID NO: 165703 - DNA, 2142 bp, Artificial Sequence
  derived and/or modified sequence
atggccacaggccaggacagggtggtcgcgctcgtggatatggattgtttttttgttcaggtagagcagaggcagaatccgcacctgagaaacaagccctgtgccgtggtgcagtacaaaagctggaaaggtgggggcatcatcgcggtgagttatgaggcccgcgcctttggagtcacccggtcgatgtgggctgatgacgcaaagaagttatgccccgatctcctgctagcacaggtgcgggaaagtcgagggaaagccaacctgacaaaatatcgcgaagcctctgttgaggttatggagattatgtctcgctttgccgtcatcgagagagcttcaatagacgaggcgtacgtggacctgacctcagcagttcaggaaaggctccaaaaactacagggccagcctatctccgcagatctgttgccatcgacctacattgaggggctccctcaaggtcccaccaccgcagaagaaactgtgcagaaagagggcatgagaaaacaaggcctatttcagtggctggactccctgcagatcgacaaccttacgtcaccagatttgcagctcactgttggcgcggtgattgtggaggagatgcgggccgcaattgaaagggagacgggctttcaatgctccgcagggatttcgcataacaaagtgctcgccaaacttgcatgtggattaaacaaaccaaaccgacagaccctggtgtcacatggcagcgtacctcagcttttttcccaaatgccaattcgtaagatccggtccctggggggaaagctaggcgcctctgtaatcgagattttgggaattgaatacatgggtgagttaactcagtttaccgaatctcagcttcagtctcacttcggagagaagaatggcagttggttgtatgccatgtgcagaggcatcgaacacgatcccgtgaagcctagacaactgcctaaaaccattggctgttcaaagaacttccctggcaaaaccgccctggcgactagggagcaagtccagtggtggttactccagctcgcccaagagctcgaggaaagactgacaaaggatcgtaatgacaatgatcgcgtagctacccagctggttgtcagtatccgagttcagggagataagcgattaagctcactgcgcaggtgttgtgcgctgacaagatacgatgcgcacaaaatgagccacgacgcatttacagtaatcaagaactgcaacaccagcggtatccagacagaatggtcgccacctctaactatgctgttcctatgcgctactaaattctccgccagtgctccttcttcctctacggacataacttccttcctttcctccgatccttctagccttcccaaagttcctgttacatcgtcagaggctaagactcaggggtcaggtcccgcagtgaccgctactaagaaggcgaccacctccctggagagtttcttccaaaaagccgccgagagacagaaggtaaaagaagcctccctgagtagcctcacagcccccacccaagctccaatgagtaattctcctagtaagccatctctcccattccagacctcccagagcacgggcacagagccgtttttcaagcagaaaagcctcctgctgaaacagaagcagcttaataacagcagcgtttcatcgcctcaacagaatccttggagcaactgtaaggccttacctaatagcctccctacagagtatccagggtgcgtaccagtttgcgagggagttagcaagctggaagaatcttcaaaagccacccccgccgaaatggatctagcccacaattcccagtccatgcacgcctcttcagcgtcaaaatcagtactcgaggtgactcagaaggccacgcccaatccctcccttttggctgccgaagaccaagttccttgtgaaaagtgtgggtccttggtaccggtgtgggatatgcccgagcatatggactatcatttcgctcttgagcttcagaaatccttcctccagccgcattctagtaacccacaggttgtgtctgcagtgagtcaccagggcaagcggaacccgaagtccccgctggcctgcactaacaaacgcccgcggccagagggaatgcagacactggaaagcttctttaagcctctcacccactag

SEQ ID NO: 165704 - DNA, 2142 bp, Artificial Sequence
  derived and/or modified sequence
atggccaccggccaggacagagtggtggccctggtggacatggactgcttctttgtgcaggtggagcagaggcagaacccccacctgaggaacaagccctgtgctgtggtgcagtacaagtcctggaagggcggcggcatcatcgctgtgtcctatgaggcccgggcctttggagtgaccaggtccatgtgggcagatgatgccaagaagctgtgcccagacctgctgctggcccaggtgcgggagagccggggcaaggccaacctgaccaagtaccgggaggcctctgtggaggtgatggagatcatgagcagatttgctgtgattgagcgggccagcattgatgaggcctacgtggacctgaccagcgctgtgcaggagcggctgcagaagctgcagggccagcccatctctgctgacctgctgcccagcacctacatcgagggcctgccccagggccccaccacagctgaggagaccgtgcagaaggagggcatgaggaagcagggcctcttccagtggctggacagcctgcagattgacaacctgaccagcccagacctgcagctgactgtgggcgccgtcatcgtggaggagatgagagctgccatcgagcgggagaccggcttccagtgcagcgctggcatcagccacaacaaggtgctggccaagctggcctgtggcctgaacaagcccaaccggcagaccctggtgagccacggctctgtgccccagctgttcagccagatgcccatcaggaagatccgcagcctgggcggcaagctgggcgcctctgtgattgagatcctgggcatcgagtacatgggagagctgacccagttcacagagagccagctgcagagccactttggagagaagaatggctcctggctgtatgccatgtgccggggcattgaacatgaccctgtgaagccccggcagctgcccaagaccatcggctgcagcaagaacttccctgggaagacagccctggccacccgggagcaggtgcagtggtggctgctgcagctggcccaggagctggaggagcggctgaccaaggacagaaatgacaatgacagagtggccacccagctggtggtgtccatccgggtgcagggcgacaagaggctgagcagcctgcggcgctgctgtgccctgaccaggtatgatgcccacaagatgagccatgatgccttcaccgtcatcaagaactgcaacaccagcggcatccagacagagtggagcccccccctgaccatgctgttcctgtgtgccaccaagttcagcgccagcgcccccagcagcagcacagacatcaccagcttcctgagcagtgaccccagcagcctgcccaaggtgcctgtgaccagcagcgaggccaagacccagggcagcggccctgctgtgacagccaccaagaaggccaccaccagcctggagagcttcttccagaaggctgctgagcggcagaaggtgaaggaggccagcctgagcagcctgacagcccccacccaggcccccatgagcaacagccccagcaagcccagcctgcccttccagaccagccagagcactggaacagagcccttcttcaagcagaagagcctgctgctgaagcagaagcagctgaacaacagctctgtgagcagcccccagcagaacccctggagcaactgcaaggccctgcccaacagcctgcccacagagtacccaggctgtgtgcctgtgtgtgagggcgtgtccaagctggaggagagcagcaaggccaccccagctgagatggacctggcccacaacagccagagcatgcacgccagcagcgccagcaagtctgtgctggaggtgacccagaaggccacccccaaccccagcctgctggccgctgaggaccaggtgccctgtgagaagtgtggcagcctggtgcctgtgtgggacatgcctgagcacatggactaccactttgccctggagctgcagaagagcttcctgcagccccacagcagcaacccccaggtggtgtctgctgtgagccaccagggcaagaggaaccccaagagccccctggcctgcaccaacaagaggcccaggcctgagggcatgcagaccctggagagcttcttcaagcccctgacccactag

SEQ ID NO: 165705 - DNA, 2142 bp, Artificial Sequence
  derived and/or modified sequence
atggccaccggccaggaccgggtggtggccctggtggacatggactgcttcttcgtgcaagttgaacagcgtcagaatccccatctgagaaacaagccttgtgcagttgtccagtacaagagctggaaaggtgggggtattatagctgtaagctatgaggcccgggcatttggggtgacacgtagcatgtgggccgatgacgctaaaaagctctgtccggaccttctgctcgcgcaggtcagggaatcccggggtaaggcaaaccttacaaagtatcgagaagcttctgtggaggtcatggagatcatgtccagatttgccgtgatcgaacgggcgtccattgatgaggcctatgtggatctgacttcagctgtccaggaacgcctccagaagctgcaggggcagcccattagcgcagaccttcttccctctacttatatagaagggctcccacaggggcctaccacagcggaagagacagtgcagaaagagggtatgagaaaacagggtttgttccagtggttagattctttgcagatcgataacctgacctccccggatctgcagctgactgtaggggctgtgatagtagaggaaatgcgcgctgcaatagaacgggagacaggttttcagtgttccgccggtatcagccacaataaagttttggcgaagctagcatgcggcctcaacaaaccaaacaggcaaactttagtctcacatggcagcgtcccccaactgttctcgcagatgcccatcaggaaaatccggtctctgggaggcaagttaggagccagcgtgattgaaatccttggtatcgaatatatgggcgaactgacccagttcaccgagtcgcaactgcaatcgcacttcggagaaaagaacggatcctggctgtacgcgatgtgccgaggtatcgagcacgatccagtgaaacctagacagctgcctaagaccatcggctgcagtaaaaacttcccggggaagaccgctcttgccactagagagcaagtgcagtggtggctgctacagctggcacaggagctcgaggagcgactgaccaaagaccggaatgataatgatcgggtggctacccagctcgtggttagtattcgtgtgcaaggcgataaaaggctctcaagtttgcgcagatgttgcgcactcacacgctatgatgctcataagatgtctcatgatgcctttactgttatcaaaaattgcaatacttccggcattcaaactgagtggagtccaccactgaccatgctctttctgtgtgcgaccaagttcagtgcgtccgccccgagctcatctaccgatattacttcattcctaagttcagacccctctagtttgcccaaagtccccgtaacatcctcagaagctaaaacccagggtagcgggcctgccgtgaccgccaccaagaaagctacaactagcctggagtcttttttccaaaaggcagctgagaggcagaaggtgaaggaggctagcctctcctccttgaccgccccaacccaagcacccatgtcaaatagcccatcaaaaccgagtctcccctttcagacctcccagtccactggcaccgagcctttctttaaacagaagtcattgttgctgaagcaaaaacaactaaataactcttcagtgagctcgccccagcagaatccgtggagcaactgcaaagccttgccaaactccctgcctacagagtatccagggtgcgtgcccgtgtgtgaaggggtcagcaaactcgaagagagtagcaaagcaacacccgccgaaatggacctcgcccacaattcccagtccatgcacgcgtcttccgccagcaagagcgttcttgaggtgacgcagaaggctacaccaaacccatctctccttgccgccgaggatcaggtgccctgcgaaaaatgtggcagcctggttcctgtctgggatatgcctgagcatatggattaccactttgccctggaacttcaaaaatcctttctgcagccccatagttctaacccccaggtagtgtccgctgtcagtcatcagggcaagcgtaacccgaagagccccttggcatgtacaaacaaaagaccgaggcccgagggcatgcaaaccctggagtctttttttaaacctcttacccactag

SEQ ID NO: 165706 - DNA, 3540 bp, Artificial Sequence
  derived and/or modified sequence
aacggcccttcgcagcgggcgcgctgtcagacctcagtctggcggctgcattgctgggcgcgccgctctcgtctgatccctgctggggacggttgcccgggcaggatcctttacgatcccttctcggtttctccgtcgtcacagggaataaatctcgctcgaaactcactggaccgctcctagaaaggcgaaaagatattcaggagcccttccattttccttccagtaggcaccgaacccagcattttcggcaaccgctgctggcagttttgccaggtgtttgttaccttgaaaaatggctactggacaggatcgagtggttgctctcgtggacatggactgtttttttgttcaagtggagcagcggcaaaatcctcatttgaggaataaaccttgtgcagttgtacagtacaaatcatggaagggtggtggaataattgcagtgagttatgaagctcgtgcatttggagtcactagaagtatgtgggcagatgatgctaagaagttatgtccagatcttctactggcacaagttcgtgagtcccgtgggaaagctaacctcaccaagtaccgggaagccagtgttgaagtgatggagataatgtctcgttttgctgtgattgaacgtgccagcattgatgaggcttacgtagatctgaccagtgctgtacaagagagactacaaaagctacaaggtcagcctatctcggcagacttgttgccaagcacttacattgaagggttgccccaaggccctacaacggcagaagagactgttcagaaagaggggatgcgaaaacaaggcttatttcaatggctcgattctcttcagattgataacctcacctctccagacctgcagctcaccgtgggagcagtgattgtggaggaaatgagagcagccatagagagggagactggttttcagtgttcagctggaatttcacacaataaggtcctggcaaaactggcctgtggactaaacaagcccaaccgccaaaccctggtttcacatgggtcagtcccacagctcttcagccaaatgcccattcgcaaaatccgtagtcttggaggaaagctaggggcctctgtcattgagatcctagggatagaatacatgggtgaactgacccagttcactgaatcccagctccagagtcattttggggagaagaatgggtcttggctatatgccatgtgccgagggattgaacatgatccagttaaacccaggcaactacccaaaaccattggctgtagtaagaacttcccaggaaaaacagctcttgctactcgggaacaggtacaatggtggctgttgcaattagcccaggaactagaggagagactgactaaagaccgaaatgataatgacagggtagccacccagctggttgtgagcattcgtgtacaaggagacaaacgcctcagcagcctgcgccgctgctgtgcccttacccgctatgatgctcacaagatgagccatgatgcatttactgtcatcaagaactgtaatacttctggaatccagacagaatggtctcctcctctcacaatgcttttcctctgtgctacaaaattttctgcctctgccccttcatcttctacagacatcaccagcttcttgagcagtgacccaagttctctgccaaaggtgccagttaccagctcagaagctaagacccagggaagtggcccagcggtgacagccactaagaaagcaaccacgtctctggaatcattcttccaaaaagctgcagaaaggcagaaagttaaagaagcttcgctttcatctcttactgctcccactcaggctcccatgagcaattcaccatccaagccctcattaccttttcaaaccagtcaaagtacaggaactgagcccttctttaagcagaaaagtctgcttctaaagcagaaacagcttaataattcttcagtttcttccccccaacaaaacccatggtccaactgtaaagcattaccaaactctttaccaacagagtatccagggtgtgtccctgtttgtgaaggggtgtcgaagctagaagaatcctctaaagcaactcctgcagagatggatttggcccacaacagccaaagcatgcacgcctcttcagcttccaaatctgtgctggaggtgactcagaaagcaaccccaaatccaagtcttctagctgctgaggaccaagtgccctgtgagaagtgtggctccctggtaccggtatgggatatgccagaacacatggactatcattttgcattggagttgcagaaatcctttttgcagccccactcttcaaacccccaggttgtttctgccgtatctcatcaaggcaaaagaaatcccaagagccctttggcctgcactaataaacgccccaggcctgagggcatgcaaacattggaatcattttttaagccattaacacattagtgctgccctcaggcttgcctgtaggatttaatattttttatctttacagatctttatctttaatattttatctttacagatttccctgagaaagggaattatgaaatttttaatacaaaaaataatccatttaggtgctgagttacggtcccatctcttcacaggcatggattctaatcccactgctgacagagatgtaaaaattcatcctaccagagtttttaatctttagcatttagggaggcagtgtcataaagtaaaaagtgtgtgggccttggagtctaagagacgtggttgcaaacttagctctggttattgcaatgagggccttgaacaagtcattttcttcacattctcatctgtaaaatggagataataccttacagattattgcagattaataacaatgtattcaaattatgtaactcggccgggtacaatggctcacgcctgtaatcctaacactttgggaggccgaggcagacagatcacctgaggtcaggagtttgagaccagcctggccaacatggcaaaaccatctctactaaaaatagaaaaattagccaggcacgttccaggcacctgtgatcccagctacttagaggctgaggcagaagaattgctttaaccttggaggcggaggttgcattgagctgagatcatgctagtgcgctccagcctgggcaacagagcgagacttcatctcagaaaataaaaaataggggccaggcacagtggctcatacctgtaatgccagcactttgggaggccaaggcgggcagatcacgaggtcaggagtttcagaccaatatggtgaaaccccatctctactaaaattacaaaaaaaattatccaggcgtggtggtgcacgcctgtaatcccagctactcaggaggctaaggcaggagaatcacttgaacccaggaggcagaggttggagtgagctgagatcgcgccaccgcactccagcctgggcaacagagcgagactccatctcaaacaaaaacaagaacaaaaacaaacataaagttggcacagaaaagggaccaagtttaaaaaagggttttaaatgtaatgagacttgcatagttaaaaaaaaaaaa

SEQ ID NO: 165707 - DNA, 2548 bp, Artificial Sequence
  derived and/or modified sequence
agtctggcggctgcattgctgggcgcgccgctctcgtctgatccctgctggggacggttgcccgggcaggatcctttacgatcccttctcggtttctccgtcgtcacagggaataaatctcgctcgaaactcactggaccgctcctagaaaggcgaaaagatattcaggagcccttccattttccttccagtaggcaccgaacccagcattttcggcaaccgctgctggcagttttgccaggtgtttgttaccttgaataattgcagtgagttatgaagctcgtgcatttggagtcactagaagtatgtgggcagatgatgctaagaagttatgtccagatcttctactggcacaagttcgtgagtcccgtgggaaagctaacctcaccaagtaccgggaagccagtgttgaagtgatggagataatgtctcgttttgctgtgattgaacgtgccagcattgatgaggcttacgtagatctgaccagtgctgtacaagagagactacaaaagctacaaggtcagcctatctcggcagacttgttgccaagcacttacattgaagggttgccccaaggccctacaacggcagaagagactgttcagaaagaggggatgcgaaaacaaggcttatttcaatggctcgattctcttcagattgataacctcacctctccagacctgcagctcaccgtgggagcagtgattgtggaggaaatgagagcagccatagagagggagactggttttcagtgttcagctggaatttcacacaataaggtcctggcaaaactggcctgtggactaaacaagcccaaccgccaaaccctggtttcacatgggtcagtcccacagctcttcagccaaatgcccattcgcaaaatccgtagtcttggaggaaagctaggggcctctgtcattgagatcctagggatagaatacatgggtgaactgacccagttcactgaatcccagctccagagtcattttggggagaagaatgggtcttggctatatgccatgtgccgagggattgaacatgatccagttaaacccaggcaactacccaaaaccattggctgtagtaagaacttcccaggaaaaacagctcttgctactcgggaacaggtacaatggtggctgttgcaattagcccaggaactagaggagagactgactaaagaccgaaatgataatgacagggtagccacccagctggttgtgagcattcgtgtacaaggagacaaacgcctcagcagcctgcgccgctgctgtgcccttacccgctatgatgctcacaagatgagccatgatgcatttactgtcatcaagaactgtaatacttctggaatccagacagaatggtctcctcctctcacaatgcttttcctctgtgctacaaaattttctgcctctgccccttcatcttctacagacatcaccagcttcttgagcagtgacccaagttctctgccaaaggtgccagttaccagctcagaagctaagacccagggaagtggcccagcggtgacagccactaagaaagcaaccacgtctctggaatcattcttccaaaaagctgcagaaaggcagaaagttaaagaagcttcgctttcatctcttactgctcccactcaggctcccatgagcaattcaccatccaagccctcattaccttttcaaaccagtcaaagtacaggaactgagcccttctttaagcagaaaagtctgcttctaaagcagaaacagcttaataattcttcagtttcttccccccaacaaaacccatggtccaactgtaaagcattaccaaactctttaccaacagagtatccagggtgtgtccctgtttgtgaaggggtgtcgaagctagaagaatcctctaaagcaactcctgcagagatggatttggcccacaacagccaaagcatgcacgcctcttcagcttccaaatctgtgctggaggtgactcagaaagcaaccccaaatccaagtcttctagctgctgaggaccaagtgccctgtgagaagtgtggctccctggtaccggtatgggatatgccagaacacatggactatcattttgcattggagttgcagaaatcctttttgcagccccactcttcaaacccccaggttgtttctgccgtatctcatcaaggcaaaagaaatcccaagagccctttggcctgcactaataaacgccccaggcctgagggcatgcaaacattggaatcattttttaagccattaacacattagtgctgccctcaggcttgcctgtaggatttaatattttttatctttacagatctttatctttaatattttatctttacagatttccctgagaaagggaattatgaaatttttaatacaaaaaataatccatttaggtgctgagttacggtcccatctcttcacaggctggtcttgaactcttgatctcaagtgatccacccgccctggcctcccaaagtgctgggattacaggcctgagccaccaggccagccccaacttctactttttattttatttataaattggg

SEQ ID NO: 165708 - DNA, 2142 bp, Artificial Sequence
  derived and/or modified sequence
atggcaactgggcaggaccgggtggtggcgctggtcgatatggactgcttctttgttcaggtggaacagcgacaaaatcctcacctcaggaacaagccatgtgccgtggtgcagtataagagctggaaggggggagggatcatcgccgtgagctacgaggctagagccttcggtgtcacacgtagcatgtgggctgacgatgccaaaaagctgtgcccagacctgcttctggcccaagtacgcgagtctagggggaaggctaatttgacaaagtatcgggaagccagcgtcgaggtgatggaaattatgagtcgattcgctgtcatcgagcgtgcctctattgatgaggcgtacgtcgatcttaccagcgccgttcaggagcgtctgcagaagctccagggtcagcctatttcagccgatttgttaccgagcacctatatcgaggggctcccacaggggcctaccaccgccgaggaaaccgttcagaaagaggggatgcggaagcagggcttattccagtggctcgactctttacagattgataatctcaccagcccagatttgcaactgactgtcggagctgtgatagtggaagagatgagagccgctattgaacgagagacaggcttccaatgcagcgccggaataagccacaataaggttctcgccaagttggcgtgtggcctcaacaagcctaatcgacagactctcgtgagccatgggtctgtcccacagctcttttcccagatgcctatcagaaaaattcgttctctcgggggtaaattaggtgcaagcgtcattgagatcctcggcatagagtacatgggcgaactgactcagtttactgagtcgcagctgcaatcacactttggagaaaaaaacggaagctggctttacgccatgtgtaggggtattgagcatgaccccgtgaaaccgagacagttgccaaaaactatcggctgcagcaagaactttccaggcaaaaccgcgttggctacaagggaacaggtccagtggtggctgctccagctggcgcaagagcttgaggagaggcttactaaggatagaaacgacaatgaccgcgtggccacgcagcttgtggttagcatcagagtgcagggggacaagaggttatcttccctgcgaagatgttgcgccttgacccgttacgatgcacataagatgtcacacgatgcctttactgttataaaaaattgcaacaccagcgggatccagaccgaatggtccccccctctcaccatgttatttctctgcgctactaagttctccgcttctgccccttcatcatctacagatattacgagctttctgagcagtgacccctctagcttaccaaaagtccccgtaacctcgagtgaggcaaagacacagggatctggtccagcagtcactgcgactaagaaggcaacaacttccctggaaagcttcttccagaaggctgccgagaggcagaaagtgaaagaggctagcctgtctagtctaacggcgccaacccaggcaccaatgtccaattctccttctaagccttcactgccgtttcagaccagtcagagcacgggaaccgagcctttcttcaaacagaagagcttgttactgaagcagaagcagctgaataacagctctgtgagctcaccacagcagaatccatggtctaattgcaaggctctgcccaatagtctgcccacagaatatcctggttgtgtccctgtgtgtgagggagtctcaaagctggaggaaagcagtaaggcaacaccagccgagatggacctagcccacaatagtcaatcaatgcacgcatcctctgcatctaaatctgtccttgaagtgacacagaaggcaacaccaaatccaagtttgttggccgctgaggaccaggtcccctgcgagaagtgcggtagcctggtgccagtgtgggacatgcctgaacacatggattaccatttcgccctggaactccagaagagctttctgcagcctcattctagtaatcctcaggtggtcagcgcggtctctcaccagggcaaacggaatccaaagtctccactcgcgtgtacgaacaagcgcccaagaccagaggggatgcagactcttgagtcttttttcaagcccttaacgcactag

SEQ ID NO: 165709 - DNA, 2142 bp, Artificial Sequence
  derived and/or modified sequence
atggccaccggccaggacagagtggtggccctggtggacatggactgcttcttcgtgcaggtggagcagagacagaacccccacctgagaaacaagccctgcgccgtggtgcagtacaagagctggaagggcggcggcatcatcgccgtgagctacgaggccagagccttcggcgtgaccagaagcatgtgggccgacgacgccaagaagctgtgccccgacctgctgctggcccaggtgagagagagcagaggcaaggccaacctgaccaagtacagagaggccagcgtggaggtgatggagatcatgagcagattcgccgtgatcgagagagccagcatcgacgaggcctacgtggacctgaccagcgccgtgcaggagagactgcagaagctgcagggccagcccatcagcgccgacctgctgcccagcacctacatcgagggcctgccccagggccccaccaccgccgaggagaccgtgcagaaggagggcatgagaaagcagggcctgttccagtggctggacagcctgcagatcgacaacctgaccagccccgacctgcagctgaccgtgggcgccgtgatcgtggaggagatgagagccgccatcgagagagagaccggcttccagtgcagcgccggcatcagccacaacaaggtgctggccaagctggcctgcggcctgaacaagcccaacagacagaccctggtgagccacggcagcgtgccccagctgttcagccagatgcccatcagaaagatcagaagcctgggcggcaagctgggcgccagcgtgatcgagatcctgggcatcgagtacatgggcgagctgacccagttcaccgagagccagctgcagagccacttcggcgagaagaacggcagctggctgtacgccatgtgcagaggcatcgagcacgaccccgtgaagcccagacagctgcccaagaccatcggctgcagcaagaacttccccggcaagaccgccctggccaccagagagcaggtgcagtggtggctgctgcagctggcccaggagctggaggagagactgaccaaggacagaaacgacaacgacagagtggccacccagctggtggtgagcatcagagtgcagggcgacaagagactgagcagcctgagaagatgctgcgccctgaccagatacgacgcccacaagatgagccacgacgccttcaccgtgatcaagaactgcaacaccagcggcatccagaccgagtggagcccccccctgaccatgctgttcctgtgcgccaccaagttcagcgccagcgcccccagcagcagcaccgacatcaccagcttcctgagcagcgaccccagcagcctgcccaaggtgcccgtgaccagcagcgaggccaagacccagggcagcggccccgccgtgaccgccaccaagaaggccaccaccagcctggagagcttcttccagaaggccgccgagagacagaaggtgaaggaggccagcctgagcagcctgaccgcccccacccaggcccccatgagcaacagccccagcaagcccagcctgcccttccagaccagccagagcaccggcaccgagcccttcttcaagcagaagagcctgctgctgaagcagaagcagctgaacaacagcagcgtgagcagcccccagcagaacccctggagcaactgcaaggccctgcccaacagcctgcccaccgagtaccccggctgcgtgcccgtgtgcgagggcgtgagcaagctggaggagagcagcaaggccacccccgccgagatggacctggcccacaacagccagagcatgcacgccagcagcgccagcaagagcgtgctggaggtgacccagaaggccacccccaaccccagcctgctggccgccgaggaccaggtgccctgcgagaagtgcggcagcctggtgcccgtgtgggacatgcccgagcacatggactaccacttcgccctggagctgcagaagagcttcctgcagccccacagcagcaacccccaggtggtgagcgccgtgagccaccagggcaagagaaaccccaagagccccctggcctgcaccaacaagagacccagacccgagggcatgcagaccctggagagcttcttcaagcccctgacccactag

SEQ ID NO: 165710 - protein, 418 aa, Artificial Sequence
  derived and/or modified sequence
MEEIGILVEKAQDEIPALSVSRPQTGLSFLGPEPEDLEDLYSRYKKLQQELEFLEVQEEYIKDEQKNLKKEFLHAQEEVKRIQSIPLVIGQFLEAVDQNTAIVGSTTGSNYYVRILSTIDRELLKPNASVALHKHSNALVDVLPPEADSSIMMLTSDQKPDVMYADIGGMDIQKQEVREAVELPLTHFELYKQIGIDPPRGVLMYGPPGCGKTMLAKAVAHHTTAAFIRVVGSEFVQKYLGEGPRMVRDVFRLAKENAPAIIFIDEIDAIATKRFDAQTGADREVQRILLELLNQMDGFDQNVNVKVIMATNRADTLDPALLRPGRLDRKIEFPLPDRRQKRLIFSTITSKMNLSEEVDLEDYVARPDKISGADINSICQESGMLAVRENRYIVLAKDFEKAYKTVIKKDEQEHEFYK

SEQ ID NO: 165711 - DNA, 1257 bp, Artificial Sequence
  derived and/or modified sequence
atggaagaaataggcatcctagtcgagaaggcccaagatgaaatccccgcactctccgtgtctcgacctcagaccggcctgtctttccttgggccagaaccagaggacctggaagacctttactctaggtacaagaagctccagcaggagctcgaattcctagaagtccaggaggaatacatcaaggacgagcagaaaaatctgaaaaaggagttcctgcatgcccaagaggaggtgaagcgtatccaaagcatccctctggtgatagggcagtttctcgaagctgtcgaccaaaacacagccattgttggttcaaccacgggttccaactactacgtcagaattttatccaccatcgacagggaactgctgaagcccaacgcaagtgtagctctacacaagcattctaatgccctggtcgacgtcttgcctcccgaggctgattccagtatcatgatgttgactagcgatcagaaaccggacgtgatgtatgctgacataggcggaatggatatccaaaagcaggaggttagggaggccgtggagctacccctgacacatttcgagctgtacaaacaaatcggcattgacccaccgcgaggggtccttatgtatgggcccccggggtgtggcaagaccatgttagccaaggccgtggcacatcatactacagccgctttcatccgtgtggtaggctccgaatttgtgcagaagtatttgggggagggtcctcggatggtaagagatgtttttcggctggcgaaggaaaacgcaccggccatcatttttatcgacgaaatcgacgccattgccactaagaggtttgatgcgcagaccggcgcagatagggaagtgcagcgaatcttactggagttactgaaccagatggatggtttcgatcagaacgtaaacgtgaaggtaataatggctactaaccgcgctgacaccctggacccggcgctattgcgacccggccgattagaccggaagatagagtttcctctgcctgaccgtcgacaaaagcgactgattttctccacgataacctcaaaaatgaatctgtcagaagaggttgacctggaggattatgtcgcaagacccgacaagatatcgggggccgatatcaatagcatttgtcaggaatccggaatgcttgcagtcagggagaatagatacatagtgcttgccaaggattttgaaaaagcctacaaaacggtaatcaagaaggatgagcaggaacacgagttctataagtag

SEQ ID NO: 165712 - DNA, 1257 bp, Artificial Sequence
  derived and/or modified sequence
atggaggagatcggcatcctggtggagaaggcccaggatgagatcccagccctgtctgtgtcccggccccagacaggcctgtccttcctgggccctgagcctgaggacctggaggacctgtacagccgctacaagaagctgcagcaggagctggagttcctggaggtgcaggaggagtacatcaaggatgagcagaagaacctgaagaaggagttcctgcacgcccaggaggaggtgaagaggatccagagcatccccctggtgattggccagttcctggaggccgtggaccagaacacagccatcgtgggcagcaccaccggcagcaactactacgtgcgcatcctgagcaccatcgaccgggagctgctgaagcccaatgcctctgtggccctgcacaagcacagcaatgccctggtggatgtgctgcccccagaggccgacagcagcatcatgatgctgaccagtgaccagaagccagatgtgatgtatgctgacattggaggcatggacatccagaagcaggaggtgcgggaggccgtggagctgcccctgacccactttgagctgtacaagcagatcggcatcgaccccccccggggcgtgctgatgtatggccccccaggctgtgggaagaccatgctggccaaggctgtggcccaccacaccacagctgccttcatccgggtggtgggcagcgagtttgtgcagaagtacctgggggagggccccaggatggtgagagatgtgttccggctggccaaggaaaatgccccagccatcatcttcattgatgaaattgatgccatcgccaccaagagatttgatgcccagacaggagctgaccgggaggtgcagaggatcctgctggagctgctgaaccagatggatggctttgaccagaatgtgaatgtgaaggtgatcatggccaccaacagagctgacaccctggaccctgccctgctgcggcccggccgcctggacaggaagattgagttccccctgcctgaccggcggcagaagaggctcatcttcagcaccatcaccagcaagatgaacctgtctgaggaggtggacctggaggactatgtggcccggccagacaagatctctggagctgacatcaacagcatctgccaggagagcggcatgctggccgtgagagaaaatcgctacatcgtgctggccaaggactttgagaaggcctacaagacagtcatcaagaaggatgagcaggagcacgagttctacaagtag

SEQ ID NO: 165713 - DNA, 1257 bp, Artificial Sequence
  derived and/or modified sequence
atggaggagatcggcatcctggtggagaaggcccaggacgagatcccagcactcagtgtatctagacctcagactgggttatcttttctcgggccggagcccgaggaccttgaagacctctattcccggtacaagaaattgcaacaggaactggaattcttggaagtgcaggaagaatatattaaggatgagcagaagaacctcaaaaaagagttcttgcacgctcaggaagaggtaaaaaggatccagtctattcccctcgtgatcgggcagttcctagaggcagttgaccagaacacagccatcgtgggttcaacgaccggctcaaactactacgttcgcatactttccacaattgatcgagaactgctgaaaccaaacgcatcagtggcactccataaacattctaatgccttggtggatgttctcccgccagaggccgattcctctatcatgatgttaacatcagaccagaagcctgatgtgatgtatgctgatattggcggaatggacatacagaaacaggaagtgcgggaagctgtcgagctacccctcacccatttcgaactgtataaacaaataggcattgacccacccaggggcgtgctgatgtacggcccaccagggtgtgggaagaccatgcttgcaaaagctgtggcgcaccatacgacagcggccttcatccgcgtcgtgggaagcgagttcgtgcagaagtacctaggcgaagggccgcgaatggtaagagacgtctttcgcttggccaaggagaatgccccagctatcatttttattgacgaaattgacgcaattgccactaagcgctttgatgcccaaacaggcgccgaccgcgaggttcagcggatcctgctggagctgttaaatcagatggacggcttcgaccagaatgtgaacgtgaaagttataatggctaccaatagggctgatacgttagatcccgccttgctaagaccagggagactggaccgaaaaatagagtttcctcttcccgaccgccggcagaagaggttgattttttcaaccattaccagtaaaatgaacttatcagaagaagttgacttggaggactacgtagcacgtcccgacaagatttcaggggcggatattaatagcatctgtcaggaaagcggcatgctggccgtgcgggaaaatcggtatattgtcctggctaaagacttcgagaaggcgtataagacagtaataaagaaggacgagcaggagcacgagttctataagtag

SEQ ID NO: 165714 - DNA, 1257 bp, Artificial Sequence
  derived and/or modified sequence
atggaggagatagggattctggttgagaaggcacaggatgagatccccgctttatcggtgagtcggccacagaccggcctgtcattcctgggacctgaacccgaagacttagaagatctgtactccagatataaaaagctccagcaggagctggaattcctcgaagtgcaggaggagtatattaaggacgaacagaaaaatttgaagaaagagttcttgcacgcccaggaggaggtgaagagaatccagtctattcctcttgtgatcgggcaattcttggaggccgtcgatcagaacactgctattgtcgggagtaccactggctcaaattactacgtccgcatcctcagtacgatagatagagaattactgaaaccaaatgcttctgtagccttgcacaagcactcgaacgctctcgttgatgtgttgccccctgaggcggactcttccatcatgatgcttacatctgaccaaaaaccagacgtgatgtatgctgacatcggcggaatggacatacagaaacaagaggtgcgcgaggcagtggaactacctctcacacactttgagctttacaagcagattggaatcgatccacctagaggtgtgttaatgtacggtcctccgggttgtggcaaaaccatgctggctaaagctgtggctcaccataccaccgccgcttttatcagagtcgtgggatctgaatttgttcaaaaatatcttggagaggggcctcgcatggtgagagacgtttttaggttagccaaggaaaacgccccagccataatctttatcgacgagatcgacgctattgccaccaagcgctttgatgctcaaactggggcagacagggaagtgcagcggatcttactggagctgctcaaccagatggatgggtttgatcaaaatgtcaacgtgaaggttatcatggctaccaatagagcggataccctggatccagctcttttgagacctggcagactggaccgcaagattgaattccctctccccgacaggcgacagaagagacttatcttcagtaccattactagtaaaatgaatctgtcggaagaggtcgaccttgaggactacgtcgccaggcctgacaaaatttcaggcgctgatatcaacagcatttgccaggagtccggcatgcttgccgtaagagagaaccgctatatcgtcctggcaaaggattttgaaaaagcctataagacggtaatcaaaaaagacgagcaagaacacgaattttacaaatag

SEQ ID NO: 165715 - DNA, 1433 bp, Artificial Sequence
  derived and/or modified sequence
gatcatcccaggccacacagaggccggcttggtcactatggaggagataggcatcttggtggagaaggctcaggatgagatcccagcactgtccgtgtcccggccccagaccggcctgtccttcctgggccctgagcctgaggacctggaggacctgtacagccgctacaagaagctgcagcaagagctggagttcctggaggtgcaggaggaatacatcaaagatgagcaaaagaacctgaaaaaggaatttctccatgcccaggaggaggtgaagcgaatccaaagcatcccgctggtcatcggacaatttctggaggctgtggatcagaatacagccatcgtgggctctaccacaggctccaactattatgtgcgcatcctgagcaccatcgatcgggagctgctcaagcccaacgcctcagtggccctccacaagcacagcaatgcactggtggacgtgctgccccccgaagccgacagcagcatcatgatgctcacctcagaccagaagccagatgtgatgtacgcggacatcggaggcatggacatccagaagcaggaggtgcgggaggccgtggagctcccgctcacgcatttcgagctctacaagcagatcggcatcgatcccccccgaggcgtcctcatgtatggcccacctggctgtgggaagaccatgttggcaaaggcggtggcacatcacacaacagctgcattcatccgggtcgtgggctcggagtttgtacagaagtatctgggtgagggcccccgcatggtccgggatgtgttccgcctggccaaggagaatgcacctgccatcatcttcatagacgagattgatgccatcgccaccaagagattcgatgctcagacaggggccgacagggaggttcagaggatcctgctggagctgctgaatcagatggatggatttgatcagaatgtcaatgtcaaggtaatcatggccacaaacagagcagacaccctggatccggccctgctacggccaggacggctggaccgtaaaattgaatttccacttcctgaccgccgccagaagagattgattttctccactatcactagcaagatgaacctctctgaggaggttgacttggaagactatgtggcccggccagataagatttcaggagctgatattaactccatctgtcaggagagtggaatgttggctgtccgtgaaaaccgctacattgtcctggccaaggacttcgagaaagcatacaagactgtcatcaagaaggacgagcaggagcatgagttttacaagtgacccttcccttccctccaccacaccactcaggggctggggcttctctcgcacccccagcacctctgtcccaaaacctcattcccttttttctttacccaggattggtttcttcaataaatagataagatcgaatccattt

SEQ ID NO: 165716 - DNA, 1257 bp, Artificial Sequence
  derived and/or modified sequence
atggaagagatcggaatcttggtagaaaaggcccaggatgagattcctgccctaagcgtcagccgccctcagacaggtctgtccttcctgggaccggaacccgaagacctcgaagatctctacagcagatacaagaaactgcagcaggaactggaattccttgaggtgcaggaagagtatatcaaagacgaacaaaagaacctgaaaaaagaatttctacacgcgcaggaagaagtgaaaaggattcagtccatcccactggtgattggtcagtttctcgaagccgttgatcaaaatactgcaatagttggatccaccaccgggagtaattattacgttcgaatactcagcactatcgatagggagctcctgaaacctaacgcttctgtcgccctgcataaacattccaatgctctggtggacgtgctgccccctgaagctgattctagcattatgatgcttacctctgaccaaaaacctgacgtaatgtacgccgatattggcggcatggatatccagaagcaggaagtccgagaagctgtggaactacccctcacacactttgaactctataaacagatcggcattgaccccccacgcggcgtgttgatgtacggtccacccggctgcgggaagacaatgctggcaaaggctgttgcccaccacaccaccgccgccttcattagagtggtgggatccgagtttgtccaaaaatatttgggcgaggggccccgcatggttcgagatgttttccgcctggcaaaagaaaacgcacccgccattattttcatagacgagattgatgctatcgccaccaagcgtttcgatgctcaaacgggtgcagatcgggaggtacaacggattcttctggagttactgaatcagatggacggttttgatcagaatgtcaatgtaaaggttatcatggccacaaacagagctgatacacttgatcccgcattgctgcgacctggccggctcgatcgaaaaatcgagttcccactgccagatagaaggcagaaaaggctgatcttcagcacaattacctccaagatgaatctgagtgaggaagtggatttggaagattatgttgctagaccagacaaaatatccggagctgatatcaattctatctgccaggagtccggcatgttggccgtgagagaaaatcgatacattgtcttggcaaaggatttcgagaaggcttataagacggtgatcaaaaaggatgaacaggagcacgagttctataagtag

SEQ ID NO: 165717 - DNA, 1257 bp, Artificial Sequence
  derived and/or modified sequence
atggaagagatcggaattctggtcgagaaagcacaagacgaaatccccgctctttctgtgtctcggccccaaacaggcttgtcttttttaggccccgaacctgaagatctcgaagatctgtactcccgttacaaaaaactccagcaggagctggaatttctagaagtccaagaggaatatatcaaagatgaacagaaaaacctgaaaaaagagttcttgcacgcccaggaggaggtgaagcgcattcagtctattccccttgtcatcggacagtttctcgaagcagttgaccaaaatacggcaatagttggatccaccaccgggagtaattattacgttcgaatactcagcactatcgatagggagctcctgaaacctaacgcttctgtcgccctgcataaacattccaatgctctggtggacgtgctgccccctgaagctgattctagcattatgatgcttacctctgaccaaaaacctgacgtaatgtacgccgatattggcggcatggatatccagaagcaggaagtccgagaagctgtggaactacccctcacacactttgaactctataaacagatcggcattgaccccccacgcggcgtactcatgtacggaccaccaggctgcggaaaaacaatgttagcaaaggcagttgctcatcacaccaccgccgcattcattagggttgtcggctcagagttcgtgcagaagtacttaggagagggcccccgcatggtgcgtgacgtattcagacttgccaaggagaatgcaccagcaatcatttttatcgacgaaatagacgccatcgctactaaacgattcgacgctcaaactggcgcagaccgtgaggtacaaaggattctgctcgaactgttaaaccagatggacggcttcgaccagaacgtgaatgttaaggtcatcatggccacaaaccgagctgatactcttgatccggccctccttagacctggacgcctcgatagaaagatcgaatttccactccccgatagaagacagaaacgacttatcttcagcactattaccagtaaaatgaacttatccgaagaggttgaccttgaagactatgtggcccgacctgacaagatatccggcgcagatatcaactccatttgtcaagaaagcggcatgctggccgtgagagagaaccggtacattgtgcttgccaaagattttgaaaaggcctataaaacagttattaagaaggacgagcaagaacacgaattttacaagtag

SEQ ID NO: 165718 - DNA, 1257 bp, Artificial Sequence
  derived and/or modified sequence
atggaggagatcggcatcctggtggagaaggcccaggacgagatccccgccctgagcgtgagcagaccccagaccggcctgagcttcctgggccccgagcccgaggacctggaggacctgtacagcagatacaagaagctgcagcaggagctggagttcctggaggtgcaggaggagtacatcaaggacgagcagaagaacctgaagaaggagttcctgcacgcccaggaggaggtgaagagaatccagagcatccccctggtgatcggccagttcctggaggccgtggaccagaacaccgccatcgtgggcagcaccaccggcagcaactactacgtgagaatcctgagcaccatcgacagagagctgctgaagcccaacgccagcgtggccctgcacaagcacagcaacgccctggtggacgtgctgccccccgaggccgacagcagcatcatgatgctgaccagcgaccagaagcccgacgtgatgtacgccgacatcggcggcatggacatccagaagcaggaggtgagagaggccgtggagctgcccctgacccacttcgagctgtacaagcagatcggcatcgacccccccagaggcgtgctgatgtacggcccccccggctgcggcaagaccatgctggccaaggccgtggcccaccacaccaccgccgccttcatcagagtggtgggcagcgagttcgtgcagaagtacctgggcgagggccccagaatggtgagagacgtgttcagactggccaaggagaacgcccccgccatcatcttcatcgacgagatcgacgccatcgccaccaagagattcgacgcccagaccggcgccgacagagaggtgcagagaatcctgctggagctgctgaaccagatggacggcttcgaccagaacgtgaacgtgaaggtgatcatggccaccaacagagccgacaccctggaccccgccctgctgagacccggcagactggacagaaagatcgagttccccctgcccgacagaagacagaagagactgatcttcagcaccatcaccagcaagatgaacctgagcgaggaggtggacctggaggactacgtggccagacccgacaagatcagcggcgccgacatcaacagcatctgccaggagagcggcatgctggccgtgagagagaacagatacatcgtgctggccaaggacttcgagaaggcctacaagaccgtgatcaagaaggacgagcaggagcacgagttctacaagtag

SEQ ID NO: 165719 - protein, 700 aa, Artificial Sequence
  derived and/or modified sequence
MEPLCPLLLVGFSLPLARALRGNETTADSNETTTTSGPPDPGASQPLLAWLLLPLLLLLLVLLLAAYFFRFRKQRKAVVSTSDKKMPNGILEEQEQQRVMLLSRSPSGPKKYFPIPVEHLEEEIRIRSADDCKQFREEFNSLPSGHIQGTFELANKEENREKNRYPNILPNDHSRVILSQLDGIPCSDYINASYIDGYKEKNKFIAAQGPKQETVNDFWRMVWEQKSATIVMLTNLKERKEEKCHQYWPDQGCWTYGNIRVCVEDCVVLVDYTIRKFCIQPQLPDGCKAPRLVSQLHFTSWPDFGVPFTPIGMLKFLKKVKTLNPVHAGPIVVHCSAGVGRTGTFIVIDAMMAMMHAEQKVDVFEFVSRIRNQRPQMVQTDMQYTFIYQALLEYYLYGDTELDVSSLEKHLQTMHGTTTHFDKIGLEEEFRKLTNVRIMKENMRTGNLPANMKKARVIQIIPYDFNRVILSMKRGQEYTDYINASFIDGYRQKDYFIATQGPLAHTVEDFWRMIWEWKSHTIVMLTEVQEREQDKCYQYWPTEGSVTHGEITIEIKNDTLSEAISIRDFLVTLNQPQARQEEQVRVVRQFHFHGWPEIGIPAEGKGMIDLIAAVQKQQQQTGNHPITVHCSAGAGRTGTFIALSNILERVKAEGLLDVFQAVKSLRLQRPHMVQTLEQYEFCYKVVQDFIDIFSDYANFK

SEQ ID NO: 165720 - protein, 140 aa, Artificial Sequence
  derived and/or modified sequence
MEPLCPLLLVGFSLPLARALRGNETTADSNETTTTSGPPDPGASQPLLAWLLLPLLLLLLVLLLAAYFFRFRKQRKAVVSTSDKKMPNGILEEQEQQRVMLLSRSPSGPKKYFPIPVEHLEEEIRIRSADDCKQFREEFN

SEQ ID NO: 165721 - protein, 417 aa, Artificial Sequence
  derived and/or modified sequence
MARAMAAAWPLLLVALLVLSWPPPGTGDVVVQAPTQVPGFLGDSVTLPCYLQVPNMEVTHVSQLTWARHGESGSMAVFHQTQGPSYSESKRLEFVAARLGAELRNASLRMFGLRVEDEGNYTCLFVTFPQGSRSVDIWLRVLAKPQNTAEVQKVQLTGEPVPMARCVSTGGRPPAQITWHSDLGGMPNTSQVPGFLSGTVTVTSLWILVPSSQVDGKNVTCKVEHESFEKPQLLTVNLTVYYPPEVSISGYDNNWYLGQNEATLTCDARSNPEPTGYNWSTTMGPLPPFAVAQGAQLLIRPVDKPINTTLICNVTNALGARQAELTVQVKEGPPSEHSGISRNAIIFLVLGILVFLILLGIGIYFYWSKCSREVLWHCHLCPSSTEHASASANGHVSYSAVSRENSSSQDPQTEGTR

SEQ ID NO: 165722 - DNA, 1254 bp, Artificial Sequence
  derived and/or modified sequence
atggcgcgagcgatggcagcagcctggcccctcttgttggttgccctgcttgtgctttcctggcctccacctggaaccggagatgtcgtcgtgcaggcacccactcaagtgccgggctttctcggagactcagtgaccctcccatgttacctgcaggtcccaaatatggaggtgacccatgtgtcacagcttacttgggcacgacacggcgagtccggcagcatggctgtctttcaccagactcagggaccctcctattctgaatcaaagcggttagaatttgtggctgctcggttaggggctgagttgcggaatgcctctctgagaatgtttggcctgcgagtggaggatgaagggaactacacgtgcctgttcgttacgtttccccagggatcaagatcagtggatatctggctgcgggttctggctaagccccaaaatacagctgaagttcaaaaagtgcaactaacaggagagccagtgcctatggcaaggtgtgtgtctactgggggcagaccaccagcgcaaattacctggcattccgatttggggggtatgccaaatacttcccaagtgcccggctttttgtcaggcacagttaccgtgacttctctgtggatcctggtacccagtagtcaggttgacggcaagaacgtgacttgcaaggtagaacatgaaagtttcgaaaaaccccagctgctaactgttaacctgaccgtgtattaccctcccgaggtatctatctcaggctatgataataattggtacttgggccagaacgaggccaccctcacttgcgacgcacgttctaacccagaaccgactggctacaactggtctacaacgatgggaccacttcctcctttcgcagtggcccagggagctcagctcctgatcaggccagtggacaagcccatcaacaccacactcatctgtaacgtcacaaacgctcttggcgcacgccaggccgagctaaccgtacaggtcaaagaaggacccccatcggagcattctggcatatcaagaaatgcaatcatattcctggtattgggcatcttagtctttttaatactgctggggattggcatctatttctactggtctaaatgcagccgcgaggtcctgtggcattgccatctgtgcccaagctccacggagcacgcgtccgcatccgccaatggccacgtaagctactctgcagtctcccgggaaaactcctcatctcaagacccccaaaccgaggggacacgatag

SEQ ID NO: 165723 - DNA, 1254 bp, Artificial Sequence
  derived and/or modified sequence
atggcccgggccatggctgctgcctggcccctgctgctggtggccctgctggtgctgtcctggcccccacctggcactggagatgtggtggtgcaggcccccacccaggtgcccggcttcctgggggacagcgtgaccctgccctgctacctgcaggtgcccaacatggaggtgacccacgtgtcccagctgacctgggcccggcatggagagagcggctccatggctgtgttccaccagacccagggccccagctacagcgagagcaagaggctggagtttgtggccgcccggctgggcgctgagctgagaaatgccagcctgaggatgtttggcctgcgggtggaggatgagggcaactacacctgcctgtttgtgaccttcccccagggcagccgctctgtggacatctggctgcgggtgctggccaagccccagaacacagctgaggtgcagaaggtgcagctgactggagagcctgtgcccatggcccgctgtgtgtccactggaggccggcccccagcccagatcacctggcacagcgacctgggcggcatgcccaacaccagccaggtgcccggcttcctgtctggaacagtgacagtgaccagcctgtggatcctggtgcccagcagccaggtggatggcaagaatgtgacctgcaaggtggagcacgagagctttgagaagccccagctgctgactgtgaacctgactgtgtactacccacctgaggtgtccatcagcggctatgacaacaactggtacctgggccagaatgaggccaccctgacctgtgatgcccggagcaaccctgagcccaccggctacaactggagcaccaccatgggccccctgcccccatttgctgtggcccagggcgcccagctgctgatccggcctgtggacaagcccatcaacaccaccctcatctgcaatgtgaccaatgccctgggcgcccggcaggccgagctgactgtgcaggtgaaggagggccccccatctgagcacagcggcatcagcagaaatgccatcatcttcctggtgctgggcatcctggtgttcctgatcctgctgggcatcggcatctacttctactggagcaagtgcagccgggaggtgctgtggcactgccacctgtgccccagcagcacagaacatgccagcgccagcgccaatggacatgtgtcctacagcgctgtgtcccgggagaacagcagcagccaggacccccagacagagggcaccaggtag

SEQ ID NO: 165724 - DNA, 1254 bp, Artificial Sequence
  derived and/or modified sequence
atggcccgggccatggccgccgcctggcccctgctgctggtggccctcctggtgctttcatggccaccccccggcacaggggatgtcgtcgtgcaagcaccgacccaggttcctggatttctcggggacagcgtgacattgccctgttaccttcaggttccaaatatggaggtcactcatgtatctcagcttacgtgggccaggcacggcgaatctggtagcatggctgtgttccaccaaacacaggggccttcatactccgaatccaaacgcctagagtttgttgctgcaaggctgggagccgagctgagaaacgcctccctccggatgtttggactgcgggtggaggatgagggaaactatacttgcctgttcgtaaccttccctcaaggtagccgaagcgtggacatttggctgagggtgttggcaaaaccccagaacaccgcagaagtccagaaagtacaacttacaggggaacccgtgcctatggccaggtgcgtgtccaccggaggaagaccacccgctcaaattacttggcactcggaccttggcgggatgcctaatactagtcaggttcctggctttttaagcggcaccgttaccgtgacgtccctctggatcttggtgccatcctcacaggtcgatggaaagaacgtgacttgtaaggtggaacacgaatccttcgagaagccacagctgctgacggtgaacctgacagtttactaccctcctgaagtgagtatttctggttacgacaataactggtacctcggccagaatgaagccaccctcacgtgcgatgctcggtctaatcctgagcctactggctataactggtccactacaatgggtcctcttcccccattcgctgtggcacaaggggcacagctgttgatacgtcctgtggataagccaattaatacaactctaatatgtaacgtcaccaatgccctgggggctcgccaggccgaactcactgtgcaggtcaaggagggccctccctcagaacactctggcatctcacgtaatgccattatcttcttggtcctgggcattcttgtctttctgatcctgctcggaatcggtatctatttttactggtccaagtgttctcgggaggttctgtggcactgccacctttgcccttcctcaaccgaacatgcctccgcctctgccaatgggcacgtgtcttattctgccgtgtcacgtgagaacagtagctcccaggacccacagacggaaggaacacgctag

SEQ ID NO: 165725 - DNA, 3239 bp, Artificial Sequence
  derived and/or modified sequence
actggccgccaactcccctccgctccagtcacttgtctggagcttgaagaagtgggtattccccttcccaccccaggcactggaggagcggccccccggggattccaggacctgagctccgggagctggactcgcagcgaccgcggcagagcgagcgggcgccgggaagcgaggagacgcccgcgggaggcccagctgctcggagcaactggcatggcccgagccatggccgccgcgtggccgctgctgctggtggcgctactggtgctgtcctggccacccccaggaaccggggacgtcgtcgtgcaggcgcccacccaggtgcccggcttcttgggcgactccgtgacgctgccctgctacctacaggtgcccaacatggaggtgacgcatgtgtcacagctgacttgggcgcggcatggtgaatctggcagcatggccgtcttccaccaaacgcagggccccagctattcggagtccaaacggctggaattcgtggcagccagactgggcgcggagctgcggaatgcctcgctgaggatgttcgggttgcgcgtagaggatgaaggcaactacacctgcctgttcgtcacgttcccgcagggcagcaggagcgtggatatctggctccgagtgcttgccaagccccagaacacagctgaggttcagaaggtccagctcactggagagccagtgcccatggcccgctgcgtctccacagggggtcgcccgccagcccaaatcacctggcactcagacctgggcgggatgcccaatacgagccaggtgccagggttcctgtctggcacagtcactgtcaccagcctctggatattggtgccctcaagccaggtggacggcaagaatgtgacctgcaaggtggagcacgagagctttgagaagcctcagctgctgactgtgaacctcaccgtgtactaccccccagaggtatccatctctggctatgataacaactggtaccttggccagaatgaggccaccctgacctgcgatgctcgcagcaacccagagcccacaggctataattggagcacgaccatgggtcccctgccaccctttgctgtggcccagggcgcccagctcctgatccgtcctgtggacaaaccaatcaacacaactttaatctgcaacgtcaccaatgccctaggagctcgccaggcagaactgaccgtccaggtcaaagagggacctcccagtgagcactcaggcatatcccgtaacgccatcatcttcctggttctgggaatcctggtttttctgatcctgctggggatcgggatttatttctattggtccaaatgttcccgtgaggtcctttggcactgtcatctgtgtccctcgagtacagagcatgccagcgcctcagctaatgggcatgtctcctattcagctgtgagcagagagaacagctcttcccaggatccacagacagagggcacaaggtgacagcgtcgggactgagaggggagagagactggagctggcaaggacgtgggcctccagagttggacccgaccccaatggatgaagaccccctccaaagagaccagcctccctccctgtgccagacctcaaaacgacgggggcaggtgcaagttcataggtctccaagaccaccctcctttcatttgctagaaggactcactagactcaggaaagctgttaggctcacagttacagtttattacagtaaaaggacagagattaagatcagcaaagggaggaggtgcacagcacacgttccacgacagatgaggcgacggcttccatctgccctctcccagtggagccatataggcagcacctgattctcacagcaacatgtgacaacatgcaagaagtactgccaatactgccaaccagagcagctcactcgagatctttgtgtccagagttttttgtttgtcttgagacagggtctggctctgttggcagactagagtacagtggtgagatcacagttcattgcagccttgacttctcaacgccaagtcatcctcccacctcagcctcctgagtagctatgactacaggtatgtgccaccacgtctggctaatctttttattatttgtaaagtcgaggtttccctgtgttgcccaggctggtcttgaactcttggctccaagtgatacttctgccttggcctcccaaagtgctgaattaagcagctcaccatccacacggctgacctcatacatcaagccaataccgtgtggcccaagacccccaccataaatcacatcattagcatgaaccacccagagtggcccaagactcccagatcagctaccaggcaggatattccaagggcttagagatgaatgcccaggagctgaggataaagggcccgatctttctttgggcaaggttaagcctttactgcatagcagaccacacagaagggtgtgggccaccagagaattttggtaaaaatttggcctctggccttgagcttctaaatctctgtatccgtcagatctctgtggttacaagaaacagccactgaccctggtcaccagaggctgcaattcaggccgcaagcagctgcctggggggtgtccaaggagcagagaaaactactagatgtgaacttgaagaaggttgtcagctgcagccactttctgccagcatctgcagccactttctgccagcatctgcagccagcaagctgggactggcaggaaataacccacaaaagaagcaaatgcaatttccaacacaagggggaagggatgcagggggaggcagcgctgcagttgctcaggacacgctcctataggaccaagatggatgcgacccaagacccaggaggcccagctgctcagtgcaactgacaagttaaaaaggtctatgatcttgagggcagacagcagaattcctcttataaagaaaactgtttgggaaaatacgttgagggagagaagaccttgggccaagatgctaaatgggaatgcaaagcttgagctgctctgcaagagaaaataagcaggacagaggatttgctctggacagagatggaagagccgggaacagagaagtgtggggaagagataggaaccagcaggatggcaggggcaaagggctcaagggtgaggaggccagtgggaccccacagagttggggagataaaggaacattggttgctttggtggcacgtaagctccttgtctgtctccagcacccagaatctcattaaagcttatttattgtacctcca

SEQ ID NO: 165726 - DNA, 1254 bp, Artificial Sequence
  derived and/or modified sequence
atggctagagcgatggctgcggcttggccactcctgctggttgccttactggtgctgtcgtggcccccaccagggaccggagacgtggtggtgcaggctccaacccaagtccctggatttctcggggactcagtgaccttgccttgctacctgcaggtcccaaatatggaggtaactcacgtctcccagctaacgtgggctcggcacggtgaaagcgggagcatggcggttttccatcagacccaagggccaagttattctgagtccaagcgactggagtttgtagccgcaaggctcggagccgaactgcgaaatgccagtcttcgcatgttcggactgagggtagaggacgaggggaattacacttgtttgtttgtgaccttcccacagggaagccggtccgtcgatatatggcttagagtcctggccaaaccccagaacactgccgaggtacaaaaagtccagctgacaggggagccagtccctatggccaggtgcgttagtacaggagggaggccccctgcacagattacctggcacagcgacttgggcggaatgcccaatactagtcaggtgcccggattcttgtcgggcaccgtcactgtcaccagcctatggattctagtgcctagcagccaagtggatggtaagaatgttacttgtaaggtcgaacacgagagcttcgagaagcctcagctgcttacagtaaacttaactgtgtattacccacccgaggtttccatttccgggtatgacaacaactggtatttgggccaaaacgaggcgaccctgacttgtgatgccaggtcaaatcctgaaccaaccggttataactggtccacaacaatgggcccactgcctcccttcgctgtcgcccagggcgctcagctcttgatccggccagttgataagcccattaacacgactctaatctgtaatgttacgaacgcactgggggctaggcaggccgagcttacggtgcaggtgaaagaaggtccgccttctgaacatagtggaatatctaggaacgcaattatttttctcgtgctcggcatcctggtctttctcatcctcctgggtattggaatctatttctactggtccaagtgttctcgtgaggtgctgtggcattgccacctttgtccaagcagcactgagcacgcctcagcatcagccaacggccacgtgtcttactctgccgtgagccgggaaaatagctcttcgcaagatccccaaacagaagggacccgttag

SEQ ID NO: 165727 - DNA, 1254 bp, Artificial Sequence
  derived and/or modified sequence
atggccagagccatggccgccgcctggcccctgctgctggtggccctgctggtgctgagctggcccccccccggcaccggcgacgtggtggtgcaggcccccacccaggtgcccggcttcctgggcgacagcgtgaccctgccctgctacctgcaggtgcccaacatggaggtgacccacgtgagccagctgacctgggccagacacggcgagagcggcagcatggccgtgttccaccagacccagggccccagctacagcgagagcaagagactggagttcgtggccgccagactgggcgccgagctgagaaacgccagcctgagaatgttcggcctgagagtggaggacgagggcaactacacctgcctgttcgtgaccttcccccagggcagcagaagcgtggacatctggctgagagtgctggccaagccccagaacaccgccgaggtgcagaaggtgcagctgaccggcgagcccgtgcccatggccagatgcgtgagcaccggcggcagaccccccgcccagatcacctggcacagcgacctgggcggcatgcccaacaccagccaggtgcccggcttcctgagcggcaccgtgaccgtgaccagcctgtggatcctggtgcccagcagccaggtggacggcaagaacgtgacctgcaaggtggagcacgagagcttcgagaagccccagctgctgaccgtgaacctgaccgtgtactacccccccgaggtgagcatcagcggctacgacaacaactggtacctgggccagaacgaggccaccctgacctgcgacgccagaagcaaccccgagcccaccggctacaactggagcaccaccatgggccccctgccccccttcgccgtggcccagggcgcccagctgctgatcagacccgtggacaagcccatcaacaccaccctgatctgcaacgtgaccaacgccctgggcgccagacaggccgagctgaccgtgcaggtgaaggagggcccccccagcgagcacagcggcatcagcagaaacgccatcatcttcctggtgctgggcatcctggtgttcctgatcctgctgggcatcggcatctacttctactggagcaagtgcagcagagaggtgctgtggcactgccacctgtgccccagcagcaccgagcacgccagcgccagcgccaacggccacgtgagctacagcgccgtgagcagagagaacagcagcagccaggacccccagaccgagggcaccagatag

SEQ ID NO: 165728 - protein, 849 aa, Artificial Sequence
  derived and/or modified sequence
MAAAAPAAAAASSEAPAASATAEPEAGDQDSREVRVLQSLRGKICEAKNLLPYLGPHKMRDCFCTINLDQEEVYRTQVVEKSLSPFFSEEFYFEIPRTFQYLSFYVYDKNVLQRDLRIGKVAIKKEDLCNHSGKETWFSLQPVDSNSEVQGKVHLELKLNELITENGTVCQQLVVHIKACHGLPLINGQSCDPYATVSLVGPSRNDQKKTKVKKKTSNPQFNEIFYFEVTRSSSYTRKSQFQVEEEDIEKLEIRIDLWNNGNLVQDVFLGEIKVPVNVLRTDSSHQAWYLLQPRDNGNKSSKTDDLGSLRLNICYTEDYVLPSEYYGPLKTLLLKSPDVQPISASAAYILSEICRDKNDAVLPLVRLLLHHDKLVPFATAVAELDLKDTQDANTIFRGNSLATRCLDEMMKIVGGHYLKVTLKPILDEICDSSKSCEIDPIKLKEGDNVENNKENLRYYVDKLFNTIVKSSMSCPTVMCDIFYSLRQMATQRFPNDPHVQYSAVSSFVFLRFFAVAVVSPHTFHLRPHHPDAQTIRTLTLISKTIQTLGSWGSLSKSKSSFKETFMCEFFKMFQEEGYIIAVKKFLDEISSTETKESSGTSEPVHLKEGEMYKRAQGRTRIGKKNFKKRWFCLTSRELTYHKQPGKDAIYTIPVKNILAVEKLEESSFNKKNMFQVIHTEKPLYVQANNCVEANEWIDVLCRVSRCNQNRLSFYHPSVYLNGNWLCCQETGENTLGCKPCTAGVPADIQIDIDEDRETERIYSLFTLSLLKLQKMEEACGTIAVYQGPQKEPDDYSNFVIEDSVTTFKTIQQIKSIIEKLDEPHEKYRKKRSSSAKYGSKENPIVGKAS

SEQ ID NO: 165729 - DNA, 2550 bp, Artificial Sequence
  derived and/or modified sequence
atggcagctgcggcccccgctgccgctgctgcctcttcagaagcgccggccgctagtgctactgcggaacccgaggccggggaccaggactccagagaggttcgcgttctgcaatccctgagaggaaagatctgtgaggccaaaaatctcctgccttacctgggccctcataagatgcgcgattgtttctgcacgattaacttagatcaggaggaggtctatagaacacaggtcgtggaaaaatcactgagcccttttttctccgaagagttttacttcgaaataccacgtacctttcagtacctctctttttacgtgtatgacaaaaatgttctccagagggatttaagaattggaaaagtggccatcaagaaggaagacctgtgtaaccactctggcaaagagacctggttctcattgcaacccgtggattccaattccgaagtccagggtaaggtgcatcttgaattaaagctgaacgagctgatcactgaaaatggcaccgtgtgtcagcagctcgtggtgcatatcaaagcatgccacggcctccccctcataaatggccagtcctgtgacccctacgctacagtgtccctcgtaggcccatcacgtaatgatcaaaaaaagacaaaggtcaagaaaaaaacttctaacccacagtttaacgagattttttactttgaggtcactcgcagctcttcctacacccggaagtcacaatttcaggtggaggaagaagatatagagaagttggaaatccgcatcgatttgtggaataacggaaacttggtgcaggatgtgttcctgggtgagataaaggtccccgtcaatgtgttgaggacggatagtagccaccaggcctggtaccttctgcagccccgtgataatggaaataaaagcagcaaaacggatgacctgggcagcctgcgcctcaatatctgctatactgaggactacgttctcccttccgagtactacgggccgctgaaaaccttactgctgaagtcgccggacgtgcagcccatttctgcatccgcggcctatatcttaagcgaaatttgccgcgataaaaacgatgcagtgctgcccctggtccggctgctgctccatcacgacaaactcgtcccattcgcgacggctgtggctgagttggacctgaaggacacccaggatgccaacacaattttccggggcaacagcttagcgacaagatgcctcgatgagatgatgaagattgtgggtggacattatctcaaggtgacccttaaacccatcctcgacgagatttgcgattcatccaagagctgtgaaatcgatccgattaaactgaaagagggggataatgttgaaaataacaaggaaaatctgcgttactatgtagacaaactctttaacaccatcgtgaaatccagcatgagctgcccaaccgtaatgtgcgatatattctacagcctgcggcaaatggccacccagcgattcccgaatgacccacacgtccagtactcagcggtcagtagcttcgtcttcctgagattctttgcagtcgctgttgttagccctcatacttttcatttgcggccgcaccatcccgatgctcagacaatccgaaccctgactctgatcagtaagacaatccagactctgggttcctggggctcattgtctaagtccaagagctccttcaaagaaaccttcatgtgtgagttcttcaaaatgttccaggaagaagggtacatcatcgctgtgaaaaagttcttggacgagatttcttccacagagaccaaagagtcatccggtacatccgagcctgtgcatcttaaggagggcgaaatgtacaagcgggcccagggccgtacacgaattgggaaaaagaactttaaaaagcgatggttctgcttgaccagcagagaattaacataccataaacagcctggcaaggacgcgatttacacaattcctgtcaaaaatatcctggcggtggaaaaactggaggaatcaagcttcaataagaaaaacatgttccaggtgattcataccgaaaagccactgtatgtgcaggcgaacaactgtgttgaggctaatgaatggatcgacgtcctttgtagagtcagtaggtgtaatcagaataggctctctttttaccatccctccgtatacttgaatggaaactggctctgttgtcaggagacgggtgagaatactcttggatgcaagccttgtaccgccggcgtacccgccgacatacaaatcgacatcgatgaggaccgagaaactgagaggatctactccttgtttaccctgagcctgctaaagctccagaaaatggaggaagcatgtggcacgatcgcagtctatcaaggaccccaaaaggagcctgacgactattctaactttgtgatagaagactctgtaaccacattcaaaacaatccagcagattaaatcgatcatcgagaagttggatgagccccatgagaaatacaggaaaaaaaggtcttcaagtgcgaaatatggatccaaggaaaacccgatcgttgggaaggcttcctag

SEQ ID NO: 165730 - DNA, 2550 bp, Artificial Sequence
  derived and/or modified sequence
atggctgctgctgccccagctgctgctgctgccagcagcgaggccccagctgccagcgccacagctgagcctgaggccggggaccaggacagccgggaggtgcgggtgctgcagagcctgcggggcaagatctgtgaggccaagaacctgctgccctacctgggcccccacaagatgagggactgcttctgcaccatcaacctggaccaggaggaggtgtaccgcacccaggtggtggagaagagcctgagccccttcttcagcgaggagttctactttgagatccccaggaccttccagtacctgtccttctacgtgtatgacaagaatgtgctgcagagggacctgcgcatcggcaaggtggccatcaagaaggaggacctgtgcaaccacagcggcaaggagacctggttcagcctgcagcctgtggacagcaacagcgaggtgcagggcaaggtgcacctggagctgaagctgaatgagctgatcacagaaaatggcaccgtgtgccagcagctggtggtgcacatcaaggcctgccacggcctgcccctcatcaatggccagagctgtgacccctatgccaccgtgtccctggtgggccccagcagaaatgaccagaagaagaccaaggtgaagaagaagaccagcaacccccagttcaatgagatcttctactttgaggtgaccaggagcagcagctacaccaggaagagccagttccaggtggaggaggaggacatcgagaagctggagatcagaattgacctgtggaacaacggcaacctggtgcaggatgtgttcctgggggagatcaaggtgcctgtgaatgtgctgaggacagacagcagccaccaggcctggtacctgctgcagccccgggacaatggaaacaagagcagcaagacagatgacctgggcagcctgcggctgaacatctgctacacagaagattatgtgctgcccagcgagtactacggccccctgaagaccctgctgctgaagagcccagatgtgcagcccatcagcgccagcgctgcctacatcctgtctgagatctgccgggacaagaatgatgctgtgctgcccctggtgcggctgctgctgcaccacgacaagctggtgccctttgccacagctgtggccgagctggacctgaaggacacccaggatgccaacaccatcttccggggcaacagcctggccacccgctgcctggatgagatgatgaagatcgtgggcggccactacctgaaggtgaccctgaagcccatcctggatgagatctgtgacagcagcaagagctgtgaaattgaccccatcaagctgaaggagggggacaacgtggagaacaacaaggagaacctgcgctactacgtggacaagctgttcaacaccatcgtgaagagctccatgagctgccccaccgtgatgtgtgacatcttctacagcctgcggcagatggccacccagcgcttccccaatgacccccacgtgcagtacagcgctgtgagcagctttgtgttcctgcgcttctttgctgtggccgtggtgagcccccacaccttccacctgcggccccaccacccagatgcccagaccatccgcaccctgaccctcatcagcaagaccatccagaccctgggctcctggggcagcctgagcaagagcaagagcagcttcaaggagaccttcatgtgtgagttcttcaagatgttccaggaggagggctacatcatcgctgtgaagaagttcctggatgagatcagcagcacagagaccaaggagagcagcggcaccagcgagcctgtgcacctgaaggagggggagatgtacaagagggcccagggccgcaccagaattggcaagaagaacttcaagaagcgctggttctgcctgaccagccgggagctgacctaccacaagcagcccgggaaggatgccatctacaccatccctgtgaagaacatcctggccgtggagaagctggaggagagcagcttcaacaagaagaacatgttccaggtgatccacacagagaagcccctgtatgtgcaggccaacaactgtgtggaggccaatgagtggattgatgtgctgtgccgggtgagccgctgcaaccagaaccggctgtccttctaccaccccagcgtgtacctgaatggaaactggctgtgctgccaggagaccggggagaacaccctgggctgcaagccctgcacagctggggtgcctgctgacatccagattgatattgatgaggaccgggagacagagcgcatctacagcctcttcaccctgagcctgctgaagctgcagaagatggaggaggcctgtggcaccatcgctgtgtaccagggcccccagaaggagccagatgactacagcaactttgtgattgaagattctgtgaccaccttcaagaccatccagcagatcaagagcatcatcgagaagctggatgagccccatgagaagtacaggaagaagaggagcagcagcgccaagtatggcagcaaagaaaaccccatcgtgggcaaggccagctag

SEQ ID NO: 165731 - DNA, 2550 bp, Artificial Sequence
  derived and/or modified sequence
atggccgccgccgcccccgccgccgccgccgccagcagcgaggcccctgcagcgtcggcaaccgccgaacccgaggctggggatcaagacagcagagaggttcgggtgctacagtccctgcgcggcaaaatctgtgaggcaaagaacctcctgccttacctgggccctcataaaatgagagactgcttctgtacaattaacctcgaccaggaagaggtatatcgtactcaggtggtggagaagtccctgtcccccttctttagtgaggaattctactttgaaatcccccggacctttcagtacctgtctttctacgtttacgacaagaatgtcctgcagagagacctgcgaatcgggaaggtggcaatcaagaaggaggacttgtgtaatcactctggaaaggagacctggttctcgctccagcctgtggactctaatagcgaggttcagggcaaagttcatttggagctgaaactgaacgaacttattactgaaaacggaaccgtatgccagcagctggtcgtacacattaaggcttgccatggccttcctcttattaatggacagtcttgtgacccgtatgctacagtctcactcgtcggaccttccagaaatgatcagaaaaaaacaaaagtcaaaaaaaagacctctaacccccaatttaatgagatcttctactttgaggttacccgcagtagcagctacacaaggaaatcccagtttcaggtggaagaggaggacattgagaaactggagatccgcatagacctgtggaataacggaaatctggtgcaagacgtgttcctgggtgagataaaggtacctgtcaatgtcctgcgcactgactcttcacaccaggcttggtatctccttcagcctcgtgacaacggcaacaaaagttccaaaacagacgatcttggttcactacgactgaacatatgctacaccgaggattatgttctgccctccgagtactacggacctctgaagaccttgctgttgaagagcccagatgtacaacctatatctgcgagcgcagcctatattctgtcagaaatatgcagagacaagaacgatgcagttctacccctcgtacgactgctgctccatcacgacaaactagtaccttttgcaacagcagtcgctgagctggacctgaaggacacgcaggatgctaacaccatatttcgcggcaacagtctggctacacgctgcttagatgagatgatgaaaattgtgggtggacactatttaaaagtgactctgaagcccattttagacgagatttgcgactcttctaaaagctgtgaaattgatccaataaaactgaaggagggagacaacgttgagaacaataaggaaaacctgagatactacgtcgacaagctgttcaatacaatcgtcaagtccagtatgtcatgtcctactgtcatgtgtgacatcttttacagcctgaggcaaatggcgacccagcgattcccgaatgatccccacgttcaatattcagccgtgagcagctttgtgttcctgcggttctttgctgtggccgtggtgagtcctcacaccttccatctccggccgcaccatccagatgctcagacaattcggacccttaccctcatctcaaaaacgattcagaccctgggctcttggggctccctgtccaaaagcaaatccagctttaaagagaccttcatgtgtgagttcttcaaaatgtttcaggaagaaggctatatcattgctgtaaaaaagttcttggatgagatctcatccacagagacaaaggaatcatccggcacatccgaacccgtccaccttaaggaaggagagatgtacaagcgggcgcaggggcgaactaggatcggaaagaagaacttcaagaagagatggttctgcctgacttcacgggagttaacttaccacaagcaacccggcaaagacgcaatatatactatccccgtgaaaaatattttagcagttgagaagctggaggaaagttcattcaacaaaaagaatatgtttcaggtcatccacaccgaaaagcctctgtatgttcaggctaataactgcgtggaagcaaatgagtggatcgacgttctctgccgggtcagccggtgtaaccaaaatcggttatccttctatcacccctcagtttacctgaatggaaattggctgtgctgtcaagaaactggggagaatactctgggttgtaagccatgtaccgcgggggtacctgctgacatccaaattgacattgacgaggatcgcgagacggaaaggatttatagtctgttcacactttctttgttaaaattgcagaaaatggaagaagcatgcgggactattgccgtttatcaggggccccagaaggaacccgacgattatagcaacttcgttatcgaggactccgtaaccacttttaaaaccatacagcagataaagagtataatagagaaacttgacgagccacatgaaaagtaccggaaaaagcggagcagcagcgcaaaatacgggagcaaggagaatcctatcgtggggaaggcaagctag

SEQ ID NO: 165732 - DNA, 2550 bp, Artificial Sequence
  derived and/or modified sequence
atggccgcagctgccccagccgcagcagccgctagctcggaagcccctgcggctagcgcaactgctgagcccgaggccggtgaccaagattcacgcgaagtccgggtgctccagtccctgcggggtaagatctgcgaagccaagaacctgctcccttatctcggcccacataagatgagagactgtttctgcactattaacctcgatcaagaagaggtgtacagaacacaggtggttgaaaagagtctgtcaccttttttctctgaggagttttacttcgagatccccaggacgtttcagtacctgagcttttatgtgtacgataagaatgtgcttcagcgcgatctccggattggcaaggtcgcaatcaagaaagaggacctttgtaatcactcgggaaaggaaacctggttctctctgcagccagttgattcaaactccgaggtgcagggcaaggttcacctcgaactgaagctcaatgagctcatcacggagaatggcacggtgtgccaacagctggtagtacacatcaaagcctgtcatggcctcccacttataaatgggcagagctgtgacccgtatgccaccgtgagcttagtgggcccttctcgaaatgaccagaagaaaaccaaagtgaagaaaaaaactagcaacccacagttcaacgagattttttattttgaggtgacacggtcatctagctacaccagaaagagccagttccaagtggaggaggaagacatcgaaaaactggagattcgcattgacctgtggaacaacggaaacctcgtgcaggacgtgttcctgggtgaaatcaaggttcccgtgaatgtgttacgaacagattcctcacatcaggcgtggtacctgctgcaaccgagggacaacggaaacaaatcctcaaagaccgacgacctgggctccctgcgactgaacatatgttatactgaagattacgtcttgccaagcgagtattatggccctctaaagacccttctacttaagtctcctgatgtgcaaccaatttccgcatcggcagcttacatcctgtcggaaatttgtagggacaagaacgacgccgtgctgccacttgtgcgtctgctgctccatcacgataaactagtaccatttgctacagccgtcgcggagctggacttgaaagacactcaggacgccaatacaatcttccggggaaattcactggcgacacgttgtctggacgaaatgatgaagattgtgggtgggcactacctgaaggttaccctaaagcccatcctggatgaaatctgtgattcctcaaagagttgtgaaatcgaccccattaaacttaaagagggggacaacgtggaaaataataaggaaaacttgcgttactacgtggataagctgtttaacactattgttaaaagtagcatgagttgccccaccgtcatgtgcgacattttttatagtttgcggcagatggccacccagcgcttccccaatgatcctcacgtccagtacagcgctgtcagttcctttgtgttccttaggttttttgccgttgcagtggtcagtccccacacattccacctcaggccacatcatcccgatgctcagacgattcggacccttaccctgatatccaaaactattcagaccttgggtagctggggctctctgtccaaaagcaagtcttcatttaaggaaactttcatgtgtgaattcttcaaaatgttccaggaggagggctatatcatcgcagtgaaaaaattcttagacgagatctcttcaaccgagaccaaggaaagctccggaacctccgagccggttcatttaaaggagggcgaaatgtataaacgggctcagggaaggacgcgaattggaaagaagaatttcaagaaaaggtggttctgtttaaccagtagggaactgacgtaccacaagcagccaggcaaggatgcaatttatactattcccgtcaagaatattttagccgtcgagaaattggaggaatcctcttttaacaaaaaaaacatgttccaagttatccatacagagaagcctctgtacgtccaagcgaacaattgcgtagaggccaacgagtggattgacgtgttatgtcgtgtgtccaggtgtaaccagaaccggctttctttttaccacccatcagtataccttaatggtaactggttgtgttgccaggaaacaggagaaaatacattgggttgcaaaccctgtacagcaggcgtccctgccgatatccagattgacatagatgaagacagggagaccgagagaatttacagtctgttcactctgtcactgctgaagttgcaaaagatggaggaggcctgcggaacaattgccgtctaccaggggccacaaaaagagcccgatgattacagcaacttcgtgattgaagatagcgtaaccacatttaaaactatacagcagattaaaagcatcattgagaagctggatgaacctcatgaaaaatatagaaaaaagcggagcagcagtgcgaagtatgggtccaaagaaaaccctatcgtaggtaaagcctcctag

SEQ ID NO: 165733 - DNA, 5614 bp, Artificial Sequence
  derived and/or modified sequence
aggcggcagggctgcggcacgggccgggcggcaccatggcggcggcggcgcctgctgctgcggcggcttcttccgaggcgccagcggcgagtgcgactgcagagcccgaggccggggaccaggacagtcgcgaggttcgagtgttgcagagcctgcggggcaagatctgtgaagcaaaaaatttattgccatatcttggaccccacaaaatgagagattgtttctgtaccataaatttggaccaggaagaagtttatcgtacccaagttgtggaaaaatctttaagcccatttttcagtgaagaattttactttgagattccaagaactttccagtatttgtctttctatgtttatgataagaatgttttacaaagagatctccgtataggaaaagtagccatcaaaaaagaagacttgtgtaatcacagtggcaaagaaacttggttttcattacagcctgttgactccaattcagaggttcagggtaaagttcaccttgaattaaaactgaatgaactgataacggagaatggaactgtatgccagcagcttgttgtacacatcaaggcatgccatgggttgcctctcataaatggccaaagctgtgacccttatgcaacagtttctctagtgggcccttctaggaatgaccaaaagaagacaaaagtaaagaagaaaacaagcaatccgcagtttaatgaaatcttttattttgaggtaaccagatccagtagttacaccagaaagtcccagttccaggtagaagaggaggacattgaaaagctagaaatcaggatcgacttgtggaacaatggaaacctagtccaagatgttttcctaggtgagattaaggttcctgtgaacgtattaagaactgattcctctcatcaagcctggtacttgctacagccaagagacaatggaaacaagtcatccaaaactgatgacctggggtctcttcgattaaatatatgttatacagaagactacgtgcttccttcagagtactatggtcctttgaaaactttgctgctaaaatcaccagatgttcaaccaatatctgcctcagctgcttacattttgagtgaaatatgtcgagataaaaatgatgctgttttgccccttgtacgactgctgctgcaccatgataaacttgttccttttgccactgctgtggctgaattagacttgaaggatacacaagatgcaaacacaatttttagaggaaattccctggctacccgatgtctggatgagatgatgaaaatagtgggagggcactacctgaaagtaacattaaaacctattcttgatgagatatgtgactcctcaaaatcctgtgaaatcgatcctattaaattgaaagagggagataatgtagaaaataataaggagaatctgcgctactatgtagacaagttattcaatacaattgtaaaatcaagtatgagctgccccactgtaatgtgtgatatcttttattctctaaggcagatggctactcagagatttcctaatgaccctcatgttcagtattctgcagtgagcagctttgtatttcttcgtttctttgctgtagccgtagtatcacctcatacttttcatttgcgacctcatcatccagatgcacagacaattagaacattaactctcatctcaaaaactatacaaactttgggaagctgggggagtctgtccaaaagcaagtcaagtttcaaagagacattcatgtgtgaatttttcaaaatgtttcaagaagaaggatatattatagcagttaaaaagttcttggatgaaatttcatctactgaaactaaagagtccagtggtacgagtgagcctgtgcacctgaaagaaggtgagatgtataaaagagctcaaggaagaactcggattggaaaaaagaattttaagaaacgatggttctgcttaacaagcagagagctcacctaccacaaacagccaggcaaagatgcaatctacacaatcccagtaaaaaacattcttgctgtggaaaaactggaagagagctctttcaacaagaaaaatatgttccaagtaatacatacggagaaaccactctatgtccaggcaaataactgtgtagaagctaatgaatggatagacgtactctgcagggtgagccgatgcaatcaaaacaggctcagtttttatcatccctctgtgtatctgaacggaaattggctctgctgtcaggagactggtgaaaacactctcggctgcaagccatgtactgcaggtgtccctgcagacatccaaatagatattgatgaagacagagaaacagaaagaatttattccctttttaccctcagtttacttaagctgcagaagatggaagaggcttgtggaactattgcagtctatcaaggaccacagaaagagcctgatgattattctaactttgtaatcgaggattctgtaacaacctttaagacaattcagcaaataaaaagcataattgagaagctggatgaacctcatgaaaaatataggaagaaaagatccagtagtgcaaaatatgggagcaaggaaaatccaattgttgggaaagcatcttagagtttaacagattggttcagaagaactggaaaatattatttttcttggagcttttcaattcatcatgtattttgttcatggtatttaagaatgagcatccgcttcaatgtcatctgcctccacattgtatttaatatttaataattgaaattaattgtttgggaatcctggtattgatgtattactagagaatttaaagcccaagattcccttcatacctgtgtgaccaaatccatgtttctgcaacttctttttaatcgaaagaatcttcctagaaaagctttgtaacaaagggagaactcctccgtagcaagaaaccatctcttcttgtaacactctgttctgtggacttgttttcactaccatcagtgcctgctctatactgccaacattgtgttttactagaaaattccaattcatgacagttcagagcttttcatttagttcatgtagaccctcccactttaaaaaagaaaaaaaataagaagtgtttttcctttggtccatcagtcattacaggttccattcaagacagtgatagaaactttagaaaactgccagagcatacttgaaagttggtagatccttttgcctaaagatgtaaacaaaactcaagacagaaggaatcagggaatatgtgctattgtgtgcatcttgtttacatttgggatcagtgatggcaaaagaagtaatgagaccactgaaattgttttcattgttttaaataccaggtactcattttcttgatttgaaagtttaacatgacttctaaggacatctcttcaaaaagaaagtaaacagggaatgaaggtggtgggaaaatcacttcacttcacccactatttcatgttgtaataagggccaccataaggatgccctcctcatagtgttcggttctgatcttcctcgagaacagtcacttggcgcactttaataatctggactgctccagatttgactttagatactccatggtatctagtctttatgatcagttgaatgatcagtgtttaagtctaaaaataatgctttcctgaaaatgtttatatttcattgctgtttccttattgcctgctagccaaatggaatttgggcaagcaactctttgaagacttttttaccctagaaatttacttttgtcctaaaaaccctaactgtaaataagcagtcgaagcaagttgccaccttgaagttgagggatacactttgcttcatcagtattaaaaaccatggtactcttattttgtcttttttaattcaaaacattttctaaatgtggtactttgaaccttggagtatttacatgtttctgttcaaaactgtgacttattaatgtaagtctgctagtagtactttttttgtctgagcataagctatatttcaagatatactttgccaattttgttattggtgggtaatcatttttaaattatattgttattaggtaattatttttaaagactactggcatacaatcaaagttgttccataaaagaatataactgagcaatgtatttctctaaatgacttgtaaaaatcaatgaattatgtttaagtctgcattatggtaggttattactcccagctcattttaaagacaagtttgaaagagtcctttaaattttataagcttgtagattccataaactacactgatttatacatttgaaagaatttagccatttaataaatttcttattctcaaattgcatttagattaaaattccttttaagagtgtctgaaatgtctgcctgcgaagaacatgtaaacattgccagataccagtcattattctttagtggctttttagtcctctgcttttttttttaaggcaaaagaaatatgcatctagcatttctaataccaaatccccaattgtgattgttttaaagatcatggtatgatcacagggaccaaggctgtgtgcatatataactctggatttgaaaggaggagagttcagccatctagttcttttcttcacatgacacttttaaacagccagtttgactggaattaaccaacttggcacagcctaaaaaaggagtaatgtgaaattaaattatttttctttgaaagtcttttgaaataagagaccatgtaagtaggaccctaagacaaccaaggaatttgcttccagggccctcattcctctgctgttacttacaaatgttttaatttttactacctgatattctttctctaccttttccacatttgaaaatatacaaggcagctcacttcatcctaaaaacctaaaaactccaggaaggaaagaaaaggatgatatggggaaatttgccataaatgccggttctggttcttagtttagccatttccatcagttgaaattgtggtgtgatctgttgcttgtttcgttgttgttttgtttttgtgtagctttgttttttaatattcatttaataagatgatgggcaatagcaaacatttttactcccaggaatataatttatcaaattgaactattttatttgccaaagaaacttgtttttaatatcacgggtaatgggtaagtgtgaaaactaggcttttttttatgaaacaaaaaaaggtgacgaataatatggcttttgtttctgtttctgaagcctgatttcatttatgccaggttttgaaaaacagatctttttcttaagtgaaagcacctttaatttgctctaacggtacatcctgtaaagacagaattctgcatagccttttaggtgtttttacagtatgtgaaaaatacaagactcattctagagttaaattaccaatcttggttgatattatctgcttccatttttattaatttggaaattaatatgttgctagtaaatattggtttttacagtacccagtttgaaaatgtaagttatcaaaacttaatgtagtgaatttgtgtaaccatgttgtattgttgagaatgtatttttatttaaattttattttcttatcaagagtattataaaaattaacttttgtaactgtcgcttggaaataactcaaataaattacaagaagcctg

SEQ ID NO: 165734 - DNA, 2550 bp, Artificial Sequence
  derived and/or modified sequence
atggccgccgccgcccccgccgccgccgccgccagcagcgaggcccccgccgccagcgccaccgccgagcccgaggccggcgaccaggacagcagagaggtgagagtgctgcagagcctgagaggcaagatctgcgaggccaagaacctgctgccctacctgggcccccacaagatgagagactgcttctgcaccatcaacctggaccaggaggaggtgtacagaacccaggtggtggagaagagcctgagccccttcttcagcgaggagttctacttcgagatccccagaaccttccagtacctgagcttctacgtgtacgacaagaacgtgctgcagagagacctgagaatcggcaaggtggccatcaagaaggaggacctgtgcaaccacagcggcaaggagacctggttcagcctgcagcccgtggacagcaacagcgaggtgcagggcaaggtgcacctggagctgaagctgaacgagctgatcaccgagaacggcaccgtgtgccagcagctggtggtgcacatcaaggcctgccacggcctgcccctgatcaacggccagagctgcgacccctacgccaccgtgagcctggtgggccccagcagaaacgaccagaagaagaccaaggtgaagaagaagaccagcaacccccagttcaacgagatcttctacttcgaggtgaccagaagcagcagctacaccagaaagagccagttccaggtggaggaggaggacatcgagaagctggagatcagaatcgacctgtggaacaacggcaacctggtgcaggacgtgttcctgggcgagatcaaggtgcccgtgaacgtgctgagaaccgacagcagccaccaggcctggtacctgctgcagcccagagacaacggcaacaagagcagcaagaccgacgacctgggcagcctgagactgaacatctgctacaccgaggactacgtgctgcccagcgagtactacggccccctgaagaccctgctgctgaagagccccgacgtgcagcccatcagcgccagcgccgcctacatcctgagcgagatctgcagagacaagaacgacgccgtgctgcccctggtgagactgctgctgcaccacgacaagctggtgcccttcgccaccgccgtggccgagctggacctgaaggacacccaggacgccaacaccatcttcagaggcaacagcctggccaccagatgcctggacgagatgatgaagatcgtgggcggccactacctgaaggtgaccctgaagcccatcctggacgagatctgcgacagcagcaagagctgcgagatcgaccccatcaagctgaaggagggcgacaacgtggagaacaacaaggagaacctgagatactacgtggacaagctgttcaacaccatcgtgaagagcagcatgagctgccccaccgtgatgtgcgacatcttctacagcctgagacagatggccacccagagattccccaacgacccccacgtgcagtacagcgccgtgagcagcttcgtgttcctgagattcttcgccgtggccgtggtgagcccccacaccttccacctgagaccccaccaccccgacgcccagaccatcagaaccctgaccctgatcagcaagaccatccagaccctgggcagctggggcagcctgagcaagagcaagagcagcttcaaggagaccttcatgtgcgagttcttcaagatgttccaggaggagggctacatcatcgccgtgaagaagttcctggacgagatcagcagcaccgagaccaaggagagcagcggcaccagcgagcccgtgcacctgaaggagggcgagatgtacaagagagcccagggcagaaccagaatcggcaagaagaacttcaagaagagatggttctgcctgaccagcagagagctgacctaccacaagcagcccggcaaggacgccatctacaccatccccgtgaagaacatcctggccgtggagaagctggaggagagcagcttcaacaagaagaacatgttccaggtgatccacaccgagaagcccctgtacgtgcaggccaacaactgcgtggaggccaacgagtggatcgacgtgctgtgcagagtgagcagatgcaaccagaacagactgagcttctaccaccccagcgtgtacctgaacggcaactggctgtgctgccaggagaccggcgagaacaccctgggctgcaagccctgcaccgccggcgtgcccgccgacatccagatcgacatcgacgaggacagagagaccgagagaatctacagcctgttcaccctgagcctgctgaagctgcagaagatggaggaggcctgcggcaccatcgccgtgtaccagggcccccagaaggagcccgacgactacagcaacttcgtgatcgaggacagcgtgaccaccttcaagaccatccagcagatcaagagcatcatcgagaagctggacgagccccacgagaagtacagaaagaagagaagcagcagcgccaagtacggcagcaaggagaaccccatcgtgggcaaggccagctag

SEQ ID NO: 165735 - protein, 166 aa, Artificial Sequence
  derived and/or modified sequence
MAQTNSFFMLISSLMFLSLSQGQESQTELPNPRISCPEGTNAYRSYCYYFNEDPETWVDADLYCQNMNSGNLVSVLTQAEGAFVASLIKESSTDDSNVWIGLHDPKKNRRWHWSSGSLVSYKSWDTGSPSSANAGYCASLTSCSGFKKWKDESCEKKFSFVCKFKN

SEQ ID NO: 165736 - DNA, 501 bp, Artificial Sequence
  derived and/or modified sequence
atggctcagacaaactcgttcttcatgcttatctcctcccttatgtttctgtctctgagccaggggcaggaaagccagactgagctacccaacccaagaatctcgtgccccgaagggaccaacgcttacagatcctactgctattatttcaacgaggaccctgagacctgggttgatgccgatctctactgtcagaatatgaatagtggcaacctcgttagcgtgttaacacaggccgaaggagcctttgtcgctagcctcattaaagagagttcaacggacgactccaacgtctggatcggcctgcacgatcccaaaaagaatcgccgatggcactggtcaagcgggtccctagtctcttataagtcctgggatactggttctccttccagtgctaatgccggatattgtgcgagtttgacgtcatgttcggggtttaaaaaatggaaggatgagtcatgcgaaaaaaaattttcatttgtttgtaagttcaaaaattag

SEQ ID NO: 165737 - DNA, 501 bp, Artificial Sequence
  derived and/or modified sequence
atggcacaaacaaactctttctttatgctgatctccagtctgatgtttcttagcttgtctcagggccaggagtcgcaaactgaattgcccaaccctcgaattagctgtcccgagggtacgaatgcttaccggagctattgctactactttaatgaagatcctgaaacttgggtggatgccgatctgtattgtcagaacatgaattcaggtaaccttgttagcgttctcacccaggccgagggtgcctttgtggcttctctgatcaaggaatctagtaccgatgactctaacgtgtggatagggttgcacgatcctaaaaagaatcgccggtggcactggtcgtctggatctctggtatcgtacaaaagctgggacacagggtcaccaagttccgcaaacgcaggctattgcgcttctttgacatcctgcagcgggttcaaaaaatggaaggatgaatcatgcgagaagaagttcagctttgtttgcaaattcaagaattag

SEQ ID NO: 165738 - DNA, 501 bp, Artificial Sequence
  derived and/or modified sequence
atggcccagaccaacagcttctttatgttgatatcaagcttgatgttcctaagcctctcccaaggccaagagtctcaaacagagctgccaaacccacgaattagctgtccagagggcacaaatgcctacagatcgtattgttactattttaatgaggatcctgagacttgggtggacgccgacctgtactgtcagaacatgaatagcggaaatttagtctcagtacttactcaagccgagggcgcattcgtcgcctcccttattaaagaatctagcaccgatgattctaatgtgtggatcggcttacacgatcctaagaagaatagaagatggcattggagcagcgggtctctggtctcctataagagctgggatacaggctcaccatcaagtgctaacgcaggatactgcgcctccctaactagttgcagcggttttaaaaagtggaaagacgagtcctgtgagaaaaagtttagctttgtctgtaaatttaagaattag

SEQ ID NO: 165739 - DNA, 501 bp, Artificial Sequence
  derived and/or modified sequence
atggcccagaccaacagcttcttcatgctgatcagcagcctgatgttcctgagcctgagccagggccaggagagccagaccgagctgcccaaccccagaatcagctgccccgagggcaccaacgcctacagaagctactgctactacttcaacgaggaccccgagacctgggtggacgccgacctgtactgccagaacatgaacagcggcaacctggtgagcgtgctgacccaggccgagggcgccttcgtggccagcctgatcaaggagagcagcaccgacgacagcaacgtgtggatcggcctgcacgaccccaagaagaacagaagatggcactggagcagcggcagcctggtgagctacaagagctgggacaccggcagccccagcagcgccaacgccggctactgcgccagcctgaccagctgcagcggcttcaagaagtggaaggacgagagctgcgagaagaagttcagcttcgtgtgcaagttcaagaactag

SEQ ID NO: 165740 - DNA, 767 bp, Artificial Sequence
  derived and/or modified sequence
aagccacctcaagtggacaaggcacttaccaacagagattgctgatttgctccttaagcaagagattcactgccgctaagcatggctcagaccaactcgttcttcatgctgatctcctccctgatgttcctgtctctgagccaaggccaggagtcccagacagagctgcctaatccccgaatcagctgcccagaaggcaccaatgcctatcgctcctactgctactactttaatgaagaccctgagacctgggttgatgcagatctctattgccagaacatgaattcaggcaacctggtgtctgtgctcacccaggcggagggtgccttcgtggcctcactgattaaggagagtagcactgatgacagcaatgtctggattggcctccatgacccaaaaaagaaccgccgctggcactggagtagtgggtccctggtctcctacaagtcctgggacactggatccccgagcagtgctaatgctggctactgtgcaagcctgacttcatgctcaggattcaagaaatggaaggatgaatcttgtgagaagaagttctcctttgtttgcaagttcaaaaactagaggaagctgaaaaatggatgtctagaactggtcctgcaattactatgaagtcaaaaattaaactagactatgtctccaactcagttcagaccatctcctccctaatgagtttgcatcgctgatcttcagtaccttcacctgtctcagtctctagagccctgaaaaataaaaacaaacttattttt

SEQ ID NO: 165741 - DNA, 501 bp, Artificial Sequence
  derived and/or modified sequence
atggctcagacgaatagcttcttcatgctgatttcttcccttatgttcctctccctaagtcagggtcaggaatcacaaaccgagcttcccaatccccgcatatcgtgtcccgagggaactaatgcatatcggagttattgttattatttcaatgaagatcctgagacttgggtcgacgcggatctttactgccagaacatgaactccggaaatcttgtgagtgtccttacacaggctgaaggggccttcgtcgcgtccctgattaaagaatcttcaaccgatgattccaacgtgtggattggcctgcatgaccctaagaagaaccgtcggtggcactggagtagcgggtccctcgtgtcttacaaatcttgggacaccggaagtcctagttctgctaacgcaggctactgcgccagtctcacaagctgtagcggtttcaaaaagtggaaggacgaaagctgcgaaaaaaagttttcctttgtatgcaagttcaagaactag

SEQ ID NO: 165742 - DNA, 501 bp, Artificial Sequence
  derived and/or modified sequence
atggcccagaccaacagcttcttcatgctgatcagcagcctgatgttcctgagcctgagccagggccaggagagccagacagagctgcccaacccccgcatcagctgcccagagggcaccaatgcctaccgcagctactgctactacttcaatgaagatcctgagacctgggtggatgctgacctgtactgccagaacatgaacagcggcaacctggtgtctgtgctgacccaggccgagggcgcctttgtggccagcctcatcaaggagagcagcacagatgacagcaatgtgtggattggcctgcatgaccccaagaagaacagacgctggcactggagcagcggcagcctggtgtcctacaagtcctgggacaccggcagccccagcagcgccaatgccggctactgtgccagcctgaccagctgcagcggcttcaagaagtggaaggatgagagctgtgagaagaagttctcctttgtgtgcaagttcaagaactag

SEQ ID NO: 165743 - DNA, 501 bp, Artificial Sequence
  derived and/or modified sequence
atggcccagaccaacagcttcttcatgctgatcagcagcctgatgtttctttctctcagtcagggccaggagtcacagaccgagttgcccaaccctcggatctcatgtccagagggaaccaacgcctatcgctcctactgctattatttcaacgaagacccagagacatgggtcgatgccgatctctactgccagaatatgaattctgggaatcttgtgtcagtccttacccaggctgaaggagcattcgtcgcctccctgatcaaggagagctcaaccgacgactctaacgtttggatcggactacacgatcccaagaagaataggagatggcactggtcttccgggagtctcgtaagctacaaatcttgggacaccggcagtcccagctctgccaacgcaggttactgtgcatccctgacctcctgttccggctttaagaagtggaaagacgagtcatgtgaaaagaaattcagtttcgtgtgtaaattcaagaactag

SEQ ID NO: 165744 - RNA, 501 nt, Artificial Sequence
  derived and/or modified sequence
auggcacaaacaaacucuuucuuuaugcugaucuccagucugauguuucuuagcuugucucagggccaggagucgcaaacugaauugcccaacccucgaauuagcugucccgaggguacgaaugcuuaccggagcuauugcuacuacuuuaaugaagauccugaaacuuggguggaugccgaucuguauugucagaacaugaauucagguaaccuuguuagcguucucacccaggccgagggugccuuuguggcuucucugaucaaggaaucuaguaccgaugacucuaacguguggauaggguugcacgauccuaaaaagaaucgccgguggcacuggucgucuggaucucugguaucguacaaaagcugggacacagggucaccaaguuccgcaaacgcaggcuauugcgcuucuuugacauccugcagcggguucaaaaaauggaaggaugaaucaugcgagaagaaguucagcuuuguuugcaaauucaagaauuag

SEQ ID NO: 165745 - RNA, 501 nt, Artificial Sequence
  derived and/or modified sequence
auggcccagaccaacagcuucuuuauguugauaucaagcuugauguuccuaagccucucccaaggccaagagucucaaacagagcugccaaacccacgaauuagcuguccagagggcacaaaugccuacagaucguauuguuacuauuuuaaugaggauccugagacuuggguggacgccgaccuguacugucagaacaugaauagcggaaauuuagucucaguacuuacucaagccgagggcgcauucgucgccucccuuauuaaagaaucuagcaccgaugauucuaauguguggaucggcuuacacgauccuaagaagaauagaagauggcauuggagcagcgggucucuggucuccuauaagagcugggauacaggcucaccaucaagugcuaacgcaggauacugcgccucccuaacuaguugcagcgguuuuaaaaaguggaaagacgaguccugugagaaaaaguuuagcuuugucuguaaauuuaagaauuag

SEQ ID NO: 165746 - protein, 579 aa, Artificial Sequence
  derived and/or modified sequence
MLRSGPASGPSVPTGRAMPSRRVARPPAAPELGALGSPDLSSLSLAVSRSTDELEIIDEYIKENGFGLDGGQPGPGEGLPRLVSRGAASLSTVTLGPVAPPATPPPWGCPLGRLVSPAPGPGPQPHLVITEQPKQRGMRFRYECEGRSAGSILGESSTEASKTLPAIELRDCGGLREVEVTACLVWKDWPHRVHPHSLVGKDCTDGICRVRLRPHVSPRHSFNNLGIQCVRKKEIEAAIERKIQLGIDPYNAGSLKNHQEVDMNVVRICFQASYRDQQGQMRRMDPVLSEPVYDKKSTNTSELRICRINKESGPCTGGEELYLLCDKVQKEDISVVFSRASWEGRADFSQADVHRQIAIVFKTPPYEDLEIVEPVTVNVFLQRLTDGVCSEPLPFTYLPRDHDSYGVDKKRKRGMPDVLGELNSSDPHGIESKRRKKKPAILDHFLPNHGSGPFLPPSALLPDPDFFSGTVSLPGLEPPGGPDLLDDGFAYDPTAPTLFTMLDLLPPAPPHASAVVCSGGAGAVVGETPGPEPLTLDSYQAPGPGDGGTASLVGSNMFPNHYREAAFGGGLLSPGPEAT

SEQ ID NO: 165747 - DNA, 1740 bp, Artificial Sequence
  derived and/or modified sequence
atgcttcgcagtggacctgcaagcggacccagtgttccaaccggaagagccatgccatcacgcagagtcgctcggcctcccgccgcccctgagttaggagcattgggaagccccgatctcagctctttgagcttggccgtttcccggtccactgacgaactcgaaattatcgatgagtacattaaggaaaatggattcggtttggatggtggacagcccgggccgggcgagggattgcctcggctagttagccgcggcgctgcttccttgtccaccgtaacactcggccctgtagctccgccagctacccctcctccctggggctgtccgctcggccgccttgtgagtcccgcccctggacctgggcctcaaccgcacctggtcatcactgaacagcccaagcagcgcggtatgagattccgttacgaatgtgaagggcgatccgcagggtcgatcctcggtgaaagctccactgaagcttcaaaaacactgccagccattgagctgagagattgtggcggactgcgggaagtggaagtgaccgcctgccttgtatggaaagactggcctcatagggtacatccccactcactggtgggcaaggattgcacagatggcatatgtcgggtccgcctccgccctcatgtgagtccaagacactcctttaataatttgggaattcagtgtgttagaaaaaaggaaatcgaggcagccattgagaggaaaatacagttaggaattgacccatataatgcgggcagtctgaagaatcaccaggaagtcgatatgaacgtggtgcggatttgctttcaggccagttaccgcgaccagcaaggccagatgaggaggatggaccccgtgctcagtgagcccgtgtatgataaaaagtcgacaaacacatccgaactaagaatctgcagaattaacaaggagtccgggccctgtactggcggcgaagagctgtatctgctttgcgacaaggtccagaaagaagacattagcgtcgttttttcacgcgccagctgggaaggaagggccgatttcagccaggctgatgtccaccgtcagatcgcgattgtgtttaagacaccaccttacgaagatctggaaatcgtggaaccagtcaccgtgaacgtatttctgcagcgcttgactgacggcgtgtgtagcgaaccattgcccttcacctatctgccccgagaccacgactcctatggggttgacaagaaacgtaaacgcggaatgccggatgtgctcggtgaactgaatagcagcgacccacatggcattgagtcaaagcggagaaaaaagaagccagcaatcctggaccatttcttgcctaatcacggctctgggcccttcttgcccccatccgctctactccccgaccctgactttttttctggaacagtgagccttccagggttggagccacccgggggcccggatttgttagacgatgggtttgcgtatgatcctaccgcacccacactcttcacaatgctggacctgctgccaccagcccctccccatgcttctgccgtcgtctgcagtggcggagccggcgcagttgtgggcgagactcccgggccggaaccgctgaccctggacagttaccaagcccccgggcccggtgatggaggtacagcttccctcgtgggttccaatatgttcccaaatcactaccgggaggctgctttcggcggaggcttactatcccctggtccggaggcaacctag

SEQ ID NO: 165748 - DNA, 1740 bp, Artificial Sequence
  derived and/or modified sequence
atgctgcggagcggccctgccagcggccccagcgtgcccaccggccgggccatgcccagcagaagagtggcccggcccccagctgcccctgagctgggcgccctgggcagcccagacctgagcagcctgagcctggccgtgagccgcagcacagatgagctggagatcattgatgagtacatcaaggaaaatggcttcggcctggatggcggccagcccggccctggagagggcctgccccggctggtgtccagaggagctgccagcctgagcacagtgaccctgggccctgtggcccccccagccaccccaccaccctggggctgccccctgggccgcctggtgtccccagcccctggccctggcccccagccccacctggtgatcacagagcagcccaagcagaggggcatgaggttccgctatgaatgtgagggccgctctgctggcagcatcctgggggagagcagcacagaggccagcaagaccctgcctgccatcgagctgcgggactgtggcggcctgcgggaggtggaggtgacagcctgcctggtgtggaaggactggccccaccgggtgcacccccacagcctggtgggcaaggactgcacagatggcatctgccgggtgcggctgcggccccacgtgagccccaggcacagcttcaacaacctgggcatccagtgtgtgaggaagaaggagattgaagctgccattgaaaggaagatccagctgggcatcgacccctacaatgccggcagcctgaagaaccaccaggaggtggacatgaatgtggtgcgcatctgcttccaggccagctacagagaccagcagggccagatgaggaggatggaccctgtgctgtctgagcctgtgtatgacaagaagagcaccaacaccagcgagctgcgcatctgccgcatcaacaaggagagcggcccctgcaccggcggggaggagctgtacctgctgtgtgacaaggtgcagaaggaggacatctctgtggtgttcagccgggcctcctgggagggccgggctgacttcagccaggctgatgtgcaccggcagatcgccatcgtgttcaagaccccaccctatgaggacctggagatcgtggagcctgtgacagtgaatgtgttcctgcagaggctgacagatggagtgtgcagcgagcccctgcccttcacctacctgccccgggaccatgacagctatggagtggacaagaagaggaagaggggcatgccagatgtgctgggggagctgaacagcagtgacccccacggcatcgagagcaagaggaggaagaagaagccagccatcctggaccacttcctgcccaaccacggcagcggccccttcctgccccccagcgccctgctgcctgaccctgacttcttcagcggcaccgtgtccctgcccggcctggagcccccaggcggccctgacctgctggatgatggctttgcctatgaccccacagcccccaccctcttcaccatgctggacctgctgcccccagcccctcctcatgccagcgctgtggtgtgcagcggcggggccggggctgtggtgggggagaccccaggccctgagcccctgaccctggacagctaccaggcccctggccctggagatggcggcacagccagcctggtgggcagcaacatgttccccaaccactaccgggaggccgcctttggaggcggcctgctgagccctggccctgaggccacctag

SEQ ID NO: 165749 - DNA, 1740 bp, Artificial Sequence
  derived and/or modified sequence
atgctgcggagcggccccgccagcggccccagcgtgcccaccggcagggctatgccctccagaagagtggctcgaccccccgctgcccccgagctcggcgccctggggtcaccagacctgagcagcttgtccttggccgtaagcaggagcacggacgagctggagatcatcgatgagtacatcaaggagaatggcttcggtctggacggcggtcaacctggcccgggagaaggactcccccggctagtgtccagaggagccgcttccttaagtactgtgacacttggccctgtggcccctcccgcgacgcctcccccttggggctgccctctaggacggctcgtctcacccgctccaggaccaggaccccagccccacctggtgatcacggagcagcccaagcaaaggggtatgagatttcgctacgaatgcgaaggtaggtctgctggatccatattaggggaaagttctacggaggcgagcaaaactttgcccgccattgagctcagggactgcggcgggctcagggaagtggaggtcacagcctgcttagtgtggaaggattggccacatcgcgtgcatccacactctctggtgggaaaagattgtaccgatgggatttgtcgggtgcggcttcggccccacgtaagccccagacatagcttcaataacctgggcatacagtgcgtgcggaaaaaggaaattgaggccgctatcgagagaaagatccagcttgggatagatccgtataatgccggatctctgaagaaccaccaggaagtggacatgaacgtagtaaggatctgctttcaggcgagttacagagatcaacagggccagatgcgtaggatggacccagtactgtctgagcctgtctatgataaaaaatccacaaatacttctgagctgcggatctgtagaatcaacaaagaatccggtccttgcacagggggagaagaactgtacctgctgtgtgataaagtgcagaaagaggatatcagcgttgtgttttcaagggccagctgggagggccgagcggactttagccaggcagacgtgcacaggcaaatcgccattgtgttcaagacccctccttacgaagacctcgaaattgttgaacctgtgacagtcaacgtgttcctgcagcggctgacggatggagtttgttctgagccattaccattcacatacctgccccgagaccatgatagttacggggtggacaaaaagagaaagagggggatgcctgacgtgttgggcgagctgaattcatcggacccacacggcatcgaatctaaaaggagaaaaaaaaaacccgcaatcctggaccacttcctgcctaaccatggctcgggaccttttctcccaccatctgccctcctcccagatcccgatttctttagcggtaccgtctcgctgcccggacttgaacctcctggcgggcctgacctgctggatgatggctttgcttatgacccaaccgctccaacactttttacgatgttggacttgctgccgcccgcccctccccacgcctcagctgtagtctgctccgggggagccggggcagtcgtgggcgaaaccccggggcccgagcctctcactctggacagctatcaggctcccgggccgggcgatgggggcacagcaagcttagttggctccaacatgttcccaaatcactatcgcgaggccgccttcggtggaggcttgctaagccccggcccagaagcaacatag

SEQ ID NO: 165750 - DNA, 1740 bp, Artificial Sequence
  derived and/or modified sequence
atgttaagaagcggcccagcatccgggcctagcgtgccaacagggagggccatgccgagtcggcgagtggctcggcctccagctgcgccagagttgggggctctgggcagcccagacctgagctccttgagtctcgcggtgtcaagatctactgacgagctcgagatcatcgatgaatacatcaaagaaaatgggtttggtctggacgggggacagcctgggcctggagaaggtctgcccagactcgtgtcccggggagccgcttccttgtccactgttaccctcggtccggtcgctccaccagcgactccacccccatgggggtgccccctgggtcggctggtctctcccgcaccagggccagggccacagccccatttagttatcaccgagcagcccaaacaaaggggaatgcgcttccgatacgaatgtgagggaagatccgcagggagtatcctgggtgaaagtagtactgaggcctcgaagaccctgcccgcaattgaactgcgggattgtggcggactgcgtgaagtggaggtcacagcctgcctagtatggaaggactggccacatagagtacatccacatagtctcgtcggaaaggattgcaccgacgggatttgccgcgtgcgactccgccctcacgttagtccccgtcactccttcaacaatctgggaatccagtgtgtccgcaagaaggaaatcgaggccgcaatcgagcgtaagattcagctgggtattgatccatataacgctgggtctcttaagaaccaccaggaagtagatatgaacgtcgttcggatctgcttccaggcttcatacagggaccaacaagggcaaatgaggcgcatggatcccgtcctttccgagcctgtgtacgacaaaaagagtaccaacacaagcgaactgcgcatctgtcgaatcaacaaagaaagtggcccttgcactggaggcgaggagttatacctgctgtgtgacaaggtccagaaagaggacatatcggtggttttcagccgggctagctgggaaggcagagctgactttagccaggcggatgtccaccgacagatagccattgtattcaagacacccccatatgaagacctcgagattgttgagcccgtgaccgtgaatgtgtttcttcagaggctgaccgacggggtttgttcagaacctttgccctttacctatctgcccagggatcacgattcatacggcgttgataagaaacgtaaaaggggtatgccggacgttctgggcgagctcaactccagcgatccgcatggaatcgaatcaaaaagaaggaagaaaaagcccgctatcctggaccatttcctgccgaatcacggatccgggccttttctgcctcctagcgcactcctgccagaccctgatttcttctccgggacagtgtccctgcctgggctcgagcccccaggaggccctgatcttttggacgatgggtttgcctatgacccgacagccccaacattattcacaatgctggatctcctccccccagcaccccctcatgcatctgctgttgtgtgcagcggaggcgcaggagccgtggtgggggagactccaggcccagagccgctgactcttgactcttaccaggcgcctggacctggagatgggggaactgcaagtctcgtcggctctaacatgttcccaaaccattaccgcgaggccgctttcggcggagggttactatcccctggaccagaagcaacctag

SEQ ID NO: 165751 - DNA, 1740 bp, Artificial Sequence
  derived and/or modified sequence
atgctgagaagcggccccgccagcggccccagcgtgcccaccggcagagccatgcccagcagaagagtggccagaccccccgccgcccccgagctgggcgccctgggcagccccgacctgagcagcctgagcctggccgtgagcagaagcaccgacgagctggagatcatcgacgagtacatcaaggagaacggcttcggcctggacggcggccagcccggccccggcgagggcctgcccagactggtgagcagaggcgccgccagcctgagcaccgtgaccctgggccccgtggccccccccgccaccccccccccctggggctgccccctgggcagactggtgagccccgcccccggccccggcccccagccccacctggtgatcaccgagcagcccaagcagagaggcatgagattcagatacgagtgcgagggcagaagcgccggcagcatcctgggcgagagcagcaccgaggccagcaagaccctgcccgccatcgagctgagagactgcggcggcctgagagaggtggaggtgaccgcctgcctggtgtggaaggactggccccacagagtgcacccccacagcctggtgggcaaggactgcaccgacggcatctgcagagtgagactgagaccccacgtgagccccagacacagcttcaacaacctgggcatccagtgcgtgagaaagaaggagatcgaggccgccatcgagagaaagatccagctgggcatcgacccctacaacgccggcagcctgaagaaccaccaggaggtggacatgaacgtggtgagaatctgcttccaggccagctacagagaccagcagggccagatgagaagaatggaccccgtgctgagcgagcccgtgtacgacaagaagagcaccaacaccagcgagctgagaatctgcagaatcaacaaggagagcggcccctgcaccggcggcgaggagctgtacctgctgtgcgacaaggtgcagaaggaggacatcagcgtggtgttcagcagagccagctgggagggcagagccgacttcagccaggccgacgtgcacagacagatcgccatcgtgttcaagacccccccctacgaggacctggagatcgtggagcccgtgaccgtgaacgtgttcctgcagagactgaccgacggcgtgtgcagcgagcccctgcccttcacctacctgcccagagaccacgacagctacggcgtggacaagaagagaaagagaggcatgcccgacgtgctgggcgagctgaacagcagcgacccccacggcatcgagagcaagagaagaaagaagaagcccgccatcctggaccacttcctgcccaaccacggcagcggccccttcctgccccccagcgccctgctgcccgaccccgacttcttcagcggcaccgtgagcctgcccggcctggagccccccggcggccccgacctgctggacgacggcttcgcctacgaccccaccgcccccaccctgttcaccatgctggacctgctgccccccgcccccccccacgccagcgccgtggtgtgcagcggcggcgccggcgccgtggtgggcgagacccccggccccgagcccctgaccctggacagctaccaggcccccggccccggcgacggcggcaccgccagcctggtgggcagcaacatgttccccaaccactacagagaggccgccttcggcggcggcctgctgagccccggccccgaggccacctag

SEQ ID NO: 165752 - DNA, 1740 bp, Artificial Sequence
  derived and/or modified sequence
atgctgcgatccggccccgcgtccggaccctctgtacctaccggccgcgccatgccttccagacgggtcgcgcgcccgccagccgctcccgaactcggagccctgggaagcccagacctgtcttctctgagcttggcagtgtcccgttctactgatgaactggagataattgatgaatacatcaaagaaaacgggttcggcctggatggagggcagcctggacccggagaaggcctaccacgactggtgtcacggggggcagcgtccttaagcactgtcacactggggcccgtagcccctccggccactccaccaccctggggctgtcccttaggtcgtctggtaagtccagcccccggccccggtccacaaccccacctagtcattactgagcagccaaaacagcggggaatgaggttccggtacgagtgcgagggacgttccgcagggtctatcctaggggagtctagcacagaggcctctaaaacgctaccagccattgaactacgcgactgcgggggtctgcgggaggttgaggtaaccgcatgtcttgtatggaaggactggccacatagagttcatccccactcccttgtggggaaggactgcaccgacggcatctgcagggtacgcttgcggccgcacgtctctccgcgccactcctttaataacttaggcatccaatgtgtgcggaagaaggaaattgaggctgctattgagaggaagatacagttagggatagacccctacaacgcaggaagccttaagaatcatcaggaggtggacatgaacgttgtgcgcatctgctttcaggctagctaccgtgaccagcagggtcagatgaggcgaatggaccccgtgctctcggaacctgtatatgataaaaaaagtactaacacctctgagttacgcatctgccggattaacaaggaaagcggtccctgcacaggaggggaagaattatatttgttgtgcgataaagtgcagaaagaggacatatcagttgtattctccagagctagttgggagggaagggctgattttagccaggcagacgtacacagacagatcgccattgtgttcaaaaccccaccatacgaagacctggaaatagtcgaacctgtaacagtgaacgtgtttctgcagagactgacggatggcgtgtgcagcgagcccctgccgtttacctacctgccccgtgaccatgatagctacggcgttgataagaaacgcaagaggggaatgcctgacgtgcttggcgagctcaattcctcagacccccatggcattgagtccaaaaggcggaaaaagaagcccgcgattctggaccacttcctgccgaaccatggctccggtccctttctcccaccgtccgcactcctccctgatccagattttttctccggcacagtgagtctgcccggcctggagccccccggaggacctgacctcttggacgatggtttcgcatacgatcccaccgcgccaaccttgttcaccatgctagatttgctccctcctgccccaccgcacgcctccgccgtcgtgtgctccgggggagccggagcggttgtgggcgagacacctggccccgagccgttaacacttgacagttaccaggcccctggcccaggtgacggaggtacagcttctctggtcggcagtaacatgttccctaaccactatcgcgaagccgccttcggcggaggactcctgagccccggccctgaggcgacgtag

SEQ ID NO: 165753 - DNA, 1740 bp, Artificial Sequence
  derived and/or modified sequence
atgctgcggagcggccccgccagcggccccagcgtgcccaccggccgcgccatgccttcgcggagggtggctcgcccccccgcagcccccgagttaggggccctcgggagtcccgacctcagttcactcagtcttgctgtttctagaagcaccgacgaactcgaaattatcgacgagtacatcaaggagaacggtttcgggttggacggggggcaacccggacccggagaggggctaccaaggttggtgtccaggggcgctgcatctctttcgactgtgactcttggcccagtcgctccgcccgctaccccaccaccgtggggttgcccactgggacgactggtttcaccagcgccagggccaggcccacaacctcacctggtaatcaccgaacagccaaaacagagaggaatgcgcttcagatatgagtgtgagggcagaagtgccggctcaatcctaggtgaaagctctaccgaggcaagcaaaaccctccctgcaatagagctgcgggactgtggaggcctacgcgaggtggaagtgacggcgtgtctagtatggaaagactggccacatcgagtacatccacattctcttgtaggcaaggactgcactgatggcatttgtcgcgtgcgcctgcgcccgcacgtatccccccggcatagcttcaacaatctaggaattcagtgcgtccgcaaaaaagaaatcgaagccgccatagaacggaagatacagctagggatcgacccttataatgccgggtctttaaagaaccatcaagaggtcgacatgaatgtggttagaatctgctttcaagcatcctatagagatcagcagggacagatgcgtcgcatggaccccgtgctgagcgagcccgtttatgacaagaagtccaccaacacatccgaactgcggatttgtcgcatcaacaaagagagtgggccgtgcaccggaggagaggagctctacttgctctgcgacaaagtgcagaaagaggatataagcgtagtcttttcaagggcttcatgggaaggtagagccgacttctcacaggccgacgttcaccggcagattgcaattgtgtttaaaacccccccctacgaagatctggagatagtggaaccagttactgtgaatgtgttcttgcaaaggctgactgacggggtatgctccgagcctctgcctttcacctacctaccccgcgaccacgattcctacggagtggacaaaaagagaaaaagggggatgcccgatgtgctcggggagctcaattcctcagacccacatggcatcgagagcaagcggcgtaagaaaaagcctgcgattctcgaccacttcctgccaaatcatggctccggcccatttctcccgccctccgcactgctccctgacccagactttttcagtggcactgtcagcctgccggggttagaacctcctggcgggccagatttgctggatgacgggtttgcctatgatcccactgcccccactctgttcacaatgctggatttactgcctccggcaccgccgcacgccagcgccgtcgtctgcagcggaggggccggggctgtggtcggggagacaccaggtccggaacccttgacacttgactcttaccaagcccccggtcctggagacgggggaaccgcatcgttggtgggaagcaatatgtttcccaatcactaccgtgaagccgccttcggaggaggcctgctgtccccaggtccagaggctacatag

SEQ ID NO: 165754 - DNA, 1740 bp, Artificial Sequence
  derived and/or modified sequence
atgcttagatccgggccagcttcgggcccatctgtgcctacgggtagagctatgcctagtaggagagtagctaggccgcctgccgcacccgaactcggagccttaggttctcccgacctgagctctttgtctctggcagtgagccggtcaaccgacgagttagaaattatagatgaatatatcaaggagaacggctttggcctggacggaggtcagcccggtccaggagaaggtttaccacgtctcgttagccgcggtgccgcatctctcagcacagtaactctcggccctgtcgccccaccggcaaccccacctccgtggggctgccccctggggaggctcgtgtcccctgcgcctggacccggtcctcagccacacctagtgatcaccgaacagccaaagcagagaggcatgcgcttccgctacgaatgtgagggacgttctgcagggtccattcttggggagtcttcaacggaagcttcgaaaacactgcccgctatcgagctgcgggactgtggtggtctgcgggaggtggaggttactgcatgcttagtgtggaaagactggcctcaccgcgtgcacccacattccttagttggaaaggattgcaccgacggtatctgccgggtgaggctaaggccacacgtgtcacccaggcatagcttcaacaatcttggcattcagtgcgtgcgcaagaaggagatcgaagccgctattgaacggaaaatccagctcgggatcgatccctataatgcaggatccttaaagaatcaccaggaggttgatatgaacgtcgttcgtatttgctttcaggcctcatacagggaccagcagggacagatgcgacgaatggaccccgttctgtccgagccagtctacgacaaaaagtccaccaatacgtcagagttacgaatttgtcgaattaacaaggaaagcggaccttgcactggcggagaggagctgtatctgctgtgtgataaagtgcagaaggaagacatttctgtggtattttccagggctagttgggaggggagggccgacttctcccaggccgacgtacaccgccagatcgcaatagttttcaagactcccccttatgaagatcttgaaatcgtggagcctgtcactgtgaacgtttttttgcagagactgacggacggcgtgtgctctgagccactgccatttacttaccttccacgcgaccacgattcctacggagtcgacaagaagcggaaacgaggaatgcccgatgttctcggcgagctgaacagcagcgatccacacggcattgaatctaagagaagaaaaaaaaaacccgcaatcctagaccattttctgcccaaccatggaagcggcccattccttcctccctctgcactcctgccggaccctgactttttttccgggaccgtgagcctaccaggcctggaaccacccggagggccagatctccttgacgatggcttcgcttatgaccctaccgccccaacactttttacaatgctggacttgctcccacctgctccaccgcacgccagcgccgtggtatgctcaggtggggctggcgctgtggttggcgagacccctggccctgaaccacttaccctggactcctatcaggcccctggcccaggggacggcggaaccgctagtttagtgggcagcaatatgttccctaatcactatcgggaagctgcattcggtggaggcctgctcagtcccggaccagaggctacgtag

SEQ ID NO: 165755 - DNA, 2287 bp, Artificial Sequence
  derived and/or modified sequence
cccgcccggcccggccccgcgccccgcgcagccccgggcgccgcgcgtcctgcccggcctgcggccccagcccttgcgccgctcgtccgacccgcgatcgtccaccagaccgtgcctcccggccgcccggccggcccgcgtgcatgcttcggtctgggccagcctctgggccgtccgtccccactggccgggccatgccgagtcgccgcgtcgccagaccgccggctgcgccggagctgggggccttagggtcccccgacctctcctcactctcgctcgccgtttccaggagcacagatgaattggagatcatcgacgagtacatcaaggagaacggcttcggcctggacgggggacagccgggcccgggcgaggggctgccacgcctggtgtctcgcggggctgcgtccctgagcacggtcaccctgggccctgtggcgcccccagccacgccgccgccttggggctgccccctgggccgactagtgtccccagcgccgggcccgggcccgcagccgcacctggtcatcacggagcagcccaagcagcgcggcatgcgcttccgctacgagtgcgagggccgctcggccggcagcatccttggggagagcagcaccgaggccagcaagacgctgcccgccatcgagctccgggattgtggagggctgcgggaggtggaggtgactgcctgcctggtgtggaaggactggcctcaccgagtccacccccacagcctcgtggggaaagactgcaccgacggcatctgcagggtgcggctccggcctcacgtcagcccccggcacagttttaacaacctgggcatccagtgtgtgaggaagaaggagattgaggctgccattgagcggaagattcaactgggcattgacccctacaacgctgggtccctgaagaaccatcaggaagtagacatgaatgtggtgaggatctgcttccaggcctcatatcgggaccagcagggacagatgcgccggatggatcctgtgctttccgagcccgtctatgacaagaaatccacaaacacatcagagctgcggatttgccgaattaacaaggaaagcgggccgtgcaccggtggcgaggagctctacttgctctgcgacaaggtgcagaaagaggacatatcagtggtgttcagcagggcctcctgggaaggtcgggctgacttctcccaggccgacgtgcaccgccagattgccattgtgttcaagacgccgccctacgaggacctggagattgtcgagcccgtgacagtcaacgtcttcctgcagcggctcaccgatggggtctgcagcgagccattgcctttcacgtacctgcctcgcgaccatgacagctacggcgtggacaagaagcggaaacgggggatgcccgacgtccttggggagctgaacagctctgacccccatggcatcgagagcaaacggcggaagaaaaagccggccatcctggaccacttcctgcccaaccacggctcaggcccgttcctcccgccgtcagccctgctgccagaccctgacttcttctctggcaccgtgtccctgcccggcctggagccccctggcgggcctgacctcctggacgatggctttgcctacgaccctacggcccccacactcttcaccatgctggacctgctgcccccggcaccgccacacgctagcgctgttgtgtgcagcggaggtgccggggccgtggttggggagacccccggccctgaaccactgacactggactcgtaccaggccccgggccccggggatggaggcaccgccagccttgtgggcagcaacatgttccccaatcattaccgcgaggcggcctttgggggcggcctcctatccccggggcctgaagccacgtagccccgcgatgccagaggaggggcactgggtggggagggaggtggaggagccgtgcaatcccaaccaggatgtctagcacccccatccccttggcccttcctcatgcttctgaagtggacatattcagccttggcgagaagctccgttgcacgggtttccccttgagcccattttacagatgaggaaactgagtccggagaggaaaagggacatggctcccgtgcactagcttgttacagctgcctctgtccccacatgtgggggcaccttctccagtaggattcggaaaagattgtacatatgggaggagggggcagattcctggccctccctccccagacttgaaggtggggggtaggttggttgttcagagtcttcccaataaagatgagtttttgagcctc

SEQ ID NO: 165756 - DNA, 2270 bp, Artificial Sequence
  derived and/or modified sequence
cgcgccccgcgcagccccgggcgccgcgcgtcctgcccggcctgcggccccagcccttgcgccgctcgtccgacccgcgatcgtccaccagaccgtgcctcccggccgcccggccggcccgcgtgcatgcttcggtctgggccagcctctgggccgtccgtccccactggccgggccatgccgagtcgccgcgtcgccagaccgccggctgcgccggagctgggggccttagggtcccccgacctctcctcactctcgctcgccgtttccaggagcacagatgaattggagatcatcgacgagtacatcaaggagaacggcttcggcctggacgggggacagccgggcccgggcgaggggctgccacgcctggtgtctcgcggggctgcgtccctgagcacggtcaccctgggccctgtggcgcccccagccacgccgccgccttggggctgccccctgggccgactagtgtccccagcgccgggcccgggcccgcagccgcacctggtcatcacggagcagcccaagcagcgcggcatgcgcttccgctacgagtgcgagggccgctcggccggcagcatccttggggagagcagcaccgaggccagcaagacgctgcccgccatcgagctccgggattgtggagggctgcgggaggtggaggtgactgcctgcctggtgtggaaggactggcctcaccgagtccacccccacagcctcgtggggaaagactgcaccgacggcatctgcagggtgcggctccggcctcacgtcagcccccggcacagttttaacaacctgggcatccagtgtgtgaggaagaaggagattgaggctgccattgagcggaagattcaactgggcattgacccctacaacgctgggtccctgaagaaccatcaggaagtagacatgaatgtggtgaggatctgcttccaggcctcatatcgggaccagcagggacagatgcgccggatggatcctgtgctttccgagcccgtctatgacaagaaatccacaaacacatcagagctgcggatttgccgaattaacaaggaaagcgggccgtgcaccggtggcgaggagctctacttgctctgcgacaaggtgcagaaagaggacatatcagtggtgttcagcagggcctcctgggaaggtcgggctgacttctcccaggccgacgtgcaccgccagattgccattgtgttcaagacgccgccctacgaggacctggagattgtcgagcccgtgacagtcaacgtcttcctgcagcggctcaccgatggggtctgcagcgagccattgcctttcacgtacctgcctcgcgaccatgacagctacggcgtggacaagaagcggaaacgggggatgcccgacgtccttggggagctgaacagctctgacccccatggcatcgagagcaaacggcggaagaaaaagccggccatcctggaccacttcctgcccaaccacggctcaggcccgttcctcccgccgtcagccctgctgccagaccctgacttcttctctggcaccgtgtccctgcccggcctggagccccctggcgggcctgacctcctggacgatggctttgcctacgaccctacggcccccacactcttcaccatgctggacctgctgcccccggcaccgccacacgctagcgctgttgtgtgcagcggaggtgccggggccgtggttggggagacccccggccctgaaccactgacactggactcgtaccaggccccgggccccggggatggaggcaccgccagccttgtgggcagcaacatgttccccaatcattaccgcgaggcggcctttgggggcggcctcctatccccggggcctgaagccacgtagccccgcgatgccagaggaggggcactgggtggggagggaggtggaggagccgtgcaatcccaaccaggatgtctagcacccccatccccttggcccttcctcatgcttctgaagtggacatattcagccttggcgagaagctccgttgcacgggtttccccttgagcccattttacagatgaggaaactgagtccggagaggaaaagggacatggctcccgtgcactagcttgttacagctgcctctgtccccacatgtgggggcaccttctccagtaggattcggaaaagattgtacatatgggaggagggggcagattcctggccctccctccccagacttgaaggtggggggtaggttggttgttcagagtcttcccaataaagatgagtttttgagcctc

SEQ ID NO: 165757 - protein, 358 aa, Artificial Sequence
  derived and/or modified sequence
MASGSVAECLQQETTCPVCLQYFAEPMMLDCGHNICCACLARCWGTAETNVSCPQCRETFPQRHMRPNRHLANVTQLVKQLRTERPSGPGGEMGVCEKHREPLKLYCEEDQMPICVVCDRSREHRGHSVLPLEEAVEGFKEQIQNQLDHLKRVKDLKKRRRAQGEQARAELLSLTQMEREKIVWEFEQLYHSLKEHEYRLLARLEELDLAIYNSINGAITQFSCNISHLSSLIAQLEEKQQQPTRELLQDIGDTLSRAERIRIPEPWITPPDLQEKIHIFAQKCLFLTESLKQFTEKMQSDMEKIQELREAQLYSVDVTLDPDTAYPSLILSDNLRQVRYSYLQQDLPDNPERSPSTT

SEQ ID NO: 165758 - protein, 513 aa, Artificial Sequence
  derived and/or modified sequence
MASGSVAECLQQETTCPVCLQYFAEPMMLDCGHNICCACLARCWGTAETNVSCPQCRETFPQRHMRPNRHLANVTQLVKQLRTERPSGPGGEMGVCEKHREPLKLYCEEDQMPICVVCDRSREHRGHSVLPLEEAVEGFKEQIQNQLDHLKRVKDLKKRRRAQGEQARAELLSLTQMEREKIVWEFEQLYHSLKEHEYRLLARLEELDLAIYNSINGAITQFSCNISHLSSLIAQLEEKQQQPTRELLQDIGDTLSRAERIRIPEPWITPPDLQEKIHIFAQKCLFLTESLKQFTEKMQSDMEKIQELREAQLYSVDVTLDPDTAYPSLILSDNLRQVRYSYLQQDLPDNPERFNLFPCVLGSPCFIAGRHYWEVEVGDKAKWTIGVCEDSVCRKGGVTSAPQNGFWAVSLWYGKEYWALTSPMTALPLRTPLQRVGIFLDYDAGEVSFYNVTERCHTFTFSHATFCGPVRPYFSLSYSGGKSAAPLIICPMSGIDGFSGHVGNHGHSMETSP

SEQ ID NO: 165759 - protein, 248 aa, Artificial Sequence
  derived and/or modified sequence
  misc_feature (1)..(1): Xaa can be any naturally occurring amino acid
XLKQFTEKMQSDMEKIQESADSLEGGILDLGSVLSHILPVSELREAQLYSVDVTLDPDTAYPSLILSDNLRQVRYSYLQQDLPDNPERFNLFPCVLGSPCFIAGRHYWEVEVGDKAKWTIGVCEDSVCRKGGVTSAPQNGFWAVSLWYGKEYWALTSPMTALPLRTPLQRVGIFLDYDAGEVSFYNVTERCHTFTFSHATFCGPVRPYFSLSYSGGKSAAPLIICPMSGIDGFSGHVGNHGHSMETSP

SEQ ID NO: 165760 - protein, 249 aa, Artificial Sequence
  derived and/or modified sequence
MASGSVAECLQQETTCPVCLQYFAEPMMLDCGHNICCACLARCWGTAETNVSCPQCRETFPQRHMRPNRHLANVTQLVKQLRTERPSGPGGEMGVCEKHREPLKLYCEEDQMPICVVCDRSREHRGHSVLPLEEAVEGFKEQIQNQLDHLKRVKDLKKRRRAQGEQARAELLSLTQMEREKIVWEFEQLYHSLKEHEYRLLARLEELDLAIYNSINGAITQFSCNISHLSSLIAQLEEKQQQPTRELLQ

SEQ ID NO: 165761 - protein, 247 aa, Artificial Sequence
  derived and/or modified sequence
LKQFTEKMQSDMEKIQESADSLEGGILDLGSVLSHILPVSELREAQLYSVDVTLDPDTAYPSLILSDNLRQVRYSYLQQDLPDNPERFNLFPCVLGSPCFIAGRHYWEVEVGDKAKWTIGVCEDSVCRKGGVTSAPQNGFWAVSLWYGKEYWALTSPMTALPLRTPLQRVGIFLDYDAGEVSFYNVTERCHTFTFSHATFCGPVRPYFSLSYSGGKSAAPLIICPMSGIDGFSGHVGNHGHSMETSP

SEQ ID NO: 165762 - protein, 52 aa, Artificial Sequence
  derived and/or modified sequence
  misc_feature (1)..(1): Xaa can be any naturally occurring amino acid
XLREAQLYSVDVTLDPDTAYPSLILSDNLRQVRYSYLQQDLPDNPERSPSTT

SEQ ID NO: 165763 - protein, 231 aa, Artificial Sequence
  derived and/or modified sequence
  misc_feature (1)..(1): Xaa can be any naturally occurring amino acid
XSADSLEGGILDLGSVLSHILPVSELREAQLYSVDVTLDPDTAYPSLILSDNLRQVRYSYLQQDLPDNPERFNLFPCVLGSPCFIAGRHYWEVEVGDKAKWTIGVCEDSVCRKGGVTSAPQNGFWAVSLWYGKEYWALTSPMTALPLRTPLQRVGIFLDYDAGEVSFYNVTERCHTFTFSHATFCGPVRPYFSLSYSGGKSAAPLIICPMSGIDGFSGHVGNHGHSMETSP

SEQ ID NO: 165764 - protein, 207 aa, Artificial Sequence
  derived and/or modified sequence
  misc_feature (1)..(1): Xaa can be any naturally occurring amino acid
XLREAQLYSVDVTLDPDTAYPSLILSDNLRQVRYSYLQQDLPDNPERFNLFPCVLGSPCFIAGRHYWEVEVGDKAKWTIGVCEDSVCRKGGVTSAPQNGFWAVSLWYGKEYWALTSPMTALPLRTPLQRVGIFLDYDAGEVSFYNVTERCHTFTFSHATFCGPVRPYFSLSYSGGKSAAPLIICPMSGIDGFSGHVGNHGHSMETSP

SEQ ID NO: 165765 - DNA, 2969 bp, Artificial Sequence
  derived and/or modified sequence
gggtttacgctgccgccggcatccgctcggacgcggccacgttgtcttgcgcgctttgcccgcctggccctgggactctgaccctcggctaccctttcctgccccactagcgtggccgcgagcctcggtgagccggccgtattcccgctctcgcttagggggcacaggcgcaggcatcggcccggccactccaagccttcggtgcgcgggcgcgtctgggatacgggcccgggaggcgccgccctccgtccgcccggtgcctctcaggaacagcgaaccggagagagcgccggagagttgggctcagtgcagagctcggcgccggggcccatgcccgtgcgcccccgcaggccggcgccatggcctccgggagtgtggccgagtgcctgcagcaggagaccacctgccccgtgtgcctgcagtacttcgcagagcccatgatgctcgactgcggccataacatctgttgcgcgtgcctcgcccgctgctggggcacggcagagactaacgtgtcgtgcccgcagtgccgggagaccttcccgcagaggcacatgcggcccaaccggcacctggccaacgtgacccaactggtaaagcagctgcgcaccgagcggccgtcggggcccggcggcgagatgggcgtgtgcgagaagcaccgcgagcccctgaagctgtactgcgaggaggaccagatgcccatctgcgtggtgtgcgaccgctcccgcgagcaccgcggccacagcgtgctgccgctcgaggaggcggtggagggcttcaaggagcaaatccagaaccagctcgaccatttaaaaagagtgaaagatttaaagaagagacgtcgggcccagggggaacaggcacgagctgaactcttgagcctaacccagatggagagggagaagattgtttgggagtttgagcagctgtatcactccttaaaggagcatgagtatcgcctcctggcccgccttgaggagctagacttggccatctacaatagcatcaatggtgccatcacccagttctcttgcaacatctcccacctcagcagcctgatcgctcagctagaagagaagcagcagcagcccaccagggagctcctgcaggacattggggacacattgagcagggctgaaagaatcaggattcctgaaccttggatcacacctccagatttgcaagagaaaatccacatttttgcccaaaaatgtctattcttgacggagagtctaaagcagttcacagaaaaaatgcagtcagatatggagaaaatccaagaattaagagaggctcagttatactcagtggacgtgactctggacccagacacggcctaccccagcctgatcctctctgataatctgcggcaagtgcggtacagttacctccaacaggacctgcctgacaaccccgagaggttcaatctgtttccctgtgtcttgggctctccatgcttcatcgccgggagacattattgggaggtagaggtgggagataaagccaagtggaccataggtgtctgtgaagactcagtgtgcagaaaaggtggagtaacctcagccccccagaatggattctgggcagtgtctttgtggtatgggaaagaatattgggctcttacctccccaatgactgccctacccctgcggaccccgctccagcgggtggggattttcttggactatgatgctggtgaggtctccttctacaacgtgacagagaggtgtcacaccttcactttctctcatgctaccttttgtgggcctgtccggccctacttcagtctgagttactcgggagggaaaagtgcagctcctctgatcatctgccccatgagtgggatagatgggttttctggccatgttgggaatcatggtcattccatggagacctccccttgaggaggtgaattcaggccaaaagggctgttggctgtaatcctacgccaggcacaaggcatcttgttgccttgccacgtcctgtcacagctgggtatccttaccatgttccacgcccttgcagtgggagacaggatgtccatgttctctaccatccttttccttcccatgcagattgtgaaatgtaatgagatgtatcaagatatcctagaaataaaaaccagatgtccacctccagtgtttcatactttctggttttacacatcgctggagggataaagagtatggataatctttggatttggagagccgttcaagatacttccagcttcttggctcagcctggcttcctctggttcagccccacataatgattatggctatttgctgtcatttctgggctagggctcctttctaacaacctagactggaataaggccctgtcagcatggctccctttatcccagttttccgtctgggaacagtacctctgcccctgattcccaatgtgccatagttttattaactccattaaagaagcctgtatgtgttttggttagttacagttattttacaataatggtgggtaatggccccacctctgttatgagataatgttctaatcaatgtctctgcctttgtatcttttctgagggctttgtctgttctcttcattctaatgaaaggtgtattctagtgctgggtgcatatcatccaggataatattctgcccaactccatcctctgttactagatcccttaccagtcacatttgtggactggtggccagtcgtataccatccctggaaggattctgggacaatattccagggattcattgacttcttggctccttttctccatttcctttgggggaagggggaattgaccatgcttaagtgcatcctatcaaggggcagctccgtccccatggccattggatcatgagacactctgaagtcagaaggctggggcagatcacttcaagcaagcccccatgatggttctcagtcctgcttctctgtgggtacgtgcccctctgtttaaaaataaactgaatatggatgttta

SEQ ID NO: 165766 - DNA, 1077 bp, Artificial Sequence
  derived and/or modified sequence
atggccagcggcagcgtggccgagtgcctgcagcaggagaccacctgccccgtgtgcctgcagtacttcgccgagcccatgatgctggactgcggccacaacatctgctgcgcctgcctggccagatgctggggcaccgccgagaccaacgtgagctgcccccagtgcagagagaccttcccccagagacacatgagacccaacagacacctggccaacgtgacccagctggtgaagcagctgagaaccgagagacccagcggccccggcggcgagatgggcgtgtgcgagaagcacagagagcccctgaagctgtactgcgaggaggaccagatgcccatctgcgtggtgtgcgacagaagcagagagcacagaggccacagcgtgctgcccctggaggaggccgtggagggcttcaaggagcagatccagaaccagctggaccacctgaagagagtgaaggacctgaagaagagaagaagagcccagggcgagcaggccagagccgagctgctgagcctgacccagatggagagagagaagatcgtgtgggagttcgagcagctgtaccacagcctgaaggagcacgagtacagactgctggccagactggaggagctggacctggccatctacaacagcatcaacggcgccatcacccagttcagctgcaacatcagccacctgagcagcctgatcgcccagctggaggagaagcagcagcagcccaccagagagctgctgcaggacatcggcgacaccctgagcagagccgagagaatcagaatccccgagccctggatcaccccccccgacctgcaggagaagatccacatcttcgcccagaagtgcctgttcctgaccgagagcctgaagcagttcaccgagaagatgcagagcgacatggagaagatccaggagctgagagaggcccagctgtacagcgtggacgtgaccctggaccccgacaccgcctaccccagcctgatcctgagcgacaacctgagacaggtgagatacagctacctgcagcaggacctgcccgacaaccccgagagaagccccagcaccacctag

SEQ ID NO: 165767 - DNA, 1542 bp, Artificial Sequence
  derived and/or modified sequence
atggccagcggcagcgtggccgagtgcctgcagcaggagaccacctgccccgtgtgcctgcagtacttcgccgagcccatgatgctggactgcggccacaacatctgctgcgcctgcctggccagatgctggggcaccgccgagaccaacgtgagctgcccccagtgcagagagaccttcccccagagacacatgagacccaacagacacctggccaacgtgacccagctggtgaagcagctgagaaccgagagacccagcggccccggcggcgagatgggcgtgtgcgagaagcacagagagcccctgaagctgtactgcgaggaggaccagatgcccatctgcgtggtgtgcgacagaagcagagagcacagaggccacagcgtgctgcccctggaggaggccgtggagggcttcaaggagcagatccagaaccagctggaccacctgaagagagtgaaggacctgaagaagagaagaagagcccagggcgagcaggccagagccgagctgctgagcctgacccagatggagagagagaagatcgtgtgggagttcgagcagctgtaccacagcctgaaggagcacgagtacagactgctggccagactggaggagctggacctggccatctacaacagcatcaacggcgccatcacccagttcagctgcaacatcagccacctgagcagcctgatcgcccagctggaggagaagcagcagcagcccaccagagagctgctgcaggacatcggcgacaccctgagcagagccgagagaatcagaatccccgagccctggatcaccccccccgacctgcaggagaagatccacatcttcgcccagaagtgcctgttcctgaccgagagcctgaagcagttcaccgagaagatgcagagcgacatggagaagatccaggagctgagagaggcccagctgtacagcgtggacgtgaccctggaccccgacaccgcctaccccagcctgatcctgagcgacaacctgagacaggtgagatacagctacctgcagcaggacctgcccgacaaccccgagagattcaacctgttcccctgcgtgctgggcagcccctgcttcatcgccggcagacactactgggaggtggaggtgggcgacaaggccaagtggaccatcggcgtgtgcgaggacagcgtgtgcagaaagggcggcgtgaccagcgccccccagaacggcttctgggccgtgagcctgtggtacggcaaggagtactgggccctgaccagccccatgaccgccctgcccctgagaacccccctgcagagagtgggcatcttcctggactacgacgccggcgaggtgagcttctacaacgtgaccgagagatgccacaccttcaccttcagccacgccaccttctgcggccccgtgagaccctacttcagcctgagctacagcggcggcaagagcgccgcccccctgatcatctgccccatgagcggcatcgacggcttcagcggccacgtgggcaaccacggccacagcatggagaccagcccctag

SEQ ID NO: 165768 - DNA, 747 bp, Artificial Sequence
  derived and/or modified sequence
tgactgaagcagttcaccgagaagatgcagagcgacatggagaagatccaggagagcgccgacagcctggagggcggcatcctggacctgggcagcgtgctgagccacatcctgcccgtgagcgagctgagagaggcccagctgtacagcgtggacgtgaccctggaccccgacaccgcctaccccagcctgatcctgagcgacaacctgagacaggtgagatacagctacctgcagcaggacctgcccgacaaccccgagagattcaacctgttcccctgcgtgctgggcagcccctgcttcatcgccggcagacactactgggaggtggaggtgggcgacaaggccaagtggaccatcggcgtgtgcgaggacagcgtgtgcagaaagggcggcgtgaccagcgccccccagaacggcttctgggccgtgagcctgtggtacggcaaggagtactgggccctgaccagccccatgaccgccctgcccctgagaacccccctgcagagagtgggcatcttcctggactacgacgccggcgaggtgagcttctacaacgtgaccgagagatgccacaccttcaccttcagccacgccaccttctgcggccccgtgagaccctacttcagcctgagctacagcggcggcaagagcgccgcccccctgatcatctgccccatgagcggcatcgacggcttcagcggccacgtgggcaaccacggccacagcatggagaccagcccctag

SEQ ID NO: 165769 - DNA, 750 bp, Artificial Sequence
  derived and/or modified sequence
atggccagcggcagcgtggccgagtgcctgcagcaggagaccacctgccccgtgtgcctgcagtacttcgccgagcccatgatgctggactgcggccacaacatctgctgcgcctgcctggccagatgctggggcaccgccgagaccaacgtgagctgcccccagtgcagagagaccttcccccagagacacatgagacccaacagacacctggccaacgtgacccagctggtgaagcagctgagaaccgagagacccagcggccccggcggcgagatgggcgtgtgcgagaagcacagagagcccctgaagctgtactgcgaggaggaccagatgcccatctgcgtggtgtgcgacagaagcagagagcacagaggccacagcgtgctgcccctggaggaggccgtggagggcttcaaggagcagatccagaaccagctggaccacctgaagagagtgaaggacctgaagaagagaagaagagcccagggcgagcaggccagagccgagctgctgagcctgacccagatggagagagagaagatcgtgtgggagttcgagcagctgtaccacagcctgaaggagcacgagtacagactgctggccagactggaggagctggacctggccatctacaacagcatcaacggcgccatcacccagttcagctgcaacatcagccacctgagcagcctgatcgcccagctggaggagaagcagcagcagcccaccagagagctgctgcagtag

SEQ ID NO: 165770 - DNA, 744 bp, Artificial Sequence
  derived and/or modified sequence
ctgaagcagttcaccgagaagatgcagagcgacatggagaagatccaggagagcgccgacagcctggagggcggcatcctggacctgggcagcgtgctgagccacatcctgcccgtgagcgagctgagagaggcccagctgtacagcgtggacgtgaccctggaccccgacaccgcctaccccagcctgatcctgagcgacaacctgagacaggtgagatacagctacctgcagcaggacctgcccgacaaccccgagagattcaacctgttcccctgcgtgctgggcagcccctgcttcatcgccggcagacactactgggaggtggaggtgggcgacaaggccaagtggaccatcggcgtgtgcgaggacagcgtgtgcagaaagggcggcgtgaccagcgccccccagaacggcttctgggccgtgagcctgtggtacggcaaggagtactgggccctgaccagccccatgaccgccctgcccctgagaacccccctgcagagagtgggcatcttcctggactacgacgccggcgaggtgagcttctacaacgtgaccgagagatgccacaccttcaccttcagccacgccaccttctgcggccccgtgagaccctacttcagcctgagctacagcggcggcaagagcgccgcccccctgatcatctgccccatgagcggcatcgacggcttcagcggccacgtgggcaaccacggccacagcatggagaccagcccctag

SEQ ID NO: 165771 - DNA, 159 bp, Artificial Sequence
  derived and/or modified sequence
tgactgagagaggcccagctgtacagcgtggacgtgaccctggaccccgacaccgcctaccccagcctgatcctgagcgacaacctgagacaggtgagatacagctacctgcagcaggacctgcccgacaaccccgagagaagccccagcaccacctag

SEQ ID NO: 165772 - DNA, 696 bp, Artificial Sequence
  derived and/or modified sequence
tgaagcgccgacagcctggagggcggcatcctggacctgggcagcgtgctgagccacatcctgcccgtgagcgagctgagagaggcccagctgtacagcgtggacgtgaccctggaccccgacaccgcctaccccagcctgatcctgagcgacaacctgagacaggtgagatacagctacctgcagcaggacctgcccgacaaccccgagagattcaacctgttcccctgcgtgctgggcagcccctgcttcatcgccggcagacactactgggaggtggaggtgggcgacaaggccaagtggaccatcggcgtgtgcgaggacagcgtgtgcagaaagggcggcgtgaccagcgccccccagaacggcttctgggccgtgagcctgtggtacggcaaggagtactgggccctgaccagccccatgaccgccctgcccctgagaacccccctgcagagagtgggcatcttcctggactacgacgccggcgaggtgagcttctacaacgtgaccgagagatgccacaccttcaccttcagccacgccaccttctgcggccccgtgagaccctacttcagcctgagctacagcggcggcaagagcgccgcccccctgatcatctgccccatgagcggcatcgacggcttcagcggccacgtgggcaaccacggccacagcatggagaccagcccctag

SEQ ID NO: 165773 - DNA, 624 bp, Artificial Sequence
  derived and/or modified sequence
tgactgagagaggcccagctgtacagcgtggacgtgaccctggaccccgacaccgcctaccccagcctgatcctgagcgacaacctgagacaggtgagatacagctacctgcagcaggacctgcccgacaaccccgagagattcaacctgttcccctgcgtgctgggcagcccctgcttcatcgccggcagacactactgggaggtggaggtgggcgacaaggccaagtggaccatcggcgtgtgcgaggacagcgtgtgcagaaagggcggcgtgaccagcgccccccagaacggcttctgggccgtgagcctgtggtacggcaaggagtactgggccctgaccagccccatgaccgccctgcccctgagaacccccctgcagagagtgggcatcttcctggactacgacgccggcgaggtgagcttctacaacgtgaccgagagatgccacaccttcaccttcagccacgccaccttctgcggccccgtgagaccctacttcagcctgagctacagcggcggcaagagcgccgcccccctgatcatctgccccatgagcggcatcgacggcttcagcggccacgtgggcaaccacggccacagcatggagaccagcccctag

SEQ ID NO: 165774 - DNA, 1077 bp, Artificial Sequence
  derived and/or modified sequence
atggcatcaggcagcgtggccgagtgtctacagcaggaaacgacatgtcctgtgtgcctgcagtacttcgcagagccaatgatgctggactgcggccataatatttgttgtgcatgtctggcccgatgttggggaaccgcagaaaccaatgtctcttgccctcagtgtcgtgagacattcccacaacgacatatgcgacctaaccggcatctggcgaacgtaacccagctggtcaaacagctccgtacagaacgcccatcaggcccaggcggggagatgggagtgtgtgagaaacatcgagagcccttgaaactttattgtgaagaggaccagatgccaatttgcgtcgtctgcgatagaagtcgggagcacagagggcattctgtgctacctctagaagaagccgtcgagggattcaaggagcagatccagaaccaactggaccaccttaagcgggtgaaggaccttaagaaacgccgaagggcgcagggagaacaagcccgggccgagttattgtctctgactcagatggaaagggagaagatcgtatgggagtttgagcagctgtaccacagccttaaagagcatgagtacagactgttggctcggttggaagaactggacttggccatctataacagcatcaacggcgccattacccagtttagctgtaacattagccacctgagcagtctgattgcgcagctggaggagaagcagcagcagccaactcgcgaactgttgcaagacataggagacaccctgtcccgcgctgagagaatccgaattccggagccatggatcactcctcccgatctgcaggagaagattcacatcttcgctcagaaatgtttgttcctgacggaaagcctcaaacaattcaccgaaaagatgcagagcgacatggagaagatacaggaactgcgcgaggcccagctttactctgtcgacgttacactggatccagataccgcatatccctccttgattttgtctgataatctccgccaggtccgatactcctatctccagcaagatcttcctgacaaccctgagaggtcacccagcaccacgtag

SEQ ID NO: 165775 - DNA, 1542 bp, Artificial Sequence
  derived and/or modified sequence
atggctagtggcagcgtcgctgagtgcctgcagcaggagaccacctgtccggtgtgcctccagtatttcgccgagcctatgatgctggattgtggccacaatatctgctgcgcctgtctggccagatgttggggaaccgccgagacgaatgtgtcgtgccctcagtgtcgagagacttttcctcaacgccatatgagaccaaaccggcacctggctaacgtaacccagctggtgaagcagcttcggacagaaaggcctagcgggcccggcggggaaatgggagtgtgtgaaaaacatcgcgaacctcttaaactctattgtgaagaggatcagatgcccatatgcgtcgtgtgcgatcgctcacgggagcaccgcggccattccgtgctgccgctagaggaagccgtcgagggtttcaaagaacaaatacagaatcagttggaccacctgaagcgggtgaaggatctcaagaaacggcggagagcgcagggcgaacaggcccgggcagaattgctgagcctgactcaaatggagcgggaaaaaattgtgtgggagttcgagcagctttatcattctctcaaagagcatgaataccgtttgctggccaggctggaagagttagacctagcaatatataatagtatcaacggagccatcacccagttcagctgcaacataagccacctgtcaagtctgatagcacaactcgaagagaaacaacagcaacccacccgggaattgctgcaagatatcggcgacactttgtccagggccgagcgcatcagaattccagagccctggattacgccacccgatctgcaggaaaagatccatattttcgctcagaagtgcctctttcttacggaatcgttaaaacaattcaccgagaagatgcagtcagatatggagaaaatacaggaactgagggaggcccagctctacagcgtggacgtcacactggacccagacaccgcatacccctccctcatactctctgataatctccgacaagtgcgctacagctatctacaacaggatctgccagacaatcccgaaagattcaacttatttccttgcgtgctgggaagcccctgtttcattgcagggcgccactattgggaggtggaagtgggggacaaggctaaatggaccataggtgtgtgtgaagatagcgtgtgtcgcaaggggggagtgacatctgccccacagaatggattttgggcagtgtcattatggtacggcaaagaatactgggcattgacttccccaatgaccgcgctgcctctgcgcacacccctgcagcgagttggcatcttcctcgattatgatgccggcgaggtgagtttctacaatgtgaccgaaaggtgccatacctttacattttctcatgcgacattctgcggtccagtccgaccatatttttccctttcctattccggtggcaaatccgccgcgccactgattatttgtcctatgtctggcatcgatgggttctctggccacgtggggaaccatgggcattctatggagacctccccctag

SEQ ID NO: 165776 - DNA, 1542 bp, Artificial Sequence
  derived and/or modified sequence
atggcctctggaagtgtggccgagtgccttcagcaggaaaccacctgcccggtgtgtctacagtattttgccgagcctatgatgctggattgtggacacaacatttgctgcgcatgtctcgctcggtgctggggaaccgcggagactaatgtgtcatgcccccagtgtcgcgaaacttttccacagcgccatatgcgccctaataggcatctcgctaatgtgacacagttagtgaaacagctgcggacagaaagacccagcggaccaggtggcgaaatgggggtatgcgagaagcatagggagccactgaaattgtattgcgaggaagatcagatgcctatttgcgtggtctgcgatagaagtagggaacataggggacacagcgttttgccgctggaagaagccgtggagggatttaaagaacagatccaaaaccagctcgaccatctcaaacgggttaaagacctgaaaaaaagaagacgggctcaaggagaacaagctagagccgaactgctgagcctgacacaaatggaaagagagaaaatcgtgtgggagttcgaacaactgtatcacagcctgaaagagcacgagtataggctactcgctcgcctcgaagagctcgatctggcgatttacaatagcataaacggcgctatcactcaattctcgtgtaatatcagtcatctgagttcactcatcgctcagctcgaggagaagcagcagcagcctactcgtgagctgctgcaggacatcggcgacacgctgtctcgagctgaacgaattcgcatccccgaaccctggattacccctcccgacctacaggaaaagatacacattttcgcccagaagtgtttgtttctgaccgaatcgctgaagcagtttacagaaaagatgcagtccgacatggagaagatccaagaattacgcgaggcccagctgtattccgtggatgtgacgttagatcctgatactgcatacccatctctcattctgtccgacaacctgcggcaagtgcggtactcctacttgcaacaggacttgccagacaaccccgaaaggttcaatctgtttccctgcgtgcttggctccccctgttttattgcaggtcgacattactgggaagtagaggtgggagataaagctaaatggactataggcgtgtgtgaggactctgtttgccggaagggcggcgttactagcgcaccacagaacggcttttgggccgttagcctttggtacgggaaggagtactgggcacttacttctcctatgacagcgctacctctgaggacccctctccagagagtgggaatcttcctcgactacgacgccggggaggtgtccttctacaacgtaaccgaaagatgccatacctttacattcagccacgccaccttctgcggaccagtacggccatacttctctttgtcctacagtggcggaaagtctgctgccccattaattatttgtcccatgagcggcatcgacggtttctcaggtcatgtcggtaaccatggtcactctatggaaacaagtccctag

SEQ ID NO: 165777 - DNA, 1077 bp, Artificial Sequence
  derived and/or modified sequence
atggccagtggcagcgtggcagagtgcttgcaacaagaaactacatgtcccgtctgtttgcagtacttcgccgaaccaatgatgctggactgcggccataacatttgctgcgcctgtctggcccggtgttggggaaccgcagagaccaacgtgtcttgtcctcagtgccgcgaaacatttccacagcgccacatgaggcccaacagacacttagcgaacgttactcagctggtgaagcaactgcggaccgagagacccagtgggccgggcggtgaaatgggcgtgtgcgaaaagcaccgggagcctctgaaactttactgcgaagaggatcaaatgccgatctgcgtggtctgtgacaggtcacgcgagcaccgcggccactctgtgctgcccctggaggaggccgtcgaaggctttaaggagcagattcagaatcagcttgaccatctgaagagagtgaaagaccttaagaagcgccggcgggcccagggagaacaagcaagggcagagctactgtcactgactcaaatggaacgggagaaaatcgtctgggagttcgaacaactctaccactcgctcaaggagcacgaatatcgcttgctagcccgcctcgaggagctggatctggcaatctacaactcaattaatggtgctattacgcagttctcctgcaacatctcacatctttcttccttgatagctcagctggaggagaaacagcagcaacctacacgcgaactattacaggacataggagacactttgtcacgggcggagcgcatacgcatccctgagccgtggatcacccccccagacctgcaggagaagattcacatcttcgctcaaaaatgtctgtttctaactgaatcattaaagcagtttacagagaagatgcagagcgatatggaaaaaattcaagaactgcgcgaagcccagctgtattcagtggacgtgacgctcgacccagacaccgcatatccgtctctcattttaagcgacaatctgcgtcaggtgaggtactcatacttacagcaggacctcccagataaccccgagcgaagtccaagtactacatag

SEQ ID NO: 165778 - DNA, 747 bp, Artificial Sequence
  derived and/or modified sequence
tgacttaaacagtttaccgagaaaatgcagtccgacatggaaaagattcaggagagcgcggacagcctggagggggggatcttggatttaggtagcgtgttgtcccacatactgccagtgtccgaactgagagaggcccaattatattccgtggacgtgaccctcgatcccgacaccgcgtatccatccctcattctgagcgacaacctccgccaggttcggtactcctacctgcagcaggacctgcctgacaatcccgagaggtttaatcttttcccttgcgtcctgggtagcccctgtttcattgcaggtcgacactattgggaggttgaagtgggggacaaggccaagtggacaatcggtgtgtgcgaggatagtgtctgcaggaaaggcggcgttacttcggcaccacaaaacggattctgggccgtttccctctggtacggcaaggaatactgggcactaacctctccaatgactgcattgcctttgagaacccctctgcagagggtgggtatttttctggattacgacgccggggaagtgtctttttacaacgtcacggaacgctgccacacttttactttctcccacgcgacattctgcggacctgttaggccctacttctcactgagctacagcgggggaaagtccgctgctcctctcattatttgcccgatgtctggaatcgatgggttttcggggcatgtgggaaatcatgggcactccatggagacttctccctag

SEQ ID NO: 165779 - DNA, 1077 bp, Artificial Sequence
  derived and/or modified sequence
atggcaagcggaagcgtggctgaatgtctccagcaggagacaacctgcccagtctgtctccagtacttcgcagaacccatgatgttggactgtggtcataatatctgctgtgcttgtctagctagatgttggggaacagctgaaacaaatgtctcttgcccccagtgtcgcgaaaccttccctcagagacatatgcggccgaaccgtcacctggctaacgtgacccagctcgttaaacagctccgcactgagaggccctcaggacccggcggagagatgggggtctgcgaaaagcaccgcgaacccctgaagctctattgtgaagaggaccagatgcccatatgcgttgtttgcgacagaagcagagagcatcgaggccactccgtgctccccctggaggaagccgtggagggctttaaggaacagattcagaaccaattagatcatttgaagcgtgtgaaggacctgaagaagcggcgtcgcgctcaaggtgagcaggcaagagcagagttgctgtcattaacccaaatggagagagagaaaatcgtttgggaattcgaacaactgtatcactctcttaaggagcatgagtataggctgttggctcgcctggaagaactagacctggctatttataattccatcaacggagccatcactcagttttcctgtaacatttcgcatctgagcagtctcatcgcgcaactggaagaaaagcagcaacagcccacaagagaacttctccaggacatcggagatacgctgtcccgagccgaacgcatccggatccctgagccttggatcactccccccgacctgcaggaaaaaatccacatcttcgctcaaaaatgccttttcctcactgagagtctaaagcagttcactgagaaaatgcagtctgacatggaaaagatacaggagctccgtgaggcccagctctacagtgttgacgtcaccctggacccagacacagcgtatccatccctgatactcagtgacaatctacggcaggttcgctattcatacttgcaacaggacctgcctgacaatcccgaaagatccccgagcacgacctag

SEQ ID NO: 165780 - DNA, 747 bp, Artificial Sequence
  derived and/or modified sequence
tagctaaagcagttcaccgagaagatgcagtctgacatggaaaagattcaggaaagtgccgactctttggaagggggaatcctggacctaggatccgtgctgtcacatatcttgcccgtcagcgaactgagagaggctcagttgtatagcgtcgacgtcaccctcgatccagatacagcctacccatcactgatccttagtgataatcttcgccaagtacgctattcctatcttcagcaggatctgcccgataacccagagagattcaacctctttccttgtgtgctgggctctccctgcttcatcgccggcagacattactgggaggtagaggtgggggataaggccaaatggaccatcggggtctgcgaggatagcgtgtgccggaaaggtggcgtcactagcgcaccgcagaacgggttctgggccgtaagtctctggtacggcaaagaatactgggccctcacatctcctatgacagcactccccctccgcacccctctgcaaagagtaggaatattcctggattacgatgctggcgaggtgtctttctacaatgttactgagcgctgtcatacatttacattttcgcacgccaccttttgtggccccgtgaggccgtacttctccctgtcctactctgggggaaagtccgcagcccccttaataatctgtccaatgtccggcattgatggattcagtggccacgttggcaaccacggacattccatggaaacatcaccgtag

SEQ ID NO: 165781 - DNA, 1077 bp, Artificial Sequence
  derived and/or modified sequence
atggcttctgggagcgttgcagaatgcctccagcaggagactacctgccctgtgtgtctgcagtattttgctgaacctatgatgctggactgtggccataacatctgctgcgcttgtctggcacggtgctgggggaccgctgaaactaatgtctcctgccctcagtgccgggagactttcccccaacggcacatgagacccaaccgacatttagcaaatgtaacacagctagtcaagcagctgagaaccgagcgcccatcaggacccgggggtgagatgggggtgtgcgaaaaacaccgggagcccttgaaactgtactgcgaagaggatcagatgcctatttgtgtcgtgtgtgaccgctctcgggagcacagggggcatagcgtcttaccactcgaggaggctgtggaaggcttcaaagaacaaattcaaaaccagctggaccacttaaaacgcgtgaaggatctgaaaaaacggcggagggcgcagggggagcaggcaagggcagagctgttgtccctcacacagatggaaagagagaaaatagtctgggaatttgaacaactctaccattctttgaaagagcatgagtatcgtctgctggctagattggaagagctggatcttgccatctacaatagcattaatggggcaatcactcaattcagctgcaatatttcgcacttatctagtcttatcgctcaactggaagaaaagcagcagcagcctactcgggaattactccaggatataggtgatacgctgtccagggccgaacgcatccgcatccccgagccctggatcaccccccccgatctccaagagaagatccacatcttcgcacagaaatgcttgtttctcactgaaagcctgaaacagttcaccgagaagatgcaatcagacatggaaaagattcaggagctgcgagaggcccagctgtattctgttgacgtaaccctagaccccgatactgcttacccttccctgatcttgtcggacaacctcaggcaggtaaggtactcttatttgcagcaggacctgcccgacaaccctgagaggagccccagcacaacatag

SEQ ID NO: 165782 - DNA, 747 bp, Artificial Sequence
  derived and/or modified sequence
taactaaagcaattcaccgagaagatgcagtccgacatggagaaaatccaagagagcgccgattctctggagggcgggatcctggacctagggagcgttctatcacatattctgcctgtcagcgagctgcgcgaggcccagttgtactcagtcgatgtcaccttagatccagacaccgcctatccaagcctgattctttctgacaatctccgacaggttagatattcatacctgcagcaggatctcccagataaccctgagcgctttaatctgttcccatgcgtgcttggaagcccctgcttcattgctggtagacactactgggaggtggaagttggcgacaaggcgaagtggacgatcggtgtctgtgaggacagtgtgtgtaggaagggcggcgtcaccagtgcgccacagaatggcttttgggccgtctccctgtggtacgggaaggagtactgggcattaacatctccaatgactgcactaccacttagaaccccgctgcagagggtgggcatattcttggattatgacgccggtgaggtgtcattttataacgtgactgaacgctgccatactttcaccttctcccatgccactttttgcggacctgtccgaccctattttagccttagttattcaggcggcaagtccgctgcccctctaataatctgcccaatgtccggaatcgacgggttctctggccatgttgggaaccacggtcacagtatggagacttccccttag

SEQ ID NO: 165783 - DNA, 750 bp, Artificial Sequence
  derived and/or modified sequence
atggccagtgggagcgttgccgagtgtctccagcaggaaaccacatgtcccgtttgcctccagtacttcgccgaacccatgatgctcgattgtggccataacatatgctgcgcctgcttagcgcgttgctggggcaccgctgagaccaatgtttcctgcccacagtgccgtgaaaccttccctcaacggcacatgaggcctaacagacacctggcaaatgtgactcagctagtcaaacagctcaggactgaaaggcctagcggccctggtggggagatgggagtttgtgagaagcatagagaaccgcttaagctgtactgtgaagaagaccagatgcctatttgtgtcgtttgtgaccgaagcagagagcatagggggcacagcgtcctacctctcgaggaagccgtggagggatttaaggagcagatccagaatcagctggaccacctgaaaagggtcaaagacctcaagaagcggcgtagggcgcaaggtgagcaggctcgagcggaactcttgtccctaacccagatggaacgcgaaaagatcgtgtgggagttcgaacagctttaccactcacttaaggaacatgagtaccgtctcctcgcaaggttagaggagctggatcttgcaatttacaattctatcaatggggccatcacacagtttagttgcaacatctcccacctctcaagcttaatcgcgcagctggaggaaaaacaacagcaaccgacacgagagctgctccaatag

SEQ ID NO: 165784 - DNA, 1542 bp, Artificial Sequence
  derived and/or modified sequence
atggcatcaggcagcgtcgccgagtgtcttcaacaggagacaacttgtccggtctgtctccagtactttgcggagcctatgatgttagactgcggccataatatctgctgtgcttgcctagccagatgctggggcacggctgagacaaatgtctcatgcccccagtgtcgcgagacgttccctcagcgtcacatgcggcccaatcgacatttggcgaatgtcacacagctcgtgaaacagctgcggacagagcgcccttcagggccagggggggagatgggagtctgcgagaagcatagggaaccgcttaagctgtactgtgaagaagatcaaatgcccatctgtgtagtgtgcgacagatcccgcgaacaccgcggacactctgtcctcccattggaagaggcagtggagggcttcaaggagcagatccagaaccagctcgatcacctcaagagggtcaaggatctaaagaaacgacgaagggctcagggcgagcaggctagggcagaactgttatcattgacccaaatggagcgcgagaaaattgtctgggaatttgagcagctttatcacagccttaaggaacatgagtacaggctgttggcccggttagaggagctggatttagcgatatataattctattaacggggccatcacacagtttagctgcaacatcagtcacctgtcttccctgatcgcacagttggaggaaaagcaacagcagcccacaagggaattgctacaggacataggagacactctctcccgggccgagcgtattagaattcctgagccatggataacacccccggatctgcaggaaaaaatccacatttttgctcagaaatgcctttttctgacagaatccctcaagcagttcacagagaaaatgcaatctgacatggagaaaatccaggagctgcgggaagcccagttgtactccgttgacgtgactttagatcctgacaccgcctatccatctctcatcctgtctgataatcttaggcaagtgaggtacagttatctacagcaggacctgcctgacaatccggaaaggttcaatctatttccgtgcgtgctgggcagcccatgcttcattgccggtagacactactgggaggtggaggtgggggacaaggctaagtggactatcggtgtgtgtgaggacagcgtgtgtcgcaaaggcggggtgacctccgctccacagaacggcttctgggccgtgtcactatggtacgggaaagaatattgggctctgacaagtcccatgactgcacttccccttcgcactccgctccagcgcgtaggtattttccttgattatgacgccggagaagtgtccttttataatgtgactgaacgctgtcacacctttacattttcgcatgcaaccttctgcggccccgtccgtccatatttttctttatcttattccggtggtaagagtgctgctccacttattatctgtccaatgtcaggtattgacgggttctctggacacgtaggcaaccacggccatagcatggaaacatccccctag

SEQ ID NO: 165785 - DNA, 1542 bp, Artificial Sequence
  derived and/or modified sequence
atggcgagcggctcagtcgccgaatgtctgcagcaagagacaacctgccctgtctgcttgcagtacttcgctgaacctatgatgctggattgtggacacaacatttgttgtgcatgcctagcaaggtgttggggtacagcggaaacgaacgttagctgcccccaatgccgcgagactttcccccagcgacatatgaggccgaacagacacctcgctaacgtgacacaactggtgaaacagctgcgcaccgaaagacctagcggcccgggaggagagatgggagtgtgcgagaaacacagggaacccttgaaactgtattgcgaagaggatcaaatgccgatttgtgtagtatgcgacaggagccgcgagcatagagggcactctgtgttacctcttgaagaagcagtggagggctttaaggaacaaatccaaaatcaactggaccatctcaaaagggtcaaggacttaaaaaagcggcggcgcgcccagggcgagcaggcccgtgcagaattgctcagcctcacacagatggagagggagaagatcgtgtgggagtttgagcagctttaccacagtttgaaagaacatgagtatagactgcttgccagactggaggagctggatctggccatatataattcgatcaatggagccatcacccagttttcatgtaatatatcccacctttcatctctgattgcccagctggaagaaaagcaacagcaacccacccgcgagctgctgcaagacatcggggacacgctgagtagggctgaacgcatcagaatccctgagccttggattacccctccggacctacaagagaagatccacatcttcgcacagaagtgtctgttcttaacggaaagcctgaaacagtttacggaaaagatgcaatccgatatggagaaaatccaagagctcagggaggcccagctgtacagcgtggacgtgacactggatccagataccgcctacccctcgctgatcctgagcgataacctgcgccaagtgcgctatagttacttacagcaggacctcccagacaacccagagaggtttaatcttttcccttgtgtgcttgggagcccgtgtttcattgcggggcggcactactgggaggttgaagtaggtgataaagccaaatggaccatcggcgtgtgcgaagacagcgtatgccgtaagggcggcgttacgtctgctccacagaatggattctgggctgtctcattatggtatggaaaagaatactgggctctgacatctcccatgaccgcacttcccctccggactcccctgcagcgggtaggtatttttctggactacgatgctggtgaagtgagtttttataacgttacagagagatgccacaccttcacttttagccatgcaaccttttgcggcccagtcagaccttatttttccctgtcctatagtggtggaaaatcagctgctcctcttataatatgccccatgtccggaatcgacgggttttcaggtcatgtcgggaaccacgggcatagcatggagacctctccatag

SEQ ID NO: 165786 - DNA, 750 bp, Artificial Sequence
  derived and/or modified sequence
atggcaagcgggagtgtggccgagtgtctccaacaagagacaacttgtcccgtgtgcttgcagtattttgcagagccaatgatgctcgactgcggacataacatatgctgcgcttgcctggcaaggtgttggggaactgccgaaacaaacgtatcttgtcctcagtgcagggaaaccttcccacagcggcacatgcgccccaatcggcatctggccaatgtcacccagctggtgaagcagctgcgcactgagcgtccaagcggaccagggggcgaaatgggagtatgtgagaaacaccgggaacccctcaagctttactgtgaggaggatcaaatgccaatatgtgtcgtttgtgatcggagccgggagcaccgggggcactctgtgctccccctggaggaggctgtagaaggatttaaagagcagatccagaatcaattggaccacctaaaaagagttaaagacctcaaaaaacgcagaagagcgcaaggggaacaggcccgcgccgagctgctttcactcacgcagatggagagagagaagattgtttgggagttcgaacagctctatcattccctcaaagagcatgaataccgcctcttggcacgcctagaggagctcgacctcgctatctacaattcgattaacggcgctataacacaattctcatgcaacatctcccacctgagttcactgattgcacaattagaagagaaacaacagcagccaacaagagagctgctgcaatag

SEQ ID NO: 165787 - DNA, 1542 bp, Artificial Sequence
  derived and/or modified sequence
atggcaagcggcagcgtggccgagtgcttgcaacaagagactacatgtccagtctgccttcagtattttgcagagccgatgatgctcgactgtggccacaatatatgctgtgcttgtcttgcaaggtgttggggaacagccgagacaaatgtgtcgtgtccacagtgcagagagacttttccccagagacatatgaggcccaatcgacatctggctaacgtcacccagctcgtgaagcaacttcgaactgaacgcccatctggacctggcggagagatgggcgtgtgcgagaaacaccgcgaaccgctcaagttgtactgcgaggaagatcagatgcccatttgcgttgtgtgtgaccgatctcgggaacaccgcggacacagtgtgctgccccttgaggaggccgtcgaagggttcaaagaacaaattcaaaatcagcttgaccacctcaagagggttaaagacctgaagaaaaggaggcgggcccagggggagcaggcccgcgcagaactgctcagccttacgcagatggagagggagaaaattgtgtgggaattcgaacagctgtaccatagtctcaaagaacatgagtatcgcctattggcacgactcgaggagctcgaccttgccatatacaattctatcaatggtgccatcactcagtttagttgcaacatctcgcatctgtcttccctgattgcccagcttgaggaaaagcagcaacagcccacaagggaacttcttcaggacataggggatacactctcccgcgctgagagaatccggatccctgagccctggatcacgcctccagacctccaggagaaaatccacatctttgctcagaagtgcctgtttctcactgagagcttgaagcaattcactgagaagatgcagagcgacatggaaaaaattcaggagctgcgagaagctcagctctactccgtggatgtgaccctggatcccgatacggcttatcccagcctcattctgtcggataatctgcgacaggttcggtattcatacctccagcaggatctaccggataatcccgaacggttcaatctattcccctgcgtgctgggctcaccttgtttcattgccggacggcactattgggaagtcgaggtgggtgataaagccaagtggactattggcgtctgcgaggacagcgtatgccggaagggaggagtgaccagtgctccgcaaaatgggttctgggctgtttcattgtggtacggcaaagaatattgggcacttacgtcaccaatgacagccctgcccctaagaacacccctacagcgggtgggtatctttctagattacgatgcaggggaagtgtccttctataacgtgaccgaaaggtgtcatacctttactttcagccacgccacattctgtggaccggtgaggccttatttttcattatcatattccggcggtaaaagcgctgcacctctgatcatctgtccaatgtctggcatagacggcttcagcggccatgtcggcaatcacgggcatagtatggaaacctcgccctag

SEQ ID NO: 165788 - DNA, 744 bp, Artificial Sequence
  derived and/or modified sequence
ctcaagcagttcactgaaaaaatgcagtctgatatggaaaaaattcaggaatcagcagacagtttagaggggggtattttagacctgggtagcgtgctatcacatatcctgcccgtaagcgagttgcgggaggctcagctctactccgtggatgtcaccctggaccctgatactgcctatccgagcctgatcctgagcgacaatctgcgccaagtacgctactcttatcttcagcaggacctgcctgataaccctgagagatttaaccttttcccatgcgtgctggggtccccctgctttatcgccggaaggcactattgggaggtggaagtcggcgacaaagccaaatggacaatcggggtgtgtgaagactccgtgtgccggaaggggggagtgacttctgccccccagaatggattttgggccgtaagcctctggtatggcaaggaatattgggccctcacatcccctatgacagctcttccactgcgcacccctcttcagcgcgtggggatcttccttgactatgacgccggtgaggtgagcttttataatgtaactgagcgctgccacactttcactttctcccatgcaacgttttgcggacctgtgaggccatatttttcgctgagttactctggcggtaagtcggcagcacctttgattatctgcccaatgagcgggatcgacggatttagtggtcacgtaggaaaccatggccacagcatggagacctcgccatag

SEQ ID NO: 165789 - DNA, 750 bp, Artificial Sequence
  derived and/or modified sequence
atggcatcaggatctgtcgcagaatgcttgcagcaggagacaacatgtcctgtctgcctgcaatatttcgccgagcctatgatgctcgattgcggacataacatatgctgtgcttgtctagcaaggtgctggggcacggccgagacgaacgtgagctgtccacagtgccgcgaaactttccctcagaggcacatgagacccaacagacatctcgccaatgtcactcagctagtgaagcagcttcgaactgagcggccatcaggcccaggaggcgagatgggagtctgtgaaaaacaccgcgagccattaaagctctactgcgaggaagaccagatgcccatttgtgtggtgtgcgaccgcagtagagagcatagggggcacagcgtcctaccactcgaagaggctgtggagggattcaaggaacagatccaaaaccagctggatcacctgaaacgggtcaaggacctaaagaagagaaggcgtgcacagggggaacaagcgagagcagagttactgtccctcactcagatggagagggagaaaatagtatgggagtttgagcagctttatcactcacttaaggagcatgaataccgcctgttagcgaggcttgaggagctcgatctggcaatctataactctataaatggtgccattacccagttttcatgtaacatcagtcacctgagctccctgatcgcacaactggaggaaaaacagcaacagccaacccgcgagctgctacagtag

SEQ ID NO: 165790 - DNA, 159 bp, Artificial Sequence
  derived and/or modified sequence
tgactgagggaggcccagctgtactccgttgacgttaccttggatccggacactgcctacccctcacttatcctgtctgataacctgaggcaggttagatacagctaccttcaacaggatctgccggataaccccgagcggtccccctccacaacctag

SEQ ID NO: 165791 - DNA, 696 bp, Artificial Sequence
  derived and/or modified sequence
taaagtgcggactcgctcgagggaggcatcctggacctggggtccgtgcttagtcacatcctgcctgtctctgagctcagagaggcccagctctatagcgtggacgtcacgctggatccggatacagcatatccctctctgattctgtccgataatttacgccaggttcgctacagctatctgcagcaggacctgcctgataacccggagaggttcaatttgtttccttgtgtgcttggctccccttgttttattgctggcagacactactgggaagtggaggtgggggataaggcaaagtggaccattggggtgtgtgaggactccgtatgtaggaagggcggggttactagcgctccacagaatgggttctgggccgtgagcctctggtatggcaaggaatattgggcgctaaccagcccaatgacagctctgccactgcggactccgttacagcgcgtgggaatcttcttagactatgacgccggcgaggtcagcttttacaacgtgaccgaacgatgtcacacttttaccttcagtcacgccacattctgcggcccagttcgaccctactttagcctgtcgtacagcggagggaaatcggcggctccgctgataatctgtcccatgtccgggattgacggcttctctggccacgttggcaaccatggacacagcatggagacctccccgtag

SEQ ID NO: 165792 - DNA, 624 bp, Artificial Sequence
  derived and/or modified sequence
tgattgcgtgaggctcagctgtattctgtggacgtgaccctagacccggatacagcttatcctagtcttattctgtcggataatttgcggcaggttcgatattcttacctccaacaagatttacctgacaacccagagagattcaatctattcccatgtgtactggggtcaccttgcttcatcgccgggaggcattattgggaggtcgaagtgggggacaaagcgaaatggacgatcggggtctgtgaagactcagtgtgcaggaaaggcggagtgacctctgctccccagaatgggttttgggctgttagtctgtggtacggcaaggaatactgggcccttactagcccaatgactgctttgcctctacgtacccccctacaacgtgtgggcatcttcctagactacgacgccggggaagtgtccttttacaacgtaactgaacggtgtcacaccttcacctttagccatgcgactttctgcggccctgtgcgaccctatttcagcctgtcttattccggtggaaagagcgccgctcccctcatcatctgtcccatgagtggcattgacgggttctctggacacgttgggaatcacggccatagcatggaaacttcgccttag

SEQ ID NO: 165793 - DNA, 1077 bp, Artificial Sequence
  derived and/or modified sequence
atggccagcgggagtgtagctgaatgcctgcagcaggagaccacatgcccagtgtgcttacagtacttcgccgagccaatgatgttggactgcgggcacaacatatgctgcgcgtgtctggcccgttgctgggggacagcagagactaacgtttcttgccctcaatgtcgcgagactttccctcagaggcacatgcggccaaatcgtcatttggccaacgtgactcagctagtcaagcagttgagaacagagaggcccagcgggccagggggcgagatgggcgtctgtgaaaagcaccgggagccactgaaattatactgtgaagaagatcaaatgcccatatgcgttgtgtgcgacaggtccagggaacatagaggtcacagcgtgctcccactcgaagaggccgtcgagggctttaaagagcaaatccaaaatcagttggaccatctgaagagagttaaagatctcaaaaaacgtcgccgagcccagggcgagcaggcccgggccgaactgctctccctgacccagatggagcgagaaaaaattgtctgggaatttgagcagctgtaccactcactgaaggagcacgagtatagactgttagctagactcgaggagttggatttggccatttacaactcaatcaatggcgccattacacagttctcttgtaacatctcacatttgtcatccctgatagcacagctggaagagaaacaacagcagccaactagagaactcttacaggacatcggtgacacactgtctagggctgagagaattaggatcccagaaccatggattacacccccggacctacaggaaaagatacacatctttgcacagaagtgcctgtttctgacagagtccctaaaacagttcaccgagaaaatgcagtcagacatggaaaaaattcaagagctccgggaggcccagctctacagcgttgacgtcaccctggatcctgacacagcctaccctagcttgattctgtctgataacctgcggcaagtgcgctacagctaccttcagcaggatctcccagacaacccagaacgtagtcctagcacgacgtag

SEQ ID NO: 165794 - DNA, 747 bp, Artificial Sequence
  derived and/or modified sequence
tgactcaaacagtttactgagaagatgcagtctgatatggagaagatccaggaaagtgcagatagcctggagggcggtatccttgacctcggttcagtactgtctcatatccttccggtgtcagaattgcgagaggcgcagctctattccgtggatgtcacgctggaccccgatactgcctatccttccctcatcttgagcgataatcttaggcaggttcgctactcttacctacagcaggatctgcccgacaatccagagcgattcaacttgtttccttgtgttctgggttccccctgttttatcgctgggaggcactattgggaggtggaggtgggcgataaagctaaatggacgatcggagtgtgtgaggactccgtatgccggaaaggtggcgtcacctcagctcctcagaatggattctgggctgtgtcactgtggtacgggaaggagtactgggcgctaactagccccatgactgccttgccattacggaccccactgcagcgggttgggatcttcctcgattacgacgcaggggaagtgagcttttacaacgtgaccgagcgatgccacactttcactttctctcacgctactttttgtggccctgttcgtccctacttcagcctttcctattccggcggaaagagcgcggctcccttgatcatctgtccaatgtctggcattgacggatttagcgggcacgtaggcaaccacggacattccatggagacatccccctag

SEQ ID NO: 165795 - DNA, 750 bp, Artificial Sequence
  derived and/or modified sequence
atggcgtctggctctgtcgctgagtgcttacagcaagagacaacctgccctgtgtgccttcagtacttcgctgaaccaatgatgctggattgtggacacaatatttgctgcgcctgtctggccagatgttggggaactgctgaaactaatgtcagctgccctcagtgtcgcgaaactttccctcagcggcacatgcgaccaaaccgacatctcgctaacgtgacacagctggtgaaacagttaagaactgagcgcccctcaggccccgggggcgagatgggcgtgtgcgagaagcaccgggagcctctcaaactctactgcgaagaggaccaaatgcccatctgtgtggtttgtgatcggtcaagagaacacagagggcatagcgtgctgcccctggaagaggctgtggaggggttcaaagaacagatccagaaccagttggatcatctaaaacgtgttaaggatctcaaaaaaaggaggcgagcacagggcgagcaggccagggcagaactgttatctctcacccagatggagagagaaaaaatagtgtgggaatttgagcagctgtaccacagcctgaaggagcacgaataccgcctgctcgcccgtctggaggaacttgacttggctatctacaactccataaacggcgctattacacagttttcctgcaatatcagtcacttatcgagtcttattgctcagctggaagagaagcagcagcagcccacccgggagctgctgcagtag

SEQ ID NO: 165796 - DNA, 1077 bp, Artificial Sequence
  derived and/or modified sequence
atggccagcggctctgtggccgagtgcctgcagcaggagaccacctgccctgtgtgcctgcagtactttgctgagcccatgatgctggactgtggccacaacatctgctgtgcctgcctggcccgctgctggggcacagctgagaccaacgtgtcctgcccccagtgccgggagaccttcccccagaggcacatgaggcccaacagacacctggccaacgtgacccagctggtgaagcagctgaggacagagcggcccagcggccctggaggagagatgggcgtgtgtgagaagcaccgggagcccctgaagctgtactgtgaggaggaccagatgcccatctgtgtggtgtgtgacaggagccgggagcaccggggccacagcgtgctgcccctggaggaggccgtggagggcttcaaggagcagatccagaaccagctggaccacctgaagagggtgaaggacctgaagaagagaagaagagcccagggcgagcaggcccgggcagagctgctgagcctgacccagatggagcgggagaagatcgtgtgggagtttgagcagctgtaccacagcctgaaggagcacgagtaccgcctgctggcccggctggaggagctggacctggccatctacaacagcatcaacggggccatcacccagttcagctgcaacatcagccacctgagcagcctgattgcccagctggaggagaagcagcagcagcccacccgggagctgctgcaggacattggagacaccctgagcagagctgagcgcatccgcatccctgagccctggatcaccccaccagacctgcaggagaagatccacatctttgcccagaagtgcctcttcctgacagagagcctgaagcagttcacagagaagatgcagagcgacatggagaagatccaggagctgcgggaggcccagctgtacagcgtggatgtgaccctggaccctgacacagcctaccccagcctcatcctgagtgacaacctgcggcaggtgcgctacagctacctgcagcaggacctgcctgacaaccctgagaggagccccagcaccacctag

SEQ ID NO: 165797 - DNA, 1542 bp, Artificial Sequence
  derived and/or modified sequence
atggccagcggctctgtggccgagtgcctgcagcaggagaccacctgccctgtgtgcctgcagtactttgctgagcccatgatgctggactgtggccacaacatctgctgtgcctgcctggcccgctgctggggcacagctgagaccaacgtgtcctgcccccagtgccgggagaccttcccccagaggcacatgaggcccaacagacacctggccaacgtgacccagctggtgaagcagctgaggacagagcggcccagcggccctggaggagagatgggcgtgtgtgagaagcaccgggagcccctgaagctgtactgtgaggaggaccagatgcccatctgtgtggtgtgtgacaggagccgggagcaccggggccacagcgtgctgcccctggaggaggccgtggagggcttcaaggagcagatccagaaccagctggaccacctgaagagggtgaaggacctgaagaagagaagaagagcccagggcgagcaggcccgggcagagctgctgagcctgacccagatggagcgggagaagatcgtgtgggagtttgagcagctgtaccacagcctgaaggagcacgagtaccgcctgctggcccggctggaggagctggacctggccatctacaacagcatcaacggggccatcacccagttcagctgcaacatcagccacctgagcagcctgattgcccagctggaggagaagcagcagcagcccacccgggagctgctgcaggacattggagacaccctgagcagagctgagcgcatccgcatccctgagccctggatcaccccaccagacctgcaggagaagatccacatctttgcccagaagtgcctcttcctgacagagagcctgaagcagttcacagagaagatgcagagcgacatggagaagatccaggagctgcgggaggcccagctgtacagcgtggatgtgaccctggaccctgacacagcctaccccagcctcatcctgagtgacaacctgcggcaggtgcgctacagctacctgcagcaggacctgcctgacaaccctgagcgcttcaacctcttcccctgtgtgctgggcagcccctgcttcatcgccggccgccactactgggaggtggaggtgggggacaaggccaagtggaccatcggcgtgtgtgaagattctgtgtgcaggaaaggaggagtgaccagcgccccccagaatggcttctgggccgtgtccctgtggtacggcaaggagtactgggccctgaccagccccatgacagccctgcccctgcggacccccctgcagagggtgggcatcttcctggactatgatgctggggaggtgtccttctacaacgtgacagagcgctgccacaccttcaccttcagccacgccaccttctgtggccctgtgcggccctacttcagcctgagctacagcggcggcaagtctgctgcccccctcatcatctgccccatgtctggaattgatggcttcagcggccacgtgggcaaccacggccacagcatggagaccagcccctag

SEQ ID NO: 165798 - DNA, 747 bp, Artificial Sequence
  derived and/or modified sequence
tgactgaagcagttcacagagaagatgcagagcgacatggagaagatccaggagagcgctgacagcctggagggcggcatcctggacctgggctctgtgctgagccacatcctgcctgtgtctgagctgcgggaggcccagctgtacagcgtggatgtgaccctggaccctgacacagcctaccccagcctcatcctgagtgacaacctgcggcaggtgcgctacagctacctgcagcaggacctgcctgacaaccctgagcgcttcaacctcttcccctgtgtgctgggcagcccctgcttcatcgccggccgccactactgggaggtggaggtgggggacaaggccaagtggaccatcggcgtgtgtgaggacagcgtgtgcaggaagggcggcgtgaccagcgccccccagaatggcttctgggccgtgtccctgtggtacggcaaggagtactgggccctgaccagccccatgacagccctgcccctgcggacccccctgcagagggtgggcatcttcctggactatgatgctggggaggtgtccttctacaacgtgacagagcgctgccacaccttcaccttcagccacgccaccttctgtggccctgtgcggccctacttcagcctgagctacagcggcggcaagtctgctgcccccctcatcatctgccccatgagcggcattgatggcttcagcggccacgtgggcaaccacggccacagcatggagaccagcccctag

SEQ ID NO: 165799 - DNA, 750 bp, Artificial Sequence
  derived and/or modified sequence
atggccagcggctctgtggccgagtgcctgcagcaggagaccacctgccctgtgtgcctgcagtactttgctgagcccatgatgctggactgtggccacaacatctgctgtgcctgcctggcccgctgctggggcacagctgagaccaacgtgtcctgcccccagtgccgggagaccttcccccagaggcacatgaggcccaacagacacctggccaacgtgacccagctggtgaagcagctgaggacagagcggcccagcggccctggaggagagatgggcgtgtgtgagaagcaccgggagcccctgaagctgtactgtgaggaggaccagatgcccatctgtgtggtgtgtgacaggagccgggagcaccggggccacagcgtgctgcccctggaggaggccgtggagggcttcaaggagcagatccagaaccagctggaccacctgaagagggtgaaggacctgaagaagagaagaagagcccagggcgagcaggcccgggcagagctgctgagcctgacccagatggagcgggagaagatcgtgtgggagtttgagcagctgtaccacagcctgaaggagcacgagtaccgcctgctggcccggctggaggagctggacctggccatctacaacagcatcaacggggccatcacccagttcagctgcaacatcagccacctgagcagcctgattgcccagctggaggagaagcagcagcagcccacccgggagctgctgcagtag

SEQ ID NO: 165800 - DNA, 744 bp, Artificial Sequence
  derived and/or modified sequence
ctgaagcagttcacagagaagatgcagagcgacatggagaagatccaggagagcgctgacagcctggagggcggcatcctggacctgggctctgtgctgagccacatcctgcctgtgtctgagctgcgggaggcccagctgtacagcgtggatgtgaccctggaccctgacacagcctaccccagcctcatcctgagtgacaacctgcggcaggtgcgctacagctacctgcagcaggacctgcctgacaaccctgagcgcttcaacctcttcccctgtgtgctgggcagcccctgcttcatcgccggccgccactactgggaggtggaggtgggggacaaggccaagtggaccatcggcgtgtgtgaagattctgtgtgcaggaaaggaggagtgaccagcgccccccagaatggcttctgggccgtgtccctgtggtacggcaaggagtactgggccctgaccagccccatgacagccctgcccctgcggacccccctgcagagggtgggcatcttcctggactatgatgctggggaggtgtccttctacaacgtgacagagcgctgccacaccttcaccttcagccacgccaccttctgtggccctgtgcggccctacttcagcctgagctacagcggcggcaagtctgctgcccccctcatcatctgccccatgtctggaattgatggcttcagcggccacgtgggcaaccacggccacagcatggagaccagcccctag

SEQ ID NO: 165801 - DNA, 159 bp, Artificial Sequence
  derived and/or modified sequence
tgactgcgggaggcccagctgtacagcgtggatgtgaccctggaccctgacacagcctaccccagcctcatcctgagtgacaacctgcggcaggtgcgctacagctacctgcagcaggacctgcctgacaaccctgagaggagccccagcaccacctag

SEQ ID NO: 165802 - DNA, 696 bp, Artificial Sequence
  derived and/or modified sequence
tgaagtgctgacagcctggagggcggcatcctggacctgggctctgtgctgagccacatcctgcctgtgtctgagctgcgggaggcccagctgtacagcgtggatgtgaccctggaccctgacacagcctaccccagcctcatcctgagtgacaacctgcggcaggtgcgctacagctacctgcagcaggacctgcctgacaaccctgagcgcttcaacctcttcccctgtgtgctgggcagcccctgcttcatcgccggccgccactactgggaggtggaggtgggggacaaggccaagtggaccatcggcgtgtgtgaagattctgtgtgcaggaaaggaggagtgaccagcgccccccagaatggcttctgggccgtgtccctgtggtacggcaaggagtactgggccctgaccagccccatgacagccctgcccctgcggacccccctgcagagggtgggcatcttcctggactatgatgctggggaggtgtccttctacaacgtgacagagcgctgccacaccttcaccttcagccacgccaccttctgtggccctgtgcggccctacttcagcctgagctacagcggcggcaagtctgctgcccccctcatcatctgccccatgtctggaattgatggcttcagcggccacgtgggcaaccacggccacagcatggagaccagcccctag

SEQ ID NO: 165803 - DNA, 624 bp, Artificial Sequence
  derived and/or modified sequence
tgactgcgggaggcccagctgtacagcgtggatgtgaccctggaccctgacacagcctaccccagcctcatcctgagtgacaacctgcggcaggtgcgctacagctacctgcagcaggacctgcctgacaaccctgagcgcttcaacctcttcccctgtgtgctgggcagcccctgcttcatcgccggccgccactactgggaggtggaggtgggggacaaggccaagtggaccatcggcgtgtgtgaagattctgtgtgcaggaaaggaggagtgaccagcgccccccagaatggcttctgggccgtgtccctgtggtacggcaaggagtactgggccctgaccagccccatgacagccctgcccctgcggacccccctgcagagggtgggcatcttcctggactatgatgctggggaggtgtccttctacaacgtgacagagcgctgccacaccttcaccttcagccacgccaccttctgtggccctgtgcggccctacttcagcctgagctacagcggcggcaagtctgctgcccccctcatcatctgccccatgtctggaattgatggcttcagcggccacgtgggcaaccacggccacagcatggagaccagcccctag

SEQ ID NO: 165804 - DNA, 1077 bp, Artificial Sequence
  derived and/or modified sequence
atggccagcggcagcgtggccgagtgcctgcagcaggagaccacctgccctgtatgtttacaatattttgcagagccaatgatgctggactgtgggcacaatatttgttgcgcctgtctggctcgttgttggggcacagccgagacaaatgttagttgcccacaatgccgtgagacctttccacagcggcacatgagacccaataggcacctcgctaacgtgacccaactggtcaagcaactccgcactgaacgcccatccggcccagggggcgagatgggcgtgtgcgaaaaacatagagagccactgaagctttactgtgaagaggatcagatgcccatttgcgtggtatgtgaccggagtagggagcatcgcggacactccgtgttgcctttggaggaggccgtggaggggtttaaagaacagatccagaaccaactagatcacttaaaaagggtcaaagatcttaaaaagagaagacgggctcaaggggagcaggccagagctgagctgttgtccctgacacagatggaacgcgaaaaaatcgtttgggagttcgagcaactttaccactccctgaaagaacacgagtatcggcttctcgcaagactagaggaactggacctggccatttataattccattaatggtgccattacccaattttcgtgtaacatatcacacctgagtagccttatagcacagctcgaagaaaaacagcagcagccaacacgcgagctactgcaagacatcggcgacacactcagccgggccgaacggatcagaatacccgaaccttggatcacgccgcccgacctgcaggaaaaaatacatatattcgcccagaagtgcctgttcctcaccgagtccttgaaacagttcaccgagaaaatgcagagcgatatggaaaagatccaggagctgcgcgaagcccagctgtacagcgttgatgttactcttgaccctgataccgcatatccgtctttgattctgtctgacaacctgcgacaagtacgctactcctacctacaacaagacttgcctgacaacccggagcgaagcccctcaacaacttag

SEQ ID NO: 165805 - DNA, 1542 bp, Artificial Sequence
  derived and/or modified sequence
atggccagcggcagcgtggccgagtgcctgcagcaggagaccacctgccccgtgtgcttacaatatttcgctgaaccgatgatgctggactgcggacataatatatgctgcgcatgcttagcacgatgctgggggactgccgagaccaatgtttcctgccctcaatgtcgcgagacattcccgcaaaggcatatgagacctaaccgccatctggccaatgtcacccaactggtaaagcaactgcgcaccgagaggccgtcgggacctggcggcgaaatgggagtgtgtgaaaagcatcgggagcccctcaagctgtactgtgaggaagaccagatgccgatctgcgttgtgtgtgaccggagcagagaacaccgaggacatagcgtgctgcccctggaggaagccgttgagggctttaaggagcaaattcagaatcagctcgaccatttaaaacgtgttaaggacctgaagaagcgtagaagagcccagggggagcaggcacgtgccgagttactctccctcactcaaatggagagggagaaaatcgtgtgggagttcgagcagttgtaccattccctgaaagaacatgaatacagactgctggctagacttgaggaactagacttagcaatctataatagtatcaatggcgcaattactcagtttagctgtaacatcagtcatctgtcttctcttatcgcacagttggaagaaaagcagcagcaacccactagggaactcttgcaggatattggtgataccttgagtcgagccgagcgtatcagaatccctgaaccatggataactcctcccgatttgcaggagaagattcacattttcgcccaaaaatgcctgtttttgactgagtctttgaaacagttcacagaaaagatgcagtccgatatggagaagatccaggaactacgggaagcacagttatactcagttgacgtaaccctcgaccccgataccgcctacccatccctgattctgtctgataacttacgtcaggtaagatacagttatttgcaacaggaccttccagataatcctgagaggtttaacctgttcccttgtgtgcttggaagcccttgcttcattgccggacgacattactgggaggtcgaggttggagataaagcaaagtggactatcggagtttgtgaggatagcgtctgtaggaaggggggcgttaccagcgcacctcagaatggcttctgggcagtttctctctggtacggcaaagaatattgggcattaaccagccccatgaccgcgctgccattgaggacgccactccaacgcgtagggatttttcttgattatgacgctggcgaagttagcttttataacgtgactgagaggtgtcatactttcactttctcacacgccacattctgcggacccgtaagaccatatttcagcctttcgtactctggtggcaagtccgcagctccccttatcatttgcccaatgtctggcatcgacggtttcagcggccatgttgggaatcatggccactctatggagacatctccctag

SEQ ID NO: 165806 - DNA, 1542 bp, Artificial Sequence
  derived and/or modified sequence
atggccagcggcagcgtggccgagtgcctgcagcaggagaccacctgccctgtctgccttcagtacttcgctgagccaatgatgctggattgcggtcataacatttgctgtgcctgtctggcccgctgctggggaaccgcagaaacaaacgtgtcttgcccgcaatgcagggagacgttcccgcagagacatatgaggcccaataggcacttggccaacgtgacccaactggtcaaacagctacggacggaacgaccctcaggtcctgggggcgaaatgggagtgtgcgaaaagcatcgtgagcccttaaagctgtactgcgaggaggatcaaatgccgatttgcgtggtttgtgaccgctcaagagagcatagaggacactccgtgctgcccctcgaggaggcggtggaggggtttaaggaacaaattcagaaccaactggaccacctgaagcgagtgaaagatttgaaaaaaagacggagagcccaaggagagcaagcgcgtgctgaactgttgtccctgacacagatggagcgagaaaaaattgtgtgggagtttgagcagctgtatcactcccttaaggagcacgagtacaggctgttagctaggctggaagagctggaccttgcgatctacaacagtatcaacggcgccatcacccagttttcctgcaacatctcacacctgtccagccttatcgcccaactggaggagaaacagcagcagccgactagggagctgctccaggacatcggtgatactctgtcaagagccgaaaggatcagaattcccgaaccatggattacccctcccgacctgcaagaaaagatccacatctttgcacagaaatgtctcttcctgacggaatccctgaaacaattcaccgaaaagatgcagagcgacatggagaagatacaagagctgcgcgaggctcagctgtactctgtcgatgtgacactggaccctgataccgcatatccatctttgattttgagcgacaacctgcgccaagttagatactcatatctgcagcaggatctgccagacaatccggaaagatttaacctcttcccatgcgtactgggctccccttgtttcattgctgggcgccattattgggaggtggaggtcggggacaaggcgaaatggactattggggtgtgtgaggacagcgtgtgtcgaaaagggggagtgacgtctgcaccacagaacggcttttgggctgtttctctgtggtatgggaaagaatactgggccttgacatccccgatgacagcccttccattacgcaccccgctgcagcgcgtgggaatcttcttagattacgacgcaggtgaggtctccttctacaacgtgacagagaggtgtcatacatttaccttttcccacgcgaccttttgcgggccggtgagaccctatttcagcctttcctattctgggggaaagagtgccgccccacttatcatttgccctatgagtggtattgatggtttctcaggacacgtgggtaatcatggccacagtatggagacgtctccttag

SEQ ID NO: 165807 - DNA, 1077 bp, Artificial Sequence
  derived and/or modified sequence
atggccagcggcagcgtggccgagtgcctgcagcaggagaccacctgccccgtctgtctccaatactttgctgaacccatgatgctcgactgcggacataacatctgttgcgcatgtttggccaggtgttgggggacagcggaaaccaacgtgagctgccctcagtgccgggaaacgttcccccagaggcacatgcggccaaaccggcacctggccaatgtcacacagcttgtcaaacaactgaggactgagcgaccatctggacccggcggcgaaatgggcgtgtgcgagaaacatagggagcctctcaaactgtattgcgaggaggatcagatgcctatttgcgttgtttgtgataggagccgcgaacatcgcggccactccgtgttacctctggaggaagcagtcgaaggattcaaggagcagatccagaaccagttggatcacctgaaacgggtgaaggacctgaagaagcgaagaagggcccagggcgagcaggccagggcagagctgctctccttgacccagatggaacgcgaaaaaatagtttgggagttcgagcagttataccactcgctgaaggagcacgagtatcgtttgctggcccgcctcgaggagctcgatcttgccatttacaattctattaatggcgccattacccagttctcgtgcaacatcagccacctttccagtctgatcgcacagttggaagagaaacagcagcagccaacccgggagcttcttcaggatatcggcgatactctgagtagggccgagcgtatccgaattcctgagccatggattacacccccagatctccaagagaagatacacatattcgctcagaaatgcctcttcctgacagagagtctcaagcagtttaccgagaagatgcagagcgacatggaaaagattcaggaactgagagaagcgcagctttactccgttgatgtaacactggaccccgataccgcgtacccttcactaatcttgtctgacaatctgcgccaggtcaggtatagttacttgcaacaggacctgcccgacaacccagagagaagcccgagcactacctag

SEQ ID NO: 165808 - DNA, 747 bp, Artificial Sequence
  derived and/or modified sequence
tgactgaagcagttcaccgagaagatgcagagcgacatggagaagatccaagagagcgctgactccttagagggagggatcttagacctgggaagcgtgctgtcacacatcctccccgtctccgaactgcgcgaggcacaattgtactcagttgatgtgactctagaccctgacaccgcctacccatcccttatcctgagtgacaatttacggcaggtgagatatagctatctgcaacaggatttacccgataatccggagaggtttaacctcttcccgtgtgtcctcggaagtccttgttttattgccgggaggcattactgggaagttgaggtgggagacaaagccaagtggacgattggtgtttgtgaggactccgtatgtcggaaggggggcgtgacgtccgctccacaaaacggtttttgggccgtctccctttggtatgggaaagaatactgggcactgacctctcctatgaccgccctgccactgcgaaccccactgcagcgcgtgggcattttcctcgactatgacgctggagaggtgtcattttacaatgtgacagagcggtgtcacaccttcacattttctcatgccactttctgtggaccagtgaggccttacttttccctctcatatagtgggggaaaatccgccgcacccctaattatttgtcctatgtcgggcatcgacggattttctggccatgtcggcaaccacggccattccatggagacttcaccctag

SEQ ID NO: 165809 - DNA, 1077 bp, Artificial Sequence
  derived and/or modified sequence
atggccagcggcagcgtggccgagtgcctgcagcaggagaccacctgccccgtatgcctccagtacttcgctgagccaatgatgctggattgcgggcacaacatctgctgtgcctgcctcgctcgctgttggggcacggccgagacaaatgtgtcttgcccgcagtgcagagaaacctttccacagagacacatgcgcccaaatcggcacctggccaatgtaactcaactggtcaagcagttacggacagagcgtcccagtggacccggcggcgagatgggagtgtgcgagaagcatagggaacctttaaaattgtattgtgaagaggaccagatgccaatctgcgttgtgtgcgatcggagccgcgagcaccggggacattccgtgttgccgttggaagaggctgtcgagggtttcaaagagcagatccagaaccagttagatcacctgaagcgagtcaaagatctgaaaaaaagacggcgcgcgcagggcgagcaagcgagggctgagctgctgagcctgacccaaatggagagggagaaaattgtctgggaattcgagcagctgtaccatagcctcaaggagcacgaatataggctccttgctaggctcgaggagctggacttagcgatctataattctatcaacggtgccataacacagttctcctgtaacatatctcacttgtcctccctgattgcacagctggaagagaagcagcagcagccaacccgcgaacttctgcaggacatcggcgacacactcagccgcgcagagaggatccgcatcccagagccatggatcacgccacctgacttgcaagagaagatccatatttttgctcagaagtgtctcttcctcactgaaagcttgaaacaatttacagagaagatgcagagtgacatggaaaagattcaggagctgagagaagcccagctctactcagttgatgtgacacttgatcccgacacagcctatccatctctcatcttgagcgacaacttgcggcaggtacggtattcctacctgcagcaggatcttcccgacaatccggaacggtctcccagcactacctag

SEQ ID NO: 165810 - DNA, 747 bp, Artificial Sequence
  derived and/or modified sequence
tgactgaagcagttcaccgagaagatgcagagcgacatggagaagattcaagagagcgccgactctttggaagggggcatattggatttggggagcgtgcttagccatattttacccgtatctgagttacgggaggcccagctgtattctgtagatgtcaccctggatcctgacacggcgtaccctagcctgatcttgagcgataacctgcgacaggtcaggtattcttacctccagcaggatctgccagacaaccccgagcggttcaacctctttccctgtgttctggggtccccctgcttcattgcaggtaggcactactgggaagttgaagtgggtgataaagcaaagtggaccattggagtgtgcgaagattccgtgtgtagaaaaggtggcgtgacttctgccccacaaaatggcttctgggctgttagcctctggtacgggaaggaatactgggccctcaccagcccaatgactgctttgccactcagaacccccctgcagagagttggaatctttctggactacgatgctggagaagtgagtttctataacgtgactgagaggtgccacacttttacctttagtcatgccaccttctgtgggcctgtccggccatattttagcctgtcttactccgggggaaagtctgcagccccactgattatttgcccgatgtctggaatcgatggttttagtggccacgtcggcaatcacgggcactctatggaaacttctccgtag

SEQ ID NO: 165811 - DNA, 1077 bp, Artificial Sequence
  derived and/or modified sequence
atggccagcggcagcgtggccgagtgcctgcagcaggagaccacctgtcctgtttgtctgcagtactttgccgaacccatgatgctcgattgtggccataatatatgctgtgcatgtcttgcccgatgctggggcacagccgaaaccaacgtaagctgccctcagtgtagggagacgttcccccagcgccatatgaggcccaacagacacttagccaatgtcacacagttagtgaagcaactcagaaccgaacgaccatccggccccggcggggagatgggggtttgtgaaaagcaccgagagcccttgaagctctactgcgaggaagatcagatgccaatttgtgtggtttgtgaccggagccgcgaacaccgtggacacagtgtgttgcctctcgaagaggcagtagaggggttcaaagagcaaatccagaaccagctagaccatcttaagcgagtcaaggacctcaagaaaaggaggagggctcagggggagcaggcccgggccgaattgcttagccttactcaaatggagcgcgaaaaaattgtgtgggaattcgaacaactgtaccactctttaaaggagcacgagtacaggctcttggcaagactcgaagaacttgatctggccatatataactcaataaatggcgcaattactcagtttagctgcaatatctctcacctgagctcactaatcgcacaactcgaagaaaaacagcagcagcccactagggagcttttgcaggacattggtgacaccctctcacgtgcagaacggatcaggattcccgaaccttggattacacctcctgacctgcaggaaaagatccacatctttgctcagaagtgccttttcctgaccgagtctcttaagcagttcactgaaaaaatgcaatctgatatggagaaaattcaagagcttagagaggcccagctgtacagcgtcgacgttacacttgatcctgataccgcctaccccagtttaattttatctgacaatctccggcaggtgaggtactcatatcttcagcaggatctgccggataaccccgaaagatctcccagtacaacctag

SEQ ID NO: 165812 - DNA, 747 bp, Artificial Sequence
  derived and/or modified sequence
tgactgaagcagttcaccgagaagatgcagagcgacatggagaagattcaggaaagcgcggacagtcttgagggtgggatcctcgacttaggttcagtactcagccacatactgcccgtgagcgagcttcgcgaagcacagttgtactcagtggatgtgacgcttgaccccgacaccgcatatccatcactgatcctctccgataatcttagacaggtgcgctactcttatttgcagcaggaccttccggataatccagagcggtttaacttgtttccctgtgttctcgggtctccttgttttatcgctggtagacattactgggaggtggaagtgggggataaagctaaatggacaatcggcgtctgtgaagacagcgtctgcagaaaggggggcgtgactagtgccccacagaacggattttgggctgtgagtctctggtatggaaaagaatactgggcccttactagtcctatgacggcactgcccctgcgaacacccctgcaacgcgtaggtatctttctcgactacgacgcaggagaagtgtcgttttataacgtcactgagcgctgccacaccttcacctttagccacgctactttttgcggtccggtacggccttactttagcctctcctacagtggcggtaaatcggctgcacccctaatcatttgtccaatgtctggcatcgatggtttctccggccatgtggggaaccacggccactctatggaaacaagcccatag

SEQ ID NO: 165813 - DNA, 750 bp, Artificial Sequence
  derived and/or modified sequence
atggccagcggcagcgtggccgagtgcctgcagcaggagaccacctgcccggtctgcctccaatacttcgctgagccgatgatgctggactgcgggcacaacatctgctgtgcctgcctagctcgctgttggggaacagcagagacaaacgtcagctgcccccagtgtcgtgagacctttccgcaaagacatatgcggcctaacaggcacctggctaacgtgacccaactcgtgaagcaattgagaacggagagacccagcggaccaggaggagagatgggtgtctgtgagaagcaccgagaacctctcaagctctattgcgaggaggatcagatgccaatctgtgtggtatgcgatcgctcgcgcgaacataggggacattctgttttacctttggaggaagcggtcgagggctttaaggagcaaatccagaatcaactggaccacttaaagcgcgtcaaagacctcaagaagcgcaggcgcgctcagggtgagcaggccagagctgaactcctgtcactgacacagatggaaagagaaaaaatcgtgtgggaattcgagcagttgtaccactctctaaaagagcatgagtatcgactgctggctagactagaagagctagacctggccatatataattctatcaatggtgcaattacacagtttagctgtaacatctcccaccttagctctcttatcgcccagctcgaagaaaagcagcagcagccgactcgtgaactccttcagtag

SEQ ID NO: 165814 - DNA, 1542 bp, Artificial Sequence
  derived and/or modified sequence
atggccagcggcagcgtggccgagtgcctgcagcaggagaccacctgccctgtctgtctccaatacttcgccgagccaatgatgctagattgcggccacaacatttgttgcgcatgcctagcccgttgttggggcaccgcagagaccaacgtcagctgtcctcagtgtcgcgaaacatttccgcagaggcatatgcgacctaatcgccatcttgccaacgttactcagttagtgaaacagctccgaactgaaagaccatccggccccgggggtgaaatgggcgtttgcgaaaagcaccgggagcccttgaaactgtactgtgaggaagaccagatgcctatctgtgttgtgtgtgatcgctcacgggagcacaggggccatagcgtgcttccactcgaagaagcagtggaagggtttaaggagcagatccaaaaccagctagatcatctaaagcgtgtcaaagatctgaagaaacggaggcgagcccaaggagaacaggctagagccgaactgctctctctgacccaaatggaacgcgagaagatcgtgtgggagttcgaacaactataccactctctgaaggagcacgaatacaggcttttggccaggttggaggagcttgacctggccatctacaactccatcaatggtgccattacccagttctcttgcaatatttctcaccttagctctctgatcgcccagttagaggaaaaacagcaacagcccacgcgagagctgctccaagatattggtgacacactcagtagggcggaaagaattcgcattcctgaaccttggataactcccccagatctgcaggaaaaaattcacatttttgctcagaagtgtctgtttctgactgagtctctgaaacaatttactgagaaaatgcaatcggacatggagaagattcaggagctcagagaagctcagttgtactctgtggatgtgactcttgaccccgatacggcctatccgtccctcattctgagtgacaaccttaggcaggtccgttattcttatctccaacaggaccttccggataatcctgagcgattcaacctgtttccatgcgtcctggggtcaccctgcttcatcgctggtcggcactactgggaggttgaggtgggtgataaggccaagtggacaatcggggtttgcgaggatagtgtgtgccgcaagggaggagtcaccagcgcccctcagaacgggttctgggctgtcagcctgtggtatggcaaagagtattgggcccttaccagtcccatgacagccctgcctctgcgcaccccactgcagcgagtgggcatcttccttgattacgacgcaggagaggtctcattctataacgttacagagagatgtcacacatttactttctcccacgccactttttgtggtcccgtcagaccctacttctctctgtcctattccggcgggaaatccgccgcgccactgatcatctgcccaatgtcaggaatcgatggttttagcgggcacgtcggcaaccacggccattctatggagacatccccgtag

SEQ ID NO: 165815 - DNA, 1542 bp, Artificial Sequence
  derived and/or modified sequence
atggccagcggcagcgtggccgagtgcctgcagcaggagaccacctgtcctgtgtgccttcagtatttcgctgagcccatgatgctggactgcggacacaacatatgttgcgcttgcttagcgcgctgttggggaaccgccgagacaaatgtctcctgtccgcagtgtcgcgagactttccctcagcgccatatgaggccaaatcggcatctggccaacgtgacccagttggtgaaacagctgcgcactgagaggccgtcaggccccggaggggagatgggggtatgtgagaagcatcgagagccactgaagctctattgcgaagaagatcagatgcctatatgtgtggtctgtgacaggtcacgggagcatagagggcatagcgtgttgcctctagaagaagctgtcgagggctttaaagagcagatccaaaaccagttggatcacttaaagagggtcaaggatcttaagaaaagacgtcgtgcccagggcgagcaagccagagccgagctcctaagcctgacccagatggagagagagaaaatcgtgtgggagtttgagcagctataccacagtttaaaagaacatgagtaccgactgttggctaggttggaagagctggatctcgccatctacaacagtatcaatggagctattactcagtttagttgtaacattagtcacctaagcagtctcatcgcccagctcgaggagaagcagcagcagcctacaagagagcttctgcaggatatcggcgacaccctgtccagggctgaacggatccgtatcccagaaccttggattacaccacccgatttgcaagagaaaatacacatctttgcccagaaatgtcttttcctgaccgagtcgctgaaacagttcacagaaaagatgcagagcgacatggaaaagattcaggaactgagagaagctcagctatatagcgtggacgttacgcttgatcccgatacagcctacccctccctgatactctccgataacttacgccaggtccgctactcctatcttcagcaggacctgcccgataatccagaaagattcaatctgtttccgtgcgtcctcggatccccgtgcttcattgccggacggcactactgggaagtcgaggttggagacaaggccaagtggaccattggcgtctgcgaggacagtgtctgtcgaaaagggggagtgacttctgcaccacagaacggcttttgggcagtgtcattgtggtatgggaaggagtattgggccctgacgagccccatgactgcactgcctctccgtactcccctacagagagtggggatctttttggactacgacgccggggaggtatccttttacaatgtgactgaaagatgtcatacattcacattttctcatgctactttttgcggaccagtacgcccttacttttccttatcttactcaggaggaaaatccgccgcccctttaattatttgcccgatgtccggaatcgatggattttctggtcatgtagggaaccatggtcactccatggagacatccccctag

SEQ ID NO: 165816 - DNA, 750 bp, Artificial Sequence
  derived and/or modified sequence
atggccagcggcagcgtggccgagtgcctgcagcaggagaccacctgtcctgtgtgtctccagtattttgcagagcccatgatgctagattgcgggcataacatctgctgtgcctgcctcgccagatgctggggaacggcagagacaaatgtttcctgcccccagtgccgtgagactttcccgcagcgtcacatgagacctaatagacacttagccaatgtgactcagctagtgaagcaacttagaaccgaacggccaagcggacccggtggagaaatgggcgtgtgtgaaaagcatcgggagccgctgaagctgtactgtgaggaagaccagatgcctatctgtgtcgtctgcgacagatcaagggaacaccgaggtcacagcgtgcttcctctagaggaggccgttgaggggtttaaagagcaaatccagaaccagcttgaccatctaaagcgagtgaaggacctgaaaaaacggagacgggcacagggggaacaggcaagggcggaattactcagcttaactcagatggagagggaaaaaatagtatgggagtttgaacagctctaccactcattgaaagagcacgaatatagactgctggcgaggctcgaggagcttgatctagccatctacaattccattaacggggctattacacagttttcctgcaacatttcacacctctcaagcttaattgcacagctggaggaaaaacagcagcagcctacccgagagctcctccaatag

SEQ ID NO: 165817 - DNA, 1542 bp, Artificial Sequence
  derived and/or modified sequence
atggccagcggcagcgtggccgagtgcctgcagcaggagaccacctgtcctgtatgcttgcagtattttgcagagcccatgatgttggattgcggacacaacatctgctgcgcctgtctggcccggtgctggggtaccgcagagacgaatgtttcatgcccgcagtgtcgtgagaccttcccacagagacatatgcgcccaaatcgtcacctcgctaacgttacccagctggtgaagcagctgcggaccgagaggccttctggccccggcggcgaaatgggcgtgtgcgaaaaacatagagaaccgctgaaactgtattgtgaagaagaccagatgcccatttgtgtggtctgtgatcgatcccgagaacacagagggcattccgtcctgccactagaggaagccgttgaaggattcaaggaacagatccagaatcagctcgatcacctgaagagggtcaaggacctcaagaaacggcgaagagcgcagggggagcaggctcgcgccgaattacttagtctgacgcaaatggagagagaaaaaatcgtatgggaattcgagcagctgtaccattcactgaaagaacatgaatacagattactagctagacttgaagaacttgacctggccatctacaactcaattaatggagcaatcacgcaattcagctgtaatataagtcatctgagctcgctcattgcccagctggaagagaagcagcagcagcccacgcgcgagctcctgcaggacattggcgacactttgagtagagccgagagaattaggataccagaaccctggattacaccccctgacctgcaggagaagatccatatttttgcccagaaatgcctgttcctcaccgagagtctgaagcagttcacggaaaagatgcagtctgacatggagaagatacaggaactacgcgaagctcagctctacagcgttgacgtcacgctcgatccagataccgcctacccttctcttatcctttccgacaatcttcggcaggtacgatatagttacctgcagcaagatctgcccgataatcccgaaaggtttaacctcttcccctgcgtgttaggttcaccttgcttcattgcgggtcgccattattgggaagtggaggtgggtgacaaagctaagtggacgattggggtgtgcgaggacagtgtgtgccgtaaggggggagtcacctctgctccgcagaacggtttttgggctgtcagtctgtggtatggaaaagaatactgggcacttacatccccaatgacagcccttccactgagaactcccctgcaaagagtcggaatattcctggactatgacgcaggcgaggtcagtttctacaacgtgacagaacggtgccataccttcacattcagccacgctactttttgcggcccagtcagaccgtacttttccctttcatattccggtggaaagtcagccgcccctctgattatttgccccatgagtggtattgacggcttttccgggcatgtagggaaccatggccactcgatggagaccagcccctag

SEQ ID NO: 165818 - DNA, 744 bp, Artificial Sequence
  derived and/or modified sequence
ctgaagcagttcaccgagaagatgcagagcgacatggagaagatccaggaaagtgcagacagtttggaaggcggcatcttggatctgggctctgtgctgtcacatattttgcccgtttcggagctgagggaggctcagctctattcagtcgacgtgaccttggacccggacacggcctatccatcattgattctaagcgacaatctgaggcaggtgcgatattcctatcttcagcaagacttaccagacaaccccgagcgcttcaatctcttcccgtgcgtactcggctccccctgttttatcgccggccgacactactgggaagtcgaggtgggagacaaggcgaagtggactattggggtctgtgaggactccgtatgccgtaagggcggcgtcactagcgcaccgcagaatggcttctgggccgtgtctctgtggtatggaaaagaatactgggctttaacctcaccaatgacagccctgccgttaaggaccccattgcagagagttgggatttttctggactatgacgcgggggaagtgtcgttctataatgtgactgagagatgtcacacattcactttttcacatgcgaccttctgcggacccgttagaccatatttcagcctgagttattctggcgggaagtcagccgccccccttattatctgtcccatgagcggcatcgacggattttccggtcatgtaggtaaccatgggcattctatggaaacatccccctag

SEQ ID NO: 165819 - DNA, 750 bp, Artificial Sequence
  derived and/or modified sequence
atggccagcggcagcgtggccgagtgcctgcagcaggagaccacctgtcctgtgtgcctccagtacttcgcggaacctatgatgctcgactgcggacacaacatttgttgcgcctgtttggctcgctgttggggtactgcagagacaaacgtcagctgcccccaatgtagagaaacctttccacagaggcatatgaggcccaaccgccacctcgccaatgtgacccaactcgtgaagcagctccggaccgagaggccaagcggccccggcggggagatgggggtatgcgagaaacatagggaacccttaaagctgtactgtgaagaggaccagatgcccatttgcgtcgtgtgtgatcgctcccgggagcataggggccactctgtgctgcctctggaggaagccgtggaaggatttaaagaacagatccagaatcagctggaccacctgaaacgggtgaaggacctcaagaaaaggaggcgcgcacaaggtgagcaggctagggcagaactgcttagtctgacacagatggagagggagaagattgtctgggaattcgaacagctgtatcactcccttaaagaacatgaatatcgtctgctcgctcgcctggaagagctggacctggctatttataactccattaatggcgctataacacaattttcttgcaacatatcccacctaagttccctgatcgctcagctggaagaaaagcagcaacagcctacccgcgaactcctgcagtag

SEQ ID NO: 165820 - DNA, 159 bp, Artificial Sequence
  derived and/or modified sequence
tgactgcgggaggcccagctgtacagcgtggacgtgaccctggaccctgacaccgcatatccgagcctgatcctaagcgataacctgcggcaggtacgatacagctatctgcagcaggatctccctgataacccagaacgcagcccctctaccacttag

SEQ ID NO: 165821 - DNA, 696 bp, Artificial Sequence
  derived and/or modified sequence
tgaagcgccgacagcctggagggcggcatcctggacctgggcagcgtcctctctcatatcctccccgttagcgagcttcgagaagcccaactttattcggtggatgtgacactggatcccgacaccgcttatcctagcctgattcttagcgataatttgaggcaggtgcgctacagttatctgcagcaagatctgcccgacaatccggaacgcttcaatctcttcccttgcgttctaggaagcccttgtttcatagcaggtcgtcattattgggaagttgaggtgggtgataaagcaaagtggacaattggtgtttgcgaggacagcgtctgtcgtaagggaggagtgacttccgcgccacagaatggcttttgggcggtgtcactctggtacggtaaagaatactgggccctgacatcccctatgacagcattgcctctgcgcacaccactgcagagggtaggcatctttctcgattacgatgccggagaagtgagtttttacaatgtcaccgagcgctgccatacatttaccttcagccacgcaacattttgcggtcccgtgcggccatactttagcttgagttactccggcggtaagtcggctgcacctctgatcatttgccctatgagtggcatcgatggcttctccggccacgtggggaatcatgggcattcaatggaaacgagcccctag

SEQ ID NO: 165822 - DNA, 624 bp, Artificial Sequence
  derived and/or modified sequence
tgactgcgggaggcccagctgtacagcgtggacgtgaccctggaccctgacaccgcctatccaagtctgatcctttccgataacctgaggcaagtgagatattcctatcttcaacaagaccttcctgacaatcctgagaggttcaatttgtttccatgcgttctcgggtctccctgtttcatcgccggacggcattactgggaagtcgaagtgggcgacaaggcaaagtggactattggcgtgtgcgaggactctgtgtgcagaaaaggcggtgtgacctctgcaccccagaacgggttctgggctgtgagtctgtggtatggcaaggaatactgggccctgacttctccaatgacggccctccccttgagaactccactgcaaagggtggggatatttctggactatgacgccggggaggtcagtttctataacgtgactgaacggtgccacacatttacgttttctcacgcaaccttctgcgggcccgttaggccatacttttctttgtcctactccgggggcaagtctgctgccccacttataatctgccccatgtccggaatcgacggcttctctgggcacgtcggtaaccatggacattccatggagaccagcccctag

SEQ ID NO: 165823 - DNA, 1077 bp, Artificial Sequence
  derived and/or modified sequence
atggccagcggcagcgtggccgagtgcctgcagcaggagaccacctgcccggtttgcctgcagtacttcgcagagccaatgatgctcgactgcggccataatatctgttgtgcctgtttggcaaggtgctggggcactgctgaaacaaatgtgtcttgtccccagtgcagagagacctttccacagagacacatgaggcccaacagacacctcgccaacgtgacccagcttgttaaacaactccgaacagaaagaccttctggacccggtggcgagatgggcgtttgcgaaaagcaccgagagcctctgaaactttattgtgaagaagatcagatgcccatctgcgtagtgtgcgataggtcgcgagaacaccgaggccactcggttttgcccttagaggaggctgtggaggggtttaaggaacaaatccagaatcaactggaccatctgaaacgcgttaaagatctgaagaagcgccgcagagcccagggtgagcaagcgcgcgctgagctcctctctttaacccagatggaacgcgagaaaattgtgtgggagttcgagcagctgtaccactctttgaaggaacatgagtaccgtcttctcgctcggctcgaagaactggatctcgctatttacaatagtattaacggggccatcacccaattttcttgcaatatttcccacctgtcctcactaatcgcacagttagaggaaaagcaacagcagcctacaagagagctgttacaggacatcggcgacactctgtcgagggccgaacggattaggattcctgagccctggatcaccccaccagacttacaggagaagatacatatattcgcgcagaaatgtttattcctcacggaaagccttaagcagtttacggaaaaaatgcagtctgatatggaaaaaatacaggagctgcgtgaggcccagttatacagcgtggatgtcacacttgacccagacacggcttacccttcactgattttgtccgataacctgaggcaggtgcgttattcataccttcagcaggacttgcccgacaatcctgagagaagcccatcgacgacgtag

SEQ ID NO: 165824 - DNA, 747 bp, Artificial Sequence
  derived and/or modified sequence
tgactgaagcagttcaccgagaagatgcagagcgacatggagaagatccaagagagcgcagatagtctagagggcggcattctggaccttggatcagtgcttagccacattctgcctgtgagtgagctgcgggaggctcagctttactctgtcgatgtgaccctggacccggacactgcatatcctagtctcattctgtctgataatctaagacaggtccgatattcctatctgcagcaagatttacctgataatcccgaacgtttcaatctgttcccttgcgttctgggctctccatgctttatcgccggaaggcactattgggaggtcgaagtcggcgataaggccaaatggacaattggagtatgcgaggacagtgtgtgtcggaaaggtggggtgacttcagccccacagaatggcttctgggccgtgagtctgtggtatggcaaagagtattgggcacttaccagccccatgacggcccttcctctccggactcccctgcagcgggttggtatttttctagactatgacgctggggaggtcagcttctacaatgttactgagcgttgccatacctttacattctcccacgccaccttctgcggcccagtacgtccctacttcagcctgtcctattccggcggcaagtccgcagcccctcttatcatctgccctatgtctggcatagacggattttcaggccatgtaggaaatcacgggcactctatggaaaccagtccctag

SEQ ID NO: 165825 - DNA, 750 bp, Artificial Sequence
  derived and/or modified sequence
atggccagcggcagcgtggccgagtgcctgcagcaggagaccacctgtcccgtttgcctgcagtactttgccgagccaatgatgctggattgcggacacaatatctgttgcgcatgcctcgctaggtgctggggtactgcagagacaaacgtctcatgtccgcagtgcagagagactttccctcagagacatatgcgccccaaccggcacctggccaacgtgacgcagctggtgaagcagctcaggaccgagaggccctccgggccaggaggagagatgggtgtatgcgaaaaacacagggagcctttgaaactctactgtgaagaagatcaaatgcccatctgcgtggtttgtgatcggtcaagagagcatcgcggtcattctgtgctccctctggaagaggccgtcgagggcttcaaggaacagattcaaaatcagctggaccacctaaaaagagtgaaagaccttaaaaaaaggcgccgagcccagggtgaacaggccagggcggagctgctgagccttactcagatggagagggaaaagattgtgtgggaatttgaacagctgtaccacagcctcaaggagcacgaataccgcctgttggctcggctggaagaactcgacttggccatctacaattccattaacggtgccattacccagttctcatgtaatatcagccaccttagttctctgatcgctcagctcgaggaaaagcaacaacagcctactcgggagctgctgcagtag

SEQ ID NO: 165826 - DNA, 1077 bp, Artificial Sequence
  derived and/or modified sequence
atggcctctggatctgtcgcagagtgcctgcagcaagaaacgacttgtccggtttgcctgcagtactttgccgaacctatgatgctcgattgtggccataacatctgctgcgcctgtctcgcccgatgttggggcaccgccgagaccaatgtcagctgtccacaatgtcgcgagactttcccacagcgacatatgagacctaaccggcacttggctaacgtaacccaactggtcaaacaacttcgaaccgagcggccatccggccctggaggggaaatgggcgtgtgtgagaaacatcgagaaccccttaagctctattgcgaggaggatcagatgcccatttgcgtggtctgcgatcggagcagagagcatagaggtcattcagttcttcccttagaagaggcggttgagggcttcaaggaacagatccagaaccaacttgaccacctgaagagggtcaaagacctaaagaagcggcgaagggcccaaggagaacaggcacgtgccgaactcctttccctgacgcagatggaacgagagaaaatagtgtgggagtttgagcagttgtatcactcactgaaagaacacgaataccgtttgcttgcacgcctcgaagagttagatctcgctatttataactctatcaatggggctatcacgcagttttcctgcaatatctcacacctgagtagtctgatagcccaacttgaggaaaagcaacaacagcctactcgagaactactccaagatataggggatacgctcagtagggctgagcggatccgcatacccgagccgtggataaccccgccagatcttcaggagaagattcatatcttcgcccagaagtgcctgttcctcaccgagagtctgaaacagttcactgaaaaaatgcaaagtgacatggagaagatacaagaactgcgggaagcacagctttacagcgttgatgtgacgctggatccagacaccgcctatccgtccctgatcttaagcgataacctccgccaggttcggtactcgtatctgcaacaggacctaccggacaatccagagcggtcacccagcacgacatag

SEQ ID NO: 165827 - DNA, 1542 bp, Artificial Sequence
  derived and/or modified sequence
atggccagtggatctgtggccgagtgtctgcaacaagaaactacatgtccagtctgcctgcagtacttcgcggagccaatgatgctcgattgcggacataatatttgttgtgcctgcctcgcccgttgttgggggaccgccgagactaacgtttcctgccctcagtgcagggagacgtttccacaacgccacatgaggcccaaccgacacttggccaacgtgacacaactcgttaagcaactccggaccgaacgcccaagcggaccgggaggggagatgggagtgtgcgagaaacatagagagcccctcaaactgtactgtgaggaggaccagatgcctatatgtgtggtctgtgaccgcagtagggagcacagaggccattccgtgctgccactggaggaggcggtggaaggcttcaaggagcagatccagaaccagttggatcacctgaaaagagtgaaggatcttaagaagcggagacgggctcagggagagcaggccagggccgagctgttgtcgctcacacaaatggagcgggagaagattgtgtgggagttcgagcagctgtatcattcacttaaggagcacgagtaccggctcctagccaggctggaggaactggacctcgcaatttataatagcatcaatggcgcaatcacccagttctcctgcaatatcagtcatctcagtagtctgatcgcacagcttgaagagaaacagcaacagcccacccgcgaactgctgcaggacataggcgatactctgagtcgagcggaacgcataagaatccctgaaccatggatcacacctcctgaccttcaggagaaaatccacatcttcgcacagaaatgtctgtttctgacagagtccttgaaacagttcacagagaaaatgcagtctgacatggaaaagattcaggagctgagggaggcgcaactttacagtgtggatgttaccctggatcctgatacagcttatccttccttgatcctttcagacaatttgcgccaggtacgctacagctatcttcagcaggatcttcctgataatcctgaaagattcaacttgtttccgtgtgtgttaggctcgccgtgctttatcgctggtagacactactgggaggtggaggtgggcgataaggcgaaatggaccatcggcgtgtgtgaggatagtgtgtgcaggaagggaggggtcacatctgcgcctcagaatgggttttgggctgtcagcctgtggtacggaaaggagtattgggccctaacaagccctatgacagccctcccgctaaggactcctctgcagagagtcggcatctttttagattacgatgccggagaagtgagcttctataatgttacagagcgctgccacacctttaccttttcccatgccactttttgcggccctgttcgcccatacttctctctctcttatagtggagggaaaagcgctgccccactgataatctgtcctatgtccggtattgatggattctcaggccatgtcgggaatcatgggcacagcatggaaacctccccctag

SEQ ID NO: 165828 - DNA, 1542 bp, Artificial Sequence
  derived and/or modified sequence
atggcaagtgggagcgttgccgagtgtcttcagcaagagactacctgccctgtatgcctgcaatattttgcagagcccatgatgctggattgtggtcacaatatctgttgtgcctgtctcgcacggtgctggggaactgccgagaccaacgtgtcatgcccccaatgcagggagacttttccacagagacatatgagaccaaatcgacaccttgccaacgtgacccagctggttaagcaactgcgaacggagcggccaagtgggcctggtggagagatgggggtttgtgagaaacacagggagccattgaaactgtactgcgaggaagaccagatgcccatctgcgttgtgtgcgataggtcgagggaacacagggggcatagcgtgctccccctggaggaggcagtcgaggggttcaaggaacagatccagaatcagttggaccacctcaagagggtgaaagacctgaaaaagagacggagagctcaaggtgagcaggcacgtgccgaactgctcagcctgacacaaatggagcgagagaagatagtttgggagttcgagcaattgtatcacagtttgaaagaacatgaatatcgcctgctcgcacgtctagaggaactggacttggcgatttataattctatcaacggcgcaattacccagtttagttgtaatatcagccacctttcgtctctgatagctcagttggaagaaaaacagcagcagcccaccagagagctgctccaggacatcggcgataccctgtcccgcgctgagaggattcggatcccagagccctggattactccccctgacctgcaggagaaaatccacatttttgcgcagaagtgcctcttcttgaccgagagtctcaagcagttcacagaaaaaatgcagtccgatatggaaaaaatccaggaactgagggaggcacagttgtactccgtcgatgtcacgcttgatcccgataccgcttatccaagtctcatcctctcggacaatcttcgccaggtccggtactcatacttgcagcaggatctgccggataaccctgagcgctttaatctattcccttgtgtcctgggatctccctgttttatcgcaggcaggcactactgggaagttgaagtgggggacaaagccaagtggaccattggcgtgtgtgaggactcagtgtgccgtaagggcggagtgacttccgccccacagaacggcttttgggctgtgagtctttggtacggtaaagaatactgggcattaacatcgcccatgaccgctctgcctctgcgcacccctctgcagcgggtgggaatctttctcgattacgatgcaggtgaagtgtcgttttacaacgtcaccgaaagatgccatacctttacattttcacatgctactttctgtggccctgttcgcccatattttagtttatcttacagcggcggtaagtccgctgctcctctgatcatctgtcccatgtccggcatcgatggcttttcaggacacgtgggaaatcacggccactccatggagacttccccctag

SEQ ID NO: 165829 - DNA, 1077 bp, Artificial Sequence
  derived and/or modified sequence
atggcatccgggagcgtggctgagtgtttgcagcaggagacgacatgccctgtctgcctgcaatatttcgcagagccgatgatgctagattgcggccacaacatctgttgcgcatgtctcgctcgctgttggggcaccgcggagacaaatgtgtcctgtcctcagtgtagagagacgttcccccaacggcatatgcgccctaaccggcatctagcaaatgtgactcagttggttaagcagttgcgaacagagcggccatctggccctggtggagagatgggcgtgtgcgaaaaacatcgggagcccctcaaactctactgtgaggaggatcagatgccaatctgcgttgtgtgcgatagaagcagggagcatcgaggtcacagcgtccttcctctggaggaagcggttgaggggttcaaggagcaaatccagaaccagctcgaccatctgaagcgggtgaaggaccttaaaaaaagacggagagcacagggcgaacaggccagagctgaactactatctctgacccagatggaaagagaaaagattgtctgggaatttgagcaactgtaccactcactcaaagaacatgagtaccggctgctggccaggctcgaggaacttgatcttgccatttataacagtataaacggagcgatcacacaattcagctgcaacattagccacctctcttcccttatcgctcagctggaggagaagcagcagcagcccaccagggagttgctgcaggatattggcgacacactgtcaagggccgaacggattaggatacccgaaccttggatcacccctccagatctccaagaaaaaatccacatcttcgcacagaagtgcctattcctaactgaaagcctgaagcagtttactgaaaagatgcagtccgacatggagaagatacaagaacttcgagaagcccaactatactccgttgatgtgacattagaccctgataccgcttacccatccctgatactcagtgacaatctgaggcaggtacgatacagctacctacaacaggatctgcccgacaatcctgagcggtctcccagtactacctag

SEQ ID NO: 165830 - DNA, 747 bp, Artificial Sequence
  derived and/or modified sequence
tgactcaaacagtttaccgagaagatgcaatcggacatggagaaaatccaggagagtgcagactctctagagggcggaattcttgatctgggctccgtcctatcacatatactccctgtgtccgagctgagggaagcgcagctgtacagtgtggatgttacgctggatccggacaccgcataccccagcttaatactcagcgataatctcagacaggtacgctattcttaccttcagcaagacttgccagacaaccccgagcgcttcaacctgtttccttgcgttttgggatctccctgtttcattgcaggcagacattactgggaggtagaggtaggagataaggccaagtggactatcggagtttgcgaagactctgtgtgtaggaagggcggagttacgtctgcccctcaaaatggattttgggctgtctccctctggtacgggaaagagtactgggcactgaccagccccatgaccgctttaccattgaggaccccccttcagagagtgggcattttcctggactacgatgccggagaggtatcattctacaatgttaccgagcgttgtcacactttcactttttcccatgcaaccttttgtggtccagtccgaccatatttttcactgtcgtactctggtgggaaaagcgcagccccattgatcatctgccccatgagcgggatcgatggcttctcaggacatgtcggcaaccacggccactccatggagacaagtccttag

SEQ ID NO: 165831 - DNA, 1077 bp, Artificial Sequence
  derived and/or modified sequence
atggcatcaggcagtgttgcagaatgcctgcagcaggagactacttgtccggtatgcctgcagtactttgcagagccaatgatgttggattgcggccacaatatttgctgcgcttgtcttgcgagatgctggggcactgctgagacgaatgtctcttgtcctcagtgtcgggagactttcccacagaggcacatgcgcccaaaccgccatctggccaatgtcactcagctggttaagcagctgcgcaccgaacggcctagtgggccaggcggtgagatgggagtgtgcgagaagcatcgggagccactgaaattgtattgtgaggaagaccagatgcctatatgcgtggtatgtgatagaagccgggaacatcggggtcattccgtgctgcctctggaagaggccgtggaggggttcaaagaacagattcagaaccagctggatcatctgaaacgcgtcaaggacttgaagaaaaggagaagggcccagggcgaacaagcccgtgctgaactgctctccctgacccaaatggagagagagaagatagtctgggaatttgaacagctgtaccactcgctgaaagagcacgaatatcgattgctggccaggttagaagagcttgacctggccatctacaacagcatcaatggcgcaataacccaatttagctgtaacataagccaccttagttcccttatagcccaactggaagagaagcagcagcagcccactcgcgagcttctgcaggacattggtgatacccttagccgagccgagagaatcagaatcccggaaccttggatcacgccgcctgatctgcaggagaagatccatatcttcgctcaaaaatgcctatttctgactgagtccttaaaacagtttacagagaagatgcaatctgatatggagaagatccaggaattgcgagaggcccagctgtattcagtggacgtgaccctagatccggacactgcttaccccagtttgatcctgtctgacaacctgcgccaggtcaggtatagctacctgcagcaggacctccccgacaaccctgagagaagccccagcacaacttag

SEQ ID NO: 165832 - DNA, 747 bp, Artificial Sequence
  derived and/or modified sequence
tgattaaaacagttcacggagaaaatgcagagcgacatggaaaaaattcaggagagtgctgattcactcgaggggggaatcttagacctcgggtctgttttatcacatatccttccggtgtcggaactgagggaggctcagctttactccgtggacgttaccttggacccagacacagcctacccgtccctaattctgtcagacaaccttaggcaggttcggtactcctaccttcagcaagatcttcctgacaatcctgagagattcaacctgtttccatgcgttctgggcagcccttgttttattgccggacgacactattgggaagtcgaagtgggggataaggctaagtggacaatcggcgtgtgtgaggattctgtgtgccggaagggaggagtgacaagcgcacctcagaacggattctgggctgttagcctatggtatggtaaggagtactgggccctgacctctcccatgactgctctccctctgagaactcccctgcagcgtgtcgggattttcctggactacgacgccggtgaagtgtccttctacaatgtgacggagaggtgtcatacatttacttttagccacgccaccttctgtggtccggtgcgtccctacttcagccttagctattccgggggtaaatcagctgcaccactgatcatttgtcctatgagcggcatcgatggtttcagcggccacgttgggaatcacggccactccatggagacatcaccctag

SEQ ID NO: 165833 - DNA, 1077 bp, Artificial Sequence
  derived and/or modified sequence
atggccagcggatccgtggcggaatgtctgcaacaggaaaccacgtgcccagtgtgcctacagtactttgcagaacccatgatgttggattgcggccacaacatttgttgtgcgtgcttggctcgctgttggggaacagcagagacaaatgtctcatgtccccagtgtcgggagacattcccccaacgacacatgagacctaaccggcacctcgcaaacgtcacacagctggtcaagcagctaagaaccgagcgaccaagtggtcccggtggagaaatgggggtgtgtgaaaagcaccgcgaaccactaaagctatactgcgaagaggatcaaatgcctatatgcgtcgtgtgcgaccgaagcagagaacataggggacactcggtgttgccactcgaggaggccgtggagggtttcaaggaacagatccaaaatcagctcgaccatctgaaaagagtcaaagacttgaaaaagcggagacgggcacaaggcgaacaggcacgagcggagctcttgtctttgacccagatggagcgtgaaaaaatagtgtgggaattcgagcagttgtatcactcacttaaagaacacgagtacagattgctcgctcgtctcgaggaattggacctagccatatacaactcaatcaacggcgcaatcacacagttcagttgtaacataagtcatctgagctcactgattgcccagctggaggaaaaacagcagcagcccacgcgcgaactcctgcaggacatcggagacacactgtcccgagctgaacgcatcagaatcccagaaccttggattaccccacctgacttgcaggaaaaaatccacatctttgctcagaagtgcttgttccttaccgagagcttgaaacagttcacagaaaaaatgcaatccgacatggagaagattcaggagttgcgagaggcgcagctatactcagttgatgtgaccctggatcccgatacagcctatccctctctgatcttatccgacaatctgagacaagtccggtattcttacctgcaacaggacctgcccgataatcccgaaaggtctcctagtacaacctag

SEQ ID NO: 165834 - DNA, 747 bp, Artificial Sequence
  derived and/or modified sequence
tgactcaagcagttcacagagaaaatgcaaagcgacatggagaagattcaggaaagtgccgactctctggaaggcggtatactcgatttgggcagtgtcctgagtcacatcctcccagtctcggagttgcgtgaagcccaattatacagtgtagacgtgactctggatcctgacacagcatatccttccctcatcctgtcggacaacctgagacaggtgaggtactcctacttgcagcaggacctgcctgacaacccagagcgtttcaatctgtttccctgtgtcctgggctcaccatgtttcatcgcaggaaggcattattgggaggtagaggtgggggacaaagcaaaatggacaataggcgtgtgtgaagacagtgtctgtcgaaaggggggtgtaacctcagcaccacagaatggcttctgggccgtgtccctgtggtatgggaaggagtactgggccctcacatcccctatgactgccctgcctcttagaacgccactacaaagggttggcatcttcttggactatgatgccggagaggtgtcattctacaatgtgactgaaaggtgtcacacatttaccttctcccacgcgaccttctgcggaccagtcagaccgtatttcagcctttcatattccggtggcaaaagcgccgcaccgctgatcatctgccccatgagtggtattgacgggtttagtgggcacgtgggcaaccacggccactctatggaaacgagcccatag

SEQ ID NO: 165835 - DNA, 750 bp, Artificial Sequence
  derived and/or modified sequence
atggcctcgggctctgtggcagagtgcttgcaacaggagacgacatgccctgtgtgtctccaatattttgctgaacctatgatgctggattgcgggcataatatttgctgtgcttgtctagcccgttgctggggcaccgcagagacaaacgtgagttgtccccagtgtagagaaacctttcctcaacgccatatgcgcccaaacaggcacctcgctaacgtcactcaactcgtgaaacagctgcgcactgaacggccatctggccctggtggcgaaatgggagtgtgcgagaaacatagagagcccctaaaactgtactgcgaagaggatcagatgccaatctgcgtggtgtgcgacaggagtcgcgagcatcggggacactcagtacttcctttggaggaggctgtggagggctttaaagaacagatccagaatcagctggatcacctgaaaagggtgaaagaccttaagaagaggcgaagggcacagggtgagcaggccagagccgaactgctcagcctgacccagatggaacgcgagaagattgtttgggagtttgagcagctgtaccattcactgaaagagcacgaatacagactgttagccagactggaagagctggacctcgctatctataactccattaacggtgctattacacagtttagttgtaacatatcacacttgagctccctgatcgctcagctagaggagaagcaacagcagccgactagagaattactacagtag

SEQ ID NO: 165836 - DNA, 1542 bp, Artificial Sequence
  derived and/or modified sequence
atggcctcgggttctgttgcagaatgcctgcagcaggaaactacctgtccggtgtgcctccagtattttgccgaacccatgatgctggactgtggtcacaacatttgttgcgcgtgcttggccagatgctgggggaccgctgagaccaacgtgagctgtccacaatgtagggagaccttcccgcagaggcatatgcgacccaatcgccatcttgctaatgtcactcaattggtgaagcaactgagaacagaacgcccaagtggtcccggaggggaaatgggagtctgcgaaaagcacagggagcctcttaagttatactgcgaggaggaccaaatgcctatctgcgtggtgtgtgatcgctccagggaacatcggggacattccgtactgcctctcgaggaagcagtggaaggatttaaagagcaaatccagaaccagctggaccatctgaaacgagtcaaagatttaaagaagagacgaagagctcagggcgaacaggcacgggcagaactgctgagtctcacccaaatggagcgcgagaaaatagtgtgggagttcgagcagctgtaccattccctaaaggaacatgaatacaggctgttggcccgactcgaagaactcgacttagctatctacaattccatcaatggtgccatcacacagttctcctgcaatatctctcatctgtccagtctgattgcccagctcgaggagaagcagcagcagcctacaagagagctcctgcaggacattggcgatacactctcccgcgcagaacgaattcgtataccagagccttggattactccccctgacttacaggaaaaaatccacatatttgcgcaaaagtgcttgttccttacagagtcacttaagcagttcaccgagaaaatgcaaagcgacatggagaagattcaggagctgagagaggctcagctgtattccgtcgacgtgactctagatccagataccgcgtaccctagtcttattctctccgacaacctacgacaagttaggtatagttatctacaacaggacttgcccgataatcctgaaaggttcaatcttttcccctgcgtactgggttcaccctgcttcatcgccggacgccattattgggaggtcgaagtgggtgacaaagccaaatggactataggcgtgtgtgaagatagcgtgtgccgaaaaggcggtgtgaccagcgctccacaaaacggcttttgggccgtgtccctgtggtatgggaaggaatactgggcactgacttctcccatgactgcgctccctctccgcacccccctgcagcgcgtgggcatcttcctggactatgatgccggagaggtcagcttctataatgtcacagagagatgccatacatttacattcagtcacgctactttttgcggccctgtcagaccgtacttttccctcagctacagtggcggtaagtctgctgcacctctcattatttgccctatgtctggtatagacggttttagcggccacgttggaaatcatggccactcaatggagacctctccatag

SEQ ID NO: 165837 - DNA, 1542 bp, Artificial Sequence
  derived and/or modified sequence
atggctagtggcagcgtggccgagtgcctgcaacaggagacgacttgtcctgtctgtctccagtactttgcagaaccaatgatgctggattgcggtcataacatttgttgcgcatgtcttgctcggtgctggggtaccgctgagacaaacgtatcatgccctcagtgccgggagaccttccctcaacgacatatgagacccaaccggcatctggcaaatgtaacccagctggtgaagcagctgaggacagaaagacctagtggtccgggaggagagatgggagtgtgtgaaaagcacagggagcccctgaagctctactgtgaggaggaccagatgccaatttgcgtggtatgtgaccgctcacgggaacatcgcggacactctgtgttaccgctggaggaagccgtggagggcttcaaagaacagattcagaatcagctggatcatctaaagcgggtgaaagatctcaagaagagacgcagagcccagggggagcaggcaagggcagagctgctgtctttgactcagatggaaagggagaagatcgtgtgggagttcgagcagttgtaccattcactgaaggagcatgaataccgcctactggcacggctggaagaactggacctggcaatctacaactctattaacggggctatcactcaattttcatgcaatatttctcacctttctagcttaatcgcacagttggaagagaagcaacagcaaccgacacgagaactcctgcaagacataggagatactctgtccagagcggagagaatcagaatccccgagccatggatcacacccccagaccttcaggaaaaaattcatatcttcgcccagaagtgtctcttccttaccgagtctctgaaacagttcactgaaaagatgcagagtgatatggaaaagattcaggaactgcgggaggctcagctttatagcgtggatgtgacactggacccagacacagcgtacccgtctctcattctcagtgacaatctgagacaagtgaggtactcttacttacagcaggatctgccagataacccagaacggtttaacctgttcccttgcgtgctgggttctccatgtttcatagccggaaggcattactgggaggtagaggtgggagataaagccaagtggacgataggagtatgtgaagattcggtgtgccggaaggggggtgttacttcagcaccccagaatggcttttgggccgtgagcctatggtatgggaaggagtactgggcactgacctcaccgatgactgctttgccactgcgtacgccactgcagcgcgtaggaatttttcttgattacgacgcaggcgaagtctccttctataacgttacagaaagatgccatacttttactttctctcacgctacattctgcggtcccgtccgcccttatttctcgctgagctatagcgggggtaagtcagcagcgcctctgatcatttgcccaatgagcggcattgacgggttcagcggacatgtgggcaaccatggacattctatggagacttcaccatag

SEQ ID NO: 165838 - DNA, 750 bp, Artificial Sequence
  derived and/or modified sequence
atggcatcagggtcagtcgcagaatgcttacaacaggagacaacgtgcccagtctgcttgcagtattttgctgagcctatgatgcttgactgcggccacaacatctgttgtgcctgtctggccagatgctggggaacggctgagactaacgtgtcctgcccacagtgcagggaaaccttccctcaaaggcatatgcgacccaacagacacttggctaatgtcacacagctcgtcaagcaactcagaaccgagcgtccaagcggacctggcggagaaatgggggtctgtgaaaagcatcgcgaaccgctcaagctgtactgtgaggaggaccaaatgcccatttgcgtcgtgtgcgaccgtagccgagagcatcggggacactccgtacttccactcgaggaagctgtcgagggtttcaaggagcagattcagaatcagcttgatcacctcaagagagtgaaggatctgaaaaaaagacgtcgggctcaaggcgaacaggcaagggccgaactcctatcactgactcaaatggaaagagagaagatcgtgtgggagttcgaacagctgtaccatagtctgaaggagcatgagtatagactattagcacggcttgaggaactagatctggccatatacaacagtatcaacggagccatcacccagtttagctgcaatatttcgcaccttagttcactaatcgctcagcttgaagagaaacagcagcagcccacgagggagctcctgcagtag

SEQ ID NO: 165839 - DNA, 1542 bp, Artificial Sequence
  derived and/or modified sequence
atggcctcaggttccgtggcagaatgtctccagcaggaaaccacctgccctgtttgtctgcagtatttcgctgagcctatgatgttagattgtggacacaatatctgttgcgcttgcctggcgcgatgctggggtaccgccgaaacaaatgtgtcttgccctcagtgccgggaaacttttccccagcgccacatgcggccaaacaggcatttggccaacgtgacgcagctggttaagcagctccgcacggaacgcccatccggtcctggcggtgagatgggggtatgcgagaagcatcgggaacctctcaagctctattgtgaggaggaccagatgcccatctgcgtcgtgtgtgatcggagcagagagcataggggccactctgtgctgcccctggaggaggcggtagaaggattcaaggagcagattcagaaccagcttgaccatctgaaaagagtaaaggacctgaagaagcgaaggagggctcagggcgaacaggcacgggctgagctcctttctcttactcaaatggagcgagagaaaattgtgtgggaattcgagcaactgtaccattctcttaaagagcacgagtatcgtctgctggccagacttgaagagctcgaccttgccatctataactctattaacggggctattactcagttctcttgcaatatctcgcacttgagttctttgatcgcccagttagaagagaaacagcagcagcctactcgtgagctgctgcaggatatcggagatacactaagcagggctgagagaatcaggatccccgagccttggattactccacctgacctccaagaaaaaatccatatctttgcacaaaagtgcctgtttttgacagaaagtctgaagcagtttactgagaaaatgcagagtgatatggaaaaaattcaggagctccgggaggcccagctgtactcagttgacgttaccctggatcccgacaccgcctacccttcccttattttatccgacaatctcaggcaagtacggtacagttacttgcagcaggacctacccgataacccggaaagatttaatctcttcccatgcgtcctcggttcgccttgttttatcgcaggccgacattattgggaagttgaggttggcgataaagccaagtggactatcggggtgtgcgaggatagcgtgtgtagaaagggcggagtgacaagtgcacctcagaacggcttttgggccgtctccctgtggtacggaaaggaatattgggcccttacgtctcctatgaccgcactgccgttaagaacgccgctgcaaagagttggaatattcctggattatgatgcgggtgaggtgtccttttacaatgtgaccgagcgctgtcacaccttcactttttcccatgcaactttttgcggcccagttcgaccgtacttttctctgtcatattccggtgggaagagtgccgcacctctaataatctgtcctatgtcaggaatcgatgggttcagcgggcacgtggggaatcacggtcattcaatggagacatccccatag

SEQ ID NO: 165840 - DNA, 744 bp, Artificial Sequence
  derived and/or modified sequence
ctcaagcagtttacggaaaaaatgcagtcggatatggagaagatacaagagtcagccgacagcttagaaggcggaattttggacctaggatcggtgctgtctcacatcctgcctgtgtcagagcttagagaagctcaactatactccgtggatgtgactctcgatccagatacagcttacccaagtctcattctgtcagataatcttaggcaggtgaggtacagttatcttcagcaggacctgccagataacccagagcgattcaatctgtttccatgcgtgctgggttcaccttgcttcattgccggtcgtcactattgggaggtagaagttggggacaaggcaaagtggaccatcggtgtgtgtgaggatagcgtgtgcaggaagggcggagtcacatccgcaccccagaatggtttttgggctgtcagcctgtggtatggcaaagagtactgggcgttgacgtcaccaatgacagctctgcccctgcgcaccccgctccaacgagtgggaatctttctcgattacgacgcaggggaagtgtcattttacaacgtcacagagcggtgtcacacttttaccttttctcacgcgactttctgtggccctgtgcggccttactttagcctcagctatagcgggggaaaatcagcagcccctctgattatctgccctatgagtggcattgatgggttctctgggcatgtcggtaaccacgggcattccatggagacttccccctag

SEQ ID NO: 165841 - DNA, 750 bp, Artificial Sequence
  derived and/or modified sequence
atggcttccggcagcgtggccgagtgtcttcaacaggagaccacatgccccgtttgtctgcagtacttcgcagagcccatgatgctggattgtggccataatatatgttgtgcttgtctggccagatgttggggcactgctgagaccaatgtttcttgtccacagtgccgcgaaacattcccgcagcggcatatgcgcccaaaccgacatttagctaacgtgacccagctggtgaaacagctcagaacagaacggccatctggcccaggcggagaaatgggtgtatgtgagaagcaccgggagccacttaaactctattgcgaggaagaccaaatgcccatttgcgtcgtctgcgaccggagtagggagcaccgcggacattctgtattacctctggaggaggcggtggaaggcttcaaggaacagatccaaaatcagcttgatcaccttaagcgcgtaaaggacctgaagaaacggagaagggcccagggcgaacaggctcgggctgagctgttgtccctgacgcagatggaaagagagaaaatcgtgtgggagttcgagcagttataccacagcctgaaggaacacgaatatagactgcttgccagattggaggaactggatctggcgatctacaatagcatcaacggcgctattactcagttttcgtgcaatatctcccaccttagctcactcatcgcgcaactggaagagaaacaacagcagccaacacgtgaactgcttcagtag

SEQ ID NO: 165842 - DNA, 159 bp, Artificial Sequence
  derived and/or modified sequence
tagctccgggaagcccagctctattccgtcgacgtgactcttgaccccgacactgcctacccctcgctaatcctcagtgacaacctccggcaagtcaggtattcctatctccagcaagatctgcccgataatcccgaacgtagtccatctacgacatag

SEQ ID NO: 165843 - DNA, 696 bp, Artificial Sequence
  derived and/or modified sequence
taatccgccgacagccttgagggaggcatcttagaccttggctcggtgttgagccatattctccctgtcagcgaactgagagaggctcaattgtattcagtagacgtgactttggaccctgatacggcttacccatcattaattctgtccgacaatctgaggcaggtaaggtatagctatctgcagcaagacctgccagataaccccgagagattcaaccttttcccttgcgttctgggctcgccctgttttatcgcaggacggcattactgggaggtagaagtcggcgataaggcaaaatggaccattggagtgtgtgaggactctgtctgccgtaaaggcggagtgacatccgcccctcaaaatggattttgggctgtctcactgtggtacggcaaagagtactgggctctgaccagcccaatgaccgcgctgcccctgagaacaccactacagcgagtaggcatctttttagattacgacgccggagaggtcagcttctataatgttactgagagatgtcacacattcacatttagccatgccacattttgtggcccagtgcgtccatacttcagtctgtcctactcaggcggtaagtccgctgctcccttaattatctgtccaatgtctggcatagacggattcagcggccatgtcgggaaccatgggcactcgatggagacttctccttag

SEQ ID NO: 165844 - DNA, 624 bp, Artificial Sequence
  derived and/or modified sequence
tagttgagggaggctcagttgtactccgtcgacgtgacactggatcccgatactgcttatccttctctgatacttagcgataatctcaggcaggttagatatagctacctgcaacaagatctcccagataatccagaaaggttcaacttgttcccctgtgtgttaggctccccatgcttcatcgcaggcaggcattattgggaggtggaagtcggagacaaggcaaagtggactatcggcgtgtgcgaagattctgtgtgtcgcaaaggtggcgtgacgtctgctccccaaaacggcttttgggcggtgtctttgtggtacgggaaggaatactgggctttgacctctcccatgacagctctgcctctgagaacaccgcttcagcgagtcggtattttcttggattatgatgcaggggaggtgtcgttttacaatgtgaccgagaggtgtcacacattcacatttagtcacgctaccttttgtggcccagttagaccgtacttctcgctctcatactcaggcggtaagagtgctgctccactaatcatctgccctatgtctggtatcgatgggttcagcggtcacgtcgggaatcatggacattccatggaaacatcaccatag

SEQ ID NO: 165845 - DNA, 1077 bp, Artificial Sequence
  derived and/or modified sequence
atggcatcaggctccgtagcagagtgtctccagcaggagacgacttgtcccgtgtgcttacaatattttgcagaaccaatgatgctggattgcggccacaacatttgttgtgcatgtctggccagatgttggggaactgctgagacaaacgtgagctgtccccaatgtcgggagaccttcccccagcgccacatgcgtcctaatcggcatctggctaacgtcacccaactggttaagcaactaaggacagagaggccttcagggcctggcggtgagatgggagtgtgcgaaaaacatagagagccactgaagctttactgcgaggaagaccagatgcctatatgcgtggtctgtgatcgctcaagagagcatcgcggtcactctgtgttacctttagaagaagctgtggagggcttcaaagaacagatccagaatcagctggatcatctcaagcgagtcaaagatttaaagaagcgtcgcagagctcagggcgaacaggcccgtgcggagctgttgagcctgactcagatggaacgagagaagatcgtctgggagtttgaacagttgtaccattcactaaaagaacatgaataccgacttttagcacgcctagaggagctggaccttgcaatatacaactccattaacggggctataacccagttttcttgcaacatttcccacctatcatctctgattgctcagctggaagagaaacagcagcagcccactcgagagttgctacaagatataggggatacccttagccgcgctgagcgcatccgcattcccgaaccgtggattacaccgccagacctccaggagaagatccatatttttgcccagaagtgccttttcctgaccgagagcttaaaacagtttacggagaagatgcagagtgacatggagaaaatacaggaactcagagaggcccaactgtactccgtggacgtcacgctggacccggacaccgcgtaccctagcttgatactgagcgacaacctgcgtcaggtgcgctactcttacctgcaacaggatctgcccgacaaccctgaacgcagcccttcgactacttag

SEQ ID NO: 165846 - DNA, 747 bp, Artificial Sequence
  derived and/or modified sequence
taacttaagcaattcactgaaaagatgcagtcagacatggaaaaaatccaggaaagcgctgactctctcgaaggaggtatcctggatctaggcagcgtgctttcacacatcctgcctgtgtccgaacttagggaggcccagctctattcagtggatgtgaccctagatcctgacacagcatatcctagcttgatcttgtctgacaatcttagacaagtgaggtactcctatcttcagcaagatctcccagacaatcctgagcgcttcaacctttttccgtgtgtcttgggaagcccctgcttcattgctgggaggcactactgggaggtcgaggtcggcgataaggcaaaatggactataggtgtgtgtgaggactcagtttgtcgtaagggaggcgtgacaagcgctccgcagaacgggttttgggcggtgtccctgtggtacggcaaagaatattgggccctcacaagcccaatgactgctctacctctgagaactcctctgcaaagagtcggaatctttcttgactacgatgcaggcgaggtgtccttctacaatgtaacagagaggtgccacactttcacctttagtcacgccacgttttgtggaccagtgagaccttacttttcgctgtcatattccggcggaaaaagcgcagcacctctgataatttgcccaatgtctggaatcgatggtttctcaggacacgtcgggaaccacggacactctatggagacctccccttag

SEQ ID NO: 165847 - DNA, 750 bp, Artificial Sequence
  derived and/or modified sequence
atggcatctggaagcgtggcagagtgtttacaacaggaaaccacctgcccagtttgtttacagtacttcgcggagcctatgatgctggactgtggtcacaacatctgttgcgcttgtcttgctcgatgttggggcactgctgagaccaatgtgtcatgccctcagtgccgagagacatttccccaacgacacatgcggccaaataggcatctggcgaatgtgacacaactggtcaaacagcttcggacagagcgcccatcagggccaggaggggaaatgggcgtgtgcgagaaacaccgcgaaccccttaagctatactgtgaggaggatcagatgcctatctgcgttgtgtgtgataggtcacgggaacacagaggccactccgtcctgcctctggaggaggcggtggagggcttcaaggagcagatacagaatcagttggaccacctgaagagggtgaaggatctgaagaagaggagacgcgctcaaggggaacaggctagggccgaactactctcactgacgcagatggagcgcgaaaagattgtttgggagtttgaacagctttatcactcattaaaagagcacgaatatagacttctcgctcgccttgaagaactggatctagctatctataatagcatcaacggggcaattacccaattttcatgcaacattagccatctgagttcactgatcgctcaacttgaggagaagcagcagcaaccaactcgcgagttattacagtag

SEQ ID NO: 165848 - DNA, 2686 bp, Artificial Sequence
  derived and/or modified sequence
tttacgctgccgccggcatccgctcggacgcggccacgttgtcttgcgcgctttgcccgcctggccctgggactctgaccctcggctaccctttcctgccccactagcgtggccgcgagcctcggtgagccggccgtattcccgctctcgcttagggggcacaggcgcaggcatcggcccggccactccaagccttcggtgcgcgggcgcgtctgggatacgggcccgggaggcgccgccctccgtccgcccggtgcctctcaggaacagcgaaccggagagagcgccggagagttgggctcagtgcagagctcggcgccggggcccatgcccgtgcgcccccgcaggccggcgccatggcctccgggagtgtggccgagtgcctgcagcaggagaccacctgccccgtgtgcctgcagtacttcgcagagcccatgatgctcgactgcggccataacatctgttgcgcgtgcctcgcccgctgctggggcacggcagagactaacgtgtcgtgcccgcagtgccgggagaccttcccgcagaggcacatgcggcccaaccggcacctggccaacgtgacccaactggtaaagcagctgcgcaccgagcggccgtcggggcccggcggcgagatgggcgtgtgcgagaagcaccgcgagcccctgaagctgtactgcgaggaggaccagatgcccatctgcgtggtgtgcgaccgctcccgcgagcaccgcggccacagcgtgctgccgctcgaggaggcggtggagggcttcaaggagcaaatccagaaccagctcgaccatttaaaaagagtgaaagatttaaagaagagacgtcgggcccagggggaacaggcacgagctgaactcttgagcctaacccagatggagagggagaagattgtttgggagtttgagcagctgtatcactccttaaaggagcatgagtatcgcctcctggcccgccttgaggagctagacttggccatctacaatagcatcaatggtgccatcacccagttctcttgcaacatctcccacctcagcagcctgatcgctcagctagaagagaagcagcagcagcccaccagggagctcctgcaggacattggggacacattgagcagggctgaaagaatcaggattcctgaaccttggatcacacctccagatttgcaagagaaaatccacatttttgcccaaaaatgtctattcttgacggagagtctaaagcagttcacagaaaaaatgcagtcagatatggagaaaatccaagaattaagagaggctcagttatactcagtggacgtgactctggacccagacacggcctaccccagcctgatcctctctgataatctgcggcaagtgcggtacagttacctccaacaggacctgcctgacaaccccgagaggtctccttctacaacgtgacagagaggtgtcacaccttcactttctctcatgctaccttttgtgggcctgtccggccctacttcagtctgagttactcgggagggaaaagtgcagctcctctgatcatctgccccatgagtgggatagatgggttttctggccatgttgggaatcatggtcattccatggagacctccccttgaggaggtgaattcaggccaaaagggctgttggctgtaatcctacgccaggcacaaggcatcttgttgccttgccacgtcctgtcacagctgggtatccttaccatgttccacgcccttgcagtgggagacaggatgtccatgttctctaccatccttttccttcccatgcagattgtgaaatgtaatgagatgtatcaagatatcctagaaataaaaaccagatgtccacctccagtgtttcatactttctggttttacacatcgctggagggataaagagtatggataatctttggatttggagagccgttcaagatacttccagcttcttggctcagcctggcttcctctggttcagccccacataatgattatggctatttgctgtcatttctgggctagggctcctttctaacaacctagactggaataaggccctgtcagcatggctccctttatcccagttttccgtctgggaacagtacctctgcccctgattcccaatgtgccatagttttattaactccattaaagaagcctgtatgtgttttggttagttacagttattttacaataatggtgggtaatggccccacctctgttatgagataatgttctaatcaatgtctctgcctttgtatcttttctgagggctttgtctgttctcttcattctaatgaaaggtgtattctagtgctgggtgcatatcatccaggataatattctgcccaactccatcctctgttactagatcccttaccagtcacatttgtggactggtggccagtcgtataccatccctggaaggattctgggacaatattccagggattcattgacttcttggctccttttctccatttcctttgggggaagggggaattgaccatgcttaagtgcatcctatcaaggggcagctccgtccccatggccattggatcatgagacactctgaagtcagaaggctggggcagatcacttcaagcaagcccccatgatggttctcagtcctgcttctctgtgggtacgtgcccctctgtttaaaaataaactgaatatggatgttta

SEQ ID NO: 165849 - DNA, 2967 bp, Artificial Sequence
  derived and/or modified sequence
gtttacgctgccgccggcatccgctcggacgcggccacgttgtcttgcgcgctttgcccgcctggccctgggactctgaccctcggctaccctttcctgccccactagcgtggccgcgagcctcggtgagccggccgtattcccgctctcgcttagggggcacaggcgcaggcatcggcccggccactccaagccttcggtgcgcgggcgcgtctgggatacgggcccgggaggcgccgccctccgtccgcccggtgcctctcaggaacagcgaaccggagagagcgccggagagttgggctcagtgcagagctcggcgccggggcccatgcccgtgcgcccccgcaggccggcgccatggcctccgggagtgtggccgagtgcctgcagcaggagaccacctgccccgtgtgcctgcagtacttcgcagagcccatgatgctcgactgcggccataacatctgttgcgcgtgcctcgcccgctgctggggcacggcagagactaacgtgtcgtgcccgcagtgccgggagaccttcccgcagaggcacatgcggcccaaccggcacctggccaacgtgacccaactggtaaagcagctgcgcaccgagcggccgtcggggcccggcggcgagatgggcgtgtgcgagaagcaccgcgagcccctgaagctgtactgcgaggaggaccagatgcccatctgcgtggtgtgcgaccgctcccgcgagcaccgcggccacagcgtgctgccgctcgaggaggcggtggagggcttcaaggagcaaatccagaaccagctcgaccatttaaaaagagtgaaagatttaaagaagagacgtcgggcccagggggaacaggcacgagctgaactcttgagcctaacccagatggagagggagaagattgtttgggagtttgagcagctgtatcactccttaaaggagcatgagtatcgcctcctggcccgccttgaggagctagacttggccatctacaatagcatcaatggtgccatcacccagttctcttgcaacatctcccacctcagcagcctgatcgctcagctagaagagaagcagcagcagcccaccagggagctcctgcaggacattggggacacattgagcagggctgaaagaatcaggattcctgaaccttggatcacacctccagatttgcaagagaaaatccacatttttgcccaaaaatgtctattcttgacggagagtctaaagcagttcacagaaaaaatgcagtcagatatggagaaaatccaagaattaagagaggctcagttatactcagtggacgtgactctggacccagacacggcctaccccagcctgatcctctctgataatctgcggcaagtgcggtacagttacctccaacaggacctgcctgacaaccccgagaggttcaatctgtttccctgtgtcttgggctctccatgcttcatcgccgggagacattattgggaggtagaggtgggagataaagccaagtggaccataggtgtctgtgaagactcagtgtgcagaaaaggtggagtaacctcagccccccagaatggattctgggcagtgtctttgtggtatgggaaagaatattgggctcttacctccccaatgactgccctacccctgcggaccccgctccagcgggtggggattttcttggactatgatgctggtgaggtctccttctacaacgtgacagagaggtgtcacaccttcactttctctcatgctaccttttgtgggcctgtccggccctacttcagtctgagttactcgggagggaaaagtgcagctcctctgatcatctgccccatgagtgggatagatgggttttctggccatgttgggaatcatggtcattccatggagacctccccttgaggaggtgaattcaggccaaaagggctgttggctgtaatcctacgccaggcacaaggcatcttgttgccttgccacgtcctgtcacagctgggtatccttaccatgttccacgcccttgcagtgggagacaggatgtccatgttctctaccatccttttccttcccatgcagattgtgaaatgtaatgagatgtatcaagatatcctagaaataaaaaccagatgtccacctccagtgtttcatactttctggttttacacatcgctggagggataaagagtatggataatctttggatttggagagccgttcaagatacttccagcttcttggctcagcctggcttcctctggttcagccccacataatgattatggctatttgctgtcatttctgggctagggctcctttctaacaacctagactggaataaggccctgtcagcatggctccctttatcccagttttccgtctgggaacagtacctctgcccctgattcccaatgtgccatagttttattaactccattaaagaagcctgtatgtgttttggttagttacagttattttacaataatggtgggtaatggccccacctctgttatgagataatgttctaatcaatgtctctgcctttgtatcttttctgagggctttgtctgttctcttcattctaatgaaaggtgtattctagtgctgggtgcatatcatccaggataatattctgcccaactccatcctctgttactagatcccttaccagtcacatttgtggactggtggccagtcgtataccatccctggaaggattctgggacaatattccagggattcattgacttcttggctccttttctccatttcctttgggggaagggggaattgaccatgcttaagtgcatcctatcaaggggcagctccgtccccatggccattggatcatgagacactctgaagtcagaaggctggggcagatcacttcaagcaagcccccatgatggttctcagtcctgcttctctgtgggtacgtgcccctctgtttaaaaataaactgaatatggatgttta

SEQ ID NO: 165850 - DNA, 1813 bp, Artificial Sequence
  derived and/or modified sequence
tctaaagcagttcacagaaaaaatgcagtcagatatggagaaaatccaagaatcagctgactcactggaaggtggaattcttgatcttggctcagttttatcccatattctaccagtctcagaattaagagaggctcagttatactcagtggacgtgactctggacccagacacggcctaccccagcctgatcctctctgataatctgcggcaagtgcggtacagttacctccaacaggacctgcctgacaaccccgagaggttcaatctgtttccctgtgtcttgggctctccatgcttcatcgccgggagacattattgggaggtagaggtgggagataaagccaagtggaccataggtgtctgtgaagactcagtgtgcagaaaaggtggagtaacctcagccccccagaatggattctgggcagtgtctttgtggtatgggaaagaatattgggctcttacctccccaatgactgccctacccctgcggaccccgctccagcgggtggggattttcttggactatgatgctggtgaggtctccttctacaacgtgacagagaggtgtcacaccttcactttctctcatgctaccttttgtgggcctgtccggccctacttcagtctgagttactcgggagggaaaagtgcagctcctctgatcatctgccccatgagtgggatagatgggttttctggccatgttgggaatcatggtcattccatggagacctccccttgaggaggtgaattcaggccaaaagggctgttggctgtaatcctacgccaggcacaaggcatcttgttgccttgccacgtcctgtcacagctgggtatccttaccatgttccacgcccttgcagtgggagacaggatgtccatgttctctaccatccttttccttcccatgcagattgtgaaatgtaatgagatgtatcaagatatcctagaaataaaaaccagatgtccacctccagtgtttcatactttctggttttacacatcgctggagggataaagagtatggataatctttggatttggagagccgttcaagatacttccagcttcttggctcagcctggcttcctctggttcagccccacataatgattatggctatttgctgtcatttctgggctagggctcctttctaacaacctagactggaataaggccctgtcagcatggctccctttatcccagttttccgtctgggaacagtacctctgcccctgattcccaatgtgccatagttttattaactccattaaagaagcctgtatgtgttttggttagttacagttattttacaataatggtgggtaatggccccacctctgttatgagataatgttctaatcaatgtctctgcctttgtatcttttctgagggctttgtctgttctcttcattctaatgaaaggtgtattctagtgctgggtgcatatcatccaggataatattctgcccaactccatcctctgttactagatcccttaccagtcacatttgtggactggtggccagtcgtataccatccctggaaggattctgggacaatattccagggattcattgacttcttggctccttttctccatttcctttgggggaagggggaattgaccatgcttaagtgcatcctatcaaggggcagctccgtccccatggccattggatcatgagacactctgaagtcagaaggctggggcagatcacttcaagcaagcccccatgatggttctcagtcctgcttctctgtgggtacgtgcccctctgtttaaaaataaactgaatatggatgttta

SEQ ID NO: 165851 - DNA, 2686 bp, Artificial Sequence
  derived and/or modified sequence
tttacgctgccgccggcatccgctcggacgcggccacgttgtcttgcgcgctttgcccgcctggccctgggactctgaccctcggctaccctttcctgccccactagcgtggccgcgagcctcggtgagccggccgtattcccgctctcgcttagggggcacaggcgcaggcatcggcccggccactccaagccttcggtgcgcgggcgcgtctgggatacgggcccgggaggcgccgccctccgtccgcccggtgcctctcaggaacagcgaaccggagagagcgccggagagttgggctcagtgcagagctcggcgccggggcccatgcccgtgcgcccccgcaggccggcgccatggcctccgggagtgtggccgagtgcctgcagcaggagaccacctgccccgtgtgcctgcagtacttcgcagagcccatgatgctcgactgcggccataacatctgttgcgcgtgcctcgcccgctgctggggcacggcagagactaacgtgtcgtgcccgcagtgccgggagaccttcccgcagaggcacatgcggcccaaccggcacctggccaacgtgacccaactggtgaagcagctgcgcaccgagcggccgtcggggcccggcggcgagatgggcgtgtgcgagaagcaccgcgagcccctgaagctgtactgcgaggaggaccagatgcccatctgcgtggtgtgcgaccgctcccgcgagcaccgcggccacagcgtgctgccgctcgaggaggcggtggagggcttcaaggagcaaatccagaaccagctcgaccatttaaaaagagtgaaagatttaaagaagagacgtcgggcccagggggaacaggcacgagctgaactcttgagcctaacccagatggagagggagaagattgtttgggagtttgagcagctgtatcactccttaaaggagcatgagtatcgcctcctggcccgccttgaggagctagacttggccatctacaatagcatcaatggtgccatcacccagttctcttgcaacatctcccacctcagcagcctgatcgctcagctagaagagaagcagcagcagcccaccagggagctcctgcaggacattggggacacattgagcagggctgaaagaatcaggattcctgaaccttggatcacacctccagatttgcaagagaaaatccacatttttgcccaaaaatgtctattcttgacggagagtctaaagcagttcacagaaaaaatgcagtcagatatggagaaaatccaagaattaagagaggctcagttatactcagtggacgtgactctggacccagacacggcctaccccagcctgatcctctctgataatctgcggcaagtgcggtacagttacctccaacaggacctgcctgacaaccccgagaggtctccttctacaacgtgacagagaggtgtcacaccttcactttctctcatgctaccttttgtgggcctgtccggccctacttcagtctgagttactcgggagggaaaagtgcagctcctctgatcatctgccccatgagtgggatagatgggttttctggccatgttgggaatcatggtcattccatggagacctccccttgaggaggtgaattcaggccaaaagggctgttggctgtaatcctacgccaggcacaaggcatcttgttgccttgccacgtcctgtcacagctgggtatccttaccatgttccacgcccttgcagtgggagacaggatgtccatgttctctaccatccttttccttcccatgcagattgtgaaatgtaatgagatgtatcaagatatcctagaaataaaaaccagatgtccacctccagtgtttcatactttctggttttacacatcgctggagggataaagagtatggataatctttggatttggagagccgttcaagatacttccagcttcttggctcagcctggcttcctctggttcagccccacataatgattatggctatttgctgtcatttctgggctagggctcctttctaacaacctagactggaataaggccctgtcagcatggctccctttatcccagttttccgtctgggaacagtacctctgcccctgattcccaatgtgccatagttttattaactccattaaagaagcctgtatgtgttttggttagttacagttattttacaataatggtgggtaatggccccacctctgttatgagataatgttctaatcaatgtctctgcctttgtatcttttctgagggctttgtctgttctcttcattctaatgaaaggtgtattctagtgctgggtgcatatcatccaggataatattctgcccaactccatcctctgttactagatcccttaccagtcacatttgtggactggtggccagtcgtataccatccctggaaggattctgggacaatattccagggattcattgacttcttggctccttttctccatttcctttgggggaagggggaattgaccatgcttaagtgcatcctatcaaggggcagctccgtccccatggccattggatcatgagacactctgaagtcagaaggctggggcagatcacttcaagcaagcccccatgatggttctcagtcctgcttctctgtgggtacgtgcccctctgtttaaaaataaactgaatatggatgttta

SEQ ID NO: 165852 - DNA, 1103 bp, Artificial Sequence
  derived and/or modified sequence
tttacgctgccgccggcatccgctcggacgcggccacgttgtcttgcgcgctttgcccgcctggccctgggactctgaccctcggctaccctttcctgccccactagcgtggccgcgagcctcggtgagccggccgtattcccgctctcgcttagggggcacaggcgcaggcatcggcccggccactccaagccttcggtgcgcgggcgcgtctgggatacgggcccgggaggcgccgccctccgtccgcccggtgcctctcaggaacagcgaaccggagagagcgccggagagttgggctcagtgcggagctcggcgccggggcccatgcccgtgcgcccccgcaggccggcgccatggcctccgggagtgtggccgagtgcctgcagcaggagaccacctgccccgtgtgcctgcagtacttcgcagagcccatgatgctcgactgcggccataacatctgttgcgcgtgcctcgcccgctgctggggcacggcagagactaacgtgtcgtgcccgcagtgccgggagaccttcccgcagaggcacatgcggcccaaccggcacctggccaacgtgacccaactggtaaagcagctgcgcaccgagcggccgtcggggcccggcggcgagatgggcgtgtgcgagaagcaccgcgagcccctgaagctgtactgcgaggaggaccagatgcccatctgcgtggtgtgcgaccgctcccgcgagcaccgcggccacagcgtgctgccgctcgaggaggcggtggagggcttcaaggagcaaatccagaaccagctcgaccatttaaaaagagtgaaagatttaaagaagagacgtcgggcccagggggaacaggcacgagctgaactcttgagcctaacccagatggagagggagaagattgtttgggagtttgagcagctgtatcactccttaaaggagcatgagtatcgcctcctggcccgccttgaggagctagacttggccatctacaatagcatcaatggtgccatcacccagttctcttgcaacatctcccacctcagcagcctgatcgctcagctagaagagaagcagcagcagcccaccagggagctcctgcag

SEQ ID NO: 165853 - DNA, 2901 bp, Artificial Sequence
  derived and/or modified sequence
cctgggactctgaccctcggctaccctttcctgccccactagcgtggccgcgagcctcggtgagccggccgtattcccgctctcgcttagggggcacaggcgcaggcatcggcccggccactccaagccttcggtgcgcgggcgcgtctgggatacgggcccgggaggcgccgccctccgtccgcccggtgcctctcaggaacagcgaaccggagagagcgccggagagttgggctcagtgcggagctcggcgccggggcccatgcccgtgcgcccccgcaggccggcgccatggcctccgggagtgtggccgagtgcctgcagcaggagaccacctgccccgtgtgcctgcagtacttcgcagagcccatgatgctcgactgcggccataacatctgttgcgcgtgcctcgcccgctgctggggcacggcagagactaacgtgtcgtgcccgcagtgccgggagaccttcccgcagaggcacatgcggcccaaccggcacctggccaacgtgacccaactggtaaagcagctgcgcaccgagcggccgtcggggcccggcggcgagatgggcgtgtgcgagaagcaccgcgagcccctgaagctgtactgcgaggaggaccagatgcccatctgcgtggtgtgcgaccgctcccgcgagcaccgcggccacagcgtgctgccgctcgaggaggcggtggagggcttcaaggagcaaatccagaaccagctcgaccatttaaaaagagtgaaagatttaaagaagagacgtcgggcccagggggaacaggcacgagctgaactcttgagcctaacccagatggagagggagaagattgtttgggagtttgagcagctgtatcactccttaaaggagcatgagtatcgcctcctggcccgccttgaggagctagacttggccatctacaatagcatcaatggtgccatcacccagttctcttgcaacatctcccacctcagcagcctgatcgctcagctagaagagaagcagcagcagcccaccagggagctcctgcaggacattggggacacattgagcagggctgaaagaatcaggattcctgaaccttggatcacacctccagatttgcaagagaaaatccacatttttgcccaaaaatgtctattcttgacggagagtctaaagcagttcacagaaaaaatgcagtcagatatggagaaaatccaagaattaagagaggctcagttatactcagtggacgtgactctggacccagacacggcctaccccagcctgatcctctctgataatctgcggcaagtgcggtacagttacctccaacaggacctgcctgacaaccccgagaggttcaatctgtttccctgtgtcttgggctctccatgcttcatcgccgggagacattattgggaggtagaggtgggagataaagccaagtggaccataggtgtctgtgaagactcagtgtgcagaaaaggtggagtaacctcagccccccagaatggattctgggcagtgtctttgtggtatgggaaagaatattgggctcttacctccccaatgactgccctacccctgcggaccccgctccagcgggtggggattttcttggactatgatgctggtgaggtctccttctacaacgtgacagagaggtgtcacaccttcactttctctcatgctaccttttgtgggcctgtccggccctacttcagtctgagttactcgggagggaaaagtgcagctcctctgatcatctgccccatgagtgggatagatgggttttctggccatgttgggaatcatggtcattccatggagacctccccttgaggaggtgaattcaggccaaaagggctgttggctgtaatcctacgccaggcacaaggcatcttgttgccttgccacgtcctgtcacagctgggtatccttaccatgttccacgcccttgcagtgggagacaggatgtccatgttctctaccatccttttccttcccatgcagattgtgaaatgtaatgagatgtatcaagatatcctagaaataaaaaccagatgtccacctccagtgtttcatactttctggttttacacatcgctggagggataaagagtatggataatctttggatttggagagccgttcaagatacttccagcttcttggctcagcctggcttcctctggttcagccccacataatgattatggctatttgctgtcatttctgggctagggctcctttctaacaacctagactggaataaggccctgtcagcatggctccctttatcccagttttccgtctgggaacagtacctctgcccctgattcccaatgtgccatagttttattaactccattaaagaagcctgtatgtgttttggttagttacagttattttacaataatggtgggtaatggccccacctctgttatgagataatgttctaatcaatgtctctgcctttgtatcttttctgagggctttgtctgttctcttcattctaatgaaaggtgtattctagtgctgggtgcatatcatccaggataatattctgcccaactccatcctctgttactagatcccttaccagtcacatttgtggactggtggccagtcgtataccatccctggaaggattctgggacaatattccagggattcattgacttcttggctccttttctccatttcctttgggggaagggggaattgaccatgcttaagtgcatcctatcaaggggcagctccgtccccatggccattggatcatgagacactctgaagtcagaaggctggggcagatcacttcaagcaagcccccatgatggttctcagtcctgcttctctgtgggtacgtgcccctctgtttaaaaataaactgaatatggatgttta

SEQ ID NO: 165854 - DNA, 2967 bp, Artificial Sequence
  derived and/or modified sequence
gtttacgctgccgccggcatccgctcggacgcggccacgttgtcttgcgcgctttgcccgcctggccctgggactctgaccctcggctaccctttcctgccccactagcgtggccgcgagcctcggtgagccggccgtattcccgctctcgcttagggggcacaggcgcaggcatcggcccggccactccaagccttcggtgcgcgggcgcgtctgggatacgggcccgggaggcgccgccctccgtccgcccggtgcctctcaggaacagcgaaccggagagagcgccggagagttgggctcagtgcagagctcggcgccggggcccatgcccgtgcgcccccgcaggccggcgccatggcctccgggagtgtggccgagtgcctgcagcaggagaccacctgccccgtgtgcctgcagtacttcgcagagcccatgatgctcgactgcggccataacatctgttgcgcgtgcctcgcccgctgctggggcacggcagagactaacgtgtcgtgcccgcagtgccgggagaccttcccgcagaggcacatgcggcccaaccggcacctggccaacgtgacccaactggtgaagcagctgcgcaccgagcggccgtcggggcccggcggcgagatgggcgtgtgcgagaagcaccgcgagcccctgaagctgtactgcgaggaggaccagatgcccatctgcgtggtgtgcgaccgctcccgcgagcaccgcggccacagcgtgctgccgctcgaggaggcggtggagggcttcaaggagcaaatccagaaccagctcgaccatttaaaaagagtgaaagatttaaagaagagacgtcgggcccagggggaacaggcacgagctgaactcttgagcctaacccagatggagagggagaagattgtttgggagtttgagcagctgtatcactccttaaaggagcatgagtatcgcctcctggcccgccttgaggagctagacttggccatctacaatagcatcaatggtgccatcacccagttctcttgcaacatctcccacctcagcagcctgatcgctcagctagaagagaagcagcagcagcccaccagggagctcctgcaggacattggggacacattgagcagggctgaaagaatcaggattcctgaaccttggatcacacctccagatttgcaagagaaaatccacatttttgcccaaaaatgtctattcttgacggagagtctaaagcagttcacagaaaaaatgcagtcagatatggagaaaatccaagaattaagagaggctcagttatactcagtggacgtgactctggacccagacacggcctaccccagcctgatcctctctgataatctgcggcaagtgcggtacagttacctccaacaggacctgcctgacaaccccgagaggttcaatctgtttccctgtgtcttgggctctccatgcttcatcgccgggagacattattgggaggtagaggtgggagataaagccaagtggaccataggtgtctgtgaagactcagtgtgcagaaaaggtggagtaacctcagccccccagaatggattctgggcagtgtctttgtggtatgggaaagaatattgggctcttacctccccaatgactgccctacccctgcggaccccgctccagcgggtggggattttcttggactatgatgctggtgaggtctccttctacaacgtgacagagaggtgtcacaccttcactttctctcatgctaccttttgtgggcctgtccggccctacttcagtctgagttactcgggagggaaaagtgcagctcctctgatcatctgccccatgagtgggatagatgggttttctggccatgttgggaatcatggtcattccatggagacctccccttgaggaggtgaattcaggccaaaagggctgttggctgtaatcctacgccaggcacaaggcatcttgttgccttgccacgtcctgtcacagctgggtatccttaccatgttccacgcccttgcagtgggagacaggatgtccatgttctctaccatccttttccttcccatgcagattgtgaaatgtaatgagatgtatcaagatatcctagaaataaaaaccagatgtccacctccagtgtttcatactttctggttttacacatcgctggagggataaagagtatggataatctttggatttggagagccgttcaagatacttccagcttcttggctcagcctggcttcctctggttcagccccacataatgattatggctatttgctgtcatttctgggctagggctcctttctaacaacctagactggaataaggccctgtcagcatggctccctttatcccagttttccgtctgggaacagtacctctgcccctgattcccaatgtgccatagttttattaactccattaaagaagcctgtatgtgttttggttagttacagttattttacaataatggtgggtaatggccccacctctgttatgagataatgttctaatcaatgtctctgcctttgtatcttttctgagggctttgtctgttctcttcattctaatgaaaggtgtattctagtgctgggtgcatatcatccaggataatattctgcccaactccatcctctgttactagatcccttaccagtcacatttgtggactggtggccagtcgtataccatccctggaaggattctgggacaatattccagggattcattgacttcttggctccttttctccatttcctttgggggaagggggaattgaccatgcttaagtgcatcctatcaaggggcagctccgtccccatggccattggatcatgagacactctgaagtcagaaggctggggcagatcacttcaagcaagcccccatgatggttctcagtcctgcttctctgtgggtacgtgcccctctgtttaaaaataaactgaatatggatgttta

SEQ ID NO: 165855 - DNA, 1103 bp, Artificial Sequence
  derived and/or modified sequence
tttacgctgccgccggcatccgctcggacgcggccacgttgtcttgcgcgctttgcccgcctggccctgggactctgaccctcggctaccctttcctgccccactagcgtggccgcgagcctcggtgagccggccgtattcccgctctcgcttagggggcacaggcgcaggcatcggcccggccactccaagccttcggtgcgcgggcgcgtctgggatacgggcccgggaggcgccgccctccgtccgcccggtgcctctcaggaacagcgaaccggagagagcgccggagagttgggctcagtgcagagctcggcgccggggcccatgcccgtgcgcccccgcaggccggcgccatggcctccgggagtgtggccgagtgcctgcagcaggagaccacctgccccgtgtgcctgcagtacttcgcagagcccatgatgctcgactgcggccataacatctgttgcgcgtgcctcgcccgctgctggggcacggcagagactaacgtgtcgtgcccgcagtgccgggagaccttcccgcagaggcacatgcggcccaaccggcacctggccaacgtgacccaactggtaaagcagctgcgcaccgagcggccgtcggggcccggcggcgagatgggcgtgtgcgagaagcaccgcgagcccctgaagctgtactgcgaggaggaccagatgcccatctgcgtggtgtgcgaccgctcccgcgagcaccgcggccacagcgtgctgccgctcgaggaggcggtggagggcttcaaggagcaaatccagaaccagctcgaccatttaaaaagagtgaaagatttaaagaagagacgtcgggcccagggggaacaggcacgagctgaactcttgagcctaacccagatggagagggagaagattgtttgggagtttgagcagctgtatcactccttaaaggagcatgagtatcgcctcctggcccgccttgaggagctagacttggccatctacaatagcatcaatggtgccatcacccagttctcttgcaacatctcccacctcagcagcctgatcgctcagctagaagagaagcagcagcagcccaccagggagctcctgcag

SEQ ID NO: 165856 - DNA, 1812 bp, Artificial Sequence
  derived and/or modified sequence
ctaaagcagttcacagaaaaaatgcagtcagatatggagaaaatccaagaatcagctgactcactggaaggtggaattcttgatcttggctcagttttatcccatattctaccagtctcagaattaagagaggctcagttatactcagtggacgtgactctggacccagacacggcctaccccagcctgatcctctctgataatctgcggcaagtgcggtacagttacctccaacaggacctgcctgacaaccccgagaggttcaatctgtttccctgtgtcttgggctctccatgcttcatcgccgggagacattattgggaggtagaggtgggagataaagccaagtggaccataggtgtctgtgaagactcagtgtgcagaaaaggtggagtaacctcagccccccagaatggattctgggcagtgtctttgtggtatgggaaagaatattgggctcttacctccccaatgactgccctacccctgcggaccccgctccagcgggtggggattttcttggactatgatgctggtgaggtctccttctacaacgtgacagagaggtgtcacaccttcactttctctcatgctaccttttgtgggcctgtccggccctacttcagtctgagttactcgggagggaaaagtgcagctcctctgatcatctgccccatgagtgggatagatgggttttctggccatgttgggaatcatggtcattccatggagacctccccttgaggaggtgaattcaggccaaaagggctgttggctgtaatcctacgccaggcacaaggcatcttgttgccttgccacgtcctgtcacagctgggtatccttaccatgttccacgcccttgcagtgggagacaggatgtccatgttctctaccatccttttccttcccatgcagattgtgaaatgtaatgagatgtatcaagatatcctagaaataaaaaccagatgtccacctccagtgtttcatactttctggttttacacatcgctggagggataaagagtatggataatctttggatttggagagccgttcaagatacttccagcttcttggctcagcctggcttcctctggttcagccccacataatgattatggctatttgctgtcatttctgggctagggctcctttctaacaacctagactggaataaggccctgtcagcatggctccctttatcccagttttccgtctgggaacagtacctctgcccctgattcccaatgtgccatagttttattaactccattaaagaagcctgtatgtgttttggttagttacagttattttacaataatggtgggtaatggccccacctctgttatgagataatgttctaatcaatgtctctgcctttgtatcttttctgagggctttgtctgttctcttcattctaatgaaaggtgtattctagtgctgggtgcatatcatccaggataatattctgcccaactccatcctctgttactagatcccttaccagtcacatttgtggactggtggccagtcgtataccatccctggaaggattctgggacaatattccagggattcattgacttcttggctccttttctccatttcctttgggggaagggggaattgaccatgcttaagtgcatcctatcaaggggcagctccgtccccatggccattggatcatgagacactctgaagtcagaaggctggggcagatcacttcaagcaagcccccatgatggttctcagtcctgcttctctgtgggtacgtgcccctctgtttaaaaataaactgaatatggatgttta

SEQ ID NO: 165857 - DNA, 1104 bp, Artificial Sequence
  derived and/or modified sequence
gtttacgctgccgccggcatccgctcggacgcggccacgttgtcttgcgcgctttgcccgcctggccctgggactctgaccctcggctaccctttcctgccccactagcgtggccgcgagcctcggtgagccggccgtattcccgctctcgcttagggggcacaggcgcaggcatcggcccggccactccaagccttcggtgcgcgggcgcgtctgggatacgggcccgggaggcgccgccctccgtccgcccggtgcctctcaggaacagcgaaccggagagagcgccggagagttgggctcagtgcagagctcggcgccggggcccatgcccgtgcgcccccgcaggccggcgccatggcctccgggagtgtggccgagtgcctgcagcaggagaccacctgccccgtgtgcctgcagtacttcgcagagcccatgatgctcgactgcggccataacatctgttgcgcgtgcctcgcccgctgctggggcacggcagagactaacgtgtcgtgcccgcagtgccgggagaccttcccgcagaggcacatgcggcccaaccggcacctggccaacgtgacccaactggtaaagcagctgcgcaccgagcggccgtcggggcccggcggcgagatgggcgtgtgcgagaagcaccgcgagcccctgaagctgtactgcgaggaggaccagatgcccatctgcgtggtgtgcgaccgctcccgcgagcaccgcggccacagcgtgctgccgctcgaggaggcggtggagggcttcaaggagcaaatccagaaccagctcgaccatttaaaaagagtgaaagatttaaagaagagacgtcgggcccagggggaacaggcacgagctgaactcttgagcctaacccagatggagagggagaagattgtttgggagtttgagcagctgtatcactccttaaaggagcatgagtatcgcctcctggcccgccttgaggagctagacttggccatctacaatagcatcaatggtgccatcacccagttctcttgcaacatctcccacctcagcagcctgatcgctcagctagaagagaagcagcagcagcccaccagggagctcctgcag

SEQ ID NO: 165858 - DNA, 1411 bp, Artificial Sequence
  derived and/or modified sequence
aattaagagaggctcagttatactcagtggacgtgactctggacccagacacggcctaccccagcctgatcctctctgataatctgcggcaagtgcggtacagttacctccaacaggacctgcctgacaaccccgagaggtctccttctacaacgtgacagagaggtgtcacaccttcactttctctcatgctaccttttgtgggcctgtccggccctacttcagtctgagttactcgggagggaaaagtgcagctcctctgatcatctgccccatgagtgggatagatgggttttctggccatgttgggaatcatggtcattccatggagacctccccttgaggaggtgaattcaggccaaaagggctgttggctgtaatcctacgccaggcacaaggcatcttgttgccttgccacgtcctgtcacagctgggtatccttaccatgttccacgcccttgcagtgggagacaggatgtccatgttctctaccatccttttccttcccatgcagattgtgaaatgtaatgagatgtatcaagatatcctagaaataaaaaccagatgtccacctccagtgtttcatactttctggttttacacatcgctggagggataaagagtatggataatctttggatttggagagccgttcaagatacttccagcttcttggctcagcctggcttcctctggttcagccccacataatgattatggctatttgctgtcatttctgggctagggctcctttctaacaacctagactggaataaggccctgtcagcatggctccctttatcccagttttccgtctgggaacagtacctctgcccctgattcccaatgtgccatagttttattaactccattaaagaagcctgtatgtgttttggttagttacagttattttacaataatggtgggtaatggccccacctctgttatgagataatgttctaatcaatgtctctgcctttgtatcttttctgagggctttgtctgttctcttcattctaatgaaaggtgtattctagtgctgggtgcatatcatccaggataatattctgcccaactccatcctctgttactagatcccttaccagtcacatttgtggactggtggccagtcgtataccatccctggaaggattctgggacaatattccagggattcattgacttcttggctccttttctccatttcctttgggggaagggggaattgaccatgcttaagtgcatcctatcaaggggcagctccgtccccatggccattggatcatgagacactctgaagtcagaaggctggggcagatcacttcaagcaagcccccatgatggttctcagtcctgcttctctgtgggtacgtgcccctctgtttaaaaataaactgaatatggatgttta

SEQ ID NO: 165859 - DNA, 1763 bp, Artificial Sequence
  derived and/or modified sequence
aatcagctgactcactggaaggtggaattcttgatcttggctcagttttatcccatattctaccagtctcagaattaagagaggctcagttatactcagtggacgtgactctggacccagacacggcctaccccagcctgatcctctctgataatctgcggcaagtgcggtacagttacctccaacaggacctgcctgacaaccccgagaggttcaatctgtttccctgtgtcttgggctctccatgcttcatcgccgggagacattattgggaggtagaggtgggagataaagccaagtggaccataggtgtctgtgaagactcagtgtgcagaaaaggtggagtaacctcagccccccagaatggattctgggcagtgtctttgtggtatgggaaagaatattgggctcttacctccccaatgactgccctacccctgcggaccccgctccagcgggtggggattttcttggactatgatgctggtgaggtctccttctacaacgtgacagagaggtgtcacaccttcactttctctcatgctaccttttgtgggcctgtccggccctacttcagtctgagttactcgggagggaaaagtgcagctcctctgatcatctgccccatgagtgggatagatgggttttctggccatgttgggaatcatggtcattccatggagacctccccttgaggaggtgaattcaggccaaaagggctgttggctgtaatcctacgccaggcacaaggcatcttgttgccttgccacgtcctgtcacagctgggtatccttaccatgttccacgcccttgcagtgggagacaggatgtccatgttctctaccatccttttccttcccatgcagattgtgaaatgtaatgagatgtatcaagatatcctagaaataaaaaccagatgtccacctccagtgtttcatactttctggttttacacatcgctggagggataaagagtatggataatctttggatttggagagccgttcaagatacttccagcttcttggctcagcctggcttcctctggttcagccccacataatgattatggctatttgctgtcatttctgggctagggctcctttctaacaacctagactggaataaggccctgtcagcatggctccctttatcccagttttccgtctgggaacagtacctctgcccctgattcccaatgtgccatagttttattaactccattaaagaagcctgtatgtgttttggttagttacagttattttacaataatggtgggtaatggccccacctctgttatgagataatgttctaatcaatgtctctgcctttgtatcttttctgagggctttgtctgttctcttcattctaatgaaaggtgtattctagtgctgggtgcatatcatccaggataatattctgcccaactccatcctctgttactagatcccttaccagtcacatttgtggactggtggccagtcgtataccatccctggaaggattctgggacaatattccagggattcattgacttcttggctccttttctccatttcctttgggggaagggggaattgaccatgcttaagtgcatcctatcaaggggcagctccgtccccatggccattggatcatgagacactctgaagtcagaaggctggggcagatcacttcaagcaagcccccatgatggttctcagtcctgcttctctgtgggtacgtgcccctctgtttaaaaataaactgaatatggatgttta

SEQ ID NO: 165860 - DNA, 1691 bp, Artificial Sequence
  derived and/or modified sequence
aattaagagaggctcagttatactcagtggacgtgactctggacccagacacggcctaccccagcctgatcctctctgataatctgcggcaagtgcggtacagttacctccaacaggacctgcctgacaaccccgagaggttcaatctgtttccctgtgtcttgggctctccatgcttcatcgccgggagacattattgggaggtagaggtgggagataaagccaagtggaccataggtgtctgtgaagactcagtgtgcagaaaaggtggagtaacctcagccccccagaatggattctgggcagtgtctttgtggtatgggaaagaatattgggctcttacctccccaatgactgccctacccctgcggaccccgctccagcgggtggggattttcttggactatgatgctggtgaggtctccttctacaacgtgacagagaggtgtcacaccttcactttctctcatgctaccttttgtgggcctgtccggccctacttcagtctgagttactcgggagggaaaagtgcagctcctctgatcatctgccccatgagtgggatagatgggttttctggccatgttgggaatcatggtcattccatggagacctccccttgaggaggtgaattcaggccaaaagggctgttggctgtaatcctacgccaggcacaaggcatcttgttgccttgccacgtcctgtcacagctgggtatccttaccatgttccacgcccttgcagtgggagacaggatgtccatgttctctaccatccttttccttcccatgcagattgtgaaatgtaatgagatgtatcaagatatcctagaaataaaaaccagatgtccacctccagtgtttcatactttctggttttacacatcgctggagggataaagagtatggataatctttggatttggagagccgttcaagatacttccagcttcttggctcagcctggcttcctctggttcagccccacataatgattatggctatttgctgtcatttctgggctagggctcctttctaacaacctagactggaataaggccctgtcagcatggctccctttatcccagttttccgtctgggaacagtacctctgcccctgattcccaatgtgccatagttttattaactccattaaagaagcctgtatgtgttttggttagttacagttattttacaataatggtgggtaatggccccacctctgttatgagataatgttctaatcaatgtctctgcctttgtatcttttctgagggctttgtctgttctcttcattctaatgaaaggtgtattctagtgctgggtgcatatcatccaggataatattctgcccaactccatcctctgttactagatcccttaccagtcacatttgtggactggtggccagtcgtataccatccctggaaggattctgggacaatattccagggattcattgacttcttggctccttttctccatttcctttgggggaagggggaattgaccatgcttaagtgcatcctatcaaggggcagctccgtccccatggccattggatcatgagacactctgaagtcagaaggctggggcagatcacttcaagcaagcccccatgatggttctcagtcctgcttctctgtgggtacgtgcccctctgtttaaaaataaactgaatatggatgttta

SEQ ID NO: 165861 - DNA, 2686 bp, Artificial Sequence
  derived and/or modified sequence
tttacgctgccgccggcatccgctcggacgcggccacgttgtcttgcgcgctttgcccgcctggccctgggactctgaccctcggctaccctttcctgccccactagcgtggccgcgagcctcggtgagccggccgtattcccgctctcgcttagggggcacaggcgcaggcatcggcccggccactccaagccttcggtgcgcgggcgcgtctgggatacgggcccgggaggcgccgccctccgtccgcccggtgcctctcaggaacagcgaaccggagagagcgccggagagttgggctcagtgcggagctcggcgccggggcccatgcccgtgcgcccccgcaggccggcgccatggcctccgggagtgtggccgagtgcctgcagcaggagaccacctgccccgtgtgcctgcagtacttcgcagagcccatgatgctcgactgcggccataacatctgttgcgcgtgcctcgcccgctgctggggcacggcagagactaacgtgtcgtgcccgcagtgccgggagaccttcccgcagaggcacatgcggcccaaccggcacctggccaacgtgacccaactggtaaagcagctgcgcaccgagcggccgtcggggcccggcggcgagatgggcgtgtgcgagaagcaccgcgagcccctgaagctgtactgcgaggaggaccagatgcccatctgcgtggtgtgcgaccgctcccgcgagcaccgcggccacagcgtgctgccgctcgaggaggcggtggagggcttcaaggagcaaatccagaaccagctcgaccatttaaaaagagtgaaagatttaaagaagagacgtcgggcccagggggaacaggcacgagctgaactcttgagcctaacccagatggagagggagaagattgtttgggagtttgagcagctgtatcactccttaaaggagcatgagtatcgcctcctggcccgccttgaggagctagacttggccatctacaatagcatcaatggtgccatcacccagttctcttgcaacatctcccacctcagcagcctgatcgctcagctagaagagaagcagcagcagcccaccagggagctcctgcaggacattggggacacattgagcagggctgaaagaatcaggattcctgaaccttggatcacacctccagatttgcaagagaaaatccacatttttgcccaaaaatgtctattcttgacggagagtctaaagcagttcacagaaaaaatgcagtcagatatggagaaaatccaagaattaagagaggctcagttatactcagtggacgtgactctggacccagacacggcctaccccagcctgatcctctctgataatctgcggcaagtgcggtacagttacctccaacaggacctgcctgacaaccccgagaggtctccttctacaacgtgacagagaggtgtcacaccttcactttctctcatgctaccttttgtgggcctgtccggccctacttcagtctgagttactcgggagggaaaagtgcagctcctctgatcatctgccccatgagtgggatagatgggttttctggccatgttgggaatcatggtcattccatggagacctccccttgaggaggtgaattcaggccaaaagggctgttggctgtaatcctacgccaggcacaaggcatcttgttgccttgccacgtcctgtcacagctgggtatccttaccatgttccacgcccttgcagtgggagacaggatgtccatgttctctaccatccttttccttcccatgcagattgtgaaatgtaatgagatgtatcaagatatcctagaaataaaaaccagatgtccacctccagtgtttcatactttctggttttacacatcgctggagggataaagagtatggataatctttggatttggagagccgttcaagatacttccagcttcttggctcagcctggcttcctctggttcagccccacataatgattatggctatttgctgtcatttctgggctagggctcctttctaacaacctagactggaataaggccctgtcagcatggctccctttatcccagttttccgtctgggaacagtacctctgcccctgattcccaatgtgccatagttttattaactccattaaagaagcctgtatgtgttttggttagttacagttattttacaataatggtgggtaatggccccacctctgttatgagataatgttctaatcaatgtctctgcctttgtatcttttctgagggctttgtctgttctcttcattctaatgaaaggtgtattctagtgctgggtgcatatcatccaggataatattctgcccaactccatcctctgttactagatcccttaccagtcacatttgtggactggtggccagtcgtataccatccctggaaggattctgggacaatattccagggattcattgacttcttggctccttttctccatttcctttgggggaagggggaattgaccatgcttaagtgcatcctatcaaggggcagctccgtccccatggccattggatcatgagacactctgaagtcagaaggctggggcagatcacttcaagcaagcccccatgatggttctcagtcctgcttctctgtgggtacgtgcccctctgtttaaaaataaactgaatatggatgttta

SEQ ID NO: 165862 - DNA, 1104 bp, Artificial Sequence
  derived and/or modified sequence
gtttacgctgccgccggcatccgctcggacgcggccacgttgtcttgcgcgctttgcccgcctggccctgggactctgaccctcggctaccctttcctgccccactagcgtggccgcgagcctcggtgagccggccgtattcccgctctcgcttagggggcacaggcgcaggcatcggcccggccactccaagccttcggtgcgcgggcgcgtctgggatacgggcccgggaggcgccgccctccgtccgcccggtgcctctcaggaacagcgaaccggagagagcgccggagagttgggctcagtgcggagctcggcgccggggcccatgcccgtgcgcccccgcaggccggcgccatggcctccgggagtgtggccgagtgcctgcagcaggagaccacctgccccgtgtgcctgcagtacttcgcagagcccatgatgctcgactgcggccataacatctgttgcgcgtgcctcgcccgctgctggggcacggcagagactaacgtgtcgtgcccgcagtgccgggagaccttcccgcagaggcacatgcggcccaaccggcacctggccaacgtgacccaactggtaaagcagctgcgcaccgagcggccgtcggggcccggcggcgagatgggcgtgtgcgagaagcaccgcgagcccctgaagctgtactgcgaggaggaccagatgcccatctgcgtggtgtgcgaccgctcccgcgagcaccgcggccacagcgtgctgccgctcgaggaggcggtggagggcttcaaggagcaaatccagaaccagctcgaccatttaaaaagagtgaaagatttaaagaagagacgtcgggcccagggggaacaggcacgagctgaactcttgagcctaacccagatggagagggagaagattgtttgggagtttgagcagctgtatcactccttaaaggagcatgagtatcgcctcctggcccgccttgaggagctagacttggccatctacaatagcatcaatggtgccatcacccagttctcttgcaacatctcccacctcagcagcctgatcgctcagctagaagagaagcagcagcagcccaccagggagctcctgcag

SEQ ID NO: 165863 - DNA, 393 bp, Artificial Sequence
  derived and/or modified sequence
atgcgactgtttacaggaatcgtgttttgtagcctggtgatgggcgtgactagtgagtcatggcgttcttttttcaaggaggccctccagggagtgggcgatatgggccgcgcctactgggacattatgatatcaaatcatcaaaattctaatcggtacctgtatgctcggggcaattatgacgctgctcagcggggacccgggggggtttgggcagctaagctgatatccaggtccagggtgtacttgcaaggcctcattgattgctatctcttcggcaactcctcaacagtcctggaggactcaaagtctaatgaaaaagcagaggagtggggcaggagcggtaaggacccagaccgatttcgtcccgatgggcttcctaagaaatactag

SEQ ID NO: 165864 - DNA, 393 bp, Artificial Sequence
  derived and/or modified sequence
atgaggctcttcaccggcatcgtgttctgcagcctggtgatgggcgtgaccagcgagagctggaggagcttcttcaaggaggccctgcagggcgtgggggacatgggccgggcctactgggacatcatgatcagcaaccaccagaacagcaaccgctacctgtatgcccggggcaactatgatgctgcccagaggggccctggaggagtgtgggccgccaagctgatcagccgcagccgggtgtacctgcagggcctgattgactgctacctgtttggaaacagcagcacagtgctggaggacagcaagagcaatgagaaggccgaggagtggggccgcagcggcaaggaccctgaccgcttccggccagatggcctgcccaagaagtactag

SEQ ID NO: 165865 - DNA, 393 bp, Artificial Sequence
  derived and/or modified sequence
atgcggctgttcaccggcatcgtgttctgcagcctggtgatgggcgtgacctcggagtcctggcgatccttctttaaagaggcgctacaaggtgtcggcgacatgggtagggcttattgggacatcatgatctcaaaccatcagaattccaaccgctatctatatgcaagggggaactacgatgccgctcaacggggaccaggcggagtctgggctgctaaacttatatctcggtcacgagtgtatctccagggtcttattgattgttacctgttcggaaattcatcaacagtactggaggattccaagagcaacgagaaagccgaggaatggggtaggtccgggaaagatccagatcgcttcaggccagacgggcttcccaagaagtactag

SEQ ID NO: 165866 - DNA, 393 bp, Artificial Sequence
  derived and/or modified sequence
atgaggttatttaccgggattgtgttctgcagcttggtcatgggagttacatcagaatcatggcgctcattctttaaagaggccctccagggtgtgggcgacatggggagggcttactgggacattatgatctctaatcaccagaattccaatcgctatttgtatgccagaggcaattacgacgccgcacagagaggccctgggggtgtgtgggcggctaaactgatttcaagatcccgcgtataccttcagggcctgatcgattgttacttgtttggtaattccagcaccgtgctggaggacagtaagtctaatgagaaggccgaagaatggggtcgatctggaaaagaccccgaccgcttccggcctgacggcctgcccaaaaagtactag

SEQ ID NO: 165867 - DNA, 393 bp, Artificial Sequence
  derived and/or modified sequence
atgagactgttcaccggcatcgtgttctgcagcctggtgatgggcgtgaccagcgagagctggagaagcttcttcaaggaggccctgcagggcgtgggcgacatgggcagagcctactgggacatcatgatcagcaaccaccagaacagcaacagatacctgtacgccagaggcaactacgacgccgcccagagaggccccggcggcgtgtgggccgccaagctgatcagcagaagcagagtgtacctgcagggcctgatcgactgctacctgttcggcaacagcagcaccgtgctggaggacagcaagagcaacgagaaggccgaggagtggggcagaagcggcaaggaccccgacagattcagacccgacggcctgcccaagaagtactag

SEQ ID NO: 165868 - protein, 1956 aa, Artificial Sequence
  derived and/or modified sequence
MEFPIGSLETNNFRRFTPESLVEIEKQIAAKQGTKKAREKHREQKDQEEKPRPQLDLKACNQLPKFYGELPAELIGEPLEDLDPFYSTHRTFMVLNKGRTISRFSATRALWLFSPFNLIRRTAIKVSVHSWFSLFITVTILVNCVCMTRTDLPEKIEYVFTVIYTFEALIKILARGFCLNEFTYLRDPWNWLDFSVITLAYVGTAIDLRGISGLRTFRVLRALKTVSVIPGLKVIVGALIHSVKKLADVTILTIFCLSVFALVGLQLFKGNLKNKCVKNDMAVNETTNYSSHRKPDIYINKRGTSDPLLCGNGSDSGHCPDGYICLKTSDNPDFNYTSFDSFAWAFLSLFRLMTQDSWERLYQQTLRTSGKIYMIFFVLVIFLGSFYLVNLILAVVTMAYEEQNQATTDEIEAKEKKFQEALEMLRKEQEVLAALGIDTTSLHSHNGSPLTSKNASERRHRIKPRVSEGSTEDNKSPRSDPYNQRRMSFLGLASGKRRASHGSVFHFRSPGRDISLPEGVTDDGVFPGDHESHRGSLLLGGGAGQQGPLPRSPLPQPSNPDSRHGEDEHQPPPTSELAPGAVDVSAFDAGQKKTFLSAEYLDEPFRAQRAMSVVSIITSVLEELEESEQKCPPCLTSLSQKYLIWDCCPMWVKLKTILFGLVTDPFAELTITLCIVVNTIFMAMEHHGMSPTFEAMLQIGNIVFTIFFTAEMVFKIIAFDPYYYFQKKWNIFDCIIVTVSLLELGVAKKGSLSVLRSFRLLRVFKLAKSWPTLNTLIKIIGNSVGALGNLTIILAIIVFVFALVGKQLLGENYRNNRKNISAPHEDWPRWHMHDFFHSFLIVFRILCGEWIENMWACMEVGQKSICLILFLTVMVLGNLVVLNLFIALLLNSFSADNLTAPEDDGEVNNLQVALARIQVFGHRTKQALCSFFSRSCPFPQPKAEPELVVKLPLSSSKAENHIAANTARGSSGGLQAPRGPRDEHSDFIANPTVWVSVPIAEGESDLDDLEDDGGEDAQSFQQEVIPKGQQEQLQQVERCGDHLTPRSPGTGTSSEDLAPSLGETWKDESVPQVPAEGVDDTSSSEGSTVDCLDPEEILRKIPELADDLEEPDDCFTEGCIRHCPCCKLDTTKSPWDVGWQVRKTCYRIVEHSWFESFIIFMILLSSGSLAFEDYYLDQKPTVKALLEYTDRVFTFIFVFEMLLKWVAYGFKKYFTNAWCWLDFLIVNISLISLTAKILEYSEVAPIKALRTLRALRPLRALSRFEGMRVVVDALVGAIPSIMNVLLVCLIFWLIFSIMGVNLFAGKFWRCINYTDGEFSLVPLSIVNNKSDCKIQNSTGSFFWVNVKVNFDNVAMGYLALLQVATFKGWMDIMYAAVDSREVNMQPKWEDNVYMYLYFVIFIIFGGFFTLNLFVGVIIDNFNQQKKKLGGQDIFMTEEQKKYYNAMKKLGSKKPQKPIPRPLNKFQGFVFDIVTRQAFDITIMVLICLNMITMMVETDDQSEEKTKILGKINQFFVAVFTGECVMKMFALRQYYFTNGWNVFDFIVVVLSIASLIFSAILKSLQSYFSPTLFRVIRLARIGRILRLIRAAKGIRTLLFALMMSLPALFNIGLLLFLVMFIYSIFGMSSFPHVRWEAGIDDMFNFQTFANSMLCLFQITTSAGWDGLLSPILNTGPPYCDPNLPNSNGTRGDCGSPAVGIIFFTTYIIISFLIMVNMYIAVILENFNVATEESTEPLSEDDFDMFYETWEKFDPEATQFITFSALSDFADTLSGPLRIPKPNRNILIQMDLPLVPGDKIHCLDILFAFTKNVLGESGELDSLKANMEEKFMATNLSKSSYEPIATTLRWKQEDISATVIQKAYRSYVLHRSMALSNTPCVPRAEEEAASLPDEGFVAFTANENCVLPDKSETASATSFPPSYESVTRGLSDRVNMRTSSSIQNEDEATSMELIAPGP

SEQ ID NO: 165869 - DNA, 5871 bp, Artificial Sequence
  derived and/or modified sequence
atggaattccccatcggtagtctagagacaaacaatttcaggcgcttcacacctgaatctttagtcgagatagaaaagcagattgcagctaagcaggggacgaaaaaggccagagaaaaacatcgagagcaaaaagaccaggaggagaaaccaaggccacagttggaccttaaagcatgcaatcagctacctaaattctacggtgagctccccgctgaattgattggcgagcccctagaggatctggatcccttttatagcacccaccggaccttcatggtgctaaacaagggcagaacgatatcccggttctctgccacacgggcactttggctgttctccccattcaatctcatccggagaactgcaatcaaagtgtccgtccactcatggttcagcctgtttattaccgtgaccattttagtgaattgcgtgtgtatgacacgcaccgacctgcctgagaagatcgagtacgtttttaccgttatttacacgttcgaagccttgatcaagattctggccagaggcttctgcctcaatgagtttacctaccttagagacccctggaactggctcgacttctccgtcattacgctcgcctacgtaggaacagccattgacctgaggggcataagtggtttgcggaccttccgcgtgctccgggcgttaaagacagtcagtgtgatcccagggctaaaagtcattgtcggggcgcttatccactccgtgaagaagttagccgacgtcacgatcctcacaatcttttgcctgagcgtgttcgctcttgttggcctgcagctgtttaagggcaatctaaagaataagtgtgtaaagaatgatatggctgttaatgaaactacaaattattccagtcaccgcaagcccgatatatatattaacaagagaggcaccagcgatccactcctatgcggaaacggaagtgacagcggccactgcccagatggctacatctgtcttaagaccagcgacaatcctgattttaattatacttcgtttgattccttcgcttgggcctttctttctctgtttcgcctcatgacccaggattcttgggaacgtctttaccagcagactctgcgaacttccggaaagatctatatgatattctttgttctggtcatttttctcggatctttttacctggtgaacctgatcctggccgtcgtgacaatggcctatgaggagcaaaaccaggccacaacagacgaaattgaggctaaagaaaaaaagtttcaggaagcgctggagatgctccgcaaggagcaggaagtgctggccgcactgggcattgatacgaccagcctgcattctcacaacggttctccccttacgtccaagaacgctagtgaaaggcggcacaggatcaaaccaagggtcagtgaggggtccactgaggacaataagtctcctagatccgacccatacaaccagaggcgtatgagcttcctcggactggccagcgggaagcgaagagcttctcacgggtccgtctttcacttcagatctccgggcagggacataagtctgcctgagggcgtcactgacgacggagttttcccaggagaccacgaatcacacagggggtccctgctgctggggggaggagccgggcagcagggtccactgcccaggagccccctgccccagccatctaatcctgacagccggcacggagaagatgagcatcagcctccacccacatctgaactcgcgcccggtgctgtggacgtgtcagcgttcgacgccggccaaaaaaaaaccttcctgtcagcagaatacctggacgaaccttttagggctcaaagggcgatgtcggtggtcagcatcatcaccagcgtgctggaagaactcgaggaatccgagcagaagtgcccgccttgtttgacctctctgtcacagaagtatctgatatgggattgctgccccatgtgggtcaaattaaagaccatcctgttcgggctggtcacggaccctttcgcggagttaaccataacactctgtattgttgtcaataccatcttcatggcaatggagcatcacgggatgagccctacattcgaagccatgctgcagattggaaatattgtgtttacaatttttttcaccgcagaaatggtgtttaagattatcgcattcgacccatattactacttccaaaaaaagtggaatatatttgactgcataattgtgactgtgagtctgctggagcttggcgtcgctaaaaagggcagcttgtcagttcttaggtctttcagactgctacgagttttcaaactggccaaatcgtggcctacactgaacactctcataaagatcatcggtaacagtgttggagccctgggcaacctgaccattatcctcgctatcattgtatttgtgtttgcactcgtcggcaaacaattgctcggagagaactataggaacaatcggaaaaatatcagtgctcctcacgaagactggccccggtggcacatgcacgacttttttcactcttttctcatcgtctttcgaatcctctgtggcgaatggatcgagaatatgtgggcttgcatggaggttgggcaaaagtctatttgcttgattctgtttctcactgtgatggtgctcgggaatctggtggtgttaaacttgtttatcgctctgctgttgaactctttctcggctgataacctcaccgctccggaggatgatggtgaggtcaataatctgcaggtcgctcttgcaagaatccaggtgtttgggcaccggacaaaacaagctttatgttcttttttttcgcggtcctgtcctttccctcaacccaaagctgaacctgagcttgtggtgaagcttcccctgagcagctccaaggcagagaatcacatcgccgccaatactgctcgcggatcatccggaggattacaagcccctagagggccacgcgacgaacacagcgattttatcgccaatcctactgtgtgggtgtccgtgccgatcgcagaaggtgaatccgatcttgatgatctcgaagatgacgggggcgaggacgctcagtctttccagcaagaggtcatcccaaagggtcagcaggagcagcttcaacaagtggaacgttgcggtgaccatctcactccgaggtctccagggacaggcacttcctctgaagacctggctccatccctgggcgaaacttggaaggacgaaagcgtccctcaggtccctgccgagggagtcgacgatactagttccagtgaaggtagcacagttgactgtctggaccccgaagaaattctgagaaaaatcccagagctcgccgatgatctggaggagcctgatgattgcttcacagagggttgtatacgccattgtccttgttgcaaacttgacaccaccaagagtccttgggacgtcgggtggcaagtaagaaagacttgctaccggatcgtagaacattcctggttcgagtcttttatcatcttcatgatcctgttgtcatccggatccttggccttcgaggattactatctggaccagaagccaacagttaaggctctcttggagtacacagatcgagtgtttacattcatatttgtgttcgagatgctgctcaaatgggtcgcctatggcttcaaaaaatatttcacaaatgcctggtgctggctagattttctgatcgtgaacatctcgctcatcagtctgacagcaaaaatcctggaatactctgaggtggcccccatcaaagccttgcgcacacttagggcactaagaccacttcgggccctctcccgatttgaaggtatgcgtgtagtagtggacgccctggttggcgccatcccatccattatgaatgtgctgctagtatgcctgattttttggctcatattctcaatcatgggcgtgaatctgtttgcgggtaagttctggagatgcatcaattacacagacggagagtttagcctagtgccgctctccatcgttaacaacaagtccgattgcaaaatacagaactctactggctctttcttttgggtcaacgtgaaggtgaactttgacaacgtggctatggggtacttggctctgttgcaagtggcaactttcaagggctggatggacattatgtacgctgcggtagactctcgcgaggtgaatatgcagccaaagtgggaggacaatgtatacatgtacctctacttcgtcatcttcatcatttttggggggtttttcaccttaaacctttttgtcggggtgattatcgacaactttaatcagcagaaaaaaaagttaggcggacaggacattttcatgactgaagaacagaagaaatattataacgccatgaagaagctgggatcaaagaaacctcagaaacccattcctcgcccactgaacaagtttcaggggttcgtgtttgacattgtgacccggcaagctttcgatatcacaataatggtgcttatctgtttgaacatgatcacaatgatggtcgaaactgatgaccaatccgaggaaaaaacaaagatcctaggaaaaattaatcaattttttgtggccgtgtttacgggcgaatgtgtcatgaagatgtttgccctgcggcagtactatttcaccaacggctggaacgtgttcgactttatagtcgtagtcctgtcaatcgcctctcttattttttcggcaattttaaaaagtctgcagtcatacttctcaccgactctgtttcgtgtaattcggctggcacgtatcggcaggatattacgtctgatacgggctgccaaaggaatcaggaccctgctcttcgcactgatgatgtcgttaccagcgctatttaatatcggtttgctactgtttctcgttatgtttatatattccattttcggcatgtcaagctttccacacgtgaggtgggaagctgggattgacgatatgttcaattttcagacttttgcgaattccatgctgtgcctgttccagatcacaacgagcgccgggtgggacggcctcctgagccccatactcaatactggccccccttactgcgaccccaacctccctaactcaaacgggacgcgaggagattgcgggtcaccagccgtggggatcattttttttacaacatatattattatttcttttctgattatggtgaacatgtacatagccgtgatcctcgaaaacttcaatgtggccacggaagagtccactgagccattgagcgaagatgatttcgacatgttctacgaaacatgggagaaattcgatcctgaagccacacagtttataacgttcagcgccctcagcgactttgcagatacactgagtggcccacttaggattccgaaacccaaccgaaatattcttatccaaatggacctgccgctggtccctggagataaaatacactgcctggatatcctctttgctttcaccaagaatgtcctcggggaaagtggcgaactagattccttgaaagcaaatatggaagagaagttcatggcaaccaatctcagcaaaagctcctatgaacctatcgccaccaccctgagatggaaacaagaagatatttccgccacggtgattcagaaagcataccgaagctacgtgcttcatcggtctatggcccttagcaacacgccttgtgtgccacgggcagaagaagaggcagcttcactgccagatgaggggttcgttgcatttactgccaatgagaattgcgtactgcccgacaaaagcgaaacagccagtgctacgagctttcctccttcttatgaatctgtgaccaggggtcttagcgatagagtgaatatgcgcacctcgagtagcatacagaacgaagacgaagcgacgtctatggagcttattgccccaggcccttag

SEQ ID NO: 165870 - DNA, 5871 bp, Artificial Sequence
  derived and/or modified sequence
atggagttccccatcggcagcctggagaccaacaacttccgccgcttcaccccagagagcctggtggagattgagaagcagattgctgccaagcagggcaccaagaaggcccgggagaagcaccgggagcagaaggaccaggaggagaagccccggccccagctggacctgaaggcctgcaaccagctgcccaagttctatggagagctgcctgctgagctgattggagagcccctggaggacctggaccccttctacagcacccacaggaccttcatggtgctgaacaagggccgcaccatcagccgcttcagcgccacccgggccctgtggctgttcagccccttcaacctgatccggaggacagccatcaaggtgtctgtgcacagctggttcagcctcttcatcaccgtgaccatcctggtgaactgtgtgtgcatgaccaggacagacctgcctgagaagattgaatatgtgttcaccgtcatctacacctttgaggccctgatcaagatcctggcccggggcttctgcctgaatgagttcacctacctgcgggacccctggaactggctggacttcagcgtcatcaccctggcctacgtgggcacagccatcgacctgcggggcatcagcggcctgcggaccttccgggtgctgcgggccctgaagacagtgtctgtcatccctggcctgaaggtgattgtgggcgccctgatccacagcgtgaagaagctggctgatgtgaccatcctgaccatcttctgcctgtctgtgtttgccctggtgggcctgcagctgttcaagggcaacctgaagaacaagtgtgtgaagaatgacatggctgtgaatgagaccaccaactacagcagccacaggaagccagacatctacatcaacaagaggggcaccagtgaccccctgctgtgtggaaatggaagtgacagcggccactgcccagatggctacatctgcctgaagaccagtgacaacccagacttcaactacaccagctttgacagctttgcctgggccttcctgagcctcttccggctgatgacccaggacagctgggagcggctgtaccagcagaccctgcggaccagcggcaagatctacatgatcttctttgtgctggtgatcttcctgggcagcttctacctggtgaacctgatcctggccgtggtgaccatggcctatgaggagcagaaccaggccaccacagatgaaattgaggccaaggagaagaagttccaggaggccctggagatgctgaggaaggagcaggaggtgctggccgccctgggcatcgacaccaccagcctgcacagccacaacggcagccccctgaccagcaagaatgccagcgagcggcggcaccgcatcaagccccgggtgtctgagggcagcacagaggacaacaagagccccaggagtgacccctacaaccagaggaggatgtccttcctgggcctggccagcggcaagagaagagccagccacggctctgtgttccacttccgcagccctggccgggacatcagcctgcctgagggcgtgacagatgatggagtcttccctggggaccacgagagccaccggggcagcctgctgctgggcggcggggccggccagcagggccccctgcccaggagccccctgccccagcccagcaacccagacagccgccacggggaggatgagcaccagcccccacccaccagcgagctggcccctggagctgtggatgtgtctgcctttgatgctggccagaagaagaccttcctgtctgctgagtacctggatgagcccttccgggcccagagggccatgtctgtggtgtccatcatcacctctgtgctggaggagctggaggagagcgagcagaagtgccccccctgcctgaccagcctgagccagaagtacctgatctgggactgctgccccatgtgggtgaagctgaagaccatcctgtttggcctggtgacagacccctttgctgagctgaccatcaccctgtgcatcgtggtgaacaccatcttcatggccatggagcaccacggcatgagccccacctttgaggccatgctgcagatcggcaacatcgtgttcaccatcttcttcaccgctgagatggtgttcaagatcatcgcctttgacccctactactacttccagaagaagtggaacatctttgactgcatcatcgtgacagtgtccctgctggagctgggcgtggccaagaagggcagcctgtctgtgctgcgctccttccggctgctgcgggtcttcaagctggccaagtcctggcccaccctgaacaccctcatcaagatcatcggcaacagcgtgggcgccctgggcaacctgaccatcatcctggccatcatcgtgtttgtgtttgccctggtgggcaagcagctgctgggggagaactacagaaacaacaggaagaacatcagcgcccctcatgaggactggccccgctggcacatgcatgacttcttccacagcttcctgattgtgttccgcatcctgtgtggggagtggattgagaacatgtgggcctgcatggaggtgggccagaagagcatctgcctgatcctcttcctgactgtgatggtgctgggcaacctggtggtgctgaacctcttcatcgccctgctgctgaacagcttctctgctgacaacctgacagccccagaagatgatggagaggtgaacaacctgcaggtggccctggcccgcatccaggtgtttggccacaggaccaagcaggccctgtgcagcttcttcagccgcagctgccccttcccccagcccaaggccgagcctgagctggtggtgaagctgcccctgagcagcagcaaggccgagaaccacatcgccgccaacacagcccggggcagcagcggcggcctgcaggccccccggggccccagagatgagcacagcgacttcatcgccaaccccaccgtgtgggtgtctgtgcccatcgccgagggggagagtgacctggatgacctggaggatgatggaggagaagatgcccagagcttccagcaggaggtgatccccaagggccagcaggagcagctgcagcaggtggagcgctgtggggaccacctgacccccaggagccctggcaccggcaccagcagcgaggacctggcccccagcctgggggagacctggaaggatgaatctgtgccccaggtgcctgctgagggcgtggatgacaccagcagcagcgagggcagcacagtggactgcctggaccctgaggagatcctgaggaagatccctgagctggctgatgacctggaggagccagatgactgcttcacagagggctgcatccgccactgcccctgctgcaagctggacaccaccaagagcccctgggatgtgggctggcaggtgaggaagacctgctaccgcatcgtggagcacagctggtttgagagcttcatcatcttcatgatcctgctgagcagcggcagcctggcctttgaggactactacctggaccagaagcccaccgtgaaggccctgctggagtacacagacagagtcttcaccttcatctttgtgtttgagatgctgctgaagtgggtggcctacggcttcaagaagtacttcaccaatgcctggtgctggctggacttcctgattgtgaacatcagcctcatcagcctgacagccaagatcctggagtacagcgaggtggcccccatcaaggccctgcggaccctgcgggccctgcggcccctgcgggccctgagcagatttgagggcatgagggtggtggtggatgccctggtgggcgccatccccagcatcatgaatgtgctgctggtgtgcctgatcttctggctgatcttcagcatcatgggcgtgaacctgtttgctgggaagttctggcgctgcatcaactacacagatggagagttcagcctggtgcccctgagcatcgtgaacaacaagagtgactgcaagatccagaacagcacaggcagcttcttctgggtgaatgtgaaggtgaactttgacaacgtggccatgggctacctggccctgctgcaggtggccaccttcaagggctggatggacatcatgtatgctgctgtggacagccgggaggtgaacatgcagcccaagtgggaggacaacgtgtacatgtacctgtacttcgtcatcttcatcatctttggaggcttcttcaccctgaacctgtttgtgggcgtcatcatcgacaacttcaaccagcagaagaagaagctgggcggccaggacatcttcatgacagaggagcagaagaagtactacaatgccatgaagaagctgggcagcaagaagccccagaagcccatcccccggcccctgaacaagttccagggctttgtgtttgacatcgtgacccggcaggcctttgacatcaccatcatggtgctgatctgcctgaacatgatcaccatgatggtggagacagatgaccagagcgaggagaagaccaagatcctgggcaagatcaaccagttctttgtggccgtgttcaccggggagtgtgtgatgaagatgtttgccctgcggcagtactacttcaccaacggctggaatgtgtttgacttcatcgtggtggtgctgagcatcgccagcctcatcttcagcgccatcctgaagagcctgcagagctacttcagccccaccctcttccgggtcatccggctggcccgcatcggccgcatcctgcggctcatccgggccgccaagggcatccgcaccctgctgtttgccctgatgatgagcctgcctgccctcttcaacatcggcctgctgctcttcctggtgatgttcatctacagcatcttcggcatgagcagcttcccccacgtgcgctgggaggccggcattgatgacatgttcaacttccagacctttgccaacagcatgctgtgcctcttccagatcaccaccagcgctggctgggatggcctgctgagccccatcctgaacacaggccccccctactgtgaccccaacctgcccaacagcaatggcaccaggggggactgtggcagccctgctgtgggcatcatcttcttcaccacctacatcatcatctccttcctgatcatggtgaacatgtacatcgctgtgatcctggagaacttcaacgtggccacagaggagagcacagagcccctgtctgaagatgactttgacatgttttatgagacctgggagaagtttgatcctgaggccacccagttcatcaccttcagcgccctgagtgactttgctgacaccctgagcggccccctgcgcatccccaagcccaacagaaacatcctgatccagatggacctgcccctggtgcctggggacaagatccactgcctggacatcctgtttgccttcaccaagaatgtgctgggggagagcggggagctggacagcctgaaggccaacatggaggagaagttcatggccaccaacctgagcaagagcagctatgagcccatcgccaccaccctgcgctggaagcaggaggacatcagcgccaccgtcatccagaaggcctaccgctcctatgtgctgcaccgctccatggccctgagcaacaccccctgtgtgcccagggctgaggaggaggccgccagcctgcctgatgagggctttgtggccttcaccgccaatgaaaactgtgtgctgcctgacaagtcagaaacagccagcgccaccagcttcccccccagctatgaatctgtgacccggggcctgagtgacagagtgaacatgaggaccagcagcagcatccagaatgaagatgaggccacctccatggagctgattgcccctggcccctag

SEQ ID NO: 165871 - DNA, 5871 bp, Artificial Sequence
  derived and/or modified sequence
atggagttccccatcggcagcctggagaccaacaacttccggcggtttactccagagagtctggtggaaatcgaaaaacagatcgctgccaagcagggaactaagaaggcacgcgagaaacatcgggaacagaaggatcaggaagagaaaccgcggccgcagctggaccttaaggcttgcaaccagctacctaaattctacggtgagctgccggctgagctcatcggagagccgcttgaagacttggatcccttctacagcactcacaggacctttatggtcctgaacaagggaaggacaatcagcaggttctccgcaacccgggccttgtggttatttagcccctttaacctaattagaaggacagccataaaggtgagcgtccattcttggttctcattgttcatcactgtcacaatcctggtgaactgtgtttgcatgacacggacagatttgcccgaaaaaatcgagtatgtctttacagtaatttataccttcgaagccctaatcaagatactagcacgtggattctgcttgaacgaatttacctacctaagggacccttggaactggcttgacttctccgtcattactttagcgtatgtcggaaccgctatcgatctacgtgggatttcagggctcaggaccttcagagtgctcagagctctgaagactgtgtccgtgattcccggcctgaaggtcatcgtgggtgccctcattcatagcgttaagaagttagccgacgtgacaatcctcacgattttctgcctatctgtttttgcattggtaggcctacagttatttaagggaaatcttaaaaacaagtgtgtgaagaacgatatggctgttaatgaaacaaccaattacagcagccacaggaagccagacatatacattaacaagcgcggtacctccgatccgctgctgtgtggaaatggatcagactctggccactgtcctgacggctacatctgtctgaagacgagtgacaatcctgacttcaactacacctcttttgatagttttgcttgggcttttcttagtctcttccggctcatgacccaggactcatgggagcggctctaccagcagactcttcgcactagtgggaaaatttacatgatcttcttcgtcctggttattttcctagggagcttttatctagtgaacttgattctggccgtggtgaccatggcatacgaagaacaaaatcaagctaccaccgatgagatcgaggcaaaagaaaagaagtttcaggaggcactagaaatgctcaggaaggaacaggaagtgcttgccgctttggggattgacaccacgtcgctccatagtcacaatggatctccgctgacttcgaagaacgcaagtgaaagaaggcatcggatcaagccccgggtctctgaaggctctacggaggataacaagtcccctcggagcgatccctacaaccagcgccgcatgtccttcttggggctcgccagtggcaagcgaagggcctcccacggctccgtgttccacttccgaagtcccggccgagatatttcactgccggaaggagtgactgacgatggcgtgttccctggtgaccacgagtctcataggggctcactactgctcggagggggcgccggacagcagggccccctgccacgcagcccgcttccacaaccttccaatcccgacagccgccacggagaggacgagcaccagcctccccctactagcgagttggcaccgggcgcggtggatgtgagcgcttttgacgccgggcagaagaaaactttcctctccgcagagtaccttgacgagccatttcgcgcccagcgggccatgtctgttgtttctattatcaccagcgtacttgaagaattggaagagtccgaacaaaagtgccctccttgcttaacctcacttagtcagaagtatttgatttgggattgctgtccaatgtgggtgaagctcaagactatactgttcggactggttaccgatccctttgctgagttgactataaccctgtgtattgtggtgaataccatctttatggccatggagcatcatggaatgtcacccaccttcgaggccatgctccagatagggaatatcgttttcactatcttctttaccgcagagatggtttttaaaataatcgccttcgatccatactactactttcagaaaaagtggaatattttcgactgtattattgtgaccgtgagtctgctcgaacttggagttgccaagaagggctccttgagtgtgcttcgaagctttcgtttgctcagggtgttcaagctcgccaagtcttggcctacattgaacacactcatcaagataatcggcaatagcgttggggcccttggaaacctgacaattattctggctattatagtgtttgtcttcgcactggtcgggaaacagctgctgggcgagaactacagaaacaatcggaagaacataagtgctcctcacgaagactggccgaggtggcatatgcacgactttttccattcctttttgatcgtgttccgtatactatgtggcgaatggattgaaaatatgtgggcctgtatggaggtcgggcagaaaagtatctgtttgatcctctttttgactgttatggtcttgggtaatctggtggtgttgaacctgtttattgcactcctgctaaattctttttcggccgataatcttaccgctcccgaggacgacggcgaagttaacaacctgcaggtagccttggcccgcatccaagtcttcggccataggaccaagcaggccctctgctccttcttctcccgctcctgccctttcccccaacctaaagccgagcccgaactcgtcgtaaagctccccctttccagcagcaaggctgagaaccacatcgcggcaaacactgcccgcgggtcttcagggggattgcaggctccccgcggacctagagatgaacattcggactttatcgctaatcctacggtttgggtgagtgtgcctatcgcagaaggtgagtctgatctcgatgacctggaggatgatggaggagaggacgcccagtcatttcaacaggaggtgattcctaaaggacaacaagagcagctgcagcaggtagagaggtgtggagaccacctgacaccgagaagcccgggaaccggaacaagctctgaagacctcgctcccagtcttggggaaacttggaaggacgagtctgtcccacaagtgcccgccgagggcgtggacgacacttcttcttccgagggttctactgtggactgtctggacccagaggagatactgaggaagatccctgagttggcagacgacctagaggaacctgatgattgttttactgaggggtgtatcagacattgcccctgttgcaaactcgacactacaaagtctccatgggatgtaggatggcaggtgcgaaaaacttgctatcgcattgtggagcatagctggttcgaaagcttcattatcttcatgattctgctgtcaagcggcagcctagcctttgaggactactacctagatcagaagcctaccgtgaaagcattgctggagtatactgatagagtgttcacctttatctttgtgtttgaaatgctgttgaagtgggtggcatacgggtttaaaaagtactttaccaacgcctggtgttggctcgattttctcatcgttaacatttcactcatctccctaacagccaagattctagagtattctgaagtggcacctatcaaggccctaagaacattacgtgctttgcgcccactgagggccttgtcaaggttcgagggtatgagggtcgtagtagatgctctggtgggtgcgattccgtccatcatgaatgtgctgcttgtctgtcttatcttctggctcatcttcagcatcatgggagtcaacctgttcgccggcaagttctggagatgcataaactacaccgacggggagttttcattagtgcccctgtccatcgtaaataataagtcggactgtaaaatccagaattccaccggctcttttttttgggtcaacgtgaaagtgaactttgacaacgttgcgatgggctacctggccctgcttcaggtcgctacattcaagggttggatggatattatgtatgctgccgtggattccagggaagtgaacatgcaacccaaatgggaagacaacgtttacatgtatctatacttcgtcattttcatcatctttgggggattttttacccttaacctgtttgtgggggtgataattgacaatttcaatcagcaaaaaaagaagttggggggacaggatatctttatgacagaggagcagaagaaatactacaatgctatgaagaagctgggatccaagaagccacagaaacctatccctagacccttgaataagtttcagggcttcgtcttcgacattgtgacacgccaggccttcgatataacaattatggtcctgatctgcttgaacatgatcacgatgatggttgagacggacgatcagagcgaagagaagaccaagatcctcggcaagattaaccaatttttcgtggcagtgttcaccggggaatgtgtgatgaagatgtttgccctgcgccagtattacttcacaaacggatggaacgtgttcgacttcattgttgtggttctcagcatagcaagcctgatctttagcgccatcctgaagagcctacagagttatttttcccctacgcttttcagggtcatcaggttggctcgtattgggcgaattctgagactgatcagagccgccaaggggatccggacgctcttattcgccctaatgatgtccctgcctgccttattcaacatcggtttgctgttgttcctagtcatgttcatttatagcatctttggcatgagttcttttcctcacgtccgatgggaagccggcattgacgatatgttcaacttccagacattcgccaattcaatgctctgtctttttcagatcaccaccagtgcgggatgggacggactgctcagtcccattctgaacaccggaccaccctactgcgatccaaatctcccaaatagcaacggaaccaggggcgattgcggctctccagcagttggaatcattttcttcactacatatataatcatttcgttcttgattatggtgaatatgtatatcgcggtcattttagagaacttcaatgttgccaccgaagagtcaacagagcccttatctgaagatgactttgatatgttctacgagacttgggaaaaattcgatcccgaagctacacagttcattacatttagcgccttgagtgacttcgcagacacacttagcgggcctctgcgcattcccaagccgaacagaaatattctgattcagatggatctgcctcttgtgcccggtgacaagatacactgtcttgacatactgtttgctttcaccaagaacgttctgggtgagtcgggtgaactggactctctaaaggcgaatatggaggaaaaatttatggccaccaacctatcgaaatcaagttacgagcccatcgcgaccactcttcgctggaagcaagaggacatctccgccactgtcattcaaaaagcctaccggtcttacgtgctgcacaggagcatggcactttctaacaccccttgtgtccctcgagcggaagaggaggccgctagtctaccagatgaagggttcgtggctttcacggccaatgagaactgcgtactacccgacaagtccgagacagcaagtgctacatcattccccccctcatatgaatcagtgaccagggggctcagcgacagagttaatatgcggactagtagttcgatccagaatgaggacgaggcaacttcaatggaactcattgccccaggtccttag

SEQ ID NO: 165872 - DNA, 5870 bp, Artificial Sequence
  derived and/or modified sequence
atggagtttccaatcggatctttagagaccaataactttcgacgcttcactcccgaatcccttgtggagatcgaaaagcagatagccgcaaagcaaggtacaaaaaaagcccgagaaaaacatagagagcagaaagatcaggaagaaaagcccaggccccagttggacctgaaagcatgtaaccagcttcctaagttctacggcgagctgcccgcagaactcattggcgagcctctcgaagacctagatcccttctactccacgcaccggactttcatggtgctcaataaggggcgaacgatctccagattcagcgccacgagggccctctggctgttctccccgtttaacctcattagaaggacagcgattaaggtgtctgtgcatagctggttttctctgtttattaccgttaccatccttgtgaattgtgtctgtatgactcgaaccgatcttcccgaaaaaatagagtacgttttcaccgtcatttacaccttcgaagcgctcatcaaaattctggcccgaggtttctgtttgaacgaattcacatacctcagagacccatggaattggttagacttctcagtcatcacgctggcgtatgtagggacagccatcgatctcagaggaatttccggcctcaggacttttcgcgtattacgagcgctcaagactgtgagcgtcatcccaggtctgaaggttatcgtgggagccttgattcattctgttaaaaagctggccgatgtgaccatactgacaatcttctgtttgagcgtattcgctctggttggcttgcagttgtttaagggaaacctgaaaaacaaatgtgtcaagaatgacatggctgtgaacgaaacaactaactactcctctcaccgcaaacccgacatctatatcaataaacggggaactagcgatccactgctatgtggtaatggtagcgattccggccattgcccagatggctatatctgtttgaagacttccgataacccagattttaactacaccagttttgactcatttgcttgggcatttctgagtctgtttcggctaatgacacaggactcctgggaacgcttgtatcagcagacactcagaacttcgggtaagatttacatgatcttctttgtgctcgtgattttcctgggcagcttctatctggtgaatttgatccttgcagtggttacaatggcctacgaagagcagaaccaggccacgaccgacgagattgaggccaaggagaagaagtttcaggaagccctagaaatgctgcgcaaggagcaggaagtattagcggctctcgggattgacacgaccagtttgcactctcacaacggctctcctttaacaagcaagaatgccagtgaaaggagacacagaatcaagccaagggtttccgaagggtcaaccgaggacaacaagtctccgagaagcgacccttataatcagcgccgaatgagctttctggggctggcttccggcaagcgacgcgctagccatggctctgtattccactttaggagtcctggtagggacatcagcttacctgagggcgtgactgacgatggcgtttttccaggagaccatgaatcccatcgcggtagcctgctgctgggcggtggggctggccagcagggccctctgccccgatcgcccttgccccagccaagtaatcccgattctcggcacggagaggatgagcaccagcctcccccaacttccgagcttgcacctggcgcagtggacgtcagcgcctttgatgcgggacagaagaagacctttctctccgcagaatacctggacgagccgttccgtgcccagcgagcgatgtcagtggtgagcattattacaagcgttttggaggagctagaagagtctgaacaaaagtgccccccatgcctcacctctctgagtcagaagtatctgatctgggattgctgtcctatgtgggtcaaattgaaaaccattctcttcggattggtcacagaccctttcgctgaactcacgattaccctttgcatagttgtaaataccatctttatggcaatggaacatcacgggatgtctcctaccttcgaggccatgctgcaaatcggtaatattgtctttaccatcttctttactgcagagatggtgttcaaaattattgccttcgacccttattactatttccagaagaaatggaatatttttgattgtattatcgtgacagtatctctgctcgaactcggcgtggctaaaaaaggcagtctgagcgtgctcaggtcattcaggctcttgcgggtgtttaagttagcaaaaagctggcccacactgaatactttgatcaaaatcattggaaacagcgtgggggcacttggtaacctcacaatcatactggctattattgtgtttgtgttcgcattggtgggcaaacagcttctgggcgagaattatcgcaataataggaaaaacattagtgctccccacgaagattggccacggtggcatatgcacgatttctttcacagttttctcattgtctttcgtatcttgtgtggcgagtggatcgaaaatatgtgggcttgcatggaagttggacagaaatctatatgtctgatccttttcctaaccgtaatggttctgggaaatctggtggtgctcaacctatttattgcactgttactaaattcctttagcgccgacaatctcacggcacctgaggacgacggcgaggtgaataacctgcaggtcgccctagcacgaatccaggtgttcggccatcgcaccaagcaggccctgtgtagttttttttcaagatcttgcccattcccccaaccaaaagctgaacctgagctggtggtgaaattgccgctcagttcctcaaaggcagagaatcatattgccgcaaataccgcacgcggaagcagtgggggtctccaggcgcctaggggtcccagggatgagcattccgacttcattgccaacccaacagtttgggtgtcggtccccatcgctgagggagaatccgacttggatgatctggaggacgacgggggagaagatgctcagtcattccagcaggaagttattcccaagggtcagcaagagcagttgcagcaggtcgaaaggtgtggcgaccatttaacccctaggtcccctgggactggaacttccagcgaagatttagctcctagccttggtgagacgtggaaagacgagagtgtgcctcaggtgcccgcagaaggcgtcgacgataccagctcatctgaggggtctacagtcgattgcctggaccctgaagagatcttgaggaaaatccctgaactggcagatgatctggaagaacccgacgattgtttcaccgaggggtgcattagacactgcccttgttgtaagttagacaccacaaagagcccatgggatgttgggtggcaggttaggaagacatgctaccgtattgttgagcatagctggtttgagtcctttattatctttatgattctcctgtcttccggctccctggcgttcgaggactattacttggaccaaaagccaaccgtaaaggccctgctggagtatactgatagggtattcacttttatttttgtgttcgagatgctgctaaaatgggtggcgtatggtttcaaaaagtactttaccaacgcctggtgctggctggatttcctgattgttaacatcagcctgatttcccttacagctaaaatcctggaatacagcgaggttgcccctatcaaagcgcttcgaacccttagggcgctccgccctctgcgggctctcagtcgcttcgagggaatgagagtggtggtcgacgcactggtgggagccatcccttcaatcatgaatgttctgcttgtctgcttgattttttggctcatattcagcataatgggagtgaatctgttcgcgggaaaattttggagatgtatcaactataccgacggcgagtttagtctggtccccctttcaattgtaaacaacaagtccgactgcaagattcagaactctacagggagtttcttctgggtaaatgtgaaagtaaactttgacaacgtagcaatggggtacctggcgctgcttcaggtggcgacatttaaaggatggatggacattatgtacgctgcagttgatagccgggaagtgaacatgcagcctaagtgggaggacaatgtttacatgtacctctattttgtgatattcataatattcggcggatttttcacactcaatctctttgttggggtcatcatcgataattttaaccagcagaaaaagaaactcggagggcaggacatttttatgaccgaggagcaaaaaaaatattataatgctatgaaaaagttgggcagtaagaagccccagaagccaatcccccgacccctgaacaagtttcaaggctttgtgtttgacatcgtcactaggcaggcatttgatattactataatggtgctgatttgtctgaacatgatcaccatgatggtcgagacagacgaccaatctgaagagaagacaaagattctgggaaagatcaaccagtttttcgttgctgtcttcacaggcgagtgcgtgatgaagatgtttgcactgcggcagtattactttaccaatgggtggaatgtgttcgatttcatagtagtggtgctaagcatcgccagcctgattttttctgctatcctgaaatcacttcagagctattttagtcctactttgttcagggtgatcagattagccagaattggtcggatcttaagattgatccgggcagccaaaggcatcagaacgcttttgttcgccttgatgatgtcacttcccgctctctttaatataggtctgcttctttttctggtcatgttcatctacagcatatttggcatgagtagttttcctcatgtacgatgggaggccggtattgacgatatgttcaattttcagacgtttgctaattccatgctgtgcttgttccaaataactacttcagctgggtgggacgggttgctttctccgatactcaatacaggcccaccttattgtgaccctaacctgccaaactccaacgggacccggggagactgtgggagcccagccgtaggcataattttctttaccacttacatcatcatatcttttcttattatggtaaacatgtatatagcagttattctcgaaaatttcaacgtggcaacagaagagagcacagagcctctgagtgaggatgatttcgatatgttttacgagacttgggagaagtttgaccccgaagccacacagttcatcacgttctccgccctgagtgactttgccgacacgctgtccggcccattaaggattcctaagccaaaccgaaatatcttaattcaaatggacctccctctggtacctggagataagatacactgcttggatatcctcttcgccttcacaaagaacgtgcttggcgaatctggagaactggacagtctgaaggccaatatggaggagaagttcatggcaacaaatctgtccaagtcctcgtatgagccaatcgccactactctacggtggaagcaggaagatatctccgccaccgttattcagaaagcttaccggtcctacgtgctgcataggagtatggccctgtccaataccccttgtgtccctcgtgccgaagaagaggcagcttccttgccagatgaaggcttcgtggcgtttaccgcaaatgaaaactgtgtgctgccagacaaatcagaaaccgcgagtgctacctcattccctccatcatacgagtctgtgactagaggcctctctgatagagtcaacatgaggaccagtagttcaatccagaacgaggacgaggccacgagcatggaactgatcgcacccggtccata

SEQ ID NO: 165873 - DNA, 6418 bp, Artificial Sequence
  derived and/or modified sequence
atggaattccccattggatccctcgaaactaacaacttccgtcgctttactccggagtcactggtggagatagagaagcaaattgctgccaagcagggaacaaagaaagccagagagaagcatagggagcagaaggaccaagaagagaagcctcggccccagctggacttgaaagcctgcaaccagctgcccaagttctatggtgagctcccagcagaactgatcggggagcccctggaggatctagatccgttctacagcacacaccggacatttatggtgctgaacaaagggaggaccatttcccggtttagtgccactcgggccctgtggctattcagtcctttcaacctgatcagaagaacggccatcaaagtgtctgtccactcgtggttcagtttatttattacggtcactattttggttaattgtgtgtgcatgacccgaactgaccttccagagaaaattgaatatgtcttcactgtcatttacacctttgaagccttgataaagatactggcaagaggattttgtctaaatgagttcacgtacctgagagatccttggaactggctggattttagcgtcattaccctggcatatgttggcacagcaatagatctccgtgggatctcaggcctgcggacattcagagttcttagagcattaaaaacagtttctgtgatcccaggcctgaaggtcattgtgggggccctgattcactcagtgaagaaactggctgatgtgaccatcctcaccatcttctgcctaagtgtttttgccttggtggggctgcaactcttcaagggcaacctcaaaaataaatgtgtcaagaatgacatggctgtcaatgagacaaccaactactcatctcacagaaaaccagatatctacataaataagcgaggcacttctgaccccttactgtgtggcaatggatctgactcaggccactgccctgatggttatatctgccttaaaacttctgacaacccggattttaactacaccagctttgattcctttgcttgggctttcctctcactgttccgcctcatgacacaggattcctgggaacgcctctaccagcagaccctgaggacttctgggaaaatctatatgatcttttttgtgctcgtaatcttcctgggatctttctacctggtcaacttgatcttggctgtagtcaccatggcgtatgaggagcagaaccaggcaaccactgatgaaattgaagcaaaggagaagaagttccaggaggccctcgagatgctccggaaggagcaggaggtgctagcagcactagggattgacacaacctctctccactcccacaatggatcacctttaacctccaaaaatgccagtgagagaaggcatagaataaagccaagagtgtcagagggctccacagaagacaacaaatcaccccgctctgatccttacaaccagcgcaggatgtcttttctaggcctcgcctctggaaaacgccgggctagtcatggcagtgtgttccatttccggtcccctggccgagatatctcactccctgagggagtcacagatgatggagtctttcctggagaccacgaaagccatcggggctctctgctgctgggtgggggtgctggccagcaaggccccctccctagaagccctcttcctcaacccagcaaccctgactccaggcatggagaagatgaacaccaaccgccgcccactagtgagcttgcccctggagctgtcgatgtctcggcattcgatgcaggacaaaagaagactttcttgtcagcagaatacttagatgaacctttccgggcccaaagggcaatgagtgttgtcagtatcataacctccgtccttgaggaactcgaggagtctgaacagaagtgcccaccctgcttgaccagcttgtctcagaagtatctgatctgggattgctgccccatgtgggtgaagctcaagacaattctctttgggcttgtgacggatccctttgcagagctcaccatcaccttgtgcatcgtggtgaacaccatcttcatggccatggagcaccatggcatgagccctaccttcgaagccatgctccagataggcaacatcgtctttaccatattttttactgctgaaatggtcttcaaaatcattgccttcgacccatactattatttccagaagaagtggaatatctttgactgcatcatcgtcactgtgagtctgctagagctgggcgtggccaagaagggaagcctgtctgtgctgcggagcttccgcttgctgcgcgtattcaagctggccaaatcctggcccaccttaaacacactcatcaagatcatcggaaactcagtgggggcactggggaacctcaccatcatcctggccatcattgtctttgtctttgctctggttggcaagcagctcctaggggaaaactaccgtaacaaccgaaaaaatatctccgcgccccatgaagactggccccgctggcacatgcacgacttcttccactctttcctcattgtcttccgtatcctctgtggagagtggattgagaacatgtgggcctgcatggaagttggccaaaaatccatatgcctcatccttttcttgacggtgatggtgctagggaacctggtggtgcttaacctgttcatcgccctgctattgaactctttcagtgctgacaacctcacagccccggaggacgatggggaggtgaacaacctgcaggtggccctggcacggatccaggtctttggccatcgtaccaaacaggctctttgcagcttcttcagcaggtcctgcccattcccccagcccaaggcagagcctgagctggtggtgaaactcccactctccagctccaaggctgagaaccacattgctgccaacactgccagggggagctctggagggctccaagctcccagaggccccagggatgagcacagtgacttcatcgctaatccgactgtgtgggtctctgtgcccattgctgagggtgaatctgatcttgatgacttggaggatgatggtggggaagatgctcagagcttccagcaggaagtgatccccaaaggacagcaggagcagctgcagcaagtcgagaggtgtggggaccacctgacacccaggagcccaggcactggaacatcttctgaggacctggctccatccctgggtgagacgtggaaagatgagtctgttcctcaggtccctgctgagggagtggacgacacaagctcctctgagggcagcacggtggactgcctagatcctgaggaaatcctgaggaagatccctgagctggcagatgacctggaagaaccagatgactgcttcacagaaggatgcattcgccactgtccctgctgcaaactggataccaccaagagtccatgggatgtgggctggcaggtgcgcaagacttgctaccgtatcgtggagcacagctggtttgagagcttcatcatcttcatgatcctgctcagcagtggatctctggcctttgaagactattacctggaccagaagcccacggtgaaagctttgctggagtacactgacagggtcttcacctttatctttgtgttcgagatgctgcttaagtgggtggcctatggcttcaaaaagtacttcaccaatgcctggtgctggctggacttcctcattgtgaatatctcactgataagtctcacagcgaagattctggaatattctgaagtggctcccatcaaagcccttcgaacccttcgcgctctgcggccactgcgggctctttctcgatttgaaggcatgcgggtggtggtggatgccctggtgggcgccatcccatccatcatgaatgtcctcctcgtctgcctcatcttctggctcatcttcagcatcatgggtgtgaacctcttcgcagggaagttttggaggtgcatcaactataccgatggagagttttcccttgtacctttgtcgattgtgaataacaagtctgactgcaagattcaaaactccactggcagcttcttctgggtcaatgtgaaagtcaactttgataatgttgcaatgggttaccttgcacttctgcaggtggcaacctttaaaggctggatggacattatgtatgcagctgttgattcccgggaggtcaacatgcaacccaagtgggaggacaacgtgtacatgtatttgtactttgtcatcttcatcatttttggaggcttcttcacactgaatctctttgttggggtcataattgacaacttcaatcaacagaaaaaaaagttagggggccaggacatcttcatgacagaggagcagaagaaatactacaatgccatgaagaagttgggctccaagaagccccagaagcccatcccacggcccctgaacaagttccagggttttgtctttgacatcgtgaccagacaagcttttgacatcaccatcatggtcctcatctgcctcaacatgatcaccatgatggtggagactgatgaccaaagtgaagaaaagacgaaaattctgggcaaaatcaaccagttctttgtggccgtcttcacaggcgaatgtgtcatgaagatgttcgctttgaggcagtactacttcacaaatggctggaatgtgtttgacttcattgtggtggttctctccattgcgagcctgattttttctgcaattcttaagtcacttcaaagttacttctccccaacgctcttcagagtcatccgcctggcccgaattggccgcatcctcagactgatccgagcggccaaggggatccgcacactgctctttgccctcatgatgtccctgcctgccctcttcaacatcgggctgttgctattccttgtcatgttcatctactctatcttcggtatgtccagctttccccatgtgaggtgggaggctggcatcgacgacatgttcaacttccagaccttcgccaacagcatgctgtgcctcttccagattaccacgtcggccggctgggatggcctcctcagccccatcctcaacacagggcccccctactgtgaccccaatctgcccaacagcaatggcaccagaggggactgtgggagcccagccgtaggcatcatcttcttcaccacctacatcatcatctccttcctcatcatggtcaacatgtacattgcagtgattctggagaacttcaatgtggccacggaggagagcactgagcccctgagtgaggacgactttgacatgttctatgagacctgggagaagtttgacccagaggccactcagtttattaccttttctgctctctcggactttgcagacactctctctggtcccctgagaatcccaaaacccaatcgaaatatactgatccagatggacctgcctttggtccctggagataagatccactgcttggacatcctttttgctttcaccaagaatgtcctaggagaatccggggagttggattctctgaaggcaaatatggaggagaagtttatggcaactaatctttcaaaatcatcctatgaaccaatagcaaccactctccgatggaagcaagaagacatttcagccactgtcattcaaaaggcctatcggagctatgtgctgcaccgctccatggcactctctaacaccccatgtgtgcccagagctgaggaggaggctgcatcactcccagatgaaggttttgttgcattcacagcaaatgaaaattgtgtactcccagacaaatctgaaactgcttctgccacatcattcccaccgtcctatgagagtgtcactagaggccttagtgatagagtcaacatgaggacatctagctcaatacaaaatgaagatgaagccaccagtatggagctgattgcccctgggccctagtgagaacactccagcctggatatgttcagttatgatgcgtccttctgctctgtgttaactctttcccattgcagatcacacccagctacagcctcaccaatgcatgccactggtcacaatgtcagaactgggcagggaatgcaactggtaaccacctttgaaaaaaccatcatacacaaataggagtcagaagctaagagcacttccactgtgatttcccttctgaatttcaatatcagatcatgggttctcttactctccagaaaatatcccttgtccttttatttttgttgtaatcagattatatttactgagacaaacttctcaggaccagaacttccaaagatatagaacaagaacattactgaaggtccaaggtagtcctctgtggagcaccatacagagattggcaatattatttaggattttgcatgactgcatgtgagagctgtcggacaactgctctgacccagggtaacacctgtggcctatgtcatgaaaagcctttgagatatccattaaaattaatatttttaaatgtatgtcc

SEQ ID NO: 165874 - DNA, 5871 bp, Artificial Sequence
  derived and/or modified sequence
atggagttccccatcggcagcctggagaccaacaacttcagaagattcacccccgagagcctggtggagatcgagaagcagatcgccgccaagcagggcaccaagaaggccagagagaagcacagagagcagaaggaccaggaggagaagcccagaccccagctggacctgaaggcctgcaaccagctgcccaagttctacggcgagctgcccgccgagctgatcggcgagcccctggaggacctggaccccttctacagcacccacagaaccttcatggtgctgaacaagggcagaaccatcagcagattcagcgccaccagagccctgtggctgttcagccccttcaacctgatcagaagaaccgccatcaaggtgagcgtgcacagctggttcagcctgttcatcaccgtgaccatcctggtgaactgcgtgtgcatgaccagaaccgacctgcccgagaagatcgagtacgtgttcaccgtgatctacaccttcgaggccctgatcaagatcctggccagaggcttctgcctgaacgagttcacctacctgagagacccctggaactggctggacttcagcgtgatcaccctggcctacgtgggcaccgccatcgacctgagaggcatcagcggcctgagaaccttcagagtgctgagagccctgaagaccgtgagcgtgatccccggcctgaaggtgatcgtgggcgccctgatccacagcgtgaagaagctggccgacgtgaccatcctgaccatcttctgcctgagcgtgttcgccctggtgggcctgcagctgttcaagggcaacctgaagaacaagtgcgtgaagaacgacatggccgtgaacgagaccaccaactacagcagccacagaaagcccgacatctacatcaacaagagaggcaccagcgaccccctgctgtgcggcaacggcagcgacagcggccactgccccgacggctacatctgcctgaagaccagcgacaaccccgacttcaactacaccagcttcgacagcttcgcctgggccttcctgagcctgttcagactgatgacccaggacagctgggagagactgtaccagcagaccctgagaaccagcggcaagatctacatgatcttcttcgtgctggtgatcttcctgggcagcttctacctggtgaacctgatcctggccgtggtgaccatggcctacgaggagcagaaccaggccaccaccgacgagatcgaggccaaggagaagaagttccaggaggccctggagatgctgagaaaggagcaggaggtgctggccgccctgggcatcgacaccaccagcctgcacagccacaacggcagccccctgaccagcaagaacgccagcgagagaagacacagaatcaagcccagagtgagcgagggcagcaccgaggacaacaagagccccagaagcgacccctacaaccagagaagaatgagcttcctgggcctggccagcggcaagagaagagccagccacggcagcgtgttccacttcagaagccccggcagagacatcagcctgcccgagggcgtgaccgacgacggcgtgttccccggcgaccacgagagccacagaggcagcctgctgctgggcggcggcgccggccagcagggccccctgcccagaagccccctgccccagcccagcaaccccgacagcagacacggcgaggacgagcaccagcccccccccaccagcgagctggcccccggcgccgtggacgtgagcgccttcgacgccggccagaagaagaccttcctgagcgccgagtacctggacgagcccttcagagcccagagagccatgagcgtggtgagcatcatcaccagcgtgctggaggagctggaggagagcgagcagaagtgccccccctgcctgaccagcctgagccagaagtacctgatctgggactgctgccccatgtgggtgaagctgaagaccatcctgttcggcctggtgaccgaccccttcgccgagctgaccatcaccctgtgcatcgtggtgaacaccatcttcatggccatggagcaccacggcatgagccccaccttcgaggccatgctgcagatcggcaacatcgtgttcaccatcttcttcaccgccgagatggtgttcaagatcatcgccttcgacccctactactacttccagaagaagtggaacatcttcgactgcatcatcgtgaccgtgagcctgctggagctgggcgtggccaagaagggcagcctgagcgtgctgagaagcttcagactgctgagagtgttcaagctggccaagagctggcccaccctgaacaccctgatcaagatcatcggcaacagcgtgggcgccctgggcaacctgaccatcatcctggccatcatcgtgttcgtgttcgccctggtgggcaagcagctgctgggcgagaactacagaaacaacagaaagaacatcagcgccccccacgaggactggcccagatggcacatgcacgacttcttccacagcttcctgatcgtgttcagaatcctgtgcggcgagtggatcgagaacatgtgggcctgcatggaggtgggccagaagagcatctgcctgatcctgttcctgaccgtgatggtgctgggcaacctggtggtgctgaacctgttcatcgccctgctgctgaacagcttcagcgccgacaacctgaccgcccccgaggacgacggcgaggtgaacaacctgcaggtggccctggccagaatccaggtgttcggccacagaaccaagcaggccctgtgcagcttcttcagcagaagctgccccttcccccagcccaaggccgagcccgagctggtggtgaagctgcccctgagcagcagcaaggccgagaaccacatcgccgccaacaccgccagaggcagcagcggcggcctgcaggcccccagaggccccagagacgagcacagcgacttcatcgccaaccccaccgtgtgggtgagcgtgcccatcgccgagggcgagagcgacctggacgacctggaggacgacggcggcgaggacgcccagagcttccagcaggaggtgatccccaagggccagcaggagcagctgcagcaggtggagagatgcggcgaccacctgacccccagaagccccggcaccggcaccagcagcgaggacctggcccccagcctgggcgagacctggaaggacgagagcgtgccccaggtgcccgccgagggcgtggacgacaccagcagcagcgagggcagcaccgtggactgcctggaccccgaggagatcctgagaaagatccccgagctggccgacgacctggaggagcccgacgactgcttcaccgagggctgcatcagacactgcccctgctgcaagctggacaccaccaagagcccctgggacgtgggctggcaggtgagaaagacctgctacagaatcgtggagcacagctggttcgagagcttcatcatcttcatgatcctgctgagcagcggcagcctggccttcgaggactactacctggaccagaagcccaccgtgaaggccctgctggagtacaccgacagagtgttcaccttcatcttcgtgttcgagatgctgctgaagtgggtggcctacggcttcaagaagtacttcaccaacgcctggtgctggctggacttcctgatcgtgaacatcagcctgatcagcctgaccgccaagatcctggagtacagcgaggtggcccccatcaaggccctgagaaccctgagagccctgagacccctgagagccctgagcagattcgagggcatgagagtggtggtggacgccctggtgggcgccatccccagcatcatgaacgtgctgctggtgtgcctgatcttctggctgatcttcagcatcatgggcgtgaacctgttcgccggcaagttctggagatgcatcaactacaccgacggcgagttcagcctggtgcccctgagcatcgtgaacaacaagagcgactgcaagatccagaacagcaccggcagcttcttctgggtgaacgtgaaggtgaacttcgacaacgtggccatgggctacctggccctgctgcaggtggccaccttcaagggctggatggacatcatgtacgccgccgtggacagcagagaggtgaacatgcagcccaagtgggaggacaacgtgtacatgtacctgtacttcgtgatcttcatcatcttcggcggcttcttcaccctgaacctgttcgtgggcgtgatcatcgacaacttcaaccagcagaagaagaagctgggcggccaggacatcttcatgaccgaggagcagaagaagtactacaacgccatgaagaagctgggcagcaagaagccccagaagcccatccccagacccctgaacaagttccagggcttcgtgttcgacatcgtgaccagacaggccttcgacatcaccatcatggtgctgatctgcctgaacatgatcaccatgatggtggagaccgacgaccagagcgaggagaagaccaagatcctgggcaagatcaaccagttcttcgtggccgtgttcaccggcgagtgcgtgatgaagatgttcgccctgagacagtactacttcaccaacggctggaacgtgttcgacttcatcgtggtggtgctgagcatcgccagcctgatcttcagcgccatcctgaagagcctgcagagctacttcagccccaccctgttcagagtgatcagactggccagaatcggcagaatcctgagactgatcagagccgccaagggcatcagaaccctgctgttcgccctgatgatgagcctgcccgccctgttcaacatcggcctgctgctgttcctggtgatgttcatctacagcatcttcggcatgagcagcttcccccacgtgagatgggaggccggcatcgacgacatgttcaacttccagaccttcgccaacagcatgctgtgcctgttccagatcaccaccagcgccggctgggacggcctgctgagccccatcctgaacaccggccccccctactgcgaccccaacctgcccaacagcaacggcaccagaggcgactgcggcagccccgccgtgggcatcatcttcttcaccacctacatcatcatcagcttcctgatcatggtgaacatgtacatcgccgtgatcctggagaacttcaacgtggccaccgaggagagcaccgagcccctgagcgaggacgacttcgacatgttctacgagacctgggagaagttcgaccccgaggccacccagttcatcaccttcagcgccctgagcgacttcgccgacaccctgagcggccccctgagaatccccaagcccaacagaaacatcctgatccagatggacctgcccctggtgcccggcgacaagatccactgcctggacatcctgttcgccttcaccaagaacgtgctgggcgagagcggcgagctggacagcctgaaggccaacatggaggagaagttcatggccaccaacctgagcaagagcagctacgagcccatcgccaccaccctgagatggaagcaggaggacatcagcgccaccgtgatccagaaggcctacagaagctacgtgctgcacagaagcatggccctgagcaacaccccctgcgtgcccagagccgaggaggaggccgccagcctgcccgacgagggcttcgtggccttcaccgccaacgagaactgcgtgctgcccgacaagagcgagaccgccagcgccaccagcttcccccccagctacgagagcgtgaccagaggcctgagcgacagagtgaacatgagaaccagcagcagcatccagaacgaggacgaggccaccagcatggagctgatcgcccccggcccctag

SEQ ID NO: 165875 - protein, 684 aa, Artificial Sequence
  derived and/or modified sequence
MFAEAAKTTRPCGMAEFKEKPEAPTEQLDVACGQENLPVGAWPPGAAPAPFQYTPDHVVGPGADIDPTQITFPGCICVKTPCLPGTCSCLRHGENYDDNSCLRDIGSGGKYAEPVFECNVLCRCSDHCRNRVVQKGLQFHFQVFKTHKKGWGLRTLEFIPKGRFVCEYAGEVLGFSEVQRRIHLQTKSDSNYIIAIREHVYNGQVMETFVDPTYIGNIGRFLNHSCEPNLLMIPVRIDSMVPKLALFAAKDIVPEEELSYDYSGRYLNLTVSEDKERLDHGKLRKPCYCGAKSCTAFLPFDSSLYCPVEKSNISCGNEKEPSMCGSAPSVFPSCKRLTLETMKMMLDKKQIRAIFLFEFKMGRKAAETTRNINNAFGPGTANERTVQWWFKKFCKGDESLEDEERSGRPSEVDNDQLRAIIEADPLTTTREVAEELNVNHSTVVRHLKQIGKVKKLDKWVPHELTENQKNRRFEVSSSLILRNHNEPFLDRIVTCDEKWILYDNRRRSAQWLDQEEAPKHFPKPILHPKKVMVTIWWSAAGLIHYSFLNPGETITSEKYAQEIDEMNQKLQRLQLALVNRKGPILLHDNARPHVAQPTLQKLNELGYEVLPHPPYSPDLLPTNYHVFKHLNNFLQGKRFHNQQDAENAFQEFVESQSTDFYATGINQLISRWQKCVDCNGSYFD

SEQ ID NO: 165876 - protein, 171 aa, Artificial Sequence
  derived and/or modified sequence
MFAEAAKTTRPCGMAEFKEKPEAPTEQLDVACGQENLPVGAWPPGAAPAPFQYTPDHVVGPGADIDPTQITFPGCICVKTPCLPGTCSCLRHGENYDDNSCLRDIGSGGKYAEPVFECNVLCRCSDHCRNRVVQKGLQFHFQVFKTHKKGWGLRTLEFIPKGRKVEHQLWK

SEQ ID NO: 165877 - DNA, 2055 bp, Artificial Sequence
  derived and/or modified sequence
atgttcgcagaggccgccaagaccacccgtccctgcggcatggcggaattcaaggaaaaacctgaggcccctacagagcagctggatgtcgcatgcggccaggagaatctccctgtaggcgcgtggcctcctggagcagctccagccccattccagtacacccctgaccacgtggtaggaccaggagccgatatagacccaacacaaatcacttttcccggctgcatatgcgtaaagaccccatgcttgcccggcacatgctcttgtttgcgacatggagagaactacgacgataattcctgcctcagagatatcgggagtggcggaaagtacgccgaacctgtcttcgagtgtaatgtgctgtgcagatgctctgaccactgccggaaccgggtcgtgcagaagggactccagttccacttccaggtgtttaagacccacaaaaaagggtggggactcagaaccctggaatttatccctaagggccgtttcgtctgtgaatacgcaggtgaggtgctgggtttttcggaggttcaacgcaggattcacttacagaccaaaagcgactctaattacattattgccattcgagagcatgtttacaatggccaggtgatggagacgttcgttgatccaacatatattggcaacattggcagattcctcaaccattcttgcgagccaaatctgcttatgatccccgtgcgaattgacagcatggtcccaaagctcgccttattcgctgcgaaagacattgtacccgaggaggagttgtcctatgattactctggcaggtacctaaatctcactgtctccgaggacaaagaaagattagatcacggcaagctacggaagccctgttactgtggcgccaagtcatgtactgccttcctgccatttgattcaagcttatactgtcccgtggaaaaatcgaatatctcatgcggaaacgagaaggaaccctcaatgtgtgggtccgccccaagtgtcttcccaagttgcaagcgtctgacccttgaaaccatgaagatgatgttggacaagaaacagattcgggccatttttttatttgaatttaagatgggcaggaaggccgctgagactaccaggaatatcaacaacgccttcggccccgggaccgcgaacgagaggacagtccaatggtggtttaaaaaattttgtaaaggggacgagtctctggaagacgaggagaggagcggtagaccaagtgaggtggacaatgaccagttgcgcgccatcattgaggccgaccctctgactacaacgagggaagtagcggaagagctgaacgtcaaccactctactgtggtgcgtcacctgaagcagatcgggaaggttaaaaaacttgataagtgggtgccacatgaactaaccgaaaatcagaagaaccgaagattcgaagtgtcgagctccctgatcctccgcaatcataacgagcccttcctcgatcgcattgtaacttgcgatgaaaagtggatcttgtacgacaaccggagaagaagtgcccagtggctggaccaggaggaggctcccaaacatttccctaaaccgatcctgcatccaaagaaggtgatggtgacaatttggtggtcagccgccggtctgatccattacagtttcctgaatcccggagaaacaatcacttcagagaaatacgctcaagaaatcgatgagatgaaccaaaagcttcaacgcctgcagctcgcactggtaaaccggaaaggccccatcctcctgcacgataatgccaggcctcacgtggcacaacctaccctacagaaactgaatgagttaggatatgaggtgcttcctcacccaccctacagccccgatcttttgcccacaaattatcatgtatttaagcacctgaataactttctgcagggcaaacgatttcataaccagcaggacgccgagaacgccttccaggagttcgtagaaagccagtcaactgatttttacgctacaggcatcaaccaactgatttcacggtggcagaagtgtgtggactgtaacgggagctacttcgattag

SEQ ID NO: 165878 - DNA, 2055 bp, Artificial Sequence
  derived and/or modified sequence
atgtttgctgaggccgccaagaccacccggccctgtggcatggccgagttcaaggagaagccagaggcccccacagagcagctggatgtggcctgtggccaggagaacctgcctgtgggcgcctggcccccaggggccgccccagcccccttccagtacaccccagaccacgtggtgggccctggagctgacatcgaccccacccagatcaccttccctggctgcatctgtgtgaagaccccctgcctgcccggcacctgcagctgcctgcggcacggggagaactatgatgacaacagctgcctgcgggacatcggcagcggcggcaagtatgcagagcctgtgtttgaatgtaatgtgctgtgccgctgcagcgaccactgcaggaacagagtggtgcagaagggcctgcagttccacttccaggtgttcaagacccacaagaagggctggggcctgcggaccctggagttcatccccaagggccgctttgtgtgtgaatatgctggggaggtgctgggcttcagcgaggtgcagaggcgcatccacctgcagaccaagagtgacagcaactacatcatcgccatccgggagcacgtgtacaacggccaggtgatggagacctttgtggaccccacctacatcggcaacatcggccgcttcctgaaccacagctgtgagcccaacctgctgatgatccctgtgagaattgacagcatggtgcccaagctggccctgtttgctgccaaggacatcgtgcctgaggaggagctgtcctatgactacagcggccgctacctgaacctgactgtgtctgaggacaaggagcggctggaccacggcaagctgaggaagccctgctactgtggggccaagagctgcacagccttcctgccctttgacagcagcctgtactgccctgtggagaagagcaacatcagctgtggaaatgagaaggagcccagcatgtgtggcagcgcccccagcgtcttccccagctgcaagaggctgaccctggagaccatgaagatgatgctggacaagaagcagatccgggccatcttcctgtttgagttcaagatgggcaggaaggctgctgagaccaccaggaacatcaacaatgccttcggccctggaacagccaatgaaagaacagtgcagtggtggttcaagaagttctgcaagggagatgagagcctggaggatgaggagaggagcggccggcccagcgaggtggacaatgaccagctgcgggccatcattgaagctgaccccctgaccaccacccgggaggtggccgaggagctgaatgtgaaccacagcacagtggtgcgccacctgaagcagatcggcaaggtgaagaagctggacaagtgggtgccccatgagctgacagagaaccagaagaacagaagatttgaggtgagcagcagcctcatcctgaggaaccacaatgagcccttcctggaccgcatcgtgacctgtgatgagaagtggatcctgtatgacaacagaagaagaagtgcccagtggctggaccaggaggaggcccccaagcacttccccaagcccatcctgcaccccaagaaggtgatggtgaccatctggtggagcgctgctggcctcatccactacagcttcctgaaccctggagagaccatcaccagcgagaagtatgcccaggagattgatgagatgaaccagaagctgcagaggctgcagctggccctggtgaacaggaagggccccatcctgctgcatgacaatgcccggccccacgtggcccagcccaccctgcagaagctgaatgagctgggctatgaggtgctgccccaccccccctacagcccagacctgctgcccaccaactaccacgtgttcaagcacctgaacaacttcctgcagggcaagcgcttccacaaccagcaggatgctgaaaatgccttccaggagtttgtggagagccagagcacagacttctacgccaccggcatcaaccagctgatcagccgctggcagaagtgtgtggactgcaatggcagctactttgattag

SEQ ID NO: 165879 - DNA, 2055 bp, Artificial Sequence
  derived and/or modified sequence
atgttcgccgaggccgccaagaccacccggccctgcggcatggccgaattcaaggagaaaccggaggcccccaccgagcagttagatgtagcttgtggccaggaaaacctgccagtgggagcttggccacccggcgcagccccggccccattccagtatacacctgatcacgttgttggaccaggcgctgatatcgaccctacccagatcacgtttcctggatgcatatgtgtaaaaaccccctgcttgcccggtacatgttcctgtcttagacatggtgagaactatgacgacaacagctgtctgcgggatattggatcaggcggtaagtatgccgagccagtctttgaatgtaatgttctttgtaggtgttctgaccactgtagaaacagggttgtgcagaagggcctgcagttccactttcaggttttcaaaacgcacaagaaaggctggggactgcgcactctcgaattcatacccaagggccgcttcgtttgtgagtacgccggcgaagtgcttggattctcggaagtgcagagaaggattcacctgcagacaaagagcgactcaaattatatcatcgccatccgcgagcacgtgtataatggtcaagtaatggaaacatttgtcgatccaacctatattggaaacatcggacgttttcttaaccatagttgtgagcctaatttgctgatgattcctgtgagaattgattccatggtccctaagctggccctcttcgccgccaaagacattgtgcctgaggaagagctctcatacgactatagcgggcgttatctgaatctgaccgtgagcgaagacaaggagcgccttgaccatgggaaactgcgtaagccttgttattgtggcgctaagtcatgtactgctttcctcccatttgacagcagcctatactgccccgtagagaagtctaatatcagctgcggcaacgagaaggagccatcaatgtgtggtagcgcccccagtgtgttccctagctgtaagagattgacactggagacgatgaaaatgatgttggacaagaaacaaatacgcgccatttttctcttcgagtttaaaatgggcaggaaggccgcagagacaaccaggaatattaataatgcctttgggccgggaacagctaatgagcgtaccgtccaatggtggttcaagaagttttgcaagggcgatgagtctttggaggacgaagagaggagtgggagacccagtgaagtggacaatgaccagctgagagcaataatcgaggctgatcccctgaccactacccgggaagtggctgaggaactgaacgtgaatcactctacagtcgtcaggcacctgaaacagatcgggaaagtgaaaaaactggataagtgggtccctcatgaactgaccgaaaaccagaagaaccggcgtttcgaagtaagttcgtctcttattctcaggaaccacaatgaaccgtttctagacagaatcgtcacatgtgacgagaaatggatcttgtatgataacaggagaaggtctgcgcagtggcttgatcaggaggaagccccaaaacattttccgaagcctatccttcatcctaagaaggtcatggtcaccatctggtggagtgctgcaggcctaatccactatagcttcttgaaccccggcgaaactatcacttcggagaagtacgcccaggagatcgacgaaatgaatcagaaactgcaacgactccaactagcactggtgaacaggaaaggaccgatcctgctgcacgacaatgctcggcctcatgtcgcccagccaacccttcagaaattgaatgaattaggatatgaggtgctgccgcaccctccatactctcctgatctcttgcccaccaactaccacgttttcaaacatcttaataatttccttcaagggaaaagatttcataatcagcaggatgctgagaacgccttccaggagtttgtcgagtcccagtccactgatttttacgccaccgggattaatcagctgatttctcggtggcaaaaatgcgtggactgtaatgggtcatactttgattag

SEQ ID NO: 165880 - DNA, 2055 bp, Artificial Sequence
  derived and/or modified sequence
atgttcgcagaggccgctaagacgacgcgcccatgtggaatggccgaattcaaggaaaaaccagaggctccaacagaacagttagacgtggcgtgtgggcaggaaaatttgcccgtgggcgcatggcccccaggagccgcaccagcgccttttcaatatacacccgatcatgttgttggacctggggctgacattgatcctacacagatcacatttcctggttgtatttgtgtcaagacaccgtgtctcccaggaacatgctcttgtttgcggcacggagagaattatgacgacaactcatgccttagggatatcggtagcgggggtaaatacgcagagccagtcttcgagtgtaatgtactctgtaggtgcagcgaccactgtagaaacagagtggtgcagaaggggctccagttccacttccaggtgtttaagacccacaaaaaaggctggggcctccgcacgcttgaatttattcccaagggacggtttgtgtgcgagtacgctggcgaggtgctgggattttccgaagtccagaggagaattcatctccagactaaaagtgactcgaattatattatcgccatcagagaacatgtgtacaatggacaggtaatggagactttcgtcgatccaacatatattggcaacatagggcgatttcttaatcatagctgtgagccaaatctgctcatgatcccggtaagaattgactctatggttcctaaacttgcacttttcgccgctaaggacattgtcccggaagaggaactgtcatacgactattctgggcgatacctcaacctaaccgtctccgaggataaagagcgcttagatcacggaaaactcaggaagccatgttactgtggggcaaagagctgtacagcttttttgcctttcgattctagtctgtattgccccgtggagaaatccaatatctcctgcggcaatgagaaagaaccaagtatgtgtggctccgctccttccgtgttcccatcatgtaagagactgacccttgaaacgatgaaaatgatgctggacaaaaagcagatacgggctatctttctttttgagttcaagatggggagaaaagcagctgaaaccaccagaaatataaacaatgcctttgggccaggtactgccaatgaacggaccgtacagtggtggtttaagaaattttgcaagggagatgaatcgctggaagacgaggagcgctcaggcagaccgtctgaagtagacaatgatcagttgagagccattatcgaagctgatcccctgacaactacccgggaggtggcagaagagctaaacgtcaaccacagtaccgtggtcaggcatctcaaacagatagggaaggtaaagaaattggacaaatgggtaccacacgagctgactgagaatcagaaaaaccgtcgatttgaagtctcgtccagtctgatcctcagaaatcataatgaaccctttttggacagaatcgtgacctgtgacgagaagtggatcttgtatgataaccggcgacgttcagcgcagtggttggatcaagaggaagcacctaagcacttccctaagccaattctccaccccaagaaagtgatggtaaccatctggtggtccgccgctggcctcatccattatagtttcttgaaccctggggagaccatcacctcagaaaagtatgctcaagagattgatgagatgaatcagaagctgcaaagactacaattggccttggtcaacaggaaggggcctatcctacttcacgacaatgctcgccctcatgtggctcagccgactcttcagaagttgaacgagctgggctacgaggtgttgcctcaccccccttactcgcctgatctcctgcctactaattatcatgtattcaaacacctcaataactttctgcaggggaagcgctttcacaaccagcaggatgctgaaaacgcattccaggaattcgtggaaagtcagtccaccgatttttacgcgacaggcatcaaccagctgatttctcggtggcagaaatgcgttgactgcaatggatcctacttcgactag

SEQ ID NO: 165881 - DNA, 2443 bp, Artificial Sequence
  derived and/or modified sequence
acaagtcccagcatccaccgcgcggcccaggactgtcagggtagtgggcgttgcgtgaggcgggtaaatgttcgcggaagcggcaaagacgacacggccttgtgggatggcggagtttaaggagaagcctgaggccccgactgagcagctggatgtcgcgtgcggccaggaaaacttgccggtgggcgcgtggcccccgggggccgcgccggcgcccttccagtacactcctgatcatgtagttggacctggagcagacattgatcccactcaaataacctttcccggatgcatttgtgtcaaaactccctgcctccctggcacttgctcctgtctccgccatggagagaactatgatgataactcatgccttagagatataggatctggaggaaagtatgcagagcctgtttttgaatgcaatgtcctgtgccgatgcagtgaccactgcagaaacagagtggtccagaaaggtctacagttccacttccaagtgttcaagacgcataaaaaaggctggggacttcgtaccttggaatttataccgaaaggaaggtttgtctgtgaatatgctggtgaggttttaggattctctgaagttcagagaagaattcacttacaaacaaaatccgactccaattacattatagccatcagggaacatgtttataatgggcaggtaatggaaacatttgttgaccctacttatataggaaatattggaagattccttaatcattcttgtgagccaaaccttttgatgattcctgtccgaattgactcaatggtacctaagttggcactttttgcagccaaagatattgtgccagaagaagaactctcttatgattattcaggaagatatcttaatctaacagtcagtgaagacaaagaaaggctagatcatgggaaactaaggaaaccttgttactgtggtgccaaatcatgtactgctttcctgccttttgacagttctctgtactgccccgtagaaaagtcgaacatcagttgtggaaatgagaaggaacccagcatgtgtggctcagccccttctgtgttcccctcctgcaagcgattgacccttgagactatgaaaatgatgttagacaaaaagcaaattcgagcaattttcttattcgagttcaaaatgggtcgtaaagcagcagaaacaactcgcaacatcaacaatgcatttggcccaggaactgctaacgaacgtacagtgcagtggtggttcaagaagttttgcaaaggagatgagagccttgaagatgaggagcgtagtggccggccatcagaagttgacaacgaccagttgagagcaatcatcgaagctgatccccttacaactacacgagaagttgctgaagaactcaatgtcaaccattctacggtcgttcgacatttgaagcaaattggaaaggtgaaaaagctcgataagtgggtgcctcatgagctgactgaaaatcaaaaaaatcgtcgttttgaagtgtcatcttctcttattctacgcaaccacaacgaaccatttctcgatcggattgtgacgtgtgatgaaaagtggattttatatgacaaccggcgacgatcagctcagtggttggatcaagaagaagctccaaagcacttcccaaagccaatcttgcacccaaaaaaggtcatggtcactatttggtggtctgctgctggtctgatccactacagctttctgaatcccggtgaaaccattacatctgagaagtatgctcaggaaatcgatgagatgaaccaaaaactgcaacgcctgcagctggcattggtcaacagaaagggcccaattcttctccacgacaatgcccgaccgcatgttgcacaacccacacttcaaaagttgaatgaattgggctatgaagttttgcctcatccaccgtattcacctgacctcttgccaaccaactaccacgtctttaagcatctcaacaactttttgcagggaaaacgcttccacaaccagcaggatgcagaaaatgctttccaagagttcgtcgaatcccaaagcacggatttttacgctacaggaataaaccaacttatttctcgttggcaaaaatgtgttgattgtaatggttcctattttgattaataaaaatgcgttgagcctagttataatgatttaaaattcacagtccaaaaccgcagttagttttgcaccaacccaatatcttcatagattgaaatataaattaaaattgcatttgaagtagattccacggactttattaagaatgtagaaatgtggcctggcatggtggcttacaactgtaatcccagcactttgggaggcccaggcgggcagatcacttgagtccaattgttcaggaccagcctgggcaacatagtgagaccctgactctaataaaataattttttaaaaaaagattaaaacatgtaccttgaaaagcat

SEQ ID NO: 165882 - DNA, 2055 bp, Artificial Sequence
  derived and/or modified sequence
atgttcgccgaggccgccaagaccaccagaccctgcggcatggccgagttcaaggagaagcccgaggcccccaccgagcagctggacgtggcctgcggccaggagaacctgcccgtgggcgcctggccccccggcgccgcccccgcccccttccagtacacccccgaccacgtggtgggccccggcgccgacatcgaccccacccagatcaccttccccggctgcatctgcgtgaagaccccctgcctgcccggcacctgcagctgcctgagacacggcgagaactacgacgacaacagctgcctgagagacatcggcagcggcggcaagtacgccgagcccgtgttcgagtgcaacgtgctgtgcagatgcagcgaccactgcagaaacagagtggtgcagaagggcctgcagttccacttccaggtgttcaagacccacaagaagggctggggcctgagaaccctggagttcatccccaagggcagattcgtgtgcgagtacgccggcgaggtgctgggcttcagcgaggtgcagagaagaatccacctgcagaccaagagcgacagcaactacatcatcgccatcagagagcacgtgtacaacggccaggtgatggagaccttcgtggaccccacctacatcggcaacatcggcagattcctgaaccacagctgcgagcccaacctgctgatgatccccgtgagaatcgacagcatggtgcccaagctggccctgttcgccgccaaggacatcgtgcccgaggaggagctgagctacgactacagcggcagatacctgaacctgaccgtgagcgaggacaaggagagactggaccacggcaagctgagaaagccctgctactgcggcgccaagagctgcaccgccttcctgcccttcgacagcagcctgtactgccccgtggagaagagcaacatcagctgcggcaacgagaaggagcccagcatgtgcggcagcgcccccagcgtgttccccagctgcaagagactgaccctggagaccatgaagatgatgctggacaagaagcagatcagagccatcttcctgttcgagttcaagatgggcagaaaggccgccgagaccaccagaaacatcaacaacgccttcggccccggcaccgccaacgagagaaccgtgcagtggtggttcaagaagttctgcaagggcgacgagagcctggaggacgaggagagaagcggcagacccagcgaggtggacaacgaccagctgagagccatcatcgaggccgaccccctgaccaccaccagagaggtggccgaggagctgaacgtgaaccacagcaccgtggtgagacacctgaagcagatcggcaaggtgaagaagctggacaagtgggtgccccacgagctgaccgagaaccagaagaacagaagattcgaggtgagcagcagcctgatcctgagaaaccacaacgagcccttcctggacagaatcgtgacctgcgacgagaagtggatcctgtacgacaacagaagaagaagcgcccagtggctggaccaggaggaggcccccaagcacttccccaagcccatcctgcaccccaagaaggtgatggtgaccatctggtggagcgccgccggcctgatccactacagcttcctgaaccccggcgagaccatcaccagcgagaagtacgcccaggagatcgacgagatgaaccagaagctgcagagactgcagctggccctggtgaacagaaagggccccatcctgctgcacgacaacgccagaccccacgtggcccagcccaccctgcagaagctgaacgagctgggctacgaggtgctgccccaccccccctacagccccgacctgctgcccaccaactaccacgtgttcaagcacctgaacaacttcctgcagggcaagagattccacaaccagcaggacgccgagaacgccttccaggagttcgtggagagccagagcaccgacttctacgccaccggcatcaaccagctgatcagcagatggcagaagtgcgtggactgcaacggcagctacttcgactag

SEQ ID NO: 165883 - protein, 613 aa, Artificial Sequence
  derived and/or modified sequence
MGRGGGGLDVGGGGEGSRDRLSRDGLASWGAEPGGGGSGSGSSSPPSSSSCSSRNKYQPQSGSSGPSSHSPPAAMALQSQASEEAKGPWQEADQEQQEPVGSPEPESEPEPEPEPEPVPVPPPEPQPEPQPLPDPAPLPELEFESERVHEPEPTPTVETRGTARGFQPPEGGFGWVVVFAATWCNGSIFGIHNSVGILYSMLLEEEKEKNRQVEFQAAWVGALAMGMIFFCSPIVSIFTDRLGCRITATAGAAVAFIGLHTSSFTSSLSLRYFTYGILFGCGCSFAFQPSLVILGHYFQRRLGLANGVVSAGSSIFSMSFPFLIRMLGDKIKLAQTFQVLSTFMFVLMLLSLTYRPLLPSSQDTPSKRGVRTLHQRFLAQLRKYFNMRVFRQRTYRIWAFGIAAAALGYFVPYVHLMKYVEEEFSEIKETWVLLVCIGATSGLGRLVSGHISDSIPGLKKIYLQVLSFLLLGLMSMMIPLCRDFGGLIVVCLFLGLCDGFFITIMAPIAFELVGPMQASQAIGYLLGMMALPMIAGPPIAGLLRNCFGDYHVAFYFAGVPPIIGAVILFFVPLMHQRMFKKEQRDSSKDKMLAPDPDPNGELLPGSPNPEEPI

SEQ ID NO: 165884 - DNA, 1842 bp, Artificial Sequence
  derived and/or modified sequence
atgggcagggggggcgggggcctcgatgttggaggaggaggcgaaggctcacgggaccgcctgagccgagacggccttgcctcatggggggccgaaccggggggcggtggttcaggaagcggttcctcttcaccaccatcctcatcctcttgttccagccggaacaaatatcagccacaaagcggttcttctgggccgtcatctcactccccccccgccgccatggcactccaatcacaggccagcgaggaggccaaagggccgtggcaggaagccgaccaggagcagcaggaacctgtgggttcccctgaaccggagagtgaacccgagccagagccagaaccagagcctgtaccagtaccccccccggaaccacagccagaaccccagccccttcctgatcctgcacccctccctgagcttgagttcgagtctgagcgggtccatgaacccgaacccacacccactgtggaaacccgggggactgcccgcggatttcagccacccgagggcggattcgggtgggtagtggtctttgcagccacgtggtgcaacggcagcatcttcggtattcataatagtgtcggaattctgtacagcatgctgcttgaggaggagaaggaaaaaaaccgccaggtggagttccaggctgcgtgggtcggggccctggcaatggggatgatctttttctgttcaccaatagtttctatattcacagacaggctcggctgccggattactgcgaccgccggagcggccgttgctttcatcggacttcatactagttccttcacttccagtcttagtctgcggtactttacttacgggatcctgttcggttgcggatgctcgttcgcctttcagccttcccttgtcattttgggccactatttccagcgtagactgggcctcgcaaacggtgtggtcagcgctgggagctccatatttagcatgtcttttccctttcttattcgtatgctaggtgataaaatcaaattggctcagaccttccaagtactgagtactttcatgttcgtgctgatgctcctaagtttgacatatcggcccctcctaccttcatcacaggacaccccttccaaacggggggtacgtaccctgcaccagaggttcctggcgcagcttaggaagtactttaatatgcgcgttttcagacagaggacatatcggatatgggccttcgggattgccgccgcagccttggggtatttcgtgccatatgtgcatctgatgaaatacgttgaagaggagttcagtgagattaaagagacatgggtcctcctggtgtgtatcggcgctaccagcggattgggaaggctggtttcagggcacatctctgattctatccccgggcttaaaaaaatatacctgcaggttctgagttttctactgctcggcctgatgtcgatgatgataccgctctgcagggactttggaggccttatagtggtttgcttgttcctcggcctctgcgacgggtttttcattacgatcatggcacctattgcctttgagctggtgggtcccatgcaggcctcacaggccatcggatacctgctgggcatgatggccctgccaatgatcgctgggcctcctatcgccggcctcctgagaaattgttttggagactaccacgtggcattttacttcgctggtgtgccaccgatcatcggggccgttattctgttttttgtgccgcttatgcatcagcggatgttcaagaaagagcagagagatagctccaaagacaagatgctcgcccctgatccagaccccaacggagaacttctcccaggatcacccaatccagaggagccaatctag

SEQ ID NO: 165885 - DNA, 1842 bp, Artificial Sequence
  derived and/or modified sequence
atgggccggggcggcggcggcctggatgtgggcggcggcggggagggcagccgggaccggctgagcagagatggcctggcctcctggggcgctgagcccggcggcggcggcagcggcagcggcagcagcagcccccccagcagcagcagctgcagcagcaggaacaagtaccagccccagagcggcagcagcggccccagcagccacagccccccagctgccatggccctgcagagccaggccagcgaggaggccaagggcccctggcaggaggccgaccaggagcagcaggagcctgtgggcagccctgagcctgagagcgagcctgagcctgagcctgagcctgagcctgtgcctgtgcccccacctgagccccagcctgagccccagcccctgcctgaccctgcccccctgcctgagctggagtttgaaagtgagcgggtgcatgagcctgagcccacccccaccgtggagacccggggcacagcccggggcttccagcccccagagggcggcttcggctgggtggtggtgtttgctgccacctggtgcaatggcagcatcttcggcatccacaacagcgtgggcatcctgtacagcatgctgctggaggaggagaaggagaagaaccggcaggtggagttccaggccgcctgggtgggcgccctggccatgggcatgatcttcttctgcagccccatcgtgtccatcttcacagaccggctgggctgccgcatcacagccacagctggagctgctgtggccttcatcggcctgcacaccagcagcttcaccagcagcctgagcctgcgctacttcacctacggcatcctgtttggctgcggctgcagctttgccttccagcccagcctggtgatcctgggccactacttccagaggcggctgggcctggccaacggggtggtgtctgctggcagcagcatcttctccatgtccttccccttcctgatccgcatgctgggggacaagatcaagctggcccagaccttccaggtgctgagcaccttcatgtttgtgctgatgctgctgagcctgacctaccggcccctgctgcccagcagccaggacacccccagcaagaggggcgtgaggaccctgcaccagcgcttcctggcccagctgaggaagtacttcaacatgagggtcttccggcagaggacctaccgcatctgggccttcggcattgctgctgctgccctgggctactttgtgccctacgtgcacctgatgaagtatgtggaggaggagttcagcgagatcaaggagacctgggtgctgctggtgtgcattggagccaccagcggcctgggccgcctggtgtctggccacatcagtgacagcatccctggcctgaagaagatctacctgcaggtgctgtccttcctgctgctgggcctgatgtccatgatgatccccctgtgccgggactttggaggcctcatcgtggtgtgcctcttcctgggcctgtgtgatggcttcttcatcaccatcatggcccccatcgcctttgagctggtgggccccatgcaggccagccaggccatcggctacctgctgggcatgatggccctgcccatgattgctggcccccccatcgccggcctgctgaggaactgctttggagactaccacgtggccttctactttgctggggtgccccccatcattggagctgtgatcctcttctttgtgcccctgatgcaccagaggatgttcaagaaggagcagagggacagcagcaaggacaagatgctggccccagaccctgaccccaatggagagctgctgcccggcagccccaaccctgaggagcccatctag

SEQ ID NO: 165886 - DNA, 1842 bp, Artificial Sequence
  derived and/or modified sequence
atgggccggggcggcggcggcctggacgtgggcggcggcggcgaggggagccgcgatcggttatcacgtgacgggttggctagttggggcgctgagccaggtggcggaggttctggatctggctcttctagtccacccagttcctcttcatgttcatcaagaaataaatatcagccccagtctgggtccagtggcccctctagtcactctccaccagccgctatggcccttcagtcacaggcttcagaagaggcgaaaggaccttggcaggaggccgaccaggagcagcaggagcctgtgggatctcctgaaccagaaagcgagccagaacctgagccagagcctgagcccgtccccgtccctccacctgagccgcagcccgaaccccagcctctccctgatcccgcacccttaccggagctcgagttcgagtctgagcgcgtgcatgagcctgagcctacacctacagtggagacccgaggcacagcccgcggcttccagccccctgaggggggattcggctgggtggttgtgtttgctgcaacatggtgcaacgggtcgatctttggaatccataatagtgttggcatcctatatagcatgcttcttgaggaggaaaaggagaagaatcggcaagtggagttccaggcagcttgggtgggcgctctcgctatgggcatgatctttttttgcagtcctatcgtatcaattttcacggatcggctgggttgcaggatcaccgctactgccggggccgccgtggcgttcatcggtctgcatacatccagctttactagcagcctcagtttgaggtattttacttacggtatcctgttcggctgcgggtgttccttcgcgttccagcccagcctggtcattctgggccactactttcagagaagattaggactcgccaatggagtcgtgtcggccggcagttccattttcagcatgagttttccttttctgattaggatgttaggggacaaaattaagcttgcccagacattccaagtactgtcaaccttcatgttcgtgttaatgctgctgtcgttgacttacagacctctgcttccatcttctcaggataccccttctaagcgaggcgtcagaaccttgcatcagcgattcctggctcagctcagaaaatactttaacatgagggtttttagacaacgcacataccggatctgggcttttggcatcgccgccgcggctctcggctattttgtgccctacgtccatctgatgaaatacgtagaagaagagttctcagagattaaagagacatgggtccttctagtttgcatcggggccacaagcggattggggagactggtatctggccatattagcgattccatcccaggtctgaagaaaatttatcttcaggtgctgtcttttctgctgctggggctgatgtctatgatgatcccgctgtgtagagattttgggggactaatcgttgtgtgcctgtttctgggcctctgcgatggattttttatcacgatcatggctccgatagcattcgagctcgtagggcctatgcaggcctcacaagccatagggtacttactcggaatgatggccttgcctatgattgctggaccacctattgcgggactgctgaggaactgcttcggtgactaccacgtggctttttacttcgcgggggtacccccaatcattggggcggttattctgttcttcgtgccattaatgcaccagagaatgttcaaaaaagagcagcgtgactcgtcaaaggataagatgcttgcaccggacccagatccaaacggtgagttgctgccaggcagcccgaaccccgaggagccgatctag

SEQ ID NO: 165887 - DNA, 1842 bp, Artificial Sequence
  derived and/or modified sequence
atgggaagagggggaggaggcttagatgttggagggggtggcgaagggtccagggatcgcctttctagagatgggcttgcctcgtggggggcagagccagggggtggcggaagcggatccgggtcttccagccccccatcctcgagctcatgtagctcccgtaacaagtatcaaccccaatccggctccagcggcccatcctcacatagtccgccagcggcaatggccctccaaagccaagccagtgaggaagcgaaggggccttggcaagaggccgaccaagaacagcaggaaccagtggggtctcctgaaccagaaagcgagcccgagcccgaacctgaacctgagcccgtgcctgtgccacccccagaaccgcagcccgagccccagcccttgccagaccctgcaccactgccagagctggaattcgagagtgagagagtgcacgagccagagcccacccccactgtagaaactaggggaaccgccaggggattccaaccacctgagggaggtttcgggtgggtcgtggtgtttgccgctacctggtgcaatgggtctatttttgggatccataattccgttgggattctgtattctatgttgcttgaagaggaaaaggagaagaacaggcaggtggaattccaggccgcttgggtgggtgcgctcgcaatggggatgatttttttctgttcccccatcgtgtccattttcactgataggttgggttgcagaattactgcgactgccggtgccgcagtcgcttttattgggctacacacctccagcttcaccagcagcttaagcctccgatactttacgtatggcattctctttgggtgcggctgttcatttgctttccaaccaagtctggttattcttggtcactactttcagcggcgattgggactggcaaatggcgtagtgagcgccggaagcagtattttcagtatgtccttccctttccttattcgcatgctgggggacaagattaaattggcccaaacgttccaggtgctgagcacatttatgtttgtactcatgctgttgagtctcacgtacagaccattgttacctagcagccaagacaccccaagtaagcggggagtaagaactctgcaccagcggttcttggcacagctacggaaatacttcaatatgcgagtgtttcggcaacgcacctatcggatttgggcctttggtatcgcagcagctgccctgggttactttgtcccatacgtccacttgatgaaatacgtggaagaagagttcagcgagataaaagagacctgggtcctcttggtgtgcattggagccacctccgggctagggagactggtttccggccatatttctgattcaatccccggattgaaaaagatttatctgcaggttttgagctttctgctgttgggacttatgtctatgatgatcccgctatgtagggattttggaggtttaatcgtggtttgtttgttccttgggctgtgtgacggtttcttcatcaccattatggcaccgattgcctttgaattagttgggcctatgcaagcctcccaggccataggctacctacttggaatgatggctcttccaatgatcgctggacctccaatagcagggttgctgaggaactgcttcggcgattaccacgtggctttttacttcgcgggtgtgccacccatcatcggcgcagttattctcttcttcgtgcccctgatgcatcagagaatgttcaagaaggaacaaagagactcctctaaggataagatgttggctccagatcccgatccaaatggtgagctgctgccaggatctccaaaccccgaagaacctatttag

SEQ ID NO: 165888 - DNA, 4819 bp, Artificial Sequence
  derived and/or modified sequence
gctgcatggccgcctcctcccctcccaggccgccagggatttgccgggaagagcgggggcagggggagactcccgggggtgcgcaggaccgcggggggccgagtcctcgggctcgagaagattgtgtccacccgctgtccgaggcccaggctgtcccctcaggtcgtcctcctcaagtccaaggagggacatgggagctcctgagggcagggtggggttcctcgcgggccagctgtcgtcctagggtccccggtgccacctcagttgcgggctgcttgtgaggaaggagggtatgggagcaaaaaataggaggggtcttcccgaggctcggggttgatcagtgtcggttctagagcctgcggggaaaagagggcaggagaacaggatagtttgtgcttccttttttccattttaacttttcctctaacgggcatccgggcaagaacagggttcagtagtttgggaagggagctgggggaggcagtggcggctggagtaggtaggcgagtaaaaggaggaggaagggctggggagaagagcgaggctgtagcggctgcctgttgagggaggaagaggtggggggtgtggaggagggggaggagagagagatgacatggggagaggaggaggggggttggacgtgggaggaggaggagagggctcgagggaccgtctgtcgcgggacgggctggccagctggggcgcggagcctggaggaggaggcagcggcagcggcagcagcagccctccgagcagcagcagctgcagcagcagaaacaagtaccagccacaaagcggctcctctggcccaagcagccacagtccccccgccgcgatggcgctgcaaagccaggcgagcgaggaagcaaaggggccctggcaggaggcagaccaggaacagcaggagccggtgggtagcccagagccggagtctgagccggagcctgagcccgagcccgagcccgtgccagtgcccccgcccgagccccagccggagccccagcccctaccggaccccgcacccctgccggagctggagttcgagtccgagcgggtgcacgaacccgagcccacgcctacggtagagacccgcggcaccgcgcgcggcttccagcctcccgaaggtggcttcggctgggtggtggtgttcgctgccacctggtgcaacggctccatcttcggcatccataactctgtcgggatcctctactccatgctgctagaggaggaaaaggaaaaaaatcgccaagtggagttccaagcagcatgggtcggagccctcgcgatgggtatgatcttcttctgttctcccattgtgagtatattcactgaccgtttgggctgccgaatcacagcaaccgcgggggctgccgttgctttcattggcctccataccagctccttcaccagctccctaagcctgcgctacttcacctacgggattctctttggttgtggctgttccttcgcctttcagccatccctcgtcatcctgggccactactttcaacgccgcctgggtctggccaatggtgtggtgtctgctgggagtagcattttctccatgtccttccccttcctcatcagaatgctgggggataagatcaagctggcccaaaccttccaggtgctgagtaccttcatgtttgttcttatgctgctttcactcacctaccggcccctcctgcccagctcccaggacaccccaagcaagagaggtgtccgcaccctgcaccagcgctttctggctcagctcaggaagtacttcaacatgcgagtgttccgccaacgcacttaccgcatctgggccttcggaattgctgctgctgcccttggctactttgttccctatgtacacctgatgaagtatgtggaggaggagttctcagaaatcaaggagacctgggtgctcttggtgtgtattggggctacctcaggccttgggcgtcttgtgtcaggccacatcagtgactccatccctggacttaagaagatctacttgcaggtcctttccttcctgctcctgggcctgatgtccatgatgattcccctgtgccgggacttcgggggccttatcgtcgtctgtcttttcctgggcctttgcgatggcttcttcatcaccatcatggcccccattgcatttgagctggtgggcccaatgcaggcctcacaggccattggctacctcctgggcatgatggccctgccaatgattgctgggccccccattgcaggcctactccgcaactgttttggggactaccatgtggccttctactttgccggtgtgccccccatcatcggggctgtaatcctcttcttcgtccctctgatgcatcaaaggatgttcaagaaagagcagagagattccagcaaggataagatgttggcccctgacccagaccccaatggggagctactgccgggctcccccaaccctgaggaaccaatctaatgcctttcttgccattgtgtgccctttcccagctcttccccttcatcccaccctgctcagcatttacatttttgccaccagcacacttgttcccagacctgcgcacacagcatttcagccacctgacaatctccttggagtcaaagctccaggtgttccaaactcattaactaaattctccccagaatgcttttaaattttccagggcctttctcctcccaggatctgggaaagcttgggaaccacccctggcctttggaacctctccatatactttctaagctctgggggaggaggaggatgggacctcctggacccagcttgttagtcacccactataatcaactgccaaaggtgctactgtgtccccaggagcctaatagggtaggcccaaatctctgtttgctgaggaggtcattgccatccatatttgggagccactgggtggaggggcagggaggcaaaatgagacaagtagccttggttagtcttagagttgctgatgactgtggcttcccaagaactgggtacaagcagtgcccttattgtatggttggttaacagtctgctcccctcttcccttccttctttttttcctctactgacttctctccatactctttcccctctatttctttgtatgactgtcatagacacatgggtgcttgaagaaaggagggacccggaacttgggccaatcagcctcaccttgtcccagtccactcctaacactagcatcagtcccactcatctcaggctgagccacatctcactttttcgctcaagctatataatcctagactggaagagtagaatatcatatagggaagaaaccttaaacaccacagtgttccatgttccagtcactgatttttacaaatcttacagtccaaggcattaacctcaaggccctcccagcaccccattcttgtatacacatggcaaaatgtgaagaaactcctttcatctcagcaggtagaggaggactgatgacacgagctgccatggcgggaggaggggcagtagttattgatatggtgagccccatctctcagttttcatgacaggtctatatttctacctgggccaggccaggaaagagactatttaagaaaaaaaaaatcaattcctagcctggatcccaaaaaggtacaggcagcagttgcacatagggttggaaaatttcttttgggaaggggaagccatcccagcctttaccacccaatgtgtctcccatgctgggcatcctaggccactttgcttagagggcattaaaggtgccatgaaaggtagactctgaaccactttgatccctctgaagtaggtgactgatgcctccttatgcccaggctctggcaacagtcttactgaagaacattcccagtgcccctggctaggggcagagggcactgccaggctgtgttcagttagcacagctcacctcattaggagctcagcctctctcctcactctgcctctttgtgtctctttttctcctctctgagcctttgtctattgtgttcctgtcacccaccctttcatcatctttttgccaggcattcctggctgtcacttggagccaacagtaacttgccaccttaaggcagggtcatccccgggccaggaggatgaggttgtcctgaggggctccaaagaagacaatagttcccactcatgattttccgttacaaacaggcagctggggcatggttggcctccaatgatttcattcaaggccaaagtcctgagccccctccgctggtcccagtccagctcttatcaactccccaaaggaaaacccactggttcttagctctgtgggtaggaaggggccctagaaagggcctagttactatcctgtcagttctaacagtagtggaacaggagaatctgggccctaggagccctgtaactcccaggagagaccactgaaaatactggagcaacaatgcccctgcttccatttctccccacctcactctcaccaagtcaccagagggtggttctgtaggacctcttttgttgcttaagatgcagatggctcttaagaatcaggcagtcgcccacttctctccagatgaagggaagacattcataggtcccaaatctgcccattcagatgtcacataatatggtgggatatcaatttacttcttccacacatgtggttgtgcacatgtgagcttgtgtgcttttggagagaatgttgattggcaaaagcagcacagtattaatatttagagtaggatgcagcctcttatgcaccacagttaaatctagaacgaacaaaatttcagagctcaagacatgggacatttaaatcctcaaggagtttggaacaaaataaacagatctaaaaatttg

SEQ ID NO: 165889 - DNA, 1842 bp, Artificial Sequence
  derived and/or modified sequence
atgggcagaggcggcggcggcctggacgtgggcggcggcggcgagggcagcagagacagactgagcagagacggcctggccagctggggcgccgagcccggcggcggcggcagcggcagcggcagcagcagcccccccagcagcagcagctgcagcagcagaaacaagtaccagccccagagcggcagcagcggccccagcagccacagcccccccgccgccatggccctgcagagccaggccagcgaggaggccaagggcccctggcaggaggccgaccaggagcagcaggagcccgtgggcagccccgagcccgagagcgagcccgagcccgagcccgagcccgagcccgtgcccgtgcccccccccgagccccagcccgagccccagcccctgcccgaccccgcccccctgcccgagctggagttcgagagcgagagagtgcacgagcccgagcccacccccaccgtggagaccagaggcaccgccagaggcttccagccccccgagggcggcttcggctgggtggtggtgttcgccgccacctggtgcaacggcagcatcttcggcatccacaacagcgtgggcatcctgtacagcatgctgctggaggaggagaaggagaagaacagacaggtggagttccaggccgcctgggtgggcgccctggccatgggcatgatcttcttctgcagccccatcgtgagcatcttcaccgacagactgggctgcagaatcaccgccaccgccggcgccgccgtggccttcatcggcctgcacaccagcagcttcaccagcagcctgagcctgagatacttcacctacggcatcctgttcggctgcggctgcagcttcgccttccagcccagcctggtgatcctgggccactacttccagagaagactgggcctggccaacggcgtggtgagcgccggcagcagcatcttcagcatgagcttccccttcctgatcagaatgctgggcgacaagatcaagctggcccagaccttccaggtgctgagcaccttcatgttcgtgctgatgctgctgagcctgacctacagacccctgctgcccagcagccaggacacccccagcaagagaggcgtgagaaccctgcaccagagattcctggcccagctgagaaagtacttcaacatgagagtgttcagacagagaacctacagaatctgggccttcggcatcgccgccgccgccctgggctacttcgtgccctacgtgcacctgatgaagtacgtggaggaggagttcagcgagatcaaggagacctgggtgctgctggtgtgcatcggcgccaccagcggcctgggcagactggtgagcggccacatcagcgacagcatccccggcctgaagaagatctacctgcaggtgctgagcttcctgctgctgggcctgatgagcatgatgatccccctgtgcagagacttcggcggcctgatcgtggtgtgcctgttcctgggcctgtgcgacggcttcttcatcaccatcatggcccccatcgccttcgagctggtgggccccatgcaggccagccaggccatcggctacctgctgggcatgatggccctgcccatgatcgccggcccccccatcgccggcctgctgagaaactgcttcggcgactaccacgtggccttctacttcgccggcgtgccccccatcatcggcgccgtgatcctgttcttcgtgcccctgatgcaccagagaatgttcaagaaggagcagagagacagcagcaaggacaagatgctggcccccgaccccgaccccaacggcgagctgctgcccggcagccccaaccccgaggagcccatctag

SEQ ID NO: 165890 - protein, 92 aa, Artificial Sequence
  derived and/or modified sequence
MEDYQAAEETAFVVDEVSNIVKEAIESAIGGNAYQHSKVNQWTTNVVEQTLSQLTKLGKPFKYIGNGVLFLLYLRDGFLTLIRGASSTRNNS

SEQ ID NO: 165891 - protein, 67 aa, Artificial Sequence [sequence omitted]

SEQ ID NO: 165892 - protein, 113 aa, Artificial Sequence
  derived and/or modified sequence
MEDYQAAEETAFVVDEVSNIVKEAIESAIGGNAYQHSKVNQWTTNVVEQTLSQLTKLGKPFKYIVTCVIMQKNGAGLHTASSCFWDSSTDGSCTVRWENKTMYCIVSAFGLSI

SEQ ID NO: 165893 - DNA, 342 bp, Artificial Sequence
  derived and/or modified sequence
atggaggactaccaggccgccgaggagaccgccttcgtggtggacgaggtgagcaacatcgtgaaggaggccatcgagagcgccatcggcggcaacgcctaccagcacagcaaggtgaaccagtggaccaccaacgtggtggagcagaccctgagccagctgaccaagctgggcaagcccttcaagtacatcgtgacctgcgtgatcatgcagaagaacggcgccggcctgcacaccgccagcagctgcttctgggacagcagcaccgacggcagctgcaccgtgagatgggagaacaagaccatgtactgcatcgtgagcgccttcggcctgagcatctag

SEQ ID NO: 165894 - DNA, 342 bp, Artificial Sequence
  derived and/or modified sequence
atggaagattaccaagccgcggaggagacagccttcgtggtggacgaagtctccaatatagtaaaggaagctattgagagcgccattggaggcaacgcctatcagcacagcaaggtaaatcaatggactacgaacgtggtggaacagactctgtcccagttgaccaagctcgggaaaccatttaagtatatcgtaacctgcgtcataatgcagaagaacggtgcagggctccacaccgcctcctcttgcttctgggacagctctacggacggttcttgcactgttcgatgggagaacaaaaccatgtattgcattgtcagcgccttcgggctgtcaatctag

SEQ ID NO: 165895 - DNA, 726 bp, Artificial Sequence
  derived and/or modified sequence
agggagccggaggggacgcgccggaggaaagatggaagactaccaggctgcggaggagactgcttttgttgttgatgaagtgagcaacattgtaaaagaggctatagaaagcgcaattggtggtaacgcttatcaacacagcaaagtgaaccagtggaccacaaatgtagtagaacaaactttaagccaactcaccaagctgggaaaaccatttaaatacatcgtgacctgtgtaattatgcagaagaatggagctggattacacacagcaagttcctgcttctgggacagctctactgacgggagctgcactgtgcgatgggagaataagaccatgtactgcatcgtcagtgccttcggactgtctatttgacctgcagtccagcctatggcctttctccttttgtctctagttcatcctctaaccaccagccatgaattcagtgaactcttttctcattctctttgttttgtggcactttcacaatgtagaggaaaaaaccaaatgaccgcactgtgatgtgaatggcaccgaagtcagatgagtatccctgtaggtcacctgcagcctgcgttgccacttgtcttaactctgaatatttcatttcaaaggtgctaaaatctgaaatctgctagtgtgaaacttgctctactctctgaaatgattcaaatacactaattttccatactttatacttttgttagaataaattattcaaatctaaa

SEQ ID NO: 165896 - DNA, 342 bp, Artificial Sequence
  derived and/or modified sequence
atggaggactaccaggccgctgaggagacagcctttgtggtggatgaggtgagcaacatcgtgaaggaggccattgaaagtgccatcggcggcaatgcctaccagcacagcaaggtgaaccagtggaccaccaacgtggtggagcagaccctgagccagctgaccaagctgggcaagcccttcaagtacatcgtgacctgtgtgatcatgcagaagaatggagctggcctgcacacagccagcagctgcttctgggacagcagcacagatggcagctgcaccgtgcgctgggagaacaagaccatgtactgcatcgtgtctgccttcggcctgagcatctag

SEQ ID NO: 165897 - DNA, 342 bp, Artificial Sequence
  derived and/or modified sequence
atggaggactaccaggccgccgaggagaccgccttcgtggtggacgaggtttcaaacatagtcaaggaagctatcgagtctgcaatcggaggtaatgcttatcagcattccaaagtgaaccagtggactacgaacgttgttgagcagaccttgagccaactgaccaaactggggaagcctttcaagtatatcgtgacatgtgtgattatgcagaagaatggggcggggttacacacagctagtagctgtttctgggattcctcaaccgacgggtcgtgtacggtgcggtgggaaaacaagaccatgtattgcattgttagtgcgttcggactcagcatatag

SEQ ID NO: 165898 - DNA, 342 bp, Artificial Sequence
  derived and/or modified sequence
atggaagattaccaagcggctgaagaaaccgccttcgttgtggatgaggtgagtaacattgtaaaagaggcaattgagtcagctatcggtggaaatgcatatcaacacagcaaagtaaaccaatggaccacaaatgttgtggagcaaacattgtcccagctcactaagctaggaaagccatttaagtacatcgtcacctgcgtgattatgcagaaaaacggcgctggtttgcatacagctagtagctgtttctgggattctagtaccgacgggagttgtacagtgcgttgggaaaacaaaaccatgtactgcattgtcagcgccttcggcctgtcaatttag

SEQ ID NO: 165899 - protein, 116 aa, Artificial Sequence
  derived and/or modified sequence
MEEYHRHCDEVGFNAEEAHNIVKECVDGVLGGEDYNHNNINQWTASIVEQSLTHLVKLGKAYKYIVTCAVVQKSAYGFHTASSCFWDTTSDGTCTVRWENRTMNCIVNVFAIAIVL

SEQ ID NO: 165900 - protein, 152 aa, Artificial Sequence
  derived and/or modified sequence
MEEYHRHCDEVGFNAEEAHNIVKECVDGVLGGEDYNHNNINQWTASIVEQSLTHLVKLGKAYKYIVTCAVVQKSAYGFHTASSCFWDTTSDGTCTVRWENRTMNCGVLLCRPGWSAVMQFRLTATSASQVQVILLPQPPEYLELQAHAITPG

SEQ ID NO: 165901 - protein, 122 aa, Artificial Sequence
  derived and/or modified sequence
MARSLGVLVALPFPLPVGFNAEEAHNIVKECVDGVLGGEDYNHNNINQWTASIVEQSLTHLVKLGKAYKYIVTCAVVQKSAYGFHTASSCFWDTTSDGTCTVRWENRTMNCIVNVFAIAIVL

SEQ ID NO: 165902 - DNA, 351 bp, Artificial Sequence
  derived and/or modified sequence
atggaggagtaccacagacactgcgacgaggtgggcttcaacgccgaggaggcccacaacatcgtgaaggagtgcgtggacggcgtgctgggcggcgaggactacaaccacaacaacatcaaccagtggaccgccagcatcgtggagcagagcctgacccacctggtgaagctgggcaaggcctacaagtacatcgtgacctgcgccgtggtgcagaagagcgcctacggcttccacaccgccagcagctgcttctgggacaccaccagcgacggcacctgcaccgtgagatgggagaacagaaccatgaactgcatcgtgaacgtgttcgccatcgccatcgtgctgtag

SEQ ID NO: 165903 - DNA, 459 bp, Artificial Sequence
  derived and/or modified sequence
atggaggagtaccacagacactgcgacgaggtgggcttcaacgccgaggaggcccacaacatcgtgaaggagtgcgtggacggcgtgctgggcggcgaggactacaaccacaacaacatcaaccagtggaccgccagcatcgtggagcagagcctgacccacctggtgaagctgggcaaggcctacaagtacatcgtgacctgcgccgtggtgcagaagagcgcctacggcttccacaccgccagcagctgcttctgggacaccaccagcgacggcacctgcaccgtgagatgggagaacagaaccatgaactgcggcgtgctgctgtgcagacccggctggagcgccgtgatgcagttcagactgaccgccaccagcgccagccaggtgcaggtgatcctgctgccccagccccccgagtacctggagctgcaggcccacgccatcacccccggctag

SEQ ID NO: 165904 - DNA, 369 bp, Artificial Sequence
  derived and/or modified sequence
atggccagaagcctgggcgtgctggtggccctgcccttccccctgcccgtgggcttcaacgccgaggaggcccacaacatcgtgaaggagtgcgtggacggcgtgctgggcggcgaggactacaaccacaacaacatcaaccagtggaccgccagcatcgtggagcagagcctgacccacctggtgaagctgggcaaggcctacaagtacatcgtgacctgcgccgtggtgcagaagagcgcctacggcttccacaccgccagcagctgcttctgggacaccaccagcgacggcacctgcaccgtgagatgggagaacagaaccatgaactgcatcgtgaacgtgttcgccatcgccatcgtgctgtag

SEQ ID NO: 165905 - DNA, 2217 bp, Artificial Sequence
  derived and/or modified sequence
caaaggcggggattgcgtagggaaaggccctaggccataaacgggggtggggcctccccggaggccagtgcgcggccgcggtgctctaccggcgtgtcgctccgccccagggagagccggcgctaccatggaggagtaccatcgccactgcgacgaggttggcttcaatgctgaggaagcccacaatattgtcaaagagtgtgtagatggggttttaggtggtgaagattataatcacaacaacatcaaccagtggactgcaagcatagtggaacaatccttaacacacctggttaagttgggaaaagcctataaatatattgtgacctgtgcagtggtccagaagagcgcatatggctttcacacagccagctcctgtttttgggataccacatctgatggaacctgtaccgtaagatgggagaaccggaccatgaactgtattgtcaacgtttttgccattgctattgttctttaactgactaaaaatgttgggctaaagccattaacttaagaatttgtcagtgtatcctttccaaaaagagtaatagttgtttactagtgtgctagatgaaaagcgtgcaatatgctttaaagctatcaacaaaaactgaatattataagcaagcaatatcatagtaattggcagattagctcatattctatacagcatcgtttaaataggaaaaatttaatgctagcaaaaaataaatttagaaatatggcatgacatgaaaatacaatcttatatttacaccagcttttcactaatattttgtacctaaggtgatggggaactccattcagataataaaattctctttcagctagagaagttaacaggaataaatatatgaacaaaaaagctgcaaggataaatgtggagaaaatgatgagaattagctaacatttttaagtttttttaaactttcttcccctcagttgtacttaatatttagtggaaagtaataatttttttaattttctatcaactaatagtatagtaacaactatgattaacttgtttactttttctgaggattagtaaatcaattttttttaatttcaaatttttggatttacacttgagggtaaattaaatctggtaaactgaatttcctagttaaataaaattagttgcagtatatgatgaacagtgtatgactcaaacagctgccttacaattcactcattccatgtggaacaaacatttatcagatgcctattatgggcatatgtctctgctaagcaccatagttgtcaatgtgctgtgcaaatgctaagttccttttagcaattgttcagttggaagacgtattaatatttggggaaggaaaagaaagtagttgttttacaagggaggaaaaaagtgaatctggttacacatatggaagtaagcaaaatgaaaagcacttattgctttctgacagaattatagatgtaattttaagagttgctcctagcaagttaaaagtgcatataaaatatgcaactcttagttaaaggccttattatcagtcttacctatacaagtagtaaattttgtcattgctttagttacaaccatctgtaaataacttaaaagacttattatgtggggttcaaattgagtggaataaagtatagattaaaagtatacaatccttagcacgttatctcagggcttatgaaatgtaattaaatttattaagaaaatagatgaaaaattagggtacacagctggccaccaaatgcgaagtcaatctgctacttaaccctgaaaacaaaatcagttttgcatattaccactaacactaatacatatagagagcggaaccataactcattgaattttggagaggaataagcttagcgttaatattgacaatattaaggcaatattcttgtaggaatactatgtgcatgtttgatattttgccaaataacaataattaataattgttcaatgtttaagaataatattaacaaaataaaggagtttaatgcagtgatctttgtttttggcacatcaaaaattctcagtcattattcatgtttctttatgctgctggcttttgtgccctggaagatcataatagtgaccaaaatatacatgcagacttgttttttattattgttgtttaagcataatttaagaaaaaaaatttttacctggtgaacttgctatctgctctgtttctagttaaaatataataaatattatcttcctgtgctgta

SEQ ID NO: 165906 - DNA, 920 bp, Artificial Sequence
  derived and/or modified sequence
taccatggaggagtaccatcgccactgcgacgaggttggcttcaatgctgaggaagcccacaatattgtcaaagagtgtgtagatggggttttaggtggtgaagattataatcacaacaacatcaaccagtggactgcaagcatagtggaacaatccttaacacacctggttaagttgggaaaagcctataaatatattgtgacctgtgcagtggtccagaagagcgcatatggctttcacacagccagctcctgtttttgggataccacatctgatggaacctgtaccgtaagatgggagaaccggaccatgaactgtggagtcttgctctgtcgcccaggctggagtgcagtgatgcaatttcggctcactgcaacctctgcctcccaggttcaagtgattcttctgcctcagcctcccgagtacctggaactacaggcacacgccataacgcctggctaatttttatatttttagtagagatggggttttgccatgttggccaggatggtctcgaactcctgacctcaagtgatccacccacctcggcctctcaaaatgctgggattacaagcgcgagccaccctgcccggccgaaaagatctcaaacattcatctcttacaagatttagatgactatcatcaatatgccttaacatcagtagtttaggagactctagcccactttgtctagttgcaaactgtaattctccctgtggtcccactgaatatcattccacagcattcttggatatatatgatgtattgacaattcaggtctagatagaaatggcccctattgcttcatgaagaatatcctttccccaaatgtcttctgaggagctcaagattaaagctagtatcctgtacagacacttgcaggactgctagtatgatatatattgaccctatgggagac

SEQ ID NO: 165907 - DNA, 719 bp, Artificial Sequence
  derived and/or modified sequence
ctcccagcgagggcggtcccaagagttggggtgcggcgtcctccgagcccgggtcctctcccctgggcccgggatccgccccgcccgacccgttctccccaccccaaagtcctgagattcggggtgggaggggtggccaggagcgcgcggatcagacggtggggtcggggcagggttgggaggacgaggcctgacttgggtgcgaggagtgggcatggggtgacgggcgccgccctcctaccgggcgggcctcgaaaacgggtcttcccgctgctgcctccgtcccttggcttcctcagcgcgggtgctgcagcccccatggctcggagtctcggggtcctggtggcactgccattcccgctcccggttggcttcaatgctgaggaagcccacaatattgtcaaagagtgtgtagatggggttttaggtggtgaagattataatcacaacaacatcaaccagtggactgcaagcatagtggaacaatccttaacacacctggttaagttgggaaaagcctataaatatattgtgacctgtgcagtggtccagaagagcgcatatggctttcacacagccagctcctgtttttgggataccacatctgatggaacctgtaccgtaagatgggagaaccggaccatgaactgtattgtcaacgtttttgccattgctattgttctttaactgactaaaaatgttgggctaaagccattaac

SEQ ID NO: 165908 - DNA, 351 bp, Artificial Sequence
  derived and/or modified sequence
atggaagaataccaccggcattgcgacgaggtgggcttcaatgcggaggaggcccataacatagtgaaagaatgtgtggatggggtgctgggaggcgaggattataaccataacaatataaatcaatggaccgcttctatcgttgagcagagcctgacccacctcgttaaactcggaaaggcttataaatacatcgtcacgtgcgccgtggtgcagaagagcgcttatggatttcacaccgcttcctcatgtttctgggacacaacttctgatggcacatgcactgtgaggtgggaaaacagaaccatgaattgtattgtcaatgtatttgcaatcgccattgtgttatag

SEQ ID NO: 165909 - DNA, 459 bp, Artificial Sequence
  derived and/or modified sequence
atggaagaatatcaccggcactgcgacgaagtagggtttaatgccgaagaggcgcataatattgtgaaagaatgtgtcgatggtgttctgggtggagaagattacaatcacaataatatcaaccagtggacagcaagcatagtcgaacagagcttgacccatctcgtcaagctcggcaaagcttacaagtatatagtgacttgcgctgtggtccagaagtccgcatacgggttccacacggctagttcttgtttctgggacaccacctctgacggcacctgtactgtacgttgggaaaatcgcacgatgaactgtggagtgttactttgcagaccagggtggtcagctgtcatgcagttccgtctgacagccaccagtgcatcccaggtgcaagtgatattgctgcctcagccccccgagtacctcgagttacaggcccacgccattactccgggatag

SEQ ID NO: 165910 - DNA, 369 bp, Artificial Sequence
  derived and/or modified sequence
atggcccggagcctcggagtactggtggcactaccgttccccttacctgtcggattcaacgccgaggaagcacacaacatcgtaaaggagtgtgtcgatggtgtgctcggcggggaagattataatcacaataatatcaatcaatggaccgcctcaatcgtggaacagtcactcactcatctcgtgaaattaggcaaggcttacaagtatatagtcacctgcgctgttgtccagaaatctgcgtacgggttccataccgccagctcctgcttttgggatacaacgtctgatgggacatgtaccgtacggtgggagaacaggactatgaattgcatcgtgaacgtgttcgcaatagccatagtcctgtag

SEQ ID NO: 165911 - DNA, 351 bp, Artificial Sequence
  derived and/or modified sequence
atggaggagtaccaccgccactgtgatgaggtgggcttcaatgctgaggaggcccacaacatcgtgaaggaatgtgtggatggagtgctgggcggggaggactacaaccacaacaacatcaaccagtggacagccagcatcgtggagcagagcctgacccacctggtgaagctgggcaaggcctacaagtacatcgtgacctgtgctgtggtgcagaagagcgcctacggcttccacacagccagcagctgcttctgggacaccaccagtgatggcacctgcaccgtgcgctgggagaacagaaccatgaactgcatcgtgaatgtgtttgccatcgccatcgtgctgtag

SEQ ID NO: 165912 - DNA, 459 bp, Artificial Sequence
  derived and/or modified sequence
atggaggagtaccaccgccactgtgatgaggtgggcttcaatgctgaggaggcccacaacatcgtgaaggaatgtgtggatggagtgctgggcggggaggactacaaccacaacaacatcaaccagtggacagccagcatcgtggagcagagcctgacccacctggtgaagctgggcaaggcctacaagtacatcgtgacctgtgctgtggtgcagaagagcgcctacggcttccacacagccagcagctgcttctgggacaccaccagtgatggcacctgcaccgtgcgctgggagaacagaaccatgaactgtggggtgctgctgtgccggcccggctggagcgctgtgatgcagttccggctgacagccaccagcgccagccaggtgcaggtgatcctgctgccccagcccccagagtacctggagctgcaggcccacgccatcaccccaggatag

SEQ ID NO: 165913 - DNA, 369 bp, Artificial Sequence
  derived and/or modified sequence
atggcccggagcctgggcgtgctggtggccctgcccttccccctgcctgtgggcttcaatgctgaggaggcccacaacatcgtgaaggaatgtgtggatggagtgctgggcggggaggactacaaccacaacaacatcaaccagtggacagccagcatcgtggagcagagcctgacccacctggtgaagctgggcaaggcctacaagtacatcgtgacctgtgctgtggtgcagaagagcgcctacggcttccacacagccagcagctgcttctgggacaccaccagtgatggcacctgcaccgtgcgctgggagaacagaaccatgaactgcatcgtgaatgtgtttgccatcgccatcgtgctgtag

SEQ ID NO: 165914 - DNA, 351 bp, Artificial Sequence
  derived and/or modified sequence
atggaggagtaccaccggcactgcgacgaggtgggcttcaacgccgaggaggcacataacattgtgaaggagtgcgttgatggtgtgctggggggtgaggattataaccataacaacatcaaccaatggaccgcaagcatcgttgaacagtcgctgacacacttggttaagctcggtaaagcctacaaatacatagtgacttgcgcagttgttcagaaatcagcctacggctttcacaccgcctcctcctgcttttgggatacaacaagcgacggtacctgcacggttcgttgggaaaacaggacaatgaattgcatagtgaacgtgttcgccatagccatcgtcctgtag

SEQ ID NO: 165915 - DNA, 459 bp, Artificial Sequence
  derived and/or modified sequence
atggaggagtaccaccggcactgcgacgaggtgggcttcaacgccgaggaagcacacaacatcgttaaggagtgcgttgatggcgtgttggggggcgaggactacaatcacaacaatattaaccagtggaccgcttcaatagtggagcagtctctcacacaccttgtcaaactgggcaaggcatacaaatacattgtgacatgcgctgttgtgcaaaagagtgcttacggattccacacggccagtagctgcttctgggacacgacctcggatggcacttgcactgtgagatgggaaaatagaacgatgaattgtggagtgctgctctgcaggcccgggtggtctgccgttatgcagtttagactgactgcaaccagcgccagtcaggtgcaggtgatactgttgcctcagccgccagagtatcttgaactgcaggcccacgcaattacacctggatag

SEQ ID NO: 165916 - DNA, 369 bp, Artificial Sequence
  derived and/or modified sequence
atggcccggagcctgggcgtgctggtggccctgcccttccccctgccagtgggctttaacgcagaagaagcgcataatattgtcaaggaatgcgttgacggagtcctggggggcgaggactacaaccataataatattaatcagtggacggcaagtattgtcgagcagagcttaacgcacctggtgaaactaggcaaggcctacaagtatatcgtgacctgtgccgtggtgcaaaaatctgcttacggattccacaccgcttcttcttgcttctgggatactacatctgacggaacttgtaccgtacgctgggagaatagaaccatgaactgcatcgtgaacgtatttgccatcgccatcgtgctgtag

SEQ ID NO: 165917 - DNA, 351 bp, Artificial Sequence
  derived and/or modified sequence
atggaagagtatcacagacattgcgacgaagtgggttttaatgccgaagaggctcataatattgtgaaggagtgcgtcgacggagtgctcggtggtgaggattataaccacaacaacataaatcagtggaccgccagcatcgtggagcagtccctcacacatctcgtgaagctggggaaggcttacaaatatattgtcacatgtgccgttgtgcaaaaaagcgcttacgggttccacacagcatcttcctgcttttgggacactacctcagacgggacatgcacagtaagatgggagaatagaactatgaattgtatcgtcaatgtttttgccattgccattgtgctgtag

SEQ ID NO: 165918 - DNA, 459 bp, Artificial Sequence
  derived and/or modified sequence
atggaagagtaccacagacactgcgatgaggtaggtttcaacgccgaagaggcccacaatattgtgaaggaatgtgtggatggagtgctcggcggtgaagactacaaccacaataatattaaccagtggactgccagcatcgtggaacagagtctcactcacctggtgaaactcgggaaggcatacaaatacatcgtgacttgcgcggtcgtccagaagtctgcctacggctttcatactgcttccagctgcttttgggatacaacctccgacggcacttgcactgtgcggtgggagaaccgcaccatgaactgcggtgtgcttttgtgccgacccggatggtcagcagtaatgcaattcaggttaacagctacctctgcctcccaagttcaggtaattctgctcccgcagccgcctgagtatctggaactgcaggcccatgccatcacacctggctag

SEQ ID NO: 165919 - DNA, 369 bp, Artificial Sequence
  derived and/or modified sequence
atggccaggtcactaggggtcctcgtggcgctcccctttccgcttcctgtgggttttaatgcggaagaggcgcacaatatagtcaaagagtgcgtggatggagtgctcgggggagaggattacaaccataacaatattaatcagtggaccgctagcatagtcgaacagagcctgacacacttggtgaagctggggaaggcctacaagtacatcgtgacttgtgccgtggtgcagaagagtgcgtacggatttcacactgcctcgagctgtttttgggatactaccagcgacggcacgtgcacggtccgctgggaaaatcgtacaatgaattgtatcgtgaacgttttcgcaatcgctattgtgctgtag

SEQ ID NO: 165920 - protein, 575 aa, Artificial Sequence
  derived and/or modified sequence
MSHAAEPARDGVEASAEGPRAVFVLLEERRPADSAQLLSLNSLLPESGIVADIELENVLDPDSFYELKSQPLPLRSSLPISLQATPATPATLSASSSAGGSRTPAMSSSSSSRVLLRQQLMRAQAQEQERRERREQAAAAPFPSPAPASPAISVVGVSAGGHTLSRPPPAQVPREVLKVQTHLENPTRYHLQQARRQQVKQYLSTTLGPKLASQALTPPPGPASAQPLPAPEAAHTTGPTGSAPNSPMALLTIGSSSEKEIDDVIDEIISLESSYNDEMLSYLPGGTTGLQLPSTLPVSGNLLDVYSSQGVATPAITVSNSCPAELPNIKREISETEAKALLKERQKKDNHNLIERRRRFNINDRIKELGTLIPKSSDPEMRWNKGTILKASVDYIRKLQKEQQRSKDLESRQRSLEQANRSLQLRIQELELQAQIHGLPVPPTPGLLSLATTSASDSLKPEQLDIEEEGRPGAATFHVGGGPAQNAPHQQPPAPPSDALLDLHFPSDHLGDLGDPFHLGLEDILMEEEEGVVGGLSGGALSPLRAASDPLLSSVSPAVSKASSRRSSFSMEEES

SEQ ID NO: 165921 - protein, 365 aa, Artificial Sequence
  derived and/or modified sequence
MLPPLPSRLGLLLLLLLCPAHVGGLWWAVGSPLVMDPTSICRKARRLAGRQAELCQAEPEVVAELARGARLGVRECQFQFRFRRWNCSSHSKAFGRILQQDIRETAFVFAITAAGASHAVTQACSMGELLQCGCQAPRGRAPPRPSGLPGTPGPPGPAGSPEGSAAWEWGGCGDDVDFGDEKSRLFMDARHKRGRGDIRALVQLHNNEAGRLAVRSHTRTECKCHGLSGSCALRTCWQKLPPFREVGARLLERFHGASRVMGTNDGKALLPAVRTLKPPGRADLLYAADSPDFCAPNRRTGSPGTRGRACNSSAPDLSGCDLLCCGRGHRQESVQLEENCLCRFHWCCVVQCHRCRVRKELSLCL

SEQ ID NO: 165922 - DNA, 1098 bp, Artificial Sequence
  derived and/or modified sequence
atgctgcctccgttaccctctagactgggcctgttgctgctgttactgctgtgtcccgcccacgtgggagggctatggtgggcagtgggctctccccttgtaatggacccaacctccatttgtaggaaagccaggagattggccgggagacaagcggagctttgccaggccgaaccagaggtggttgcagaactcgctagaggggccaggctcggagttcgggaatgtcaatttcagtttcgctttagaaggtggaattgctcctctcattccaaagcctttggcaggattctgcagcaggatataagagagacagcctttgtgttcgctatcaccgccgctggcgcgtcccatgccgtgacccaagcttgcagcatgggagagctactccaatgcgggtgtcaggccccacgtggccgggcccctccacgcccaagcggcctccctggaaccccaggcccccccgggccggcggggtctcccgaaggatctgcagcttgggaatggggcgggtgcggagatgatgtcgacttcggcgacgagaaatcacggttattcatggacgcacgccacaaaagaggtagaggggacatccgagctctcgtgcagctgcataacaacgaggcgggtaggctcgccgtgcggtcccatacaagaaccgagtgtaagtgtcatgggctaagcgggtcatgtgccttgcgcacctgctggcagaagctgcctccctttcgggaggtgggtgcccgattgttagaacgctttcacggagccagccgtgtaatgggcaccaatgacggaaaggcactgttgcccgcggtgaggactttgaagccaccggggagggccgaccttttatatgctgccgactctccggacttttgcgcccccaacagacgaactggatcccccgggaccagggggcgagcctgcaatagtagcgcgccagaccttagcggatgtgatctgttgtgttgcggaaggggccacagacaagaaagcgtgcaattagaggagaactgtctctgtcgctttcattggtgctgcgtggtgcaatgtcatagatgtcgagtgcgaaaagagctgtccctgtgcctgtag

SEQ ID NO: 165923 - DNA, 1098 bp, Artificial Sequence
  derived and/or modified sequence
atgctgccccccctgcccagccggctgggcctgctgctgctgctgctgctgtgcccagcccacgtgggcggcctgtggtgggccgtgggcagccccctggtgatggaccccaccagcatctgcaggaaggcccggcggctggccggccggcaggccgagctgtgccaggccgagcctgaggtggtggccgagctggcccggggggcccggctgggcgtgcgggagtgccagttccagttccgcttccgccgctggaactgcagcagccacagcaaggccttcggccgcatcctgcagcaggacatccgggagacagcctttgtgtttgccatcacagctgctggggccagccatgctgtgacccaggcctgcagcatgggagagctgctgcagtgtggctgccaggccccccggggccgggccccaccccggcccagcggcctgcccggcaccccaggccccccaggccctgctggcagccctgagggcagcgctgcctgggagtggggcggctgtggagatgatgtggactttggagatgagaagagccgcctcttcatggatgcccggcacaagaggggccgcggggacatccgggccctggtgcagctgcacaacaatgaagctggccgcctggccgtgcgcagccacaccaggacagaatgtaaatgtcatggcctgagcggcagctgtgccctgcggacctgctggcagaagctgccccccttccgggaggtgggcgcccggctgctggagcgcttccatggagccagccgggtgatgggcaccaatgatggcaaggccctgctgcctgctgtgaggaccctgaagcccccaggccgggctgacctgctgtatgctgctgacagcccagacttctgtgcccccaacagaagaacaggcagccctggcacccggggccgggcctgcaacagcagcgccccagacctgagcggctgtgacctgctgtgctgcggccggggccaccggcaggagagcgtgcagctggaggagaactgcctgtgccgcttccactggtgctgcgtggtgcagtgccaccgctgccgggtgaggaaggagctgagcctgtgcctgtag

SEQ ID NO: 165924 - DNA, 1098 bp, Artificial Sequence
  derived and/or modified sequence
atgctgccccccctgcccagccggctgggcctgctgctgctgctgctgctgtgtccagcccacgttggagggctatggtgggccgtggggtcgccgctggttatggatcctacttccatctgtcgcaaagccagacggcttgctggtcggcaagccgaactgtgccaggcagagcctgaggttgttgcggaactggccagaggcgcgcgactcggcgtgcgcgagtgtcaattccagtttagattcagaagatggaactgtagctcccactctaaagcctttgggcggattttacagcaggatatccgcgagacggcattcgtcttcgctatcacagctgctggtgcgtctcacgcagtcacccaagcctgcagcatgggcgaattactccagtgtggttgccaagcgcccagaggccgcgctccgcctcgaccctctgggctacctggaacacccggcccccccggtccggcggggagcccagaaggttcagcagcctgggaatggggaggttgcggtgatgacgtcgactttggtgacgaaaagtcccgcctgttcatggatgccagacataaaagggggagaggcgatattagagcgttagtgcagctccacaataatgaggccggccgcctggccgttagatcacacacccgcacagagtgcaagtgccacgggttgagcggaagttgcgcattgagaacatgctggcaaaaattgccaccatttcgggaggtgggagcaaggttactcgagagattccatggcgcgtccagggtgatgggtaccaatgatggaaaagctcttctgccagccgttcgcaccttaaagcccccagggagagccgacctgctgtacgctgccgacagtcccgacttctgcgcccctaacaggcgtactggctcccctggtacaagggggcgggcctgtaacagtagtgctccagacttaagtgggtgtgacctgctctgctgtggacggggacaccgtcaagaatcggttcaactggaggaaaactgcctctgtcggtttcactggtgctgcgtcgtgcagtgccaccgatgtcgcgtgagaaaggaattgtccttatgtctatag

SEQ ID NO: 165925 - DNA, 1098 bp, Artificial Sequence
  derived and/or modified sequence
atgctgcctcccctgccatcaaggcttggcctgctgctgcttctgctgttatgccccgctcacgtggggggactctggtgggccgtgggcagtcctctcgtcatggatcctacaagcatttgtcgcaaagctaggaggttggcaggaagacaggccgaattgtgtcaggctgaacctgaagtggtggcggagttggccagaggagctcgactcggggttagagaatgtcagtttcagtttaggttccgtcgatggaactgttcatctcactccaaggcgttcggaagaatcctgcagcaggacattcgggagacagcttttgtattcgccattacagcagccggagcctcccacgcggtgacacaggcctgcagcatgggtgaattgctacaatgcggttgtcaggctccccgaggcagggcgccaccacgaccgagcgggcttcctggtacccctggcccacctgggccagccggttctccagaaggtagtgcagcctgggagtggggagggtgcggtgacgacgtggatttcggagacgagaaatcaaggctttttatggacgctagacacaaaaggggcaggggagatatccgagctttagtccagcttcacaacaacgaggccggaaggcttgccgtaagaagccacacacgcactgaatgcaagtgtcatggcctatctggctcctgcgctctccgaacctgttggcagaaacttcctccatttagggaggtcggtgctagacttctggagcgattccatggcgcatccagagtcatggggaccaacgatgggaaggctctccttccagccgtacgaaccctgaagcctccagggagggcggacctgctttacgctgcagactctcctgacttctgtgcacccaaccgccgtacgggatctccaggcacgcgcggtagggcgtgtaactcatccgcccctgatttgagcggctgtgatctgttgtgctgcggccgaggccataggcaggaaagcgttcagctggaagaaaactgtctctgtcgttttcactggtgttgtgttgtacagtgtcaccggtgccgagtccggaaggagctgagcctttgtctttag

SEQ ID NO: 165926 - DNA, 1703 bp, Artificial Sequence
  derived and/or modified sequence
tccgcaggagacacaggcgctggctgccccgtccgctctccgcctccgccgcgccctcctcgcccgggatgggcccccccgccgccgccggatccctcgcctcccggccgccgccgttgcgctcgccgcgctcgcactgaagcccgggccctcgcgcgccgcggttcgccccgcagcctcgccccctgcccacccgggcggccgtagggcggtcacgatgctgccgcccttaccctcccgcctcgggctgctgctgctgctgctcctgtgcccggcgcacgtcggcggactgtggtgggctgtgggcagccccttggttatggaccctaccagcatctgcaggaaggcacggcggctggccgggcggcaggccgagttgtgccaggctgagccggaagtggtggcagagctagctcggggcgcccggctcggggtgcgagagtgccagttccagttccgcttccgccgctggaattgctccagccacagcaaggcctttggacgcatcctgcaacaggacattcgggagacggccttcgtgttcgccatcactgcggccggcgccagccacgccgtcacgcaggcctgttctatgggcgagctgctgcagtgcggctgccaggcgccccgcgggcgggcccctccccggccctccggcctgcccggcacccccggaccccctggccccgcgggctccccggaaggcagcgccgcctgggagtggggaggctgcggcgacgacgtggacttcggggacgagaagtcgaggctctttatggacgcgcggcacaagcggggacgcggagacatccgcgcgttggtgcaactgcacaacaacgaggcgggcaggctggccgtgcggagccacacgcgcaccgagtgcaaatgccacgggctgtcgggatcatgcgcgctgcgcacctgctggcagaagctgcctccatttcgcgaggtgggcgcgcggctgctggagcgcttccacggcgcctcacgcgtcatgggcaccaacgacggcaaggccctgctgcccgccgtccgcacgctcaagccgccgggccgagcggacctcctctacgccgccgattcgcccgacttctgcgcccccaaccgacgcaccggctcccccggcacgcgcggtcgcgcctgcaatagcagcgccccggacctcagcggctgcgacctgctgtgctgcggccgcgggcaccgccaggagagcgtgcagctcgaagagaactgcctgtgccgcttccactggtgctgcgtagtacagtgccaccgctgccgtgtgcgcaaggagctcagcctctgcctgtgacccgccgcccggccgctagactgacttcgcgcagcggtggctcgcacctgtgggacctcagggcaccggcaccgggcgcctctcgccgctcgagcccagcctctccctgccaaagcccaactcccagggctctggaaatggtgaggcgaggggcttgagaggaacgcccacccacgaaggcccagggcgccagacggccccgaaaaggcgctcggggagcgtttaaaggacactgtacaggccctccctccccttggcctctaggaggaaacagttttttagactggaaaaaagccagtctaaaggcctctggatactgggctccccagaactgctggccacaggatggtgggtgaggttagtatcaataaagatatttaaaccacca

SEQ ID NO: 165927 - DNA, 1098 bp, Artificial Sequence
  derived and/or modified sequence
atgctgccccccctgcccagcagactgggcctgctgctgctgctgctgctgtgccccgcccacgtgggcggcctgtggtgggccgtgggcagccccctggtgatggaccccaccagcatctgcagaaaggccagaagactggccggcagacaggccgagctgtgccaggccgagcccgaggtggtggccgagctggccagaggcgccagactgggcgtgagagagtgccagttccagttcagattcagaagatggaactgcagcagccacagcaaggccttcggcagaatcctgcagcaggacatcagagagaccgccttcgtgttcgccatcaccgccgccggcgccagccacgccgtgacccaggcctgcagcatgggcgagctgctgcagtgcggctgccaggcccccagaggcagagccccccccagacccagcggcctgcccggcacccccggcccccccggccccgccggcagccccgagggcagcgccgcctgggagtggggcggctgcggcgacgacgtggacttcggcgacgagaagagcagactgttcatggacgccagacacaagagaggcagaggcgacatcagagccctggtgcagctgcacaacaacgaggccggcagactggccgtgagaagccacaccagaaccgagtgcaagtgccacggcctgagcggcagctgcgccctgagaacctgctggcagaagctgccccccttcagagaggtgggcgccagactgctggagagattccacggcgccagcagagtgatgggcaccaacgacggcaaggccctgctgcccgccgtgagaaccctgaagccccccggcagagccgacctgctgtacgccgccgacagccccgacttctgcgcccccaacagaagaaccggcagccccggcaccagaggcagagcctgcaacagcagcgcccccgacctgagcggctgcgacctgctgtgctgcggcagaggccacagacaggagagcgtgcagctggaggagaactgcctgtgcagattccactggtgctgcgtggtgcagtgccacagatgcagagtgagaaaggagctgagcctgtgcctgtag

SEQ ID NO: 165928 - protein, 1048 aa, Artificial Sequence
  derived and/or modified sequence
MQSKVTGNMPTQSLLMYMDGPEVIGSSLGSPMEMEDALSMKGTAVVPFRATQEKNVIQIEGYMPLDCMFCSQTFTHSEDLNKHVLMQHRPTLCEPAVLRVEAEYLSPLDKSQVRTEPPKEKNCKENEFSCEVCGQTFRVAFDVEIHMRTHKDSFTYGCNMCGRRFKEPWFLKNHMRTHNGKSGARSKLQQGLESSPATINEVVQVHAAESISSPYKICMVCGFLFPNKESLIEHRKVHTKKTAFGTSSAQTDSPQGGMPSSREDFLQLFNLRPKSHPETGKKPVRCIPQLDPFTTFQAWQLATKGKVAICQEVKESGQEGSTDNDDSSSEKELGETNKGSCAGLSQEKEKCKHSHGEAPSVDADPKLPSSKEKPTHCSECGKAFRTYHQLVLHSRVHKKDRRAGAESPTMSVDGRQPGTCSPDLAAPLDENGAVDRGEGGSEDGSEDGLPEGIHLDKNDDGGKIKHLTSSRECSYCGKFFRSNYYLNIHLRTHTGEKPYKCEFCEYAAAQKTSLRYHLERHHKEKQTDVAAEVKNDGKNQDTEDALLTADSAQTKNLKRFFDGAKDVTGSPPAKQLKEMPSVFQNVLGSAVLSPAHKDTQDFHKNAADDSADKVNKNPTPAYLDLLKKRSAVETQANNLICRTKADVTPPPDGSTTHNLEVSPKEKQTETAADCRYRPSVDCHEKPLNLSVGALHNCPAISLSKSLIPSITCPFCTFKTFYPEVLMMHQRLEHKYNPDVHKNCRNKSLLRSRRTGCPPALLGKDVPPLSSFCKPKPKSAFPAQSKSLPSAKGKQSPPGPGKAPLTSGIDSSTLAPSNLKSHRPQQNVGVQGAATRQQQSEMFPKTSVSPAPDKTKRPETKLKPLPVAPSQPTLGSSNINGSIDYPAKNDSPWAPPGRDYFCNRSASNTAAEFGEPLPKRLKSSVVALDVDQPGANYRRGYDLPKYHMVRGITSLLPQDCVYPSQALPPKPRFLSSSEVDSPNVLTVQKPYGGSGPLYTCVPAGSPASSSTLEGKRPVSYQHLSNSMAQKRNYENFIGNAHYRPNDKKT

SEQ ID NO: 165929 - protein, 95 aa, Artificial Sequence
  derived and/or modified sequence
MQSKVTGNMPTQSLLMYMDGPEVIGSSLGSPMEMEDALSMKGTAVVPFRATQEKNVIQIEGYMPLDCMFCSQTFTHSEDLNKHVLMQHRPTLCEP

SEQ ID NO: 165930 - DNA, 5653 bp, Artificial Sequence
  derived and/or modified sequence
gacaaagagaactaatgctttgtgctgattcatatttgaatcgaggcattgggaaccctgtatgccttgtttgtggaaagaaccagtgacaccatcactgagcttcctaaaagttcgaagaagttagaggactatacactttcttttgaacttttataataaatatttgctctggtttttggaacccagggctgttagaggggtgagtgacaagtcttacaagtggccttattccaactccagaaattgcccaacggaactttgagattatatgcaatcgaaagtgacaggaaacatgccaactcaatccctcttaatgtacatggatgggccagaagtgattggcagctctcttggcagtccgatggagatggaggatgccttgtcaatgaaagggaccgctgttgttccattccgagctacacaagaaaaaaatgtcatccaaatcgaggggtatatgcccttggattgcatgttctgcagccagaccttcacacattcagaagaccttaataaacatgtcttaatgcaacaccggcctaccctctgtgaaccagcagttcttcgggttgaagcagagtatctcagtccgcttgataaaagtcaagtgcgaacagaacctcccaaggaaaagaattgcaaggaaaatgaatttagctgtgaggtatgtgggcagacatttagagtcgcttttgatgttgagatccacatgagaacacacaaagattctttcacttacgggtgtaacatgtgcggaagaagattcaaggagccttggtttcttaaaaatcacatgcggacacataatggcaaatcgggggccagaagcaaactgcagcaaggcttggagagtagtccagcaacgatcaacgaggtcgtccaggtgcacgcggccgagagcatctcctctccttacaaaatctgcatggtttgtggcttcctatttccaaataaagaaagtctaattgagcaccgcaaggtgcacaccaaaaaaactgctttcggtaccagcagcgcgcagacagactctccacaaggaggaatgccgtcctcgagggaggacttcctgcagttgttcaacttgagaccaaaatctcaccctgaaacggggaagaagcctgtcagatgcatccctcagctcgatccgttcaccaccttccaggcttggcagctggctaccaaaggaaaagttgccatttgccaagaagtgaaggaatcggggcaagaagggagcaccgacaacgacgattcgagttccgagaaggagcttggagaaacaaataagggcagttgtgcaggcctctcgcaagagaaagagaagtgcaaacactcccacggcgaagcgccctccgtggacgcggatcccaagttacccagtagcaaggagaagcccactcactgctccgagtgcggcaaagctttcagaacctaccaccagctggtcttgcactccagggtccacaagaaggaccggagggccggcgcggagtcgcccaccatgtctgtggacgggaggcagccggggacgtgttctcctgacctcgccgcccctctggatgaaaatggagccgtggatcgaggggaaggtggttctgaagacggatctgaggatgggcttcccgaaggaatccatctggataaaaatgatgatggaggaaaaataaaacatcttacatcttcaagagagtgtagttattgtggaaagtttttccgttcaaattattacctcaatattcatctcagaacgcatacaggtgaaaaaccatacaaatgtgaattttgtgaatatgctgcagcccagaagacatctctgaggtatcacttggagagacatcacaaggaaaaacaaaccgatgttgctgctgaagtcaagaacgatggtaaaaatcaggacactgaagatgcactattaaccgctgacagtgcgcaaaccaaaaatttgaaaagattttttgatggtgccaaagatgttacaggcagtccacctgcaaagcagcttaaggagatgccttctgtttttcagaatgttctgggcagcgctgtcctctcaccagcacacaaagatactcaggatttccataaaaatgcagctgatgacagtgctgataaagtgaataaaaaccctacccctgcttacctggacctgttaaaaaagagatcagcagttgaaactcaggcaaataacctcatctgtagaaccaaggcggatgttactcctcctccggatggcagtaccacccataaccttgaagttagccccaaagagaagcaaacggagaccgcagctgactgcagatacaggccaagtgtggattgtcacgaaaaacctttaaatttatccgtgggggctcttcacaattgcccggcaatttctttgagtaaaagtttgattccaagtatcacctgtccattttgtaccttcaagacattttatccagaagttttaatgatgcaccagagactggagcataaatacaatcctgacgttcataaaaactgtcgaaacaagtccttgcttagaagtcgacgtaccggatgcccgccagcgttgctgggaaaagatgtgcctcccctctctagtttctgtaaacccaagcccaagtctgctttcccggcgcagtccaaatccctgccatctgcgaaggggaagcagagccctcctgggccaggcaaggcccctctgacttcagggatagactctagcactttagccccaagtaacctgaagtcccacagaccacagcagaatgtgggggtccaaggggccgccaccaggcaacagcaatctgagatgtttcctaaaaccagtgtttcccctgcaccggataagacaaaaagacccgagacaaaattgaaacctcttccagtagctccttctcagcccaccctcggcagcagtaacatcaatggttccatcgactaccccgccaagaacgacagcccgtgggcacctccgggaagagactatttctgtaatcggagtgccagcaatactgcagcagaatttggtgagccccttccaaaaagactgaagtccagcgtggttgcccttgacgttgaccagcccggggccaattacagaagaggctatgaccttcccaagtaccatatggtcagaggcatcacatcactgttaccgcaggactgtgtgtatccgtcgcaggcgctgcctcccaaaccaaggttcctgagctccagcgaggtcgattctccaaatgtgctgactgttcagaagccctatggtggctccgggccactttacacttgtgtgcctgctggtagtccagcatccagctcgacgttagaaggaaaaaggcctgtgtcatatcaacacttatctaacagcatggcacaaaagagaaactatgagaattttattgggaatgcacattatcgaccaaatgacaaaaaaacttgattcactaattagggggaaaaaaggtcttggtggatgtcagtgcttactccccatgaaattaaattttacttcatcctttgagaagcgaatggtgaaagctactgaaataagctgtgattgtactgtacataaaacatatgaggaatctgcaaggaacactacagttgtgtaaagttgttctgttaacttttgtaccaaatagcaatacaaactagttggaacagttggaacttacatacatggggactggaaatctctattttgtccctgaataatatttttcttagaattgaccaaataagaagtggaatttttgcatacttgagcgctgctgaaaagaaatcatttgggttgggtggggcgggatgggggaaaagtatataatgcttgcacctcaggtaaaaatctgtaaatatctaagttgtaaacctgcttgttcaaatactgtgtgtattccttttctctaatgcagctcatcacttggagcagtttctgctattgtgctctttcatttaaaatgtatgtttttttttttttaaactgtcaatgattttgtattatgttgaatccacccaaatctattgttgtcttaaaattgttaatggaagtattgaccctctatgatatgtgctgcagatatcgaggtcagccattcggaagctggcagcattttatcgcaactttgagcatctcagatggggaaggcaccttcttcctcgcctctccagattgtcctggaacctccaggatccttgactgagggcgttgggatggcttgtaggatttttaagagagtgtgtctacagacaagcattttctctgtagagcagccacacgttgtataaacataaactgtatgtgcagttatttaaatttgtttctgtcaaattaatcatttttgttggacgattcagtggcgggggggttttgcctaaattagtatataaaaacaaaaatgctaaattatatctgtgaattgcaggtattggggaacagttttaagggaaattttggggggaacattttaggtttgtatttggtagtcttaatgtatctggcatttgggtgaactgtggacatactagagttgattatagacacattgattttgaataaggaactgctggccgagcccgctgggagtctagaaagagaaaatctgtttctagacctcagttattttcccatttttggttgttttgaagcagtaacatttttctcagtgcacatgcaatttgggttttagagaagatggccaccagctggcttcctagatattttaaacttttgttctttaatatgctgtccatggctgagtttattagtacatgggcttagtgaccacaaaatattttattaagaaactgtttcaaaaataaatttgcactgttcatttttctggcctcgctgttctccatagagcaagggtaatcctagaaaaaattttttttttttaaattatgcaacgtaagatgtcctccttgatagaagtcttagctcctgtgttacaagggagaactcatttgagatcagtctgttggcattgcaatgaagtgctttgtatcaggaaagtgtacactattgaccttttttcctgttcacaagctgagccatatgtacataatctagattttgttttcatagttttgcacttttatagcctatttttgaagattaacacatttgcaagatgattgactcaatctttgcctaatccaatgagtgttacagagagcttgctgtgactagaaccataaatcttaaagggggtatgtgataatagagggctggaatttaaacctgtatttaaaaaaaagaatcaccaaatctatttgaaaacaagtcgatttgtattatgctggaattttttgggctttcagatttctctttttaaccacatttctgaatgtataaaaataccaattattttcctacagccctttgtacttcaaaatatgtttttgtgtccatcagtattaactattggtatactactggttttatatttttttttctttgagacaacagtacatataatagaggtacaattcgttggatttttgtttatgtatttatttcattccagtttgatttattttaattgttgatacttaagttgtcgaacagtagacattacttgttttatttatgatatatttcagcttaaagttatgttattatatgtggaagtgtaaatatagatttggtgttttgcaaaaaaaaaaaaaaaaaaaa

SEQ ID NO: 165931 - DNA, 3147 bp, Artificial Sequence
  derived and/or modified sequence
atgcagagcaaggtgaccggcaacatgcccacccagagcctgctgatgtacatggacggccccgaggtgatcggcagcagcctgggcagccccatggagatggaggacgccctgagcatgaagggcaccgccgtggtgcccttcagagccacccaggagaagaacgtgatccagatcgagggctacatgcccctggactgcatgttctgcagccagaccttcacccacagcgaggacctgaacaagcacgtgctgatgcagcacagacccaccctgtgcgagcccgccgtgctgagagtggaggccgagtacctgagccccctggacaagagccaggtgagaaccgagccccccaaggagaagaactgcaaggagaacgagttcagctgcgaggtgtgcggccagaccttcagagtggccttcgacgtggagatccacatgagaacccacaaggacagcttcacctacggctgcaacatgtgcggcagaagattcaaggagccctggttcctgaagaaccacatgagaacccacaacggcaagagcggcgccagaagcaagctgcagcagggcctggagagcagccccgccaccatcaacgaggtggtgcaggtgcacgccgccgagagcatcagcagcccctacaagatctgcatggtgtgcggcttcctgttccccaacaaggagagcctgatcgagcacagaaaggtgcacaccaagaagaccgccttcggcaccagcagcgcccagaccgacagcccccagggcggcatgcccagcagcagagaggacttcctgcagctgttcaacctgagacccaagagccaccccgagaccggcaagaagcccgtgagatgcatcccccagctggaccccttcaccaccttccaggcctggcagctggccaccaagggcaaggtggccatctgccaggaggtgaaggagagcggccaggagggcagcaccgacaacgacgacagcagcagcgagaaggagctgggcgagaccaacaagggcagctgcgccggcctgagccaggagaaggagaagtgcaagcacagccacggcgaggcccccagcgtggacgccgaccccaagctgcccagcagcaaggagaagcccacccactgcagcgagtgcggcaaggccttcagaacctaccaccagctggtgctgcacagcagagtgcacaagaaggacagaagagccggcgccgagagccccaccatgagcgtggacggcagacagcccggcacctgcagccccgacctggccgcccccctggacgagaacggcgccgtggacagaggcgagggcggcagcgaggacggcagcgaggacggcctgcccgagggcatccacctggacaagaacgacgacggcggcaagatcaagcacctgaccagcagcagagagtgcagctactgcggcaagttcttcagaagcaactactacctgaacatccacctgagaacccacaccggcgagaagccctacaagtgcgagttctgcgagtacgccgccgcccagaagaccagcctgagataccacctggagagacaccacaaggagaagcagaccgacgtggccgccgaggtgaagaacgacggcaagaaccaggacaccgaggacgccctgctgaccgccgacagcgcccagaccaagaacctgaagagattcttcgacggcgccaaggacgtgaccggcagcccccccgccaagcagctgaaggagatgcccagcgtgttccagaacgtgctgggcagcgccgtgctgagccccgcccacaaggacacccaggacttccacaagaacgccgccgacgacagcgccgacaaggtgaacaagaaccccacccccgcctacctggacctgctgaagaagagaagcgccgtggagacccaggccaacaacctgatctgcagaaccaaggccgacgtgacccccccccccgacggcagcaccacccacaacctggaggtgagccccaaggagaagcagaccgagaccgccgccgactgcagatacagacccagcgtggactgccacgagaagcccctgaacctgagcgtgggcgccctgcacaactgccccgccatcagcctgagcaagagcctgatccccagcatcacctgccccttctgcaccttcaagaccttctaccccgaggtgctgatgatgcaccagagactggagcacaagtacaaccccgacgtgcacaagaactgcagaaacaagagcctgctgagaagcagaagaaccggctgcccccccgccctgctgggcaaggacgtgccccccctgagcagcttctgcaagcccaagcccaagagcgccttccccgcccagagcaagagcctgcccagcgccaagggcaagcagagcccccccggccccggcaaggcccccctgaccagcggcatcgacagcagcaccctggcccccagcaacctgaagagccacagaccccagcagaacgtgggcgtgcagggcgccgccaccagacagcagcagagcgagatgttccccaagaccagcgtgagccccgcccccgacaagaccaagagacccgagaccaagctgaagcccctgcccgtggcccccagccagcccaccctgggcagcagcaacatcaacggcagcatcgactaccccgccaagaacgacagcccctgggccccccccggcagagactacttctgcaacagaagcgccagcaacaccgccgccgagttcggcgagcccctgcccaagagactgaagagcagcgtggtggccctggacgtggaccagcccggcgccaactacagaagaggctacgacctgcccaagtaccacatggtgagaggcatcaccagcctgctgccccaggactgcgtgtaccccagccaggccctgccccccaagcccagattcctgagcagcagcgaggtggacagccccaacgtgctgaccgtgcagaagccctacggcggcagcggccccctgtacacctgcgtgcccgccggcagccccgccagcagcagcaccctggagggcaagagacccgtgagctaccagcacctgagcaacagcatggcccagaagagaaactacgagaacttcatcggcaacgcccactacagacccaacgacaagaagacctag

SEQ ID NO: 165932 - DNA, 288 bp, Artificial Sequence
  derived and/or modified sequence
atgcagagcaaggtgaccggcaacatgcccacccagagcctgctgatgtacatggacggccccgaggtgatcggcagcagcctgggcagccccatggagatggaggacgccctgagcatgaagggcaccgccgtggtgcccttcagagccacccaggagaagaacgtgatccagatcgagggctacatgcccctggactgcatgttctgcagccagaccttcacccacagcgaggacctgaacaagcacgtgctgatgcagcacagacccaccctgtgcgagccctag

SEQ ID NO: 165933 - DNA, 3147 bp, Artificial Sequence
  derived and/or modified sequence
atgcagtctaaggttacaggcaacatgcccacccagtccctccttatgtatatggacggcccagaagtgattggctcctccctggggtcgcctatggagatggaggacgccctgtccatgaagggtactgcagttgtgccatttagagctacccaggagaaaaacgtgatccaaatcgaggggtatatgcctctagattgcatgttctgttctcaaacattcacacactcagaggatctgaacaagcacgtgctaatgcagcaccggcccactctttgcgaaccagcagttctgagggtggaagcggaatatttatctccgctggataaatcccaggttcggacagaacctcctaaggaaaagaattgtaaggagaacgagttcagttgcgaggtatgcggacagacatttcgggtcgcctttgacgtggagatccacatgagaacccataaagactcctttacatacggctgcaacatgtgcggccgtaggtttaaagagccctggttcctgaaaaatcacatgcgtactcataacggtaagtcaggcgcacggtctaagctgcagcaaggcctcgaatctagccccgccaccattaacgaggtggtgcaggttcacgcggcagagagcatcagcagtccttataaaatatgcatggtgtgcggctttctgttcccaaacaaagaaagtttaatcgaacaccgaaaggtgcacaccaagaaaacagcctttggaacaagtagtgcacagactgactccccgcagggaggaatgccaagcagcagagaggatttcctgcagttatttaacttgcggccgaaatcacaccccgaaaccggcaagaagcccgttagatgcatcccccagctggaccccttcaccacattccaggcctggcagctcgccactaagggcaaagtggccatatgccaggaagtgaaagagtcaggccaggaagggtctaccgataacgacgactcctccagcgagaaggaacttggagaaaccaataaggggagctgcgcggggcttagccaagagaaagaaaaatgtaaacactctcatggggaagctccttccgtagacgcagacccaaaactgccatcgtctaaagaaaaaccaacacattgcagcgagtgtggaaaggcattcaggacttaccaccaactggtcctgcatagccgcgtccacaaaaaagaccgtcgggcaggtgctgagtcgcctactatgtcagtggacggaaggcagcccgggacatgttcacctgaccttgctgcgccacttgacgagaatggcgccgtggaccgaggcgagggcggctcagaggatgggagtgaagacggccttcctgagggcatccatttagataagaacgacgacgggggcaaaatcaaacacctcacctcttcccgcgaatgtagctactgcggcaaattcttcagatccaactactatcttaatatccatctgcgtacacacactggagaaaagccctataaatgcgagttttgcgagtatgcagctgcccaaaagacctctttgcgctaccacttggagcggcaccataaggagaaacagaccgacgtcgccgcagaagtaaagaacgatggaaagaatcaggacacggaagacgccctcttaacagcagactcagcgcagaccaaaaacctgaagaggtttttcgatggggccaaggatgtgactggctctccccctgcaaaacaactaaaggagatgccatctgtgtttcagaacgtactggggtcagcagtgctgtcccccgcccacaaggatacccaggactttcataaaaatgctgcagacgactctgcggataaggtaaataaaaacccaacacccgcctatctcgacctacttaaaaaaagaagcgctgtagaaactcaagcaaacaacctcatatgtcggacaaaagccgacgtgacgcctccccctgatggatcaaccactcacaatttggaggtgagcccaaaggaaaagcaaactgaaactgccgcagactgcaggtaccggccatccgtggactgccatgaaaagcctctgaacctttctgtgggcgctctacacaattgtcctgccatatccctttccaaatccctgattccaagcataacctgtccattttgcactttcaagactttctatccggaagtgctcatgatgcatcagcggcttgaacacaaatataacccggatgtccataagaactgccggaacaagagtctcctccggtctcgtcgcacaggttgcccacctgccttgctgggaaaagacgttccgccactttcaagcttctgcaaacctaaacccaaaagcgctttcccagcacaatcaaaatctctgccatcggccaagggcaagcaatcacctccaggcccaggtaaggcacccctgaccagcgggattgattcctccactcttgcaccctccaatcttaagagtcacagacctcagcagaatgttggtgttcagggcgccgcaaccaggcaacagcaaagtgagatgttccctaaaacctccgtttccccggcacccgacaaaaccaagcgccccgagacaaaactgaagcctttgcccgtcgccccctctcaacctaccctaggaagttcgaatattaacggctcgatagattaccctgctaagaatgacagcccatgggcccctccagggcgcgactacttctgtaacaggtccgccagtaatactgccgctgagttcggggagcccctcccaaaaagactaaagagttcagtcgtcgcactggatgtagaccaaccaggcgcaaactacaggagagggtacgatctcccgaagtaccatatggtgcgcggcattacctctcttctgccccaggattgcgtgtacccttcccaggccctgccccccaaacctcgcttcctatcctctagcgaagtggacagcccaaacgtcctcacagtgcagaaaccatacggcggaagtggcccattgtacacttgcgtgcctgccggctcgcccgccagctcgtcaacattagaaggaaagcgtccagtttcctatcagcacctctctaatagcatggcccaaaaaaggaactatgaaaattttatcggcaacgctcactaccgacccaacgacaaaaagacttag

SEQ ID NO: 165934 - DNA, 3147 bp, Artificial Sequence
  derived and/or modified sequence
atgcagagcaaagtgaccggcaacatgccaacacagtctttactcatgtatatggatgggcccgaagtaatcggatccagcctcggttcaccaatggagatggaggacgctctgagtatgaagggcactgccgttgtgcctttcagagccacgcaagaaaagaacgtgattcagatagaaggctatatgcctctggattgtatgttctgctcacaaacttttacccattcggaggatctgaataagcatgtgttgatgcaacacaggcccaccttgtgtgaacctgccgttcttagagtggaagctgaatatctctcccccctagacaaaagccaggttaggactgaacctccaaaggagaaaaactgtaaagagaatgagttttcttgcgaggtgtgtggacagacgttccgcgtcgcttttgatgtggagatccacatgcgaacccataaggacagtttcacttatggttgcaacatgtgcggtagacggtttaaagaaccctggtttctcaaaaatcatatgaggacacacaacggaaaatccggcgctaggtccaaacttcaacaggggctggaaagttctccggccaccatcaacgaagtagtgcaggtgcacgcagccgagtcaatcagcagcccatacaagatctgtatggtatgtggatttctgttcccaaataaggagtcacttattgaacaccgcaaagttcacactaaaaagaccgctttcggcacttccagtgctcagactgactcacctcagggaggaatgccctcttcaagagaggatttcctgcagttgttcaatttgaggcctaagtcccacccggagacgggaaagaaacccgtccgctgcatccctcagttagatcctttcactacattccaagcttggcagctggcaaccaaaggaaaagtggccatatgccaagaggtgaaagaatctggacaagaaggctcaacagataacgacgacagcagtagcgagaaggagctgggagagaccaacaaaggaagctgtgctgggctcagccaggagaaggaaaagtgtaaacactcccacggcgaggccccatcagtagatgctgacccaaaactgcccagctcgaaagagaagcccactcactgtagcgaatgcgggaaagctttcagaacatatcatcagcttgtgctgcattcacgagtacataagaaagatagacgggccggcgctgagagccccacgatgtccgttgacggtagacagcccggcacctgttctcctgatctggcggccccgctggatgaaaatggtgctgttgaccggggtgaagggggcagcgaggatggctcggaggatggcctgccagaggggatacaccttgataaaaacgacgatggcgggaagatcaaacatctcacttctagccgtgaatgctcatattgcggaaaattcttcagatctaattattatctcaacattcaccttaggacccatactggcgaaaaaccctataaatgtgagttttgtgaatatgcagccgctcagaagacatcgctgcgataccatttggagcgccatcataaagaaaaacagactgacgtggccgcagaggtcaaaaacgatggtaaaaaccaagataccgaggacgccctgctcactgctgactcagcgcaaaccaagaaccttaaacggttcttcgatggcgccaaggacgtgactggaagcccacccgcgaagcaacttaaagagatgccatccgtctttcagaatgttctcgggagcgctgttctttccccagcccacaaagatactcaagacttccacaaaaacgctgctgacgactctgctgacaaggttaacaaaaatcccacaccagcctacctggacctgctgaagaagaggagcgcagtggagacccaggcgaacaatctgatctgccgcactaaagctgatgtcacccctcccccagatgggtccacaacacataatctagaagtgagccctaaggaaaaacagaccgaaaccgctgctgattgtagatatagaccttctgtggattgccacgagaagcccctgaacctgtccgtaggagctctgcacaattgcccagctataagcttgtcaaagtccctgattcctagcattacctgtcctttctgtacattcaagaccttctatcccgaggtgctgatgatgcatcagaggctcgaacataaatataatcccgacgtgcataaaaattgcagaaataagtctctactgaggtcccgccggaccggatgcccccctgcgctcctgggtaaggacgtgccccccctgtctagcttttgcaagcctaaaccgaagagcgcttttccagctcagagtaagagcttaccttccgccaagggaaaacagagtcctcctggaccaggcaaagcaccactcacgtcaggtattgattcttcaaccctcgcgcccagcaacttaaaatctcacaggcctcagcagaacgtgggtgtgcagggtgcagccacacgtcagcagcagagcgagatgtttcccaagacttccgtgtcacctgcgcccgacaagacaaagcggcccgagacaaagctgaagcccctgccggtcgccccgagccagcctacccttgggtctagtaatataaacggaagcattgattatcctgcaaaaaatgattcgccatgggctcctcctgggcgcgattacttctgtaaccgttccgctagtaacaccgctgcagaattcggtgagcctctgccaaaacgcctgaagagcagcgtggttgcccttgacgttgaccagccaggggccaactacaggcgcggatacgatctgccgaaatatcatatggtaagagggatcacaagtctcctgccccaggattgcgtgtatccttcccaggcccttccacccaagcctcgctttctttcatcaagcgaggtggatagtcctaatgtgctcacagtccagaaaccatacggtggtagtgggccgctctatacttgtgtaccagcaggttcccctgccagcagctctaccctggaagggaaaagaccagtgtcgtaccagcatctttctaattccatggcccagaagcggaactacgaaaatttcatcggtaacgctcactacaggccaaatgacaaaaagacctag

SEQ ID NO: 165935 - DNA, 288 bp, Artificial Sequence
  derived and/or modified sequence
atgcaaagtaaggtgactgggaacatgccaacccagtccttgttgatgtacatggacggacccgaggtgattggcagctcactgggaagtcctatggaaatggaggatgccctttcaatgaagggcaccgctgttgtcccattcagagcgactcaggaaaaaaacgtcatacagattgaggggtatatgcctctggattgtatgttttgcagccagacctttactcacagtgaggacttaaacaaacatgtcctgatgcagcatagacctaccctgtgtgaaccttag

SEQ ID NO: 165936 - DNA, 3147 bp, Artificial Sequence
  derived and/or modified sequence
atgcagagcaaggtgacaggcaacatgcccacccagagcctgctgatgtacatggatggccctgaggtgattggcagcagcctgggcagccccatggagatggaggatgccctgtccatgaagggcacagctgtggtgcccttccgggccacccaggagaagaatgtcatccagatcgagggctacatgcccctggactgcatgttctgcagccagaccttcacccacagcgaggacctgaacaagcacgtgctgatgcagcaccggcccaccctgtgtgagcctgctgtgctgcgggtggaggccgagtacctgagccccctggacaagagccaggtgaggacagagccccccaaggagaagaactgcaaggaaaatgagttcagctgtgaggtgtgtggccagaccttccgggtggcctttgatgtggagatccacatgaggacccacaaggacagcttcacctacggctgcaacatgtgtggccgccgcttcaaggagccctggttcctgaagaaccacatgaggacccacaacgggaagagcggggcccggagcaagctgcagcagggcctggagagcagccctgccaccatcaatgaggtggtgcaggtgcatgctgctgagagcatcagcagcccctacaagatctgcatggtgtgtggcttcctgttccccaacaaggagagcctcatcgagcacaggaaggtgcacaccaagaagacagccttcggcaccagcagcgcccagacagacagcccccagggcggcatgcccagcagccgggaggacttcctgcagctgttcaacctgcggcccaagagccaccctgagaccgggaagaagcctgtgcgctgcatcccccagctggaccccttcaccaccttccaggcctggcagctggccaccaagggcaaggtggccatctgccaggaggtgaaggagagcggccaggagggcagcacagacaatgatgacagcagcagcgagaaggagctgggggagaccaacaagggcagctgtgccggcctgagccaggagaaggagaagtgcaagcacagccatggagaggcccccagcgtggatgctgaccccaagctgcccagcagcaaggagaagcccacccactgcagtgaatgtgggaaggccttccgcacctaccaccagctggtgctgcacagccgggtgcacaagaaggacagaagagctggagctgagagccccaccatgtctgtggatggccggcagcccggcacctgcagcccagacctggccgcccccctggatgaaaatggagctgtggacagaggagagggcggctctgaagatggctctgaagatggcctgcctgagggcatccacctggacaagaatgatgatggcggcaagatcaagcacctgaccagcagccgggagtgcagctactgtgggaagttcttccgcagcaactactacctgaacatccacctgcggacccacactggagagaagccctacaagtgtgagttctgtgaatatgctgctgcccagaagaccagcctgcgctaccacctggagcggcaccacaaggagaagcagacagatgtggccgctgaggtgaagaatgatggcaagaaccaggacacagaagatgccctgctgacagctgacagcgcccagaccaagaacctgaagcgcttctttgatggagccaaggatgtgacaggcagccccccagccaagcagctgaaggagatgcccagcgtcttccagaatgtgctgggcagcgctgtgctgagccctgcccacaaggacacccaggacttccacaagaatgctgctgatgacagcgctgacaaggtgaacaagaaccccaccccagcctacctggacctgctgaagaagaggtctgctgtggagacccaggccaacaacctgatctgcaggaccaaggcagatgtgaccccacctccagatggcagcaccacccacaacctggaggtgagccccaaggagaagcagacagaaacagctgctgactgccgctaccggcccagcgtggactgccacgagaagcccctgaacctgtctgtgggcgccctgcacaactgcccagccatcagcctgagcaagagcctcatccccagcatcacctgccccttctgcaccttcaagaccttctacccagaggtgctgatgatgcaccagaggctggagcacaagtacaacccagatgtgcacaagaactgcaggaacaagagcctgctgcggagcagaagaacaggctgccccccagccctgctgggcaaggatgtgccccccctgagcagcttctgcaagcccaagcccaagagcgccttccctgcccagagcaagagcctgcccagcgccaagggcaagcagagccccccaggccctgggaaggcccccctgaccagcggcatcgacagcagcaccctggcccccagcaacctgaagagccaccggccccagcagaatgtgggcgtgcagggcgccgccacccggcagcagcagagcgagatgttccccaagacctctgtgtccccagccccagacaagaccaagaggcctgagaccaagctgaagcccctgcctgtggcccccagccagcccaccctgggcagcagcaacatcaatggcagcattgactacccagccaagaatgacagcccctgggcccctcctggccgggactacttctgcaacagaagtgccagcaacacagctgctgagtttggagagcccctgcccaagaggctgaagagctctgtggtggccctggatgtggaccagcccggggccaactacagaagaggctatgacctgcccaagtaccacatggtgcggggcatcaccagcctgctgccccaggactgtgtgtaccccagccaggccctgccccccaagccccgcttcctgagcagcagcgaggtggacagccccaacgtgctgactgtgcagaagccctacggcggcagcggccccctgtacacctgtgtgcctgctggcagccctgccagcagcagcaccctggagggcaagaggcctgtgtcctaccagcacctgagcaacagcatggcccagaagaggaactatgagaacttcatcggaaatgcccactaccggcccaatgacaagaagacctag

SEQ ID NO: 165937 - DNA, 288 bp, Artificial Sequence
  derived and/or modified sequence
atgcagagcaaggtgacaggcaacatgcccacccagagcctgctgatgtacatggatggccctgaggtgattggcagcagcctgggcagccccatggagatggaggatgccctgtccatgaagggcacagctgtggtgcccttccgggccacccaggagaagaatgtcatccagatcgagggctacatgcccctggactgcatgttctgcagccagaccttcacccacagcgaggacctgaacaagcacgtgctgatgcagcaccggcccaccctgtgtgagccctag

SEQ ID NO: 165938 - DNA, 3147 bp, Artificial Sequence
  derived and/or modified sequence
atgcagagcaaggtgaccggcaacatgcccacccagagcctgctgatgtacatggatgggcctgaagttatcggatccagtctgggaagtcccatggaaatggaagatgctctctccatgaagggcaccgccgttgtgccattcagagccacacaggaaaaaaatgttatccaaatcgaaggctacatgcctctggactgtatgttttgctcccagaccttcacacacagcgaggatcttaacaagcacgtgttgatgcagcacagacccacactgtgcgagcctgcggtgctccgggttgaagctgagtatctcagccccctggacaagtctcaggtgcggacggagccccccaaagagaagaactgcaaggaaaacgagttttcttgtgaagtgtgtggccagacattccgggtcgcattcgatgttgagattcatatgcggactcacaaggattcattcacgtatggctgcaatatgtgtgggcgccgatttaaggaaccatggtttctgaagaatcatatgagaacacataatggtaaaagcggggcgcggtcaaagctacaacagggactggaaagttctcctgccactattaatgaagtggtgcaagttcacgccgcggagtcgatctcaagtccatacaagatttgtatggtctgtggatttctctttcctaataaggagagtctgattgaacatcgcaaagtgcatactaagaagacagcattcggcacctcttctgcacagactgacagcccacagggcgggatgcccagcagcagagaggactttctgcaactatttaacttgcggcccaagagccaccccgaaactgggaagaaacccgtgcgctgtatacctcaactagatcccttcacaacttttcaggcatggcagctggcaaccaaaggaaaagtggccatctgccaggaggtgaaagaatctggacaggagggaagcactgataacgacgacagctcttcagagaaggaattgggggagactaacaaaggatcttgtgcggggctcagccaggaaaaggaaaagtgcaagcattcacatggagaggcaccctcagtggacgctgaccctaagttgccttcctccaaggaaaagcctactcactgcagcgagtgtgggaaggccttccgcacataccaccagctggtacttcattctagagtgcacaagaaagatcggcgggccggggctgaaagccccactatgagtgtggacgggcggcaacccggtacttgctcccccgacctggcagcaccccttgacgagaacggtgccgtagaccggggtgagggtggatctgaagatggttccgaagacgggctgcctgagggcatccatcttgataagaacgacgacggagggaagattaagcacctgacaagttcaagagaatgtagctattgcggtaagttttttcgcagtaactactatttaaacattcacctgcggacccacaccggggaaaagccatataaatgtgagttttgtgaatacgctgccgctcaaaaaacttccctccggtaccatttagagaggcaccataaggagaagcagacagatgtggccgcagaggttaaaaatgacggaaagaatcaggacaccgaggacgcccttctcacagccgactcggcccaaacgaaaaatctgaaacggttttttgatggggctaaggatgtcactggttctccccctgcgaaacagctaaaggagatgcccagtgtctttcagaatgtgctaggaagtgctgtgcttagcccagcccacaaggacacgcaggacttccataaaaatgccgccgacgattctgccgataaggtgaacaagaacccaacccccgcatacttggacctcctcaagaagagaagcgctgtcgagacacaggcaaacaatctcatttgcaggaccaaagccgatgttacacctcctcctgacgggtccacaactcacaacctcgaagtgtcgccaaaggaaaaacagacagaaacagcagcggactgccgatacagaccatcagttgattgccacgagaagcccttgaatctatccgtcggggccctgcacaattgtccagctatcagcctttccaaatctctaatcccatcaatcacctgccctttctgtacctttaaaactttctaccccgaggtactgatgatgcaccagcgactcgagcataagtacaatcctgacgtgcacaagaattgcagaaacaagtccctgctacggagtaggagaaccggttgccctccagcgctgttaggcaaggacgtgccacccctctctagcttctgtaagccaaaacctaaaagcgcttttcccgcccagagtaaatccctaccttcagctaagggaaagcagagcccacccggccccggtaaagccccccttacaagcggaattgacagttcaacactggctccctctaatctgaaatctcacagacctcagcagaatgtcggcgtccaaggcgctgccacacgccagcagcagagcgaaatgttcccgaaaacctccgtgagcccagcccctgacaaaacaaagcgcccagagacgaaactcaagcccctgccagtggccccttcccagcccactctcgggagtagtaatattaacgggtctatcgattatcctgccaagaatgattcaccctgggcaccccccggtagggattatttttgcaatagatccgcctctaatacagccgccgagtttggagaacctctgccaaaacgcctaaagtcaagcgttgtcgcattggatgtggatcagccaggagccaactacaggcgtgggtacgatctgcctaagtatcacatggtgcggggaattacatctttgctgccccaggactgcgtctaccctagccaggccctgccccctaagcccagatttctgtcctcctcggaagtggattcccccaacgtcctgaccgtccagaaaccctacggaggctcagggcccctctacacctgcgtgccagccggctcaccagcctccagtagcaccctggagggcaagaggccggtgagttatcagcacctaagcaattccatggcccaaaagcgaaactacgagaacttcatcgggaatgcccactaccgaccaaacgataaaaaaacttag

SEQ ID NO: 165939 - DNA, 3147 bp, Artificial Sequence
  derived and/or modified sequence
atgcagagcaaggtgaccggcaacatgcccacccagagcctgctgatgtacatggatggccctgaggtcattgggagctccttaggctccccaatggagatggaggatgcgctttctatgaaggggacagccgtggtgccgttcagggccactcaggagaagaatgtgatccaaatagagggatacatgccactggattgcatgttttgttcacagacattcacacattccgaggacctgaacaaacatgtcctgatgcagcatcggccaaccttgtgtgaacccgccgtgctccgagttgaagccgagtatctcagtccactggacaagtcgcaggtccgcacagagccccctaaggagaagaactgtaaagaaaacgaattcagctgtgaagtgtgtggccaaacgttcagggtggcgtttgacgtcgagattcatatgcgtacccataaagactccttcacatatggttgcaacatgtgtgggagacgatttaaggagccgtggtttctcaagaatcacatgagaacgcataacgggaaatccggtgctcgctctaagctacagcaggggctggagagcagccctgctacaattaacgaagtagttcaagtccatgcagcagagagtatctctagtccctacaaaatttgcatggtgtgtggttttctgttcccaaacaaagaaagcctaattgagcatcgtaaggtgcacaccaaaaagactgcctttggcacatcgagcgctcaaacagactcaccacaagggggtatgcctagtagccgcgaggacttcctacagttgttcaatctaaggcccaagtcgcatccagaaacaggtaaaaaacccgtgagatgcatcccacaactggatccattcaccactttccaggcctggcagttggctacaaaaggcaaggtggccatctgccaggaggtgaaagagagtgggcaggaaggatctaccgacaatgacgactcttcaagtgagaaggagttgggtgaaaccaataagggttcctgtgcgggactgtcccaggaaaaagagaagtgcaagcactcgcatggcgaggctcctagcgtggacgctgatcctaagctccccagctctaaggagaaaccaacccactgttctgaatgtggcaaagcttttcgtacataccaccagctggtgctgcactcccgtgttcataagaaagatagacgggcaggcgctgaatcaccaactatgtctgttgacggtcgccagcctggtacgtgctcacccgatctcgcagctccgctcgatgagaatggcgctgtcgatcgaggagaagggggctccgaagacggatccgaggacggtctgcctgagggcatacatctggacaaaaatgacgacggaggaaagatcaagcacctgacttctagcagggagtgctcctactgcggcaaatttttccgttcaaactattatctgaacatccacttgaggacccataccggcgagaagccttacaaatgtgaattttgtgaatacgctgctgctcagaagactagtcttcggtaccatctggaacgccaccataaagagaaacaaacagatgtggcagcagaagtgaaaaatgacggaaagaatcaagatactgaggacgcactgctgacagcagactctgctcagactaagaacttaaagcgtttcttcgacggcgccaaggacgttacggggtcacccccggccaaacaattgaaagagatgcccagtgttttccagaacgtccttgggagcgctgtgcttagcccagcccataaagatacccaggactttcataaaaatgccgccgacgactccgctgataaggtgaacaaaaatcctactccggcatacctcgacctcctgaaaaagcgaagcgccgtagaaacgcaggctaacaacctgatatgtcggactaaggcagatgtaacaccgccacctgacggaagtacaacgcacaatcttgaggtgtcacccaaagagaaacagaccgaaactgctgctgattgtcggtatcgtccaagcgtagactgtcacgagaaacctctcaatttgagtgtcggagctctgcataactgccctgccatctcattgtctaaatccctgataccgtctatcacctgtccattctgtacatttaaaacattctaccccgaagtgctaatgatgcaccagcggctggagcataagtataaccctgatgtgcacaagaactgtcgcaataagagtctgcttagatcccgtcgcacaggctgtcctccagcgctgctggggaaagatgtgccacctttgtcgtctttctgtaaacccaaacccaaatcagccttccccgctcagagtaaatcccttcccagcgctaaaggcaagcagtctccgcccggtcctggaaaggcccctttaactagcggaatagattccagcactctggccccgtccaatctcaaaagtcatagacctcagcaaaatgtgggcgttcaaggagccgctacaaggcagcagcagagtgagatgtttcccaagacctcagttagtcctgcacccgacaagacaaaaagacccgagacaaagctcaagccgctgcctgtagccccatcccagcctaccctggggtcgagcaatattaacggcagcatcgactaccccgctaaaaatgacagtccttgggctccaccaggcagagattacttttgtaacagatctgcatccaacaccgccgctgaattcggggagccactgcctaaaagactaaagagcagcgtggtggctttagacgtcgaccagcctggggctaactaccgacggggctatgaccttccgaaatatcacatggtgcgagggatcacttccctgctgccacaggactgcgtatacccatcacaggccctcccgcccaagcctcgatttttgtcttcgtccgaagtcgacagcccaaatgtgcttactgtacaaaagccctatggcgggtctggccctctctacacctgtgtaccagccggatcccccgcttcctcatcaacgctggagggaaaacggccagtgtcctaccaacatctgtctaatagtatggctcaaaagcggaattacgagaacttcatagggaacgcccactatcggccaaatgataaaaaaacatag

SEQ ID NO: 165940 - DNA, 288 bp, Artificial Sequence
  derived and/or modified sequence
atgcagagcaaggtgaccggcaacatgcccacccagagcctgctgatgtatatggatggcccggaagtcattggctccagtctcggttctcccatggagatggaggatgccctgagtatgaaaggcaccgctgtggtcccttttcgcgctacacaggagaagaacgtgatccagatagaagggtatatgccgctggattgcatgttttgttctcagacctttactcacagcgaggatttaaataagcacgtattgatgcagcaccgacctaccttatgcgagccctag

SEQ ID NO: 165941 - DNA, 3147 bp, Artificial Sequence
  derived and/or modified sequence
atgcaatccaaagtgacgggaaatatgccaacgcagtccctgctgatgtatatggatggtcctgaggtgattggatcctccttgggctcccccatggaaatggaggatgcactgtctatgaagggcaccgctgtcgttcctttccgggctacccaggagaagaatgtgattcagatcgagggctacatgccactggactgtatgttttgctcacagacttttacacactccgaagatttgaataagcacgtgttgatgcagcacaggcctaccctctgcgagcctgctgttctgcgtgtagaagctgaatacctgagtcctctcgacaaatcccaggtgcggacagaaccacccaaagaaaaaaattgcaaagaaaatgaattttcttgcgaggtatgcgggcaaactttccgcgtggcgttcgacgtggagatccatatgaggactcacaaggattctttcacatacggatgtaacatgtgcggaaggcggttcaaggagccttggtttctgaagaaccacatgcggacacacaacggcaagtcaggtgccaggtccaagctgcagcaggggctcgagagctctcccgcaactatcaatgaggtggtgcaggtccacgccgctgagtctatcagtagcccttacaagatttgtatggtgtgtggttttctgtttcctaataaggagagcctgattgaacaccggaaagttcacacgaagaagacggcctttggaacatcatccgctcagactgatagcccacaggggggaatgcctagttcacgtgaagacttcttgcaattgttcaacctgagacccaagtctcacccagagaccggaaaaaaacccgtacgctgcatacctcagcttgacccctttacaacgtttcaggcttggcagttggcgactaaagggaaggtggcgatctgtcaggaggtcaaggagagtggacaggaaggcagcacagataacgatgacagctcctctgagaaggagctgggtgaaacaaataaaggcagttgtgctggactctcccaagagaaggaaaagtgcaaacatagccacggcgaggcgccttccgtggacgcagaccctaagctcccgagctctaaggagaaaccaacccactgctctgaatgtggcaaggctttcagaacttatcaccagcttgtcctccattctcgcgttcacaagaaagataggcgcgcaggagccgagtctcctaccatgagcgtagacggacgacagccgggaacctgttcccctgacctggctgccccactggatgaaaacggagccgtggataggggtgagggtggttccgaagacggctccgaagacggcctcccagaagggattcacctggataagaacgacgatggaggaaaaattaagcatctgacaagcagtagagaatgttcctactgtggcaaatttttcaggtctaattactatttgaacattcacttgagaacacacaccggtgaaaagccctacaagtgcgaattctgtgaatacgcagctgcccaaaaaacttcacttcgctatcacctggaacggcaccataaagagaagcaaacggacgtagcggctgaggtaaaaaacgacgggaaaaaccaagatacagaggatgcactgctgaccgccgacagcgctcagacaaaaaatttaaagcggttcttcgatggcgcaaaggatgtgacgggatctccacctgccaaacagctgaaggaaatgccgtcagtgtttcagaacgttctgggtagcgccgtactgagtccagcccataaggatacacaggacttccacaaaaacgcagctgacgatagcgctgataaagtgaacaagaaccctacacctgcttacttggatttgctgaagaagcggtctgcagtagagacccaggccaataacctgatttgccgcactaaggccgacgtgacccccccacctgacgggtcaactacccataacctagaggtgtctcccaaggagaaacagacagaaacagcggcagattgtagatataggcccagtgtggactgccacgagaaaccactgaatctgtcagtcggggcactccataattgtccggctatctctctcagcaagtcattgattcctagcataacatgcccattctgcacttttaagacgttttaccccgaggtgttgatgatgcaccagcggctggagcataagtataatccagacgtgcataagaattgtaggaataaaagccttctgaggtccaggaggacaggctgccccccagccttgcttggaaaggacgtgcctcctttatcctccttttgtaagcccaaacctaagtctgcgtttccagcacagagtaagagcctaccaagcgctaaaggtaagcagtcgccacctggacccggaaaggctcccctaacttcaggcatcgacagttctaccctcgcaccttccaatctcaaaagccaccgtccccagcagaatgttggcgtgcagggcgcagcgactcgccagcagcagagcgagatgttcccaaaaacctctgtcagccctgcaccggataagacaaagcgccctgagactaaattgaagcctcttcccgtggcaccctctcaacccaccctggggagctcaaacatcaacggttccattgattatccggcaaaaaacgatagcccttgggcccctccgggacgagactacttctgcaatcgaagtgcttctaatactgcagctgaatttggggagcccttgccaaaacggctgaagtcctcagtggtagcccttgacgtggaccagcccggagccaattatagaagggggtatgatctgccaaagtatcatatggtcagagggatcacctcactacttccccaggattgcgtgtatccttctcaggctctgccacctaaacctagatttctgtcaagttccgaggttgattcccctaacgtcctgactgtgcaaaagccatatggaggatcaggtccactctacacatgcgtccccgcaggaagccctgcttcctcttctaccctggagggtaagagacctgtgagctaccagcacctctcaaattccatggcgcaaaaacgtaactacgagaattttatcggtaacgctcactataggcctaatgacaagaagacctag

SEQ ID NO: 165942 - DNA, 3147 bp, Artificial Sequence
  derived and/or modified sequence
atgcagagcaaagtgacggggaacatgcccacacagagtctactcatgtacatggacggacccgaagtgatcggatctagtctaggatctcccatggaaatggaagatgctctgtctatgaaggggaccgccgttgtgcccttccgcgcaacgcaagaaaagaacgtgatccagatcgaaggttacatgcccttggactgcatgttttgctctcaaactttcactcactctgaagacctcaacaaacacgtgctgatgcagcaccggccaacattgtgcgagccggcagtgttgcgagtcgaggctgaatatctatctccactcgataagtcccaagtgcgaaccgagcctcccaaggaaaagaactgtaaggagaacgaattttcttgtgaagtatgcggacagacgtttagggtggccttcgatgtggagattcacatgcgaacccacaaggacagcttcacttatggctgtaacatgtgcggccgaaggtttaaggagccctggtttctcaaaaatcacatgcgaacacataatggcaaaagcggggctagaagcaagctccaacaaggtctggaaagttcccccgcaacgattaacgaagtagttcaagtccatgccgctgagtctatatcatcgccctataagatttgcatggtgtgtggctttctgtttccgaacaaagagtcactgatagaacaccgcaaggtgcacaccaagaagacagcattcggcacgtcttcagcccagacagatagccctcagggcggtatgccctcgtccagagaagattttttacagttatttaacctgcgccctaaatctcaccctgaaacgggcaagaaacccgtgcgatgtatcccccagcttgacccctttacgacattccaggcttggcaactggccacaaaaggaaaggtggccatctgccaggaagtaaaagaatccggtcaggaggggagtacggacaatgacgattccagcagcgagaaggagctcggagaaaccaacaaaggcagctgtgccggactttctcaagagaaggagaaatgtaagcattcgcacggtgaagccccatctgttgatgctgacccaaagctgccttcttctaaggaaaaacctacacattgttcagagtgcgggaaggccttccggacatatcatcagctagtcctacattctcgggttcataagaaggatcgacgagctggcgcagaaagcccgacaatgtccgtggatgggcgacagcccggaacatgctctcccgacctcgctgctccactggatgagaatggtgctgtcgatcggggagagggagggagcgaggatgggtccgaggacggcctgccagagggcattcacttggataagaatgatgatggcggaaaaattaaacacttaacatcctcaagggagtgttcatactgcggcaaatttttccgttctaactattatctgaacatccatttgcgtacgcacacgggagagaagccgtataaatgcgaattttgcgagtacgccgcagcacaaaagacatccctgcgctaccatctggaacgtcatcacaaagagaaacaaaccgacgtggctgcagaggtgaagaacgacggaaaaaatcaggacactgaggacgctcttctcaccgctgacagcgcacaaacaaagaatttaaaacgattcttcgatggggctaaggacgttaccggctcgccacccgctaagcagctgaaggagatgccgagcgtgttccagaatgtactgggtagcgctgtcctctctccagcacataaagacacacaggacttccataaaaatgccgctgatgattcagctgataaggtgaataaaaacccaacaccagcctatttagacctcttgaagaagcggtcagccgtggagacgcaggctaacaatctgatctgtcgcacaaaggccgacgttaccccaccacctgacgggagcacaacccataacctggaagtgagtcctaaggaaaagcagaccgagacggcggcagattgccgctatagaccgagcgtggattgccacgaaaagccattaaacttgagcgtgggagctcttcataattgcccagctatcagtttatcaaagtctctcatcccttctatcacatgccccttttgcactttcaaaaccttctatcctgaggtgctcatgatgcaccagagactcgaacacaagtataaccctgacgtgcataaaaattgtcgcaataagtcgctgctgcggtcaaggcgcacaggatgtccgcctgctctccttggtaaagatgttccgcctctgagctcattctgtaagcctaagccgaagtccgcatttcccgctcagtcaaagtccctccccagcgccaagggcaagcagagccccccaggtcctggaaaagcccctctgacatctggaattgattcttctactttggcaccttcgaacctcaagtcccacaggcctcagcagaatgtgggagtacaaggtgcagccacacgtcagcagcagagcgagatgtttcccaaaacctccgtatcaccagcccctgacaaaactaaacggcctgaaaccaaactgaaacccctccccgtggcacctagtcagccgactctgggctcttccaacattaatggctctatagattaccccgcaaaaaacgactccccttgggcaccgcctggacgcgactacttctgtaacagatccgcttccaataccgcggctgagttcggtgagccactcccaaaacgcctcaaatctagcgtggtggcattggacgtggatcaacccggtgccaactacagaaggggttacgatctgcctaaataccacatggtccgaggtatcacaagcctgctacctcaggactgtgtgtatccatcgcaggctctgcctcctaagccaagatttctctcatccagtgaagtagacagcccaaacgtattgacagttcaaaagccatatgggggatccggcccactgtatacatgtgtccccgcagggagcccagcctcaagctcaactttagaaggtaagcgcccagtttcatatcaacatctgtctaacagtatggctcagaagcgcaattatgaaaactttatcggtaacgctcattacaggccgaacgacaagaagacgtag

SEQ ID NO: 165943 - DNA, 288 bp, Artificial Sequence
  derived and/or modified sequence
atgcagagcaaggttacagggaatatgcccacacagtctctgctcatgtacatggatgggcctgaagtgatcgggagctcgctaggctctcccatggaaatggaagacgcattgtcaatgaagggcactgccgtggtgccatttagagccacacaagagaagaatgtgattcagatcgagggctacatgcccctggactgtatgttctgttcgcagactttcacacatagcgaggatctaaacaaacacgtgctgatgcagcacagaccaaccttgtgcgagccatag

SEQ ID NO: 165944 - DNA, 5633 bp, Artificial Sequence
  derived and/or modified sequence
gacaaagagaactaatgctttgtgctgattcatatttgaatcgaggcattgggaaccctgtatgccttgtttgtggaaagaaccagtgacaccatcactgagcttcctaaaagttcgaagaagttagaggactatacactttcttttgaacttttataataaatatttgctctggtttttggaacccagggctgttagaggggtgagtgacaagtcttacaagtggccttattccaactccagaaattgcccaacggaactttgagattatatgcaatcgaaagtgacaggaaacatgccaactcaatccctcttaatgtacatggatgggccagaagtgattggcagctctcttggcagtccgatggagatggaggatgccttgtcaatgaaagggaccgctgttgttccattccgagctacacaagaaaaaaatgtcatccaaatcgaggggtatatgcccttggattgcatgttctgcagccagaccttcacacattcagaagaccttaataaacatgtcttaatgcaacaccggcctaccctctgtgaaccagcagttcttcgggttgaagcagagtatctcagtccgcttgataaaagtcaagtgcgaacagaacctcccaaggaaaagaattgcaaggaaaatgaatttagctgtgaggtatgtgggcagacatttagagtcgcttttgatgttgagatccacatgagaacacacaaagattctttcacttacgggtgtaacatgtgcggaagaagattcaaggagccttggtttcttaaaaatcacatgcggacacataatggcaaatcgggggccagaagcaaactgcagcaaggcttggagagtagtccagcaacgatcaacgaggtcgtccaggtgcacgcggccgagagcatctcctctccttacaaaatctgcatggtttgtggcttcctatttccaaataaagaaagtctaattgagcaccgcaaggtgcacaccaaaaaaactgctttcggtaccagcagcgcgcagacagactctccacaaggaggaatgccgtcctcgagggaggacttcctgcagttgttcaacttgagaccaaaatctcaccctgaaacggggaagaagcctgtcagatgcatccctcagctcgatccgttcaccaccttccaggcttggcagctggctaccaaaggaaaagttgccatttgccaagaagtgaaggaatcggggcaagaagggagcaccgacaacgacgattcgagttccgagaaggagcttggagaaacaaataagggcagttgtgcaggcctctcgcaagagaaagagaagtgcaaacactcccacggcgaagcgccctccgtggacgcggatcccaagttacccagtagcaaggagaagcccactcactgctccgagtgcggcaaagctttcagaacctaccaccagctggtcttgcactccagggtccacaagaaggaccggagggccggcgcggagtcgcccaccatgtctgtggacgggaggcagccggggacgtgttctcctgacctcgccgcccctctggatgaaaatggagccgtggatcgaggggaaggtggttctgaagacggatctgaggatgggcttcccgaaggaatccatctggataaaaatgatgatggaggaaaaataaaacatcttacatcttcaagagagtgtagttattgtggaaagtttttccgttcaaattattacctcaatattcatctcagaacgcatacaggtgaaaaaccatacaaatgtgaattttgtgaatatgctgcagcccagaagacatctctgaggtatcacttggagagacatcacaaggaaaaacaaaccgatgttgctgctgaagtcaagaacgatggtaaaaatcaggacactgaagatgcactattaaccgctgacagtgcgcaaaccaaaaatttgaaaagattttttgatggtgccaaagatgttacaggcagtccacctgcaaagcagcttaaggagatgccttctgtttttcagaatgttctgggcagcgctgtcctctcaccagcacacaaagatactcaggatttccataaaaatgcagctgatgacagtgctgataaagtgaataaaaaccctacccctgcttacctggacctgttaaaaaagagatcagcagttgaaactcaggcaaataacctcatctgtagaaccaaggcggatgttactcctcctccggatggcagtaccacccataaccttgaagttagccccaaagagaagcaaacggagaccgcagctgactgcagatacaggccaagtgtggattgtcacgaaaaacctttaaatttatccgtgggggctcttcacaattgcccggcaatttctttgagtaaaagtttgattccaagtatcacctgtccattttgtaccttcaagacattttatccagaagttttaatgatgcaccagagactggagcataaatacaatcctgacgttcataaaaactgtcgaaacaagtccttgcttagaagtcgacgtaccggatgcccgccagcgttgctgggaaaagatgtgcctcccctctctagtttctgtaaacccaagcccaagtctgctttcccggcgcagtccaaatccctgccatctgcgaaggggaagcagagccctcctgggccaggcaaggcccctctgacttcagggatagactctagcactttagccccaagtaacctgaagtcccacagaccacagcagaatgtgggggtccaaggggccgccaccaggcaacagcaatctgagatgtttcctaaaaccagtgtttcccctgcaccggataagacaaaaagacccgagacaaaattgaaacctcttccagtagctccttctcagcccaccctcggcagcagtaacatcaatggttccatcgactaccccgccaagaacgacagcccgtgggcacctccgggaagagactatttctgtaatcggagtgccagcaatactgcagcagaatttggtgagccccttccaaaaagactgaagtccagcgtggttgcccttgacgttgaccagcccggggccaattacagaagaggctatgaccttcccaagtaccatatggtcagaggcatcacatcactgttaccgcaggactgtgtgtatccgtcgcaggcgctgcctcccaaaccaaggttcctgagctccagcgaggtcgattctccaaatgtgctgactgttcagaagccctatggtggctccgggccactttacacttgtgtgcctgctggtagtccagcatccagctcgacgttagaaggaaaaaggcctgtgtcatatcaacacttatctaacagcatggcacaaaagagaaactatgagaattttattgggaatgcacattatcgaccaaatgacaaaaaaacttgattcactaattagggggaaaaaaggtcttggtggatgtcagtgcttactccccatgaaattaaattttacttcatcctttgagaagcgaatggtgaaagctactgaaataagctgtgattgtactgtacataaaacatatgaggaatctgcaaggaacactacagttgtgtaaagttgttctgttaacttttgtaccaaatagcaatacaaactagttggaacagttggaacttacatacatggggactggaaatctctattttgtccctgaataatatttttcttagaattgaccaaataagaagtggaatttttgcatacttgagcgctgctgaaaagaaatcatttgggttgggtggggcgggatgggggaaaagtatataatgcttgcacctcaggtaaaaatctgtaaatatctaagttgtaaacctgcttgttcaaatactgtgtgtattccttttctctaatgcagctcatcacttggagcagtttctgctattgtgctctttcatttaaaatgtatgtttttttttttttaaactgtcaatgattttgtattatgttgaatccacccaaatctattgttgtcttaaaattgttaatggaagtattgaccctctatgatatgtgctgcagatatcgaggtcagccattcggaagctggcagcattttatcgcaactttgagcatctcagatggggaaggcaccttcttcctcgcctctccagattgtcctggaacctccaggatccttgactgagggcgttgggatggcttgtaggatttttaagagagtgtgtctacagacaagcattttctctgtagagcagccacacgttgtataaacataaactgtatgtgcagttatttaaatttgtttctgtcaaattaatcatttttgttggacgattcagtggcgggggggttttgcctaaattagtatataaaaacaaaaatgctaaattatatctgtgaattgcaggtattggggaacagttttaagggaaattttggggggaacattttaggtttgtatttggtagtcttaatgtatctggcatttgggtgaactgtggacatactagagttgattatagacacattgattttgaataaggaactgctggccgagcccgctgggagtctagaaagagaaaatctgtttctagacctcagttattttcccatttttggttgttttgaagcagtaacatttttctcagtgcacatgcaatttgggttttagagaagatggccaccagctggcttcctagatattttaaacttttgttctttaatatgctgtccatggctgagtttattagtacatgggcttagtgaccacaaaatattttattaagaaactgtttcaaaaataaatttgcactgttcatttttctggcctcgctgttctccatagagcaagggtaatcctagaaaaaattttttttttttaaattatgcaacgtaagatgtcctccttgatagaagtcttagctcctgtgttacaagggagaactcatttgagatcagtctgttggcattgcaatgaagtgctttgtatcaggaaagtgtacactattgaccttttttcctgttcacaagctgagccatatgtacataatctagattttgttttcatagttttgcacttttatagcctatttttgaagattaacacatttgcaagatgattgactcaatctttgcctaatccaatgagtgttacagagagcttgctgtgactagaaccataaatcttaaagggggtatgtgataatagagggctggaatttaaacctgtatttaaaaaaaagaatcaccaaatctatttgaaaacaagtcgatttgtattatgctggaattttttgggctttcagatttctctttttaaccacatttctgaatgtataaaaataccaattattttcctacagccctttgtacttcaaaatatgtttttgtgtccatcagtattaactattggtatactactggttttatatttttttttctttgagacaacagtacatataatagaggtacaattcgttggatttttgtttatgtatttatttcattccagtttgatttattttaattgttgatacttaagttgtcgaacagtagacattacttgttttatttatgatatatttcagcttaaagttatgttattatatgtggaagtgtaaatatagatttggtgttttgc

SEQ ID NO: 165945 - DNA, 5796 bp, Artificial Sequence
  derived and/or modified sequence
attcaaacccggccggcccgagtggtgtcagctcagtcccggccgccgccgcgcgaggaaatggccgaggagccggagccgcagggtttggaaatcccttgtctccaggttgctgggattgacttcttgctcaattgaaacactcattcaatggagacaaagagaactaatgctttgtgctgattcatatttgaatcgaggcattgggaaccctgtatgccttgtttgtggaaagaaccagtgacaccatcactgagcttcctaaaagttcgaagaagttagaggactatacactttcttttgaacttttataataaatatttgctctggtttttggaacccagggctgttagaggggtgagtgacaagtcttacaagtggccttattccaactccagaaattgcccaacggaactttgagattatatgcaatcgaaagtgacaggaaacatgccaactcaatccctcttaatgtacatggatgggccagaagtgattggcagctctcttggcagtccgatggagatggaggatgccttgtcaatgaaagggaccgctgttgttccattccgagctacacaagaaaaaaatgtcatccaaatcgaggggtatatgcccttggattgcatgttctgcagccagaccttcacacattcagaagaccttaataaacatgtcttaatgcaacaccggcctaccctctgtgaaccagcagttcttcgggttgaagcagagtatctcagtccgcttgataaaagtcaagtgcgaacagaacctcccaaggaaaagaattgcaaggaaaatgaatttagctgtgaggtatgtgggcagacatttagagtcgcttttgatgttgagatccacatgagaacacacaaagattctttcacttacgggtgtaacatgtgcggaagaagattcaaggagccttggtttcttaaaaatcacatgcggacacataatggcaaatcgggggccagaagcaaactgcagcaaggcttggagagtagtccagcaacgatcaacgaggtcgtccaggtgcacgcggccgagagcatctcctctccttacaaaatctgcatggtttgtggcttcctatttccaaataaagaaagtctaattgagcaccgcaaggtgcacaccaaaaaaactgctttcggtaccagcagcgcgcagacagactctccacaaggaggaatgccgtcctcgagggaggacttcctgcagttgttcaacttgagaccaaaatctcaccctgaaacggggaagaagcctgtcagatgcatccctcagctcgatccgttcaccaccttccaggcttggcagctggctaccaaaggaaaagttgccatttgccaagaagtgaaggaatcggggcaagaagggagcaccgacaacgacgattcgagttccgagaaggagcttggagaaacaaataagggcagttgtgcaggcctctcgcaagagaaagagaagtgcaaacactcccacggcgaagcgccctccgtggacgcggatcccaagttacccagtagcaaggagaagcccactcactgctccgagtgcggcaaagctttcagaacctaccaccagctggtcttgcactccagggtccacaagaaggaccggagggccggcgcggagtcgcccaccatgtctgtggacgggaggcagccggggacgtgttctcctgacctcgccgcccctctggatgaaaatggagccgtggatcgaggggaaggtggttctgaagacggatctgaggatgggcttcccgaaggaatccatctggataaaaatgatgatggaggaaaaataaaacatcttacatcttcaagagagtgtagttattgtggaaagtttttccgttcaaattattacctcaatattcatctcagaacgcatacaggtgaaaaaccatacaaatgtgaattttgtgaatatgctgcagcccagaagacatctctgaggtatcacttggagagacatcacaaggaaaaacaaaccgatgttgctgctgaagtcaagaacgatggtaaaaatcaggacactgaagatgcactattaaccgctgacagtgcgcaaaccaaaaatttgaaaagattttttgatggtgccaaagatgttacaggcagtccacctgcaaagcagcttaaggagatgccttctgtttttcagaatgttctgggcagcgctgtcctctcaccagcacacaaagatactcaggatttccataaaaatgcagctgatgacagtgctgataaagtgaataaaaaccctacccctgcttacctggacctgttaaaaaagagatcagcagttgaaactcaggcaaataacctcatctgtagaaccaaggcggatgttactcctcctccggatggcagtaccacccataaccttgaagttagccccaaagagaagcaaacggagaccgcagctgactgcagatacaggccaagtgtggattgtcacgaaaaacctttaaatttatccgtgggggctcttcacaattgcccggcaatttctttgagtaaaagtttgattccaagtatcacctgtccattttgtaccttcaagacattttatccagaagttttaatgatgcaccagagactggagcataaatacaatcctgacgttcataaaaactgtcgaaacaagtccttgcttagaagtcgacgtaccggatgcccgccagcgttgctgggaaaagatgtgcctcccctctctagtttctgtaaacccaagcccaagtctgctttcccggcgcagtccaaatccctgccatctgcgaaggggaagcagagccctcctgggccaggcaaggcccctctgacttcagggatagactctagcactttagccccaagtaacctgaagtcccacagaccacagcagaatgtgggggtccaaggggccgccaccaggcaacagcaatctgagatgtttcctaaaaccagtgtttcccctgcaccggataagacaaaaagacccgagacaaaattgaaacctcttccagtagctccttctcagcccaccctcggcagcagtaacatcaatggttccatcgactaccccgccaagaacgacagcccgtgggcacctccgggaagagactatttctgtaatcggagtgccagcaatactgcagcagaatttggtgagccccttccaaaaagactgaagtccagcgtggttgcccttgacgttgaccagcccggggccaattacagaagaggctatgaccttcccaagtaccatatggtcagaggcatcacatcactgttaccgcaggactgtgtgtatccgtcgcaggcgctgcctcccaaaccaaggttcctgagctccagcgaggtcgattctccaaatgtgctgactgttcagaagccctatggtggctccgggccactttacacttgtgtgcctgctggtagtccagcatccagctcgacgttagaaggaaaaaggcctgtgtcatatcaacacttatctaacagcatggcacaaaagagaaactatgagaattttattgggaatgcacattatcgaccaaatgacaaaaaaacttgattcactaattagggggaaaaaaggtcttggtggatgtcagtgcttactccccatgaaattaaattttacttcatcctttgagaagcgaatggtgaaagctactgaaataagctgtgattgtactgtacataaaacatatgaggaatctgcaaggaacactacagttgtgtaaagttgttctgttaacttttgtaccaaatagcaatacaaactagttggaacagttggaacttacatacatggggactggaaatctctattttgtccctgaataatatttttcttagaattgaccaaataagaagtggaatttttgcatacttgagcgctgctgaaaagaaatcatttgggttgggtggggcgggatgggggaaaagtatataatgcttgcacctcaggtaaaaatctgtaaatatctaagttgtaaacctgcttgttcaaatactgtgtgtattccttttctctaatgcagctcatcacttggagcagtttctgctattgtgctctttcatttaaaatgtatgtttttttttttttaaactgtcaatgattttgtattatgttgaatccacccaaatctattgttgtcttaaaattgttaatggaagtattgaccctctatgatatgtgctgcagatatcgaggtcagccattcggaagctggcagcattttatcgcaactttgagcatctcagatggggaaggcaccttcttcctcgcctctccagattgtcctggaacctccaggatccttgactgagggcgttgggatggcttgtaggatttttaagagagtgtgtctacagacaagcattttctctgtagagcagccacacgttgtataaacataaactgtatgtgcagttatttaaatttgtttctgtcaaattaatcatttttgttggacgattcagtggcgggggggttttgcctaaattagtatataaaaacaaaaatgctaaattatatctgtgaattgcaggtattggggaacagttttaagggaaattttggggggaacattttaggtttgtatttggtagtcttaatgtatctggcatttgggtgaactgtggacatactagagttgattatagacacattgattttgaataaggaactgctggccgagcccgctgggagtctagaaagagaaaatctgtttctagacctcagttattttcccatttttggttgttttgaagcagtaacatttttctcagtgcacatgcaatttgggttttagagaagatggccaccagctggcttcctagatattttaaacttttgttctttaatatgctgtccatggctgagtttattagtacatgggcttagtgaccacaaaatattttattaagaaactgtttcaaaaataaatttgcactgttcatttttctggcctcgctgttctccatagagcaagggtaatcctagaaaaaattttttttttttaaattatgcaacgtaagatgtcctccttgatagaagtcttagctcctgtgttacaagggagaactcatttgagatcagtctgttggcattgcaatgaagtgctttgtatcaggaaagtgtacactattgaccttttttcctgttcacaagctgagccatatgtacataatctagattttgttttcatagttttgcacttttatagcctatttttgaagattaacacatttgcaagatgattgactcaatctttgcctaatccaatgagtgttacagagagcttgctgtgactagaaccataaatcttaaagggggtatgtgataatagagggctggaatttaaacctgtatttaaaaaaaagaatcaccaaatctatttgaaaacaagtcgatttgtattatgctggaattttttgggctttcagatttctctttttaaccacatttctgaatgtataaaaataccaattattttcctacagccctttgtacttcaaaatatgtttttgtgtccatcagtattaactattggtatactactggttttatatttttttttctttgagacaacagtacatataatagaggtacaattcgttggatttttgtttatgtatttatttcattccagtttgatttattttaattgttgatacttaagttgtcgaacagtagacattacttgttttatttatgatatatttcagcttaaagttatgttattatatgtggaagtgtaaatatagatttggtgttttgcaatcttga

SEQ ID NO: 165946 - DNA, 779 bp, Artificial Sequence
  derived and/or modified sequence
accgttttaaggcttcatggtgatgagggcatttaaccctcgggacacgcccattctgcaggcctggctcgacctccactttggagaagatgctccaggaacactgaagggcaggtcgtccccgaccttctatgaggattgcccagctcaagggtttggaaatcccttgtctccaggttgctgggattgacttcttgctcaattgaaacactcattcaatggagacaaagagaactaatgctttgtgctgattcatatttgaatcgaggcattgggaaccctgtatgccttgtttgtggaaagaaccagtgacaccatcactgagcttcctaaaagttcgaagaagttagaggactatacactttcttttgaacttttataataaatatttgctctggtttttggaacccagggctgttagaggggtgagtgacaagtcttacaagtggccttattccaactccagaaattgcccaacggaactttgagattatatgcaatcgaaagtgacaggaaacatgccaactcaatccctcttaatgtacatggatgggccagaagtgattggcagctctcttggcagtccgatggagatggaggatgccttgtcaatgaaagggaccgctgttgttccattccgagctacacaagaaaaaaatgtcatccaaatcgaggggtatatgcccttggattgcatgttctgcagccagaccttcacacattcagaagaccttaataaacatgtcttaatgcaacaccggcctaccctctgtgaacca

SEQ ID NO: 165947 - protein, 270 aa, Artificial Sequence
  derived and/or modified sequence
MACRPRSPPRHQSRCDGDASPPSPARWSLGRKRRADGRRWRPEDAEEAEHRGAERRPESFTTPEGPKPRSRCSDWASAVEEDEMRTRVNKEMARYKRKLLINDFGRERKSSSGSSDSKESMSTVPADFETDESVLMRRQKQINYGKNTIAYDRYIKEVPRHLRQPGIHPKTPNKFKKYSRRSWDQQIKLWKVALHFWDPPAEEGCDLQEIHPVDLESAESSSEPQTSSQDDFDVYSGTPTKVRHMDSQVEDEFDLEACLTEPLRDFSAMS

SEQ ID NO: 165948 - DNA, 813 bp, Artificial Sequence
  derived and/or modified sequence
atggcctgcagacccagaagcccccccagacaccagagcagatgcgacggcgacgccagcccccccagccccgccagatggagcctgggcagaaagagaagagccgacggcagaagatggagacccgaggacgccgaggaggccgagcacagaggcgccgagagaagacccgagagcttcaccacccccgagggccccaagcccagaagcagatgcagcgactgggccagcgccgtggaggaggacgagatgagaaccagagtgaacaaggagatggccagatacaagagaaagctgctgatcaacgacttcggcagagagagaaagagcagcagcggcagcagcgacagcaaggagagcatgagcaccgtgcccgccgacttcgagaccgacgagagcgtgctgatgagaagacagaagcagatcaactacggcaagaacaccatcgcctacgacagatacatcaaggaggtgcccagacacctgagacagcccggcatccaccccaagacccccaacaagttcaagaagtacagcagaagaagctgggaccagcagatcaagctgtggaaggtggccctgcacttctgggacccccccgccgaggagggctgcgacctgcaggagatccaccccgtggacctggagagcgccgagagcagcagcgagccccagaccagcagccaggacgacttcgacgtgtacagcggcacccccaccaaggtgagacacatggacagccaggtggaggacgagttcgacctggaggcctgcctgaccgagcccctgagagacttcagcgccatgagctag

SEQ ID NO: 165949 - DNA, 813 bp, Artificial Sequence
  derived and/or modified sequence
atggcctgccggccccgttcaccaccccgccaccagtcccggtgcgatggcgatgcctctcccccatcacccgcacggtggagtctaggccgcaaacgcagagctgatggccggcggtggcgtccggaggatgcggaggaggcagagcatagaggggccgagcggaggccagagtcatttactactcccgagggccccaagcctcgttcacgttgctctgactgggctagcgccgtggaggaggacgaaatgcgtacccgcgtcaataaagaaatggccagatacaaacgcaagctgctcataaacgatttcggaagagaacggaaatctagttctgggagcagtgacagtaaggaaagtatgtcgaccgtgcctgcagatttcgaaactgacgaaagtgtcctgatgcgcaggcaaaagcagattaactatggaaagaacactatcgcctatgatagatacattaaggaggtcccacgccatctcaggcagcccggcatccatcccaagactcccaacaagttcaaaaagtacagccgtcggtcctgggatcagcagattaagctctggaaagttgccctccatttttgggaccccccagccgaggagggctgtgatctccaggaaatccaccccgtcgatttagagtccgccgagtcctcttcagaaccacagactagctcacaggatgacttcgatgtgtacagtgggaccccaaccaaggtgcggcatatggatagtcaggtagaggatgagtttgacctggaggcctgcttgactgagccacttcgagacttcagtgctatgtcctag

SEQ ID NO: 165950 - DNA, 813 bp, Artificial Sequence
  derived and/or modified sequence
atggcctgccggcccaggagcccccccaggcaccagagccgctgtgatggagatgccagcccccccagccctgcccgctggagcctgggcaggaagagaagagcagatggccgccgctggaggccagaagatgctgaggaggccgagcacagaggagctgagaggaggcctgagagcttcaccaccccagagggccccaagcccaggagccgctgcagcgactgggccagcgctgtggaggaggatgagatgaggaccagggtgaacaaggagatggcccgctacaagaggaagctgctgatcaatgactttggccgggagaggaagagcagcagcggcagcagtgacagcaaggagagcatgagcacagtgcctgctgactttgaaacagatgaatctgtgctgatgaggcggcagaagcagatcaactacggcaagaacaccatcgcctatgaccgctacatcaaggaggtgcccaggcacctgcggcagcccggcatccaccccaagacccccaacaagttcaagaagtacagccgccgctcctgggaccagcagatcaagctgtggaaggtggccctgcacttctgggaccccccagctgaggagggctgtgacctgcaggagatccaccctgtggacctggagagcgctgagagcagcagcgagccccagaccagcagccaggatgactttgatgtgtacagcggcacccccaccaaggtgcgccacatggacagccaggtggaggatgaatttgacctggaggcctgcctgacagagcccctgcgggacttcagcgccatgtcctag

SEQ ID NO: 165951 - DNA, 813 bp, Artificial Sequence
  derived and/or modified sequence
atggcctgccggccccggagccccccccggcaccagagccggtgcgacggcgatgcctcccctccgagccctgcacgctggtctttgggacgcaaacgtcgggcagatggcagacggtggcggccagaggatgccgaagaagctgagcacagaggcgccgagcgaagacccgagtcatttacaacccccgagggccccaagcctcgctctcgctgtagtgactgggcatctgccgttgaggaggatgaaatgcgcacccgggtgaataaggaaatggcacggtacaaaaggaagctactgatcaacgactttgggagagagcgcaaatcttcttcaggctcctcagatagtaaggaatccatgagcacagtgcccgccgacttcgagactgatgaatcagtactcatgagacggcagaaacagattaactacggtaagaatactatcgcgtatgatagatacattaaggaggtcccacgacatctccgccagcccggtatccaccctaaaacccctaacaaattcaaaaaatactctcggagatcctgggatcagcagattaagctttggaaagttgccctccacttctgggatcctccggccgaggagggctgtgacttgcaggagattcacccagtcgatctggaaagcgctgagtcctcctcagagccgcaaacctcttctcaagacgactttgacgtctatagcggtacacctacgaaagttcgacatatggacagtcaggttgaagacgaatttgacctcgaggcgtgcttgacagagcctctccgagacttttccgccatgagctag

SEQ ID NO: 165952 - DNA, 813 bp, Artificial Sequence
  derived and/or modified sequence
atggcgtgcagaccacgttccccccctcgacatcagtctcgctgtgacggagatgcttcacccccatcacccgctagatggtcgcttggccgtaaacgccgagcagacggcagacggtggcgtcccgaagatgccgaggaagcagagcataggggagctgagcggagacctgagagctttacaacacctgagggcccaaaacctagaagccgatgcagtgattgggcctccgcggtggaagaggacgagatgagaacacgggttaataaggaaatggccagatacaagaggaagctccttattaacgattttggtcgagaaagaaagagttcatctggcagctcagacagcaaggagtctatgagtacagtccctgctgattttgagacagacgaaagtgtgttgatgaggaggcagaagcagatcaattatgggaaaaacacaattgcttacgaccgttatatcaaagaagttccgcgacatttgcggcagcctggaattcaccccaagactcccaacaagttcaagaagtactctagacggagctgggatcaacagatcaaactctggaaggtcgcccttcatttctgggacccacccgctgaggaaggctgtgacctacaagagatccatcccgtggacctggagtccgctgagagctccagcgaacctcagactagctcacaggatgactttgatgtttactcggggacaccaactaaggtcaggcacatggattcccaggtggaagacgaattcgaccttgaagcttgtctgacagagcctttgcgagacttttctgcaatgtcctag

SEQ ID NO: 165953 - DNA, 1977 bp, Artificial Sequence
  derived and/or modified sequence
aggcctctcctcagcccacggcgtccatctggctcccgagccgagggccgggcagtcgggcttcgcggctgcccgcggtcccgaggcctcgccctagccccagtcggctcgcgaggcgcgcacagctgagtggacccctgcggcgtggcccgatggtctcgcccgacccggcgcgcgcgggaggccgaggggcggggcccggcgcccacataaaggcggttgggggcggggcgcgcagagctcgtgagcgccggcgcggggacgcgggtttctgcctcaggccctgccctgctctactctgcgctctctgcccgcgccgccgccgcctcagcctcggccctgcgctgcgcgcccggcccgtgctgccatggcctgccgcccgcgaagcccgccgaggcatcagagccgctgcgacggtgacgccagcccgccgtcccccgcgcgatggagcctgggacggaagcgcagagccgacggcaggcgctggaggcccgaagacgccgaggaggcagagcaccgcggcgccgagcgcagacccgagagctttaccactcctgaaggccctaaaccccgttccagatgctctgactgggcaagtgcagttgaagaagatgaaatgaggaccagagttaacaaagaaatggcaagatataaaaggaaactcctcatcaatgactttggaagagagagaaaatcatcatcaggaagttctgattcaaaggagtctatgtctactgtgccggctgactttgagacagatgaaagtgtcctaatgaggagacagaagcagatcaactatgggaagaacacaattgcctacgatcgttatattaaagaagtcccaagacaccttcgacaacctggcattcatcccaagacccctaataaatttaagaagtatagtcgacgttcatgggaccagcaaatcaaactctggaaggtggctctgcatttttgggatcctccagcggaagaaggatgtgatttgcaagaaatacaccctgtagaccttgaatctgcagaaagcagctccgagccccagaccagctctcaggatgactttgatgtgtactctggcacacccaccaaggtgagacacatggacagtcaagtggaggatgagtttgatttggaagcttgtttaactgaacccttgagagacttctcagccatgagctaactgccccctggcggccaggaagagaaacagctcctccccgactaggtggaaggctggccaggcaccaagcatgtgtgtgcacttgtacctggtggtttctctgttagcagtccattagctcatgctgaattatttttgccttactttcttaagaaacattaattttatgtatagtgagtatattttgcatgttttaaattgtaaatggagctaagtccaagaaagtacttgaagctctcttccagcgagcttaattgcgtaatccctgttgtcctccagggtaagctgacacgtctacataactggttttccacaggcatcttcagttattgcttgtcaggtggactgttttggatttaaccatgtaatccatgggaccaattgagagtcagctacttttataggcatcaaagtattctcagacacctttaatatctttatggaaacttaatttttggccttttatcaatatgtcataacagcattctgaagtcagacattgttaaattgagctattaaactaatgagttttatgtaagttatatggtcttaatttggtacttgtaaatagcactagttagactctttagaatactccaagagttagggcagcagagtggagcgatttagaaagaacattttaaaacaatcagttaatttaccatgtaaaattgctgtaaatgataatgtgtacagattttctgttcaaatattcaattgtaaacttcttgttaagactgttacgtttctattgcttttgtatgggatattgcaaaaataaaaaggaaagaaccctc

SEQ ID NO: 165954 - protein, 235 aa, Artificial Sequence
  derived and/or modified sequence
MDPARPLGLSILLLFLTEAALGDAAQEPTGNNAEICLLPLDYGPCRALLLRYYYDRYTQSCRQFLYGGCEGNANNFYTWEACDDACWRIEKVPKVCRLQVSVDDQCEGSTEKYFFNLSSMTCEKFFSGGCHRNRIENRFPDEATCMGFCAPKKIPSFCYSPKDEGLCSANVTRYYFNPRYRTCDAFTYTGCGGNDNNFVSREDCKRACAKALKKKKKMPKLRFASRIRKIRKKQF

SEQ ID NO: 165955 - DNA, 708 bp, Artificial Sequence
  derived and/or modified sequence
atggaccccgccagacccctgggcctgagcatcctgctgctgttcctgaccgaggccgccctgggcgacgccgcccaggagcccaccggcaacaacgccgagatctgcctgctgcccctggactacggcccctgcagagccctgctgctgagatactactacgacagatacacccagagctgcagacagttcctgtacggcggctgcgagggcaacgccaacaacttctacacctgggaggcctgcgacgacgcctgctggagaatcgagaaggtgcccaaggtgtgcagactgcaggtgagcgtggacgaccagtgcgagggcagcaccgagaagtacttcttcaacctgagcagcatgacctgcgagaagttcttcagcggcggctgccacagaaacagaatcgagaacagattccccgacgaggccacctgcatgggcttctgcgcccccaagaagatccccagcttctgctacagccccaaggacgagggcctgtgcagcgccaacgtgaccagatactacttcaaccccagatacagaacctgcgacgccttcacctacaccggctgcggcggcaacgacaacaacttcgtgagcagagaggactgcaagagagcctgcgccaaggccctgaagaagaagaagaagatgcccaagctgagattcgccagcagaatcagaaagatcagaaagaagcagttctag

SEQ ID NO: 165956 - DNA, 708 bp, Artificial Sequence
  derived and/or modified sequence
atggatcccgcacgtcctcttggtctctccatattattgttgtttctgacggaggccgccctaggcgacgccgcccaagagcctaccggcaacaacgcagaaatatgcctgctccccctggactacggaccatgtcgtgctttgctgttacgatactactatgatcggtacacccagagctgtcggcaattcctgtatgggggatgcgaggggaatgctaataatttctacacttgggaagcttgtgatgacgcatgctggcgaatagagaaggtgcccaaagtgtgtaggctgcaagttagcgtcgacgaccagtgcgaaggatcgaccgagaagtattttttcaacctgagttcaatgacatgcgagaaattcttctcaggagggtgccaccgaaaccgaattgagaaccgatttcctgatgaagcaacctgcatgggcttctgtgcccctaaaaagataccctcattttgctattctcctaaggatgaaggcctttgctccgcaaacgttacccggtactactttaaccctcgatacaggacatgtgatgctttcacatacaccgggtgcgggggcaatgacaacaactttgtgtctagagaggattgcaagagggcttgcgctaaggctctgaagaaaaaaaaaaaaatgcctaaactgcggttcgcatcccggatccgaaaaatcagaaagaagcagttttag

SEQ ID NO: 165957 - DNA, 708 bp, Artificial Sequence
  derived and/or modified sequence
atggaccctgcccggcccctgggcctgagcatcctgctgctcttcctgacagaagctgccctgggagatgctgcccaggagcccactggaaataatgctgagatctgcctgctgcccctggactatggcccctgccgggccctgctgctgcgctactactatgaccgctacacccagagctgccggcagttcctgtatggaggctgtgagggcaatgccaacaacttctacacctgggaggcctgtgatgatgcctgctggagaattgagaaggtgcccaaggtgtgccgcctgcaggtgtctgtggatgaccagtgtgagggcagcacagagaagtacttcttcaacctgagctccatgacctgtgagaagttcttcagcggcggctgccacaggaacagaattgagaaccgcttcccagatgaggccacctgcatgggcttctgtgcccccaagaagatccccagcttctgctacagccccaaggatgagggcctgtgcagcgccaacgtgacccgctactacttcaacccccgctaccgcacctgtgatgccttcacctacacaggctgcggcggcaatgacaacaactttgtgtcccgggaggactgcaagagggcctgtgccaaggccctgaagaagaagaagaagatgcccaagctgcgctttgccagccgcatcaggaagatcaggaagaagcagttctag

SEQ ID NO: 165958 - DNA, 708 bp, Artificial Sequence
  derived and/or modified sequence
atggaccccgcccggcccctgggcctgagcatcctgctgctgttcctgacagaggctgcacttggcgatgctgcccaggagccgaccggcaacaatgccgaaatttgcctcctcccactggactatggcccctgcagggcactcctactgcgatactactacgaccgatacacacagagctgccggcagtttctgtacggaggctgtgaaggtaatgcaaataacttttacacctgggaggcatgcgacgacgcctgttggcgcatcgaaaaagtgcccaaagtctgtcgactccaggtcagtgtggatgaccagtgcgaagggtctacagaaaaatacttttttaatctgtcttcaatgacttgcgagaagtttttctctggaggatgtcaccgcaacaggatcgaaaatcggttccctgacgaagccacatgtatgggattctgtgcgcccaagaagatccccagtttttgttactctcctaaagacgagggcctctgctctgcgaatgtgacacgatattacttcaaccctagatacaggacctgtgacgctttcacatatactgggtgtggcggcaatgataacaacttcgtaagccgggaagattgcaagcgtgcctgcgctaaggccctcaagaagaagaagaaaatgcctaagctgcgcttcgccagccgcatccgaaagatcaggaaaaagcagttctag

SEQ ID NO: 165959 - DNA, 708 bp, Artificial Sequence
  derived and/or modified sequence
atggacccagcccgaccacttggcctgtccatcctgctgctgtttttaaccgaggccgcactgggggacgccgctcaggaacctaccggaaacaatgcggaaatctgcctgttgcccctcgactacgggccatgtcgcgcactactgttgcgatattattatgatcggtacacccagtcatgtcgccagtttctgtacggagggtgcgaggggaatgctaacaacttttacacctgggaggcttgtgacgacgcatgctggaggatagagaaagtccctaaagtgtgtcgactacaggtgagcgtggatgaccagtgtgaagggagcacggagaagtacttcttcaacctctcttccatgacttgtgagaagtttttcagcggtgggtgtcatcgaaatcgtatagaaaacagatttccagatgaggctacgtgcatgggattctgcgctccgaagaaaatcccttccttttgctactcccccaaggacgagggcttgtgctcggcaaacgtgacccggtattacttcaacccccgatatagaacatgtgacgcctttacctataccgggtgcggtggcaacgataacaactttgtgagccgggaggactgtaagagggcctgtgctaaggccctcaagaaaaagaaaaaaatgcctaaactgcgtttcgcgagcaggatcaggaagattagaaaaaaacagttctag

SEQ ID NO: 165960 - DNA, 2444 bp, Artificial Sequence
  derived and/or modified sequence
attactgacacaaacgctccctcagggcgtccccgtctggactacaggagaaagtttgggaggcaggttcaacttttcaacttggcggggaattcctctccctcttacacagtttgcagcgcgggggcggcggggtgacagtccccgtgcatgaatcagccacccctcaggctccgccccggcgggggtcggccggacgctcgccccgcataaagcgggcacccgggccgcctggagcagaaagccgcgcacctcctcccgccaggcgctttctcggacgccttgcccagcgggccgcccgaccccctgcaccatggaccccgctcgccccctggggctgtcgattctgctgcttttcctgacggaggctgcactgggcgatgctgctcaggagccaacaggaaataacgcggagatctgtctcctgcccctagactacggaccctgccgggccctacttctccgttactactacgacaggtacacgcagagctgccgccagttcctgtacgggggctgcgagggcaacgccaacaatttctacacctgggaggcttgcgacgatgcttgctggaggatagaaaaagttcccaaagtttgccggctgcaagtgagtgtggacgaccagtgtgaggggtccacagaaaagtatttctttaatctaagttccatgacatgtgaaaaattcttttccggtgggtgtcaccggaaccggattgagaacaggtttccagatgaagctacttgtatgggcttctgcgcaccaaagaaaattccatcattttgctacagtccaaaagatgagggactgtgctctgccaatgtgactcgctattattttaatccaagatacagaacctgtgatgctttcacctatactggctgtggagggaatgacaataactttgttagcagggaggattgcaaacgtgcatgtgcaaaagctttgaaaaagaaaaagaagatgccaaagcttcgctttgccagtagaatccggaaaattcggaagaagcaattttaaacattcttaatatgtcatcttgtttgtctttatggcttatttgcctttatggttgtatctgaagaataatatgacagcatgaggaaacaaatcattggtgatttattcaccagtttttattaatacaagtcactttttaaaaaatttggatttttttatatataactagctgctattcaaatgtgagtctaccatttttaatttatggttcaactgtttgtgagactgaattcttgcaatgcataagatataaaagcaaatatgactcactcatttcttggggtcgtattcctgatttcagaagaggatcataactgaaacaacataagacaatataatcatgtgcttttaacatatttgagaataaaaaggactagcaaataaaactcattttgcatttaaaagttggattatattttagtcccaagaagacaaagtcgcagattaacaacactttaaaaatattactcccattttattgtgttagattgcagtacaatgaatgaataaggggatttatttaaaagatcttaactttcttgactgatttaaaaagctaatcaatttattaaagccagaaatgttctcctctgggaaagcaatttctatctatttatctaccaatccccactcacatgtatatgtttgtgtttacatagagatagatggttttaagggttttcctattgttaaattatttcctaagacattgtgggttggagaccactaaacttataaaaaaccaaggaaagtaaagtttttcaaatgtttatactgtttaaggtgtttatttatataaaccatgcatgagaaaccatgcataaatttaataatttaaatttcaccagtaaattatcattgattaaatatggtcataccaatgaaataggttttttctttctctgtaataaaacaatttttctaaattcttatgttttcatagcaagattaacatatttaattacaaattaaatatgcaaaatgacaaatgcgtttaccttttgcttgaacaatctttcatttaaaaatttatcccagttattttgacaaataggtatatgcctgagaactttgaatgatgctgaaagctagaagcaaaccaggtactcttcagtcagggactggttgaagattttatggatgaggagttagcaaaatatctatatatgcatatcttctgactcccaggatacataagaaacacagggcctagaacagtatgaataaacacacatatacacaaacatcacagaagatactaaagatattaaaaatgtttacctatagaggtttggagagaacagaggggtggacagttgtggagataatatttgtgtaaatataactgtgatatagtttttatcttggaccatgtaaatatttgacataattaataatcaaaattaaataaaaaagaaaaagc

SEQ ID NO: 165961 - protein, 464 aa, Artificial Sequence
  derived and/or modified sequence
MAHVRHFRTLVSGFYFWEAALLLSLVATKETDSARSRSAPMSPSDFLDKLMGRTSGYDARIRPNFKGPPVNVTCNIFINSFGSIAETTMDYRVNIFLRQKWNDPRLAYSEYPDDSLDLDPSMLDSIWKPDLFFANEKGANFHEVTTDNKLLRIFKNGNVLYSIRLTLTLSCPMDLKNFPMDVQTCIMQLESFGYTMNDLIFEWQDEAPVQVAEGLTLPQFLLKEEKDLRYCTKHYNTGKFTCIEVRFHLERQMGYYLIQMYIPSLLIVILSWVSFWINMDAAPARVALGITTVLTMTTQSSGSRASLPKVSYVKAIDIWMAVCLLFVFSALLEYAAVNFVSRQHKELLRFRRKRKNKTEAFALEKFYRFSDMDDEVRESRFSFTAYGMGPCLQAKDGMTPKGPNHPVQVMPKSPDEMRKVFIDRAKKIDTISRACFPLAFLIFNIFYWVIYKILRHEDIHQQQD

SEQ ID NO: 165962 - DNA, 107 bp, Artificial Sequence
  derived and/or modified sequence
taagccgataagcaacttcagcaaagtctcaggagacaaaatcaatgtgcaaaaaatcacaagcattcttatacactaataacagacaaacagagagccaaatcatg

SEQ ID NO: 165963 - DNA, 80 bp, Artificial Sequence
  derived and/or modified sequence
aggatacaaaatcaatgtacaaaaatcacaaacattcttatacaccaacaacagacaaacagagagccaaatcatgggtg

SEQ ID NO: 165964 - DNA, 1395 bp, Artificial Sequence
  derived and/or modified sequence
atggcccatgtgcggcattttcggaccttggtgagtggcttctacttctgggaggctgccctgctgctcagcctggtggctacaaaagaaaccgacagcgcccggtcccgctccgcaccaatgtccccctctgatttcctcgataaactcatgggacggacctccggttacgacgcgcgtattcgccccaattttaagggccccccggtgaacgtcacttgcaatatcttcatcaattcctttggtagcatcgccgaaactactatggattatcgggtgaatatcttccttcgacagaaatggaatgaccccagacttgcatactccgagtatcctgacgattccctggacctcgatcccagtatgctggacagcatttggaagccagatctgttcttcgccaatgagaaaggcgccaactttcacgaagttacgactgataataaactgctccgaatattcaagaacggtaacgtactctattctatccggctcacactcactttgtcctgccctatggacctgaaaaattttcccatggacgttcaaacatgcatcatgcagctggaaagcttcggatacaccatgaacgacctgattttcgagtggcaagatgaagctcccgttcaggtggcggaagggctgaccctgccccagttcctgcttaaggaagagaaagaccttaggtactgtaccaaacactacaatacaggaaaattcacatgcatcgaggtccggtttcatctcgagagacagatggggtactaccttatccagatgtacatcccgtctctcctaatcgtgattctgagctgggtgtcattctggatcaacatggatgccgcccccgcaagagtggcgctgggcattactaccgtgctcactatgacaacccagtcatctgggagcagagcaagtttgcccaaggtcagctatgtgaaggccattgatatttggatggctgtgtgcctcctgttcgtgtttagtgctttgctcgaatatgccgcagtgaactttgtgagcagacaacataaggaattacttcgatttcggagaaagcggaaaaacaaaacagaggccttcgcactcgagaaattttacagatttagcgacatggatgatgaggtacgggagagccgcttctccttcaccgcctacggcatgggtccctgcttacaggctaaggatgggatgacccctaagggtccgaatcacccggtgcaggtgatgcccaagtcaccagacgagatgagaaaggtgtttatcgatagagccaagaagatcgacacaattagcagggcttgttttccactggcatttttgatcttcaatatcttttactgggttatctacaaaattctcaggcatgaggacatacatcagcaacaggattag

SEQ ID NO: 165965 - DNA, 8770 bp, Artificial Sequence
  derived and/or modified sequence
gtcgacaggaccgggttgtccggccccacccccgcttccctttgccgcgctccgggtctcgggttttaacccaaggtggagagctggattccggcgggcggcgcttggagcaggtggagaggcgtcctctttccggctgttgctgctcttcttcctccaatcctgggtctcagtcagggaagaacgaacattcttcctttgctgctggagctttagagaactgttgcccagcacctaggcacttcagacatttcatctcactcatttttgtaatttcactgtaaaaatcacctgcacatttataacactgtgactctccacttctgctcaatgctgagaaggggtccgcatactgcggggagctgtctaaggtgctgaagcttcccaagcatcagtctacaccaacaccatgcggggttagattgtacattttcattctgtctttctggttccccatgccttggataagactattttcaggatcgtgaatatctctccgtatcatggcccacgtgagacactttcggacattagtttcgggattttacttctgggaagcagcactgttactcagtttggttgccacaaaggaaacagacagtgcaagatctcgaagtgctccaatgtcaccttctgattttctggataaattaatgggcaggacatcaggatatgatgcaagaatcagacccaattttaaaggccctccagttaatgtcacatgcaacatattcatcaacagctttggctctatcgcagagacgaccatggattacagagtgaatatctttcttcgtcagaaatggaatgatccccgcctcgcgtacagtgaatatcctgacgactctttagacctcgacccctccatgttggactccatttggaaacctgatttgttctttgccaatgaaaagggtgccaactttcatgaagtcactacagacaacaaattgctaagaattttcaaaaatggaaatgttctttattcaataagattaacattaacactttcctgtccaatggatctcaagaattttcccatggatgtacaaacatgtataatgcaactggaaagctttgggtacacaatgaatgatctcatttttgaatggcaagatgaggcacccgtacaagtggcagaaggactcactttgccccagtttctgttgaaagaagaaaaagatttacgatactgcactaaacattacaatacaggaaagtttacgtgtatagaagtgcgattccatctggagcgacaaatgggatactatctgatccagatgtacattcccagtctcctgattgttattctatcctgggtttcattctggatcaacatggatgcagcaccggccagggtagctctggggataaccactgtgctaacgatgactacacagagttcaggatcacgagcttccttgccaaaagtttcatatgtcaaagctattgatatttggatggcagtatgcctcctttttgtgttttcagcacttctggagtatgcagctgtaaattttgtatcaagacaacacaaagaacttctgagatttcgacgaaagagaaagaataagacagaagcttttgcactggagaagttttaccgtttctcagatatggatgatgaggtaagggaaagccgattcagcttcacagcctatggaatgggaccatgtctacaagcaaaggatggcatgactccaaagggccccaaccaccctgtccaggtaatgccaaaaagtcctgatgaaatgaggaaggtctttatcgaccgggccaagaagattgataccatctcccgagcctgcttcccattagcttttttgatttttaatattttctactgggttatctataaaattcttaggcatgaggatattcatcagcagcaagattaagtctctgggggcatgcaaatgcaaatggtcaattcagaagaaagtgtctctgccataggtgtgtatgtgtatatgtgtgcgtgtggtatacaaatgatgaccattgtattaaaatggcatatggaaaagctttgtattttggttagctatgcaaagtcatgagaaagatgagattcttttaatgaatataaaatatttattaggggattctatttcatattaattccaggtgatttgttttttcacagtaaaccatgtaagtggaagctttactgccaatgtgtttatatgttatataatatctcataatagtagacatgaaaactactttgaaattccttgatttgtaattcaatgctattaaatcatacaaaagcaaattttgcacagtaaaccaatagtttgagatttaaaactattttcttatagtatagttacaaaatgggaaaataattagttacagtgggaaattcactcatattaatggaggattgtacatataaatactatttaaacaacatatgtaattttgaaaatttttaaataagagcattaaaagactttaatgatttggaatactaaatttaattgtttagaatattaagttttcctctgtgcaaatttaaaacaaataacaagagatcgtgttacagtcacaatctacttttcttaaactttgtatctctaggaacgaaggtggaaatacgggaaacaactttgtttttaaataagtattatagctatgtatttttagttattgccaaacattgaacaattcaagccagcacccttgtttttgttagacttttaatagctacttaactgtatgtgattgtgtttaataatttgatataacaggacaaaattcagtaagacttttatattttagtttagaatgtgactttaaaattcaatgggattaaagtatttacattttgataaaaatgaatacaatgaaaacaaaatggattcatggaagattttttaataaaaaccattttcccatcaatgttttatgggtctcaactcctatctccaaatataagtagggaaagttttaattttaaatgatataagtaagtcatttctataaagtgaggactctttttctatttctgaattaatgatttcaaaatctaagccattcgcaagatgtgaataattttaaatgaaatttttacataaaatttttcaatgaccccatgggattacttcaacaaaaacagagcattagtaacttgttttttgcagtgtaattgggtgcaaatgtatgatagagttcttggtaaacagaaccagactctgactctttttcagttttgctatttttttaactatttttaccataaatttatttggaaaagctttggaatgctttttaggtattttaattattggtcagatgcacaaactcagtccaccaaattattcacagagaaaactttaaagattaagaaaacaatgaactcagatgtacaatagaaaagccagttctttaacaagatgctattttctacccttcaaccactttcaaattaaaagcaaaaactaccatttaaaactaaaacctttacaatgttattgtacatcagcttatacaattgtaattttttaaaataacattttaaaaaatagtaaatgttaagcagtttttgctagtaaaagaccaagttcccctcctttataagtaacttaaaacaacactataaggaaataatatcatgtttggcattatgtgcaaatgacacaaccaaaagaatttgttactctgtaagtacccacgttgaggactgtgcacctgaaaattaaacatatgcttcttcatttggtgtgtatttaacaaaaccatggaaacatattcttgttctaaagattagagcaagatatgtcatttgtattccttgagaattagcaggagagtttgaggtaattataaactacatcatctcgatgtgtctctgaaatacctgaatacgtttttctatactttccacatcttatttcaaaagtttcccaacattgcttaagtgaattctgccaggagcaaacagaaatataatgaatgcaaacatgcttacttccaaaagaaattcacagacatcacttctttccatatttgagaatattataaatgtgtctttgttaaatcagaaacttagaaagtgaaaataccaaacatgagacaatattgtcaacaaggacgttggtacattagaaatctatctcaaaagtattacactttccttaggcatagttttcctttcctattatatttgtcactgtcttactgcactaagaaaatactttaacagctttcactcacaaggcaacagtgacaaggtgcatgtggctgaatccaatatgtttaaaggaatgtgtctcctccttcgaactcttatagaccttttaaaactgaaaaattacattgcagttagcatcctgagataatatttgcctcaataagccctgtgtccaaccagaatattttaaattaaaccaaccacaaaattattaatggcaagaaattaaaaatgtgtgcatatacattaactactaaacacacaaattggaattccaatgtgcatattctgaagtattttaaaatagccacattagaaaatatgggattttcatgtatgcagtttatatcattttcttaaaaagaattatttgtatgtcaatcattgaaatatttgattccatagcatatgaatttataggctatcttatacattagcatatatgtgcccaaccttttctttctttcccaaccattagaattgaacttaaaccataatgaggctctagaacttactttacaactttaaatagattcaagagtcactgtattttcaagaaagctgagggtgtttaaaacttctccaacccttccaaaagtttctccatggcgctggagaccccatccaactctcagtggctatattagggaatcatccggactgctcatcttattctaaaattaattcttattctgttgatatattctaataacttttatcttaatttggaatttaattgcttgtatatttatatatccctaagacatgaattcatgtattagtttatgaatacccaggatctcatggaaggtaagggaaattttagaaaaaaaaatgaataatctaaatgtttaactaacagaagagagcaagctgttcactactttagtactcagtgcaacttaagtagttataatatttgaaaaaagatttagatgtatcttccatactatacatccctttttctgaacattttttattccactttttaaaatatgcttttctatttttctcaacacaacatacttcaacctgctggttacttgggaggactgaatattatactggcagctaaatttttatttcatctataaagtacacattccaggaaatggacatgagagaatacaagagacttgccaaaattgaaatggaaaatacttgcagtattttgtaaatggaaaagaaggaaactgacagcattgtttttcacaggtgtcccctaaaaatttagaacactctaagaacaaaactctgagaacaaaaatgtatctaatgatccttagacagatatcattaacaatccttgaggtcatgatatcttctactccaaaagtgattccacactctttgcaacatagataatagcataaactcccaaaatttatcagcatatacgacctatatttttcatctagttaatattgaactagcaaagaaaagcaagccattccaaatataagacaatctggtgttaatacaatatattagaagaaatagtgtaaatgttcacacagattccctcttgcaaataaagtacccataatacccattgcatcttgtacctgtataagagacatcttcctcagcagatgcattggtttttatttccttatttgtgtgctacagtggtaaatatagcctcactgcattttttttattgttatataaacctttcatggataaataagcagtgtacactgtaaattgcattaatttaattaactttaaaattaaacttttatctcagcccccattcctctttacaaacatagtgatattaaaaagtgaacttccatagggagacacctggtactccaattacttcaaaagtaaagtgatgcatattcttccataacaaagatacttataggccatgtgtaaaatataactctctacaatttaaacggaactagggcagggaaaaatatcctggggaagcttcttccagatatgaggacaagagatataatcccaagttagtagctaggacccacttacctgtttttttggtctacattttacatcttaataatgccttcatctcttccctttccctctctctctctctctttcacacacacacacacacacacacacacacacacacacatacacatattggtaatgagatgaattcctttagattaaaaatacaaagacagtcaatttttctagacaaaggttcataatcctgtgatatgttttgcaatattaagtgattcctggtggaaaatatgaaccatgcagtcattcgatttggccagctcttaatcatgcaacaatcttttgcctcaaaaacacataaacaaagctaactggatcaagtctttaacccttaacaatcgaattctaaaacactatttgaaccgtttttgaagaacagctaaataactgtcaaaaacctttttcaaaagacagctagtaatattggatgactttgtagtgtctgaacaggtggttttctcagtagtttttgtggttaacacataaacaaagaggagacatttaaggtgatggagtattatttttaaaaagtgattttgaaccctggctatgtgttggaattccttacacattttaaaaatacatacatatgcttggtgtccaacatagaagattatgatttaatcattgattaaacaaatattcattgagtaccttatgtgtgcctggcactgtcccaagtgctaaatttagtatttttggaataagatctgaaattctggatgattgaaaaaattccagaagtgagagaattcgtgtgaacttacacaagcttattctcttaataaggatcaatttaacactttttaagttttatcattttttctttcttcaagcaactaattttagttgtctctcatttatattcttagaattaaaaataggcccggccaggtggctcacgcctgtaatcccagcactttgggaggccgaggcagtcaaatcacttgaggtcaggagttaagacaccagcctggccaatatgataaaaccctgtctctactaaaaatacaaaaattagccaggcatgatggcaggtgcctgtaatcccagttactcaagggaggctgaggtggaagaatggcttgagcccaggagatggaggttgcagtgagccaagatcgcaccactgcactccaaactgggtgacagagtgagactctgtctcacaaacaaacagacagacaaaaaaagaatttaaaataaatctttgatgcgtttcaattcagctttcctcccaatgtcagaatcttcaccattacattatccacattcttcgagcacccagatagcaacaggtagctcattactctgagggcagtcttctgttccattgtgacataactctagatgataaaaatgttaatcttcatcaagaaatgacttttacttcctaaaataccaagtaagtttattcccctcctataagacaactagcatatattttcacatttctgctgtctgtgtttaagttcaatcaaccccttatcactagctttattcttatttaaaccattcatgagagcattgtaagtgttaaacaatgatgagatattttcaggcttataaaataatgaaatataaaattaattatctacatagataaatagaaattgatgaaaatttctatgtatattattttcagtaactgttaatgtcttcctataacagcaataaatttaaattaaatatttttaaatttatttcagatatgaagatattatataaaactctacaaagtaatatgaatttaaaaaaactagcagcaaaccatattaaccatattgtgtgtttttagagtaaagctataacaaaagtacaggggattaagttgttttattttaatagctgcttttactctggggtggttttagcaatggcgcctttgggcaaccccgctcacatacacagtatccagcctgggtggttaatactagggagctgtgacttaaatggcaggaaaggattcagatgtaaaattgtacttgaatatgcttgaataattttgcacttcttcacttttttctctatgaattattcaatggtcattacttaaatttgtattttaatgtatgataaatgataatatggggggggaaatagagtgaagtaccctgacattctacagatataatatgatatgctatgaaaaacaaaacaaaaagaaaatgtgccatatattttccatgtaccatctttatatgatatacagtgacttcattattagtgagtcaagttgtttaaaggactaccaaaagaagtattgctattttatggtttttatggtgtaaattatttttctgtcttcttgagtcttatgtctaagtctgtcttccttgtccagatgctgtcatatttttccaggaaattatactgaaaacatatttaaaaatttatgcacgatttcatcaacttgtttttcattatattatatttagttcaattttgcaactaacagactctctatcagagtcattaacctgtgaacagtataaagtatttaacatgtaactatagataatttgatccgaaacaataaaaatgaacacttttcaagaatatgga

SEQ ID NO: 165966 - DNA, 1395 bp, Artificial Sequence
  derived and/or modified sequence
atggcccacgtgcgccacttccgcaccctggtgtctggcttctacttctgggaggccgccctgctgctgagcctggtggccaccaaggagacagattctgcccggagccgcagcgcccccatgagccccagcgacttcctggacaagctgatgggccgcaccagcggctatgatgcccgcatccggcccaacttcaagggcccccctgtgaatgtgacctgcaacatcttcatcaacagctttggcagcattgctgagaccaccatggactacagagtgaacatcttcctgcggcagaagtggaatgacccccggctggcctacagcgagtacccagatgacagcctggacctggaccccagcatgctggacagcatctggaagccagacctcttctttgccaatgaaaaaggagccaacttccacgaggtgaccacagacaacaagctgctgcgcatcttcaagaatggaaatgtgctgtacagcatccggctgaccctgaccctgagctgccccatggacctgaagaacttccccatggatgtgcagacctgcatcatgcagctggagagctttggctacaccatgaatgacctgatctttgagtggcaggatgaggcccctgtgcaggtggccgagggcctgaccctgccccagttcctgctgaaggaggagaaggacctgcgctactgcaccaagcactacaacacaggcaagttcacctgcatcgaggtgcgcttccacctggagcggcagatgggctactacctgatccagatgtacatccccagcctgctgattgtcatcctgtcctgggtgtccttctggatcaacatggatgctgccccagcccgggtggccctgggcatcaccaccgtgctgaccatgaccacccagagcagcggcagccgggccagcctgcccaaggtgtcctatgtgaaggccatcgacatctggatggctgtgtgcctgctgtttgtgttttctgccctgctggagtatgctgctgtgaactttgtgtcccggcagcacaaggagctgctgcgcttccggaggaagaggaagaacaagacagaggcctttgccctggagaagttctaccgcttcagtgacatggatgatgaggtgcgggagagccgcttctccttcaccgcctacggcatgggcccctgcctgcaggccaaggatggcatgacccccaagggccccaaccaccctgtgcaggtgatgcccaagagcccagatgagatgaggaaggtgttcatcgaccgggccaagaagattgacaccatcagccgggcctgcttccccctggccttcctgatcttcaacatcttctactgggtgatctacaagatcctgcggcatgaggacatccaccagcagcaggactag

SEQ ID NO: 165967 - DNA, 1395 bp, Artificial Sequence
  derived and/or modified sequence
atggcccacgtgcggcacttccggaccctggtgagcggcttctacttttgggaagccgccctcctgctctctctggtggcaaccaaagaaaccgactctgcaagaagccgatcagcccctatgtcacctagcgactttctggacaagctaatgggccgcaccagcgggtatgacgctaggatcaggccaaactttaaggggcctcctgtcaacgtgacttgcaacatcttcatcaactcttttggctccatcgctgagactactatggactatcgggtgaatatttttctccggcaaaaatggaacgatcccaggctggcatatagcgagtatcctgacgacagtctggacttggatccatctatgctggattccatctggaaacccgatctgttttttgctaatgaaaaaggggccaacttccacgaggtgactacggacaataaattgctacgaatttttaaaaatggcaacgtgctctatagtatccgcctgaccctgaccctgtcctgccccatggatctgaagaactttccaatggatgtccagacgtgcattatgcagttagaaagcttcgggtatacaatgaacgatttgatcttcgaatggcaagatgaagctccggtgcaagtggctgagggacttacactgccacaatttctgctgaaggaggagaaggatctgaggtactgtactaagcattataatacagggaaatttacctgcatcgaggttcggttccacctggagaggcagatggggtactacctgatccagatgtacatcccaagtctgttgattgttattctttcttgggtctccttctggataaacatggacgccgcccctgcccgagtggctcttggcattaccaccgtgctgacaatgaccacgcagtccagcgggtctagggcaagtctccccaaggtgagctacgtcaaggctatagatatttggatggctgtctgtttactctttgtcttctcagcactgctggagtacgcagccgtaaatttcgtctcgagacagcataaagaacttctgcgattccgccgtaagcgcaaaaacaaaactgaagcttttgcgctggagaaattctatagatttagtgacatggatgatgaggtcagagagagccgattcagttttactgcttacgggatgggcccatgcctccaggctaaggatggcatgaccccgaaaggccctaaccaccccgtgcaggtaatgccaaaatccccagatgagatgagaaaggtgtttattgatagggcaaagaagatagacactatctccagagcctgttttccactggccttcctgatatttaacatattctattgggtgatctacaagatcctgagacacgaagatatacaccagcaacaggactag

SEQ ID NO: 165968 - DNA, 1395 bp, Artificial Sequence
  derived and/or modified sequence
atggcacacgtccgtcactttcggacactggtatccggcttctatttttgggaagctgccctgctgttgagcttggtcgcaacaaaggagaccgatagcgcacgcagccgtagtgcgcctatgagccccagcgactttctagacaaactgatgggtagaacatccggctatgacgcaaggataagacccaatttcaaaggcccacctgtaaatgtgacctgcaatatcttcattaactccttcggaagcatcgcagaaacgaccatggactatagggtgaatattttcctgaggcagaagtggaatgatcccaggctggcctacagcgaataccccgatgattctctggacctggacccgagcatgctggattctatttggaaacctgatctgttctttgctaacgaaaagggtgctaattttcacgaagtgactacagataataagctgctacgtattttcaaaaatggaaatgtcctttatagcatcaggttgacgctgaccctgtcatgtccaatggacttgaagaacttccccatggatgtgcagacatgtattatgcagctcgagtcctttggttataccatgaatgatctgatctttgaatggcaggacgaagcgccagtccaagttgctgagggcctgactttgccgcagtttttattgaaggaggaaaaggatctgagatattgtactaagcactacaacaccggaaagttcacctgcatcgaggtgcggtttcatctggagaggcaaatgggttattatttaatccagatgtatatccccagcctgctcattgtgattttatcctgggtgagcttctggatcaatatggatgcggctcccgctagagtggcccttggcatcaccacggtgctgaccatgacgacacaatcaagcgggagtagagccagtctgcctaaggtgtcctatgtcaaagcaatcgacatatggatggcggtgtgcctcttgttcgtgttctcggctctactggaatacgcggcagtcaactttgtaagcaggcagcataaggaactgcttagattccgacggaaaagaaaaaacaaaacagaggcctttgccctggagaaattttaccgattttctgacatggacgacgaggtgagggagagccgtttttcctttacggcctacgggatgggaccatgcctacaagctaaggacggcatgacaccaaaggggcctaatcatcctgtgcaggtaatgcctaaatccccagatgaaatgcgcaaagtgttcatcgatcgtgctaagaagatcgataccattagtagagcttgtttccctctggccttcctgatctttaatatcttctactgggtgatctataagattcttagacatgaagatatccatcaacagcaggattag

SEQ ID NO: 165969 - DNA, 1395 bp, Artificial Sequence
  derived and/or modified sequence
atggcccacgtgagacacttcagaaccctggtgagcggcttctacttctgggaggccgccctgctgctgagcctggtggccaccaaggagaccgacagcgccagaagcagaagcgcccccatgagccccagcgacttcctggacaagctgatgggcagaaccagcggctacgacgccagaatcagacccaacttcaagggcccccccgtgaacgtgacctgcaacatcttcatcaacagcttcggcagcatcgccgagaccaccatggactacagagtgaacatcttcctgagacagaagtggaacgaccccagactggcctacagcgagtaccccgacgacagcctggacctggaccccagcatgctggacagcatctggaagcccgacctgttcttcgccaacgagaagggcgccaacttccacgaggtgaccaccgacaacaagctgctgagaatcttcaagaacggcaacgtgctgtacagcatcagactgaccctgaccctgagctgccccatggacctgaagaacttccccatggacgtgcagacctgcatcatgcagctggagagcttcggctacaccatgaacgacctgatcttcgagtggcaggacgaggcccccgtgcaggtggccgagggcctgaccctgccccagttcctgctgaaggaggagaaggacctgagatactgcaccaagcactacaacaccggcaagttcacctgcatcgaggtgagattccacctggagagacagatgggctactacctgatccagatgtacatccccagcctgctgatcgtgatcctgagctgggtgagcttctggatcaacatggacgccgcccccgccagagtggccctgggcatcaccaccgtgctgaccatgaccacccagagcagcggcagcagagccagcctgcccaaggtgagctacgtgaaggccatcgacatctggatggccgtgtgcctgctgttcgtgttcagcgccctgctggagtacgccgccgtgaacttcgtgagcagacagcacaaggagctgctgagattcagaagaaagagaaagaacaagaccgaggccttcgccctggagaagttctacagattcagcgacatggacgacgaggtgagagagagcagattcagcttcaccgcctacggcatgggcccctgcctgcaggccaaggacggcatgacccccaagggccccaaccaccccgtgcaggtgatgcccaagagccccgacgagatgagaaaggtgttcatcgacagagccaagaagatcgacaccatcagcagagcctgcttccccctggccttcctgatcttcaacatcttctactgggtgatctacaagatcctgagacacgaggacatccaccagcagcaggactag

SEQ ID NO: 165970 - protein, 227 aa, Artificial Sequence
  derived and/or modified sequence
MFKRMAEFGPDSGGRVKGVTIVKPIVYGNVARYFGKKREEDGHTHQWTVYVKPYRNEDMSAYVKKIQFKLHESYGNPLRVVTKPPYEITETGWGEFEIIIKIFFIDPNERPVTLYHLLKLFQSDTNAMLGKKTVVSEFYDEMIFQDPTAMMQQLLTTSRQLTLGAYKHETEFAELEVKTREKLEAAKKKTSFEIAELKERLKASRETINCLKNEIRKLEEDDQAKDI

SEQ ID NO: 165971 - DNA, 1404 bp, Artificial Sequence
  derived and/or modified sequence
cggcgttctccacctgcgcgggcctgaatggccttcaggagcacagtcggcctgaggagttgacggttactcaccgccgtgagcccaagtaactcgccctccttcggctagaaaccctccgcctgggcccgcgcgacaggagcgcggtctctgaggggagcggcgaccccgccagccccggtctctttccctggcggcggcggcttcttccgtgggacaatatgttcaagagaatggccgaatttgggcctgactccggcgggagagtaaagggtgttactatcgttaaaccaatagtttacggtaatgttgctcggtattttggaaagaaaagagaagaagatgggcacactcatcagtggacagtatatgtgaaaccatatagaaatgaggatatgtcagcatatgtgaagaaaatccagtttaaattacatgaaagctatggcaatcctttaagagttgttactaaacctccatatgaaattactgaaacaggatggggtgaattcgaaataatcatcaaaatatttttcattgaccctaatgaaagacctgtaaccctgtatcatttgctaaagctgtttcaatcagacaccaatgcaatgctggggaaaaagacagtggtttcagagttctatgatgaaatgatatttcaagacccaacagcaatgatgcaacaattattgacaacatctcgtcagctaacattaggagcctataagcatgaaacagaatttgcagagcttgaagtgaaaaccagagaaaaattagaagctgctaagaaaaaaacaagctttgagattgcagagcttaaggagagattaaaagcaagtcgtgaaactataaattgtttaaaaaatgaaatcagaaaacttgaagaagatgaccaagcaaaagacatataaacagttctcatgagaacttggtagtaagctaaactgaaaataaggtgggcttcactggagaaatggacttactgcaaatgctgtgatgtttcttagaggaacttcatatacagctgttgaccatgaatttcttagcaataggaatttgtactatttaagcaatctttaatggaaaatatgtgtgtaagaatggatgctatataggtattttaccaacccattttaagaaaattctatgatattaagcacagtttttaaaaatgtttattgtagtatatgtatagcttattacccttttgacaggcatcaaaatttcattataaagtattacttgtacaaattttgtacttctttagtggctagaattagtgaagaaacttaatgtgtatatttaatttcttcaagttcttacctgcccccatccttttttgtatatgatgtgtccagtaagtattcaataaatgtagtttacagatcctaaaaaaaaaaaaaaaaaaaa

SEQ ID NO: 165972 - DNA, 684 bp, Artificial Sequence
  derived and/or modified sequence
atgttcaagagaatggccgagttcggccccgacagcggcggcagagtgaagggcgtgaccatcgtgaagcccatcgtgtacggcaacgtggccagatacttcggcaagaagagagaggaggacggccacacccaccagtggaccgtgtacgtgaagccctacagaaacgaggacatgagcgcctacgtgaagaagatccagttcaagctgcacgagagctacggcaaccccctgagagtggtgaccaagcccccctacgagatcaccgagaccggctggggcgagttcgagatcatcatcaagatcttcttcatcgaccccaacgagagacccgtgaccctgtaccacctgctgaagctgttccagagcgacaccaacgccatgctgggcaagaagaccgtggtgagcgagttctacgacgagatgatcttccaggaccccaccgccatgatgcagcagctgctgaccaccagcagacagctgaccctgggcgcctacaagcacgagaccgagttcgccgagctggaggtgaagaccagagagaagctggaggccgccaagaagaagaccagcttcgagatcgccgagctgaaggagagactgaaggccagcagagagaccatcaactgcctgaagaacgagatcagaaagctggaggaggacgaccaggccaaggacatctag

SEQ ID NO: 165973 - DNA, 684 bp, Artificial Sequence
  derived and/or modified sequence
atgttcaaacgtatggcagaatttggccctgacagcggagggcgggtcaaaggagtgacgatagttaagccaatcgtgtatggcaatgtggccagatattttggtaagaaaagagaagaggacggtcatacccatcagtggacggtctacgtgaagccatatagaaatgaggatatgtcggcttacgtaaagaagattcaattcaagctgcatgagtcctacggcaatccattgagggtcgtgacgaaacccccatacgagatcacagaaactggttggggcgagtttgaaatcattatcaagattttcttcattgatccaaatgagaggcctgtcaccttataccatctgctcaaactgttccagagcgataccaacgccatgctgggcaaaaagacagtggtctccgagttttatgacgagatgatcttccaggacccaacggctatgatgcagcagcttcttactaccagtaggcagttgacactgggcgcctacaagcatgaaactgaattcgccgaactggaggtgaagacacgggaaaagctggaggcagccaaaaaaaaaacctctttcgagatagcagaactcaaggaacgcctaaaagcatcccgggagaccatcaattgtctgaagaatgaaattcgcaagttggaggaggatgaccaggcaaaggacatctag

SEQ ID NO: 165974 - DNA, 684 bp, Artificial Sequence
  derived and/or modified sequence
atgttcaagaggatggccgagtttggaccagacagcggcggccgggtgaagggcgtgaccatcgtgaagcccatcgtgtatggaaatgtggcccgctactttgggaagaagcgggaggaggatggccacacccaccagtggacagtgtatgtgaagccctacagaaatgaagacatgtctgcctacgtgaagaagatccagttcaagctgcacgagagctatggcaaccccctgcgggtggtgaccaagccaccctatgagatcacagaaacaggctggggcgagtttgagatcatcatcaagatcttcttcatcgaccccaatgaaagacctgtgaccctgtaccacctgctgaagctgttccagagcgacaccaatgccatgctgggcaagaagacagtggtgtctgagttctatgatgagatgatcttccaggaccccacagccatgatgcagcagctgctgaccaccagccggcagctgaccctgggcgcctacaagcatgaaacagaatttgctgagctggaggtgaagacccgggagaagctggaggccgccaagaagaagaccagctttgaaattgctgagctgaaggagcggctgaaggccagccgggagaccatcaactgcctgaagaatgagatcaggaagctggaggaggatgaccaggccaaggacatctag

SEQ ID NO: 165975 - DNA, 684 bp, Artificial Sequence
  derived and/or modified sequence
atgttcaagcggatggccgagttcggccccgacagcggcggccgggtgaagggggtgactattgtcaagccgatcgtctacggcaatgtggctagatattttggcaaaaagagggaggaggacggacatacacaccaatggactgtgtatgttaagccttatagaaacgaggacatgtccgcatatgttaaaaaaattcaatttaagctgcacgagtcttatgggaatccactgcgggtcgtgacaaaaccgccttatgaaattactgaaactgggtggggggaatttgaaatcattatcaaaattttctttatcgaccctaatgaaaggccagtaaccctgtatcacctgctgaagctgttccaatctgatacaaacgccatgctggggaagaaaaccgtggtgtccgagttttacgatgaaatgatctttcaggaccccaccgcaatgatgcagcaattgcttactacctccaggcaactgactctgggcgcgtataagcatgaaactgaatttgccgaactggaggtcaaaaccagagagaaactcgaagctgctaagaagaaaaccagtttcgagattgccgagctgaaagagcgtctcaaagcaagtcgtgagaccattaattgtctcaaaaatgaaattcgcaagctcgaggaggatgatcaggcaaaagacatttag

SEQ ID NO: 165976 - DNA, 684 bp, Artificial Sequence
  derived and/or modified sequence
atgttcaagcgcatggcggaattcggacctgactctggtggcagggtcaaaggggtaactattgtgaagccaatcgtttacggaaacgttgctcgctatttcggcaagaaaagggaggaggacggccacacacatcagtggaccgtgtacgtaaaaccgtatcggaacgaggacatgtctgcttatgtaaaaaagatccaattcaagttacacgaatcctacggcaacccccttcgtgttgtcactaagcctccgtacgagattacggagaccggatggggagaatttgaaattatcatcaagattttctttatagaccccaatgagagacctgtcaccctataccatctgttgaagttgtttcaaagtgatacgaacgcgatgctgggaaagaagaccgtggtctctgaattttacgacgagatgatctttcaggatccaaccgccatgatgcagcagcttctcactacatcccggcaactgacccttggagcctacaagcacgagaccgaattcgctgaactcgaggtgaaaacacgcgaaaagttagaggcagccaaaaaaaaaacttcatttgaaattgccgagcttaaagaaaggttaaaggccagtagagagacaattaactgcctcaaaaatgaaattcggaaactggaagaggacgatcaagccaaggatatctag

SEQ ID NO: 165977 - DNA, 1434 bp, Artificial Sequence
  derived and/or modified sequence
cgcgagcccgttgcgcctgcgcgcggtgcggccgtcgcccctcttttcgcggcgttctccacctgcgcgggcctgaatggccttcaggagcacagtcggcctgaggagttgacggttactcaccgccgtgagcccaagtaactcgccctccttcggctagaaaccctccgcctgggcccgcgcgacaggagcgcggtctctgaggggagcggcgaccccgccagccccggtctctttccctggcggcggcggcttcttccgtgggacaatatgttcaagagaatggccgaatttgggcctgactccggcgggagagtaaagggtgttactatcgttaaaccaatagtttacggtaatgttgctcggtattttggaaagaaaagagaagaagatgggcacactcatcagtggacagtatatgtgaaaccatatagaaatgaggatatgtcagcatatgtgaagaaaatccagtttaaattacatgaaagctatggcaatcctttaagagttgttactaaacctccatatgaaattactgaaacaggatggggtgaattcgaaataatcatcaaaatatttttcattgaccctaatgaaagacctgtaaccctgtatcatttgctaaagctgtttcaatcagacaccaatgcaatgctggggaaaaagacagtggtttcagagttctatgatgaaatgatatttcaagacccaacagcaatgatgcaacaattattgacaacatctcgtcagctaacattaggagcctataagcatgaaacagaatttgcagagcttgaagtgaaaaccagagaaaaattagaagctgctaagaaaaaaacaagctttgagattgcagagcttaaggagagattaaaagcaagtcgtgaaactataaattgtttaaaaaatgaaatcagaaaacttgaagaagatgaccaagcaaaagacatataaacagttctcatgagaacttggtagtaagctaaactgaaaataaggtgggcttcactggagaaatggacttactgcaaatgctgtgatgtttcttagaggaacttcatatacagctgttgaccatgaatttcttagcaataggaatttgtactatttaagcaatctttaatggaaaatatgtgtgtaagaatggatgctatataggtattttaccaacccattttaagaaaattctatgatattaagcacagtttttaaaaatgtttattgtagtatatgtatagcttattacccttttgacaggcatcaaaatttcattataaagtattacttgtacaaattttgtacttctttagtggctagaattagtgaagaaacttaatgtgtatatttaatttcttcaagttcttacctgcccccatccttttttgtatatgatgtgtccagtaagtattcaataaatgtagtttacagatccta

SEQ ID NO: 165978 - protein, 621 aa, Artificial Sequence
  derived and/or modified sequence
MAALKEDRSYGLSCGRVSDGSKVSVFHVKLTDSALRAFESYRARQDSVSLRPSIRFQGSQGHISIPQPDCPAEARTFSFYLSNIGRDNPQGSFDCIQQYVSSHGEVHLDCLGSIQDKITVCATDDSYQKARQSMAQAEEETRSRSAIVIKAGGRYLGKKVQFRKPAPGATDAVPSRKRATPINLASAIRKSGASAVSGGSGVSQRPFRDRVLHLLALRPYRKAELLLRLQKDGLTQADKDALDGLLQQVANMSAKDGTCTLQDCMYKDVQKDWPGYSEGDQQLLKRVLVRKLCQPQSTGSLLGDPAASSPPGERGRSASPPQKRLQPPDFIDPLANKKPRISHFTQRAQPAVNGKLGVPNGREALLPTPGPPASTDTLSSSTHLPPRLEPPRAHDPLADVSNDLGHSGRDCEHGEAAAPAPTVRLGLPLLTDCAQPSRPHGSPSRSKPKKKSKKHKDKERAAEDKPRAQLPDCAPATHATPGAPADTPGLNGTCSVSSVPTSTSETPDYLLKYAAISSSEQRQSYKNDFNAEYSEYRDLHARIERITRRFTQLDAQLRQLSQGSEEYETTRGQILQEYRKIKKTNTNYSQEKHRCEYLHSKLAHIKRLIAEYDQRQLQAWP

SEQ ID NO: 165979 - protein, 29 aa, Artificial Sequence
  derived and/or modified sequence
IHRLVVAFQDSVSLRPSIRFQGSQGEMSL

SEQ ID NO: 165980 - DNA, 1866 bp, Artificial Sequence
  derived and/or modified sequence
atggctgcgttaaaggaagaccgctcatacggtctcagctgcggacgggtgagcgatggtagtaaagtgtcagtgttccatgtgaagctgaccgattccgccctgagggcgttcgagtcctatcgtgctcggcaggacagcgtcagcctcaggccctctatccggtttcaagggagtcaaggtcacataagtatcccccagccggactgtcccgctgaagcaaggaccttcagcttctacctctccaacatagggcgcgacaacccccagggttccttcgattgtatccagcagtatgtttcgagccatggcgaggtccacttagactgcctcggctccatacaggataagatcaccgtttgcgcaaccgatgatagttatcagaaagcaagacagagcatggcccaggccgaagaggaaactcgttcccgctccgccatagtgattaaggcaggtggaagatacctaggtaaaaaggtccagtttaggaagccagctccaggcgctaccgatgctgtcccatctcggaagagagctaccccaattaatctggcctctgccattagaaaatccggcgcaagcgccgtctcaggtgggtcaggggtatcacagagaccatttcgcgacagggtgctgcacctgctggcactgagaccttacaggaaggccgagctgctgctgcgcttgcagaaagatggcctgacccaggctgacaaggatgcgttagacggcctgttacagcaagtagcgaacatgagcgcaaaggatggcacttgcaccctccaagattgcatgtataaagatgtacaaaaggactggccaggatacagtgaaggggaccagcagttgttaaagcgcgttctggttcggaagctgtgccagcctcaaagtacgggttcactgcttggggaccctgcggcctcttctccccccggagagcgcggacgctctgcatcccctcctcagaaacgcctccagcctcctgactttattgatcctttagcaaacaagaaacctcgcattagccatttcacccagcgagcccaacctgccgtgaacggcaagctgggagtccccaatggtagagaggccctgcttccaacacctgggccacctgcctccaccgataccctgtccagcagcactcacttacctccaaggcttgagccaccgcgcgctcatgaccccctggccgacgtctcaaacgacctgggacattcaggccgggattgcgaacacggggaggccgctgcgccagccccaaccgtgcgtctcggactgccgctgctcacagattgtgcccagccaagcaggccccatggatcccctagccggtctaaaccgaagaaaaagtctaaaaagcacaaagataaagaacgggcggccgaagataagcccagagcccagttgccagactgcgctccagccacccacgcaactcccggtgctcctgccgacacgcccggcttgaatggaacctgctccgtgtcctctgtacccacttcaacctccgagacgccagattacctactgaagtacgctgctatcagttctagtgagcaacggcagtcttataaaaacgacttcaacgcagaatacagcgaatacagggacttacacgctcgcatcgagagaatcacacgacggttcacccagctggacgcacagctgcggcagctctctcagggtagtgaagagtatgagacaacccgcgggcaaatcctgcaagaatatcgcaaaatcaagaaaacaaacaccaactacagccaggaaaaacaccgctgtgaatacctgcattcaaagctggctcacattaagcgcctgattgcagaatacgatcagaggcaactccaggcatggccatag

SEQ ID NO: 165981 - DNA, 90 bp, Artificial Sequence
  derived and/or modified sequence
attcatcggttggtggtcgcatttcaggacagtgtcagtctgcggccaagtatccggttccagggctcccagggtgaaatgtctctgtag

SEQ ID NO: 165982 - DNA, 1866 bp, Artificial Sequence
  derived and/or modified sequence
atggccgccctgaaggaggacaggagctatggcctgagctgtggccgggtgtctgatggcagcaaggtgtctgtgttccacgtgaagctgacagattctgccctgcgggcctttgagagctaccgggcccggcaggacagcgtgtccctgcggcccagcatccgcttccagggcagccagggccacatcagcatcccccagcctgactgcccagctgaggcccggaccttctccttctacctgagcaacatcggccgggacaacccccagggcagctttgactgcatccagcagtatgtgagcagccatggagaggtgcacctggactgcctgggcagcatccaggacaagatcaccgtgtgtgccacagatgacagctaccagaaggcccggcagagcatggcccaggccgaggaggagaccaggagccgcagcgccatcgtcatcaaggccggcggccgctacctgggcaagaaggtgcagttcaggaagccagcccctggggccacagatgctgtgcccagcaggaagagggccacccccatcaacctggccagcgccatcaggaagagcggggccagcgctgtgtctgggggcagcggcgtgtcccagaggcccttccgggacagagtgctgcacctgctggccctgcggccctacaggaaggccgagctgctgctgcggctgcagaaggatggcctgacccaggccgacaaggatgccctggatggcctgctgcagcaggtggccaacatgtctgccaaggatggcacctgcaccctgcaggactgcatgtacaaggatgtgcagaaggactggccaggctacagcgagggggaccagcagctgctgaagagggtgctggtgaggaagctgtgccagccccagagcacaggcagcctgctgggggaccctgctgccagcagccccccaggagagcggggccgcagcgccagccccccccagaagaggctgcagcccccagacttcatcgaccccctggccaacaagaagccccgcatcagccacttcacccagagggcccagcctgctgtgaatggcaagctgggcgtgcccaacggccgggaggccctgctgcccaccccaggccccccagccagcacagacaccctgagcagcagcacccacctgcccccccggctggagcccccccgggcccatgaccccctggctgatgtgtccaatgacctgggccacagcggccgggactgtgaacatggagaggccgccgccccagcccccaccgtgcggctgggcctgcccctgctgacagactgtgcccagcccagccggccccacggcagccccagccgcagcaagcccaagaagaagagcaagaagcacaaggacaaggagagagctgctgaggacaagccccgggcccagctgcctgactgtgccccagccacccacgccacccctggggccccagctgacaccccaggcctgaatggcacctgcagcgtgtcctctgtgcccaccagcaccagcgagaccccagactacctgctgaagtatgctgccatcagcagcagcgagcagaggcagagctacaagaatgacttcaatgctgagtacagcgagtacagagacctgcacgccagaattgagcgcatcacccggcgcttcacccagctggatgcccagctgcggcagctgagccagggcagcgaggagtatgagaccacccggggccagatcctgcaggagtacaggaagatcaagaagaccaacaccaactacagccaggagaagcaccgctgtgagtacctgcacagcaagctggcccacatcaagaggctgattgctgaatatgaccagaggcagctgcaggcctggccctag

SEQ ID NO: 165983 - DNA, 90 bp, Artificial Sequence
  derived and/or modified sequence
atccaccggctggtggtggccttccaggacagcgtgtccctgcggcccagcatccgcttccagggcagccagggcgagatgagcctgtag

SEQ ID NO: 165984 - DNA, 1866 bp, Artificial Sequence
  derived and/or modified sequence
atggccgccctgaaggaggaccggagctacggcctgagctgcggccgtgtctctgacggtagcaaggtctccgtttttcacgtgaaactcactgactcagctctgagggcttttgagtcttaccgggctagacaagactccgtatccctgcggcctagcatcaggtttcagggtagccaggggcacattagcatacctcagcctgactgccccgctgaagcacggacattttcattctacctctccaatattgggcgggacaacccacaaggaagctttgattgtattcagcagtatgtgtcatcacatggggaagtgcatttggattgtctggggagcatccaagataagatcacagtgtgtgcgacggatgactcttaccagaaagcgagacagagcatggcacaggctgaggaggagactaggtcccggtctgcaattgttatcaaggccggcggcaggtatttaggcaaaaaagtgcagttccgcaagccagctccaggcgccaccgatgcagtcccctcccggaagagagccacacccatcaacctggctagcgccatcaggaagagcggggccagcgccgtgagtggcggatctggagttagccaacgtccatttagagatcgcgtacttcacctgctcgcattgcgaccatacaggaaggccgagctgctcctgagactgcagaaagatggccttacccaggccgataaggacgctctggacggattactccaacaggtggctaatatgagtgcgaaagacggaacatgtaccctacaggactgcatgtacaaagatgtgcagaaggattggcccggctattccgagggagaccaacagctgttaaagcgcgtgctggtaagaaagctgtgtcagccccagtccaccgggagtttgctaggcgatccagccgcttcttctccacccggagagcgaggcaggtcggcgtcacctccccagaaaagactccaaccgccagatttcattgacccccttgctaacaaaaaaccgcggatctcccattttacccagcgggctcagcccgctgttaacgggaaactcggcgtgcctaatggaagagaggccctgttaccaaccccaggaccccctgcctccaccgacacactttctagcagcactcatctgccccccagactggagccacccagggcccacgacccgctggctgacgtgtccaatgatcttgggcattcgggcagagattgtgagcacggcgaggccgccgcccctgccccaacggtgagactcggactccctttgcttaccgattgtgctcagcccagcaggccacacggctcaccgtcccgcagcaagccaaaaaagaagtctaagaaacacaaagataaggaacgggcagcagaggacaagccaagagctcagctgcctgattgcgcacctgcaactcacgcaacgccgggggctcctgcagatacccccgggttgaacggcacttgctctgtgtccagcgtgcccacctcgacctcagaaactcccgactatctcctcaagtatgcagctatatcgtccagtgagcagcggcagtcctacaaaaatgatttcaatgccgaatactctgagtatcgcgatctccatgccaggatcgagcggattacccggcggtttacgcagctggacgcgcaattgagacagctgtcacagggtagcgaagaatacgaaacaacacggggccagattctgcaggaatatcggaagattaagaaaaccaacaccaattactcgcaggaaaagcatagatgtgagtacctacatagtaaactggctcacatcaaacgcttaatagctgagtacgaccagagacaactgcaggcgtggccgtag

SEQ ID NO: 165985 - DNA, 90 bp, Artificial Sequence
  derived and/or modified sequence
atccaccggctggtggtggccttccaggacagcgtgagcctgcggccttccatcagatttcaagggtcccaaggtgaaatgtctctgtag

SEQ ID NO: 165986 - DNA, 1866 bp, Artificial Sequence
  derived and/or modified sequence
atggcggcactgaaggaggatagatcgtatggcttatcatgtggcagggtgtctgacggctctaaggtgtcagtgttccacgttaagctcactgactccgcgctgagagcatttgaatcctatcgggctcgacaggactccgtgagccttcgaccttccatccgtttccagggctctcagggacacatttccatcccacaacccgattgtccagccgaagccagaaccttctcgttctacttgtcaaacatcggacgtgacaaccctcagggcagctttgattgcattcagcagtatgtgagctctcatggcgaggtgcatttagactgtctcgggagcatccaggataaaatcaccgtttgcgctactgacgatagctatcaaaaggccaggcagtccatggcacaagccgaggaagagacaaggtctcgcagcgctattgtgattaaggccggtggtcgctacctcggtaagaaggtgcagtttcggaaaccggcacctggcgcaactgacgcagtgccatcacgcaaaagagcaacaccaatcaacttggccagcgctataaggaagtccggggcttcggctgtgagcggaggctccggggtgtctcagaggcctttccgagatcgcgtcctccacttgctggcccttagaccatataggaaggcagaactgctgctcaggctgcagaaggatggcctgactcaggccgacaaggatgccttggatgggctcctccagcaagtggccaacatgtctgctaaagacggtacttgtaccctgcaggactgcatgtataaagatgtgcagaaagattggccagggtattctgagggcgaccaacaactgttgaaacgagttctagtccgtaagctgtgtcagccacagagcactggcagccttttgggcgaccctgcagctagcagcccacctggagagagagggaggagtgctagccctccacagaagaggctgcaaccacccgatttcattgaccccttggccaacaagaaaccaagaatctcacattttactcaacgagcacagccggcagtcaacggcaagttgggggtgcccaacggaagagaagcccttcttcccactccaggccctcctgcatccactgatactctttcctcatcaacgcacctaccccctcgcctcgaacctccacgcgctcatgatccgttggcggacgtctctaacgacttgggacatagtggcagggactgtgaacatggtgaggctgctgcaccagccccaacagttcgcctaggactccctttgcttaccgactgcgcacaaccttcaaggccccacggctcaccctccagatctaaaccaaagaaaaaatcgaaaaagcacaaggacaaagagcgggctgctgaggacaagcccagggcgcagctgcccgactgcgctcccgcaacacatgctactcctggggctcctgctgatacacccggtctgaacggcacctgctccgtgtcgagtgtcccaaccagtaccagcgagacccccgactatctcctcaaatacgcagctattagcagttccgagcagcgacagtcctacaaaaacgactttaatgctgaatacagcgaatacagggatctacatgctaggattgaacgcattaccagacgatttacgcagctcgacgcacagctgcgacagctttcacaagggtcggaggagtacgagacaactagagggcagatcttacaagaatatagaaagatcaagaagacgaacaccaactattcacaagaaaaacataggtgtgaatacctccatagtaaacttgctcacattaaaagactgatagccgagtacgatcagcgacaactgcaggcgtggccgtag

SEQ ID NO: 165987 - DNA, 90 bp, Artificial Sequence
  derived and/or modified sequence
atacatcggctggttgttgccttccaagatagcgtgtccctgaggccatctatccggttccaggggagtcaaggcgagatgagcctgtag

SEQ ID NO: 165988 - DNA, 1866 bp, Artificial Sequence
  derived and/or modified sequence
atggccgccctgaaggaggacagaagctacggcctgagctgcggcagagtgagcgacggcagcaaggtgagcgtgttccacgtgaagctgaccgacagcgccctgagagccttcgagagctacagagccagacaggacagcgtgagcctgagacccagcatcagattccagggcagccagggccacatcagcatcccccagcccgactgccccgccgaggccagaaccttcagcttctacctgagcaacatcggcagagacaacccccagggcagcttcgactgcatccagcagtacgtgagcagccacggcgaggtgcacctggactgcctgggcagcatccaggacaagatcaccgtgtgcgccaccgacgacagctaccagaaggccagacagagcatggcccaggccgaggaggagaccagaagcagaagcgccatcgtgatcaaggccggcggcagatacctgggcaagaaggtgcagttcagaaagcccgcccccggcgccaccgacgccgtgcccagcagaaagagagccacccccatcaacctggccagcgccatcagaaagagcggcgccagcgccgtgagcggcggcagcggcgtgagccagagacccttcagagacagagtgctgcacctgctggccctgagaccctacagaaaggccgagctgctgctgagactgcagaaggacggcctgacccaggccgacaaggacgccctggacggcctgctgcagcaggtggccaacatgagcgccaaggacggcacctgcaccctgcaggactgcatgtacaaggacgtgcagaaggactggcccggctacagcgagggcgaccagcagctgctgaagagagtgctggtgagaaagctgtgccagccccagagcaccggcagcctgctgggcgaccccgccgccagcagcccccccggcgagagaggcagaagcgccagccccccccagaagagactgcagccccccgacttcatcgaccccctggccaacaagaagcccagaatcagccacttcacccagagagcccagcccgccgtgaacggcaagctgggcgtgcccaacggcagagaggccctgctgcccacccccggcccccccgccagcaccgacaccctgagcagcagcacccacctgccccccagactggagccccccagagcccacgaccccctggccgacgtgagcaacgacctgggccacagcggcagagactgcgagcacggcgaggccgccgcccccgcccccaccgtgagactgggcctgcccctgctgaccgactgcgcccagcccagcagaccccacggcagccccagcagaagcaagcccaagaagaagagcaagaagcacaaggacaaggagagagccgccgaggacaagcccagagcccagctgcccgactgcgcccccgccacccacgccacccccggcgcccccgccgacacccccggcctgaacggcacctgcagcgtgagcagcgtgcccaccagcaccagcgagacccccgactacctgctgaagtacgccgccatcagcagcagcgagcagagacagagctacaagaacgacttcaacgccgagtacagcgagtacagagacctgcacgccagaatcgagagaatcaccagaagattcacccagctggacgcccagctgagacagctgagccagggcagcgaggagtacgagaccaccagaggccagatcctgcaggagtacagaaagatcaagaagaccaacaccaactacagccaggagaagcacagatgcgagtacctgcacagcaagctggcccacatcaagagactgatcgccgagtacgaccagagacagctgcaggcctggccctag

SEQ ID NO: 165989 - DNA, 90 bp, Artificial Sequence
  derived and/or modified sequence
atccacagactggtggtggccttccaggacagcgtgagcctgagacccagcatcagattccagggcagccagggcgagatgagcctgtag

SEQ ID NO: 165990 - DNA, 4025 bp, Artificial Sequence
  derived and/or modified sequence
ggcggggcggggcgtggccggcgtggcggcgctggagccgggaagggggcgcgggggagagatggtcgcaagatggcggcgctgaaggaggataggagctacgggctgtcgtgcgggcgggttagcgacggcagcaaggtgtcggtgttccacgtgaagctcaccgacagtgccctgagggccttcgagagctaccgcgccagacaggattctgtttcactgaggccatctatccgatttcaaggaagccaagggcacatctccatcccccagcctgactgccccgcagaggcgcggacgttctccttctacctctccaacatcggccgcgacaacccccagggcagcttcgactgcatccagcagtatgtctccagtcatggggaagttcacctggactgcctgggcagcatacaggacaagatcacggtgtgtgccaccgacgactcctaccagaaggcgcggcagagcatggcccaggcggaggaggagacgcggagccgaagtgccattgtcatcaaggctggaggccgctacctgggcaagaaggttcagtttcggaaaccagccccaggtgcaacagacgcggtgccctcccggaagcgggcaacccccatcaacttggcgagtgccatcaggaagagtggtgccagtgccgtgagtgggggcagcggggtgtcccagaggcccttccgtgaccgagtgctgcacctcctggcactacggccctaccgcaaggctgagctgctgctgcgactgcagaaggacggcctgacgcaggcggacaaggacgcgctggatggcctcctccagcaggtggccaacatgagtgctaaggacggcacgtgtacactgcaggactgcatgtacaaggatgtgcagaaggactggcctggctactcggagggggaccagcagctgctgaagcgggtgctcgtccggaagctgtgccagccacagagcactggcagcctccttggagaccctgctgcctccagccccccaggcgagcgtgggcgctcggcctcgcccccacagaagcggctgcagcctcctgatttcatcgaccccctagccaacaagaaaccccggatatcgcacttcactcagagagctcagcctgccgtcaacgggaagctgggcgtgcccaatggccgtgaggccttgctgcccaccccgggcccaccagccagcacggacaccctcagctccagcactcacctgcccccgcggctggagcccccgagggcccacgaccccctggccgatgtcagcaatgacctgggccacagcggccgagactgtgagcacggagaggcggctgccccagcccccactgtgcgcctcggcctgcccctgctgacggactgtgcccagcccagcaggccacacggcagcccctcgcgcagcaagcccaagaagaagtccaagaagcacaaagacaaggagagggcggctgaggacaagccccgggcccagcttccagactgtgcacctgccacccatgccacccccggagccccagcagacaccccaggtttaaacggaacctgcagcgtttccagtgttcccacgtccacgtcggagacgcctgactacttgctgaagtacgcagccatctcctcttcggagcagcgccagagctacaagaacgacttcaatgccgagtacagcgagtaccgcgacctgcacgcccgcattgagcgcatcacgcggcggttcacccagctcgacgcccagctccggcagctctcccagggctccgaggagtatgagactactcgagggcagattttgcaggaatatcgaaaaatcaaaaagaccaacaccaactacagccaggagaagcaccgctgcgagtacctgcacagcaagctggcccacatcaagaggctcatcgccgagtacgaccagcggcagctgcaggcttggccctagccgccctccccgatggcggggatctgggagggtcgggggagcaaaaggcggtgagagaggatttatttaaaaaaataaacccgaggaagatgctcatctgagccagcaccgccggctttcagggcagcccctgcagacgtctggccctggcgggtggctgcaagcccacctcggccctccctgcgcttcctgagcagtccctgcttatgatgggctccccaggaagcccactgcctcctccctggctgcagcctccggggttcagcctcctgtctcgccagaagactcctaggcccttggggtggcgcgcctgccttttctagttttatacaaagacagccacttttagctactgctaatgagacttgagtctatttttgtacaaaagagaagcaaaatcttttttctaaacctgtgcctccctctcctcggacacccagggtctagccgctgccctgggtcctgcctgcagtattacagaggtcgtcgaaaggtgcagctgcgttctgagggcgtggggaatgggcaggtggcctctgctggtctctggctctacgtttaggcacccctttccccagcctctcctccttgggcagggtctctgctccagcaagcaaacagggtggcccaggtggctattttgagaactccagctggtgcccccagacagctgctcagagccaagggggcagagggctttcagcgcccccaggcctgccctgctatttcaggccctcagctgtcgggggccactgtgtttctgtgctccaagttgagactcggccgcagcggcgtcagacttttctttgcgatgtcctcggtttcccatttgttgctgctgctgctcattccacactgttgagaccttgtggtctcgatgctgctggcctccctccgtccctctgtccacttgtgggtcctggggtcgtcttagcagagccaccgccaaggtttgcactcagggaggggctgatggagggctgggcgccatggggtcagggaggccccagggacccatgggcagagctggggagccaggaggatgggtctgcctgctctgggggtgcaggctctgcagacaccccaattgctgctctgttgctgtgcctagtctagtgtcccccaaagcatcggggggccacgcaagtgtgggtgtgtgagtgtgcgtatgtggggaccccccagggcatggtggggtctgaggcgtgtgttcccatttagggctgaatgaagccatgacttggaaaggtggtggggggtggatggcggctgtgactcagggcccagggatcacatgggggtcactgctgccatcagcagtcaggcagggagaacagaaatgcaaaaatacagatgtctatttttctaaactggggggtggaggggtgcctcctgacagcttccaaagagctgactgtggagggcccacagtgtatcccacccctgcccgagagtctctctcctttgggacccccgggttcccagagctccgaggaaactgatccttcatgtttcaatagctgttgttgtttttctctttgggccgggccgggccggggaagggccgagcaggctccaggaggcctccagagtcagctggaccttgctgtgtcgcccgcaggcagccctgcagacaccggtgaggtgggatgatttcaggaggtcccagcccgggactgcccgcccctctgccctgggaaccagtccaaggggctgtcagttgaatttgcctttttgttgttgttgttgtttttgttgtttatttgttctccttttaaggaattatgaagctaagaaaagttttgtgttttgggggttggtggacaaagttctagctgattaaatatggtctaacttattgatactatttttttttcttttaatgttgtactgtggagaaaaactattttgagccatggggttggtgtttacaagaactttccacttttgccaaaatgttacaattgaaaggcatctatctgcgtcttcagtttcctgatattttcttaaaagatctagtgtcctttttgtacactaaacaggtgaatgctgacttttttcattctccaataaatttcactgaactg

SEQ ID NO: 165991 - DNA, 87 bp, Artificial Sequence
  derived and/or modified sequence
attcacaggctggtggtggctttccaagattctgtttcactgaggccatctatccgatttcaaggaagccaaggggagatgagtctc

SEQ ID NO: 165992 - protein, 1420 aa, Artificial Sequence
  derived and/or modified sequence
MSGLGENLDPLASDSRKRKLPCDTPGQGLTCSGEKRRREQESKYIEELAELISANLSDIDNFNVKPDKCAILKETVRQIRQIKEQGKTISNDDDVQKADVSSTGQGVIDKDSLGPLLLQALDGFLFVVNRDGNIVFVSENVTQYLQYKQEDLVNTSVYNILHEEDRKDFLKNLPKSTVNGVSWTNETQRQKSHTFNCRMLMKTPHDILEDINASPEMRQRYETMQCFALSQPRAMMEEGEDLQSCMICVARRITTGERTFPSNPESFITRHDLSGKVVNIDTNSLRSSMRPGFEDIIRRCIQRFFSLNDGQSWSQKRHYQEAYLNGHAETPVYRFSLADGTIVTAQTKSKLFRNPVTNDRHGFVSTHFLQREQNGYRPNPNPVGQGIRPPMAGCNSSVGGMSMSPNQGLQMPSSRAYGLADPSTTGQMSGARYGGSSNIASLTPGPGMQSPSSYQNNNYGLNMSSPPHGSPGLAPNQQNIMISPRNRGSPKIASHQFSPVAGVHSPMASSGNTGNHSFSSSSLSALQAISEGVGTSLLSTLSSPGPKLDNSPNMNITQPSKVSNQDSKSPLGFYCDQNPVESSMCQSNSRDHLSDKESKESSVEGAENQRGPLESKGHKKLLQLLTCSSDDRGHSSLTNSPLDSSCKESSVSVTSPSGVSSSTSGGVSSTSNMHGSLLQEKHRILHKLLQNGNSPAEVAKITAEATGKDTSSITSCGDGNVVKQEQLSPKKKENNALLRYLLDRDDPSDALSKELQPQVEGVDNKMSQCTSSTIPSSSQEKDPKIKTETSEEGSGDLDNLDAILGDLTSSDFYNNSISSNGSHLGTKQQVFQGTNSLGLKSSQSVQSIRPPYNRAVSLDSPVSVGSSPPVKNISAFPMLPKQPMLGGNPRMMDSQENYGSSMGGPNRNVTVTQTPSSGDWGLPNSKAGRMEPMNSNSMGRPGGDYNTSLPRPALGGSIPTLPLRSNSIPGARPVLQQQQQMLQMRPGEIPMGMGANPYGQAAASNQLGSWPDGMLSMEQVSHGTQNRPLLRNSLDDLVGPPSNLEGQSDERALLDQLHTLLSNTDATGLEEIDRALGIPELVNQGQALEPKQDAFQGQEAAVMMDQKAGLYGQTYPAQGPPMQGGFHLQGQSPSFNSMMNQMNQQGNFPLQGMHPRANIMRPRTNTPKQLRMQLQQRLQGQQFLNQSRQALELKMENPTAGGAAVMRPMMQPQQGFLNAQMVAQRSRELLSHHFRQQRVAMMMQQQQQQQQQQQQQQQQQQQQQQQQQQQQQTQAFSPPPNVTASPSMDGLLAGPTMPQAPPQQFPYQPNYGMGQQPDPAFGRVSSPPNAMMSSRMGPSQNPMMQHPQAASIYQSSEMKGWPSGNLARNSSFSQQQFAHQGNPAVYSMVHMNGSSGHMGQMNMNPMPMSGMPMGPDQKYC

SEQ ID NO: 165993 - DNA, 4263 bp, Artificial Sequence
  derived and/or modified sequence
atgtccggcctgggcgaaaacctggaccctctcgcctccgacagcaggaagcgaaagcttccatgtgataccccgggccagggactgacctgctccggcgagaaacgacggagagagcaggaatctaagtatatcgaggaactagcggagctgatatcagctaatttgagtgatattgacaatttcaatgtcaaaccagacaagtgcgccattcttaaagaaaccgtgcgacaaatccggcaaatcaaggaacagggaaagacaatctcgaacgacgacgacgtccagaaagcagacgtgtcttccaccggtcagggagtgattgataaagactctctgggtcctctgcttctccaggcactcgacggttttcttttcgtggtgaaccgggatggaaacattgtgttcgtgagcgagaatgtaacacaatatctgcaatacaagcaagaggacttggtgaatacctctgtatataacatactgcacgaagaggaccgaaaggattttttgaaaaacctacccaaaagcaccgtgaatggcgtctcatggaccaacgagacccagagacagaaatcgcatacatttaattgcagaatgttaatgaagacccctcatgatattctggaggacatcaacgccagcccagagatgcgccagcggtatgagacaatgcaatgcttcgcactatcacagcccagggccatgatggaagagggtgaggacctacagagttgcatgatctgcgtcgcacggagaatcacaactggagagagaacctttccgagtaaccccgaatcatttatcactcggcatgatctgagcggaaaggtagttaatatcgacacaaactctctgcgctcatccatgcgccctggatttgaggacattattcgaaggtgcatccagcgtttcttctctctgaatgacgggcagtcatggtcacaaaaaaggcactaccaggaggcgtacctaaatggtcacgcagagacccccgtgtacaggttttcgttggcggatggcaccatcgtgaccgctcagacaaagtctaaactgttccgaaacccagttaccaacgaccgccacggcttcgtgtccactcattttctacagagagagcagaatgggtatcgtccgaacccaaatcctgtcggtcaaggcatcagaccccctatggcaggatgtaattcatcagtagggggaatgtccatgtcccccaatcaggggcttcagatgccatctagcagagcttatggcctcgctgacccaagcactacaggacagatgtccggggcgagatatgggggaagctcaaatatcgcaagtctcacccccgggcccggcatgcaaagtcctagttcctatcagaacaacaactacgggctcaatatgagctcaccaccgcacggctcgccagggctggcgcccaaccagcagaatatcatgataagccctaggaatagaggatccccgaaaatcgcctctcaccagttcagtcctgtggctggagtgcactccccgatggcttcctccggcaacactgggaaccacagcttttcctcctcttcactgtctgctttgcaggcgatctccgagggagtgggcacctctttgctctcgacactttcgagcccagggccgaagcttgacaacagccccaatatgaacataacacagcccagtaaggtgagcaatcaggatagcaagtcgcctctcgggttctactgcgatcagaacccagttgaaagttctatgtgccagtccaacagtagagatcaccttagtgataaagagtcaaaagagagttctgttgagggcgctgagaatcaacgtggcccactggagtctaaaggccacaagaagctgctgcagctcctgacctgtagttcagatgatagagggcactcgtctctcaccaatagtcctttagactcatcgtgtaaagagagtagtgtctcggtgacgtctcccagtggcgtttcatcctcgactagcgggggggtttcctccacaagcaatatgcatggatctctgctgcaggagaaacatcgaatcctgcataaactgctgcagaatgggaactctcctgccgaggtggctaaaataacggcggaggccacaggaaaagacacatcatctatcacgtcatgtggggatgggaacgtcgtgaagcaagagcagctttcaccaaagaaaaaagaaaacaatgccctgctgaggtatctcctggatcgcgatgatccatcagatgctctctcaaaggaactacaaccacaggtggaaggggttgataacaagatgagccagtgcaccagttccactattccttccagcagtcaggagaaggaccccaaaatcaagacagaaacctctgaagagggatctggcgacctggacaaccttgacgcaattttgggcgatttgacctcatcagacttctataataacagtatttcgtcaaacggtagccacctgggaaccaaacagcaggtgttccagggtaccaatagtttagggctgaagtcaagtcagtcggtacagtctattagacccccatataacagagccgtgtcacttgactccccagtgtccgtgggatcttctccacctgtgaaaaacatctcagccttccctatgctgcccaaacagccaatgctgggagggaatcctagaatgatggattcacaggagaactatggctcctccatgggcggacctaacagaaatgtgactgttacgcagactcctagctcaggcgattggggactgccgaactcaaaagctggaagaatggaacctatgaacagcaactccatgggaaggcccggaggcgactacaacaccagcctgccgagacctgcactgggaggctctattccaacactccccctacgttccaactccattcctggggcgaggccagtcctacaacagcaacagcagatgttgcagatgcggcctggtgagatacctatgggaatgggtgctaatccttatgggcaggctgctgcctcaaatcaactgggtagctggccggacggtatgttgagtatggaacaagtgagccatgggacacagaatcgcccactgctcagaaattcactggacgatttggtcggccctccatctaacctggaaggccagagcgacgagcgggctttactggatcagctgcacacactcctctctaatactgatgctactggccttgaggaaattgacagagccctagggatacctgaactggttaaccagggacaggcactcgaacctaaacaggacgcgtttcagggtcaggaagccgccgtcatgatggaccagaaggcgggcctgtatggccagacttatccagcgcagggaccacctatgcaaggtggctttcacctccagggccagtctccgagttttaactcgatgatgaaccagatgaatcaacagggcaacttccccttgcaaggtatgcaccccagggcaaacattatgcggccccgcaccaatactcccaagcaactgagaatgcagctgcagcagcgtctgcaaggccagcagttcctcaaccagagccggcaggctctggaattgaaaatggagaacccaactgccgggggtgccgctgtgatgcgccccatgatgcagccccagcaggggtttctgaacgcacagatggtggctcagcggtcgcgggagctgttaagtcaccatttccgacagcaaagagtagccatgatgatgcaacagcagcagcagcaacaacagcagcaacagcagcagcagcagcagcagcagcagcagcaacaacaacaacagcagcagcagcagacccaggcctttagtccccccccaaacgtcactgcgtccccgtctatggacgggttgctggctggacccacaatgccacaggcgccaccacagcaatttccctaccagcccaactacggtatgggccaacagcctgatcccgcctttggcagagtaagcagtccgccgaatgccatgatgagttcccgcatgggacccagtcagaacccgatgatgcagcacccacaggccgcatctatttatcagtccagcgaaatgaagggatggcccagcggcaatctggctcggaactcctccttcagccagcagcagttcgctcatcagggaaatcccgccgtctactccatggtgcatatgaacgggagctcaggacacatggggcagatgaatatgaatccaatgccgatgtcgggaatgccaatggggccagatcagaaatactgctag

SEQ ID NO: 165994 - DNA, 4263 bp, Artificial Sequence
  derived and/or modified sequence
atgtcaggtctgggtgagaacctggaccctctggctagcgactccagaaagcgaaaactgccttgcgacactcctggccagggtctgacctgcagcggcgaaaaaagaagaagagagcaggagtctaaatacatcgaggagctggccgagctgatcagcgccaaccttagcgatatcgataatttcaatgtgaagcccgacaagtgtgcaatattgaaagagacagtacgccagatcagacagattaaagagcagggcaaaaccatctccaatgacgatgacgtgcagaaggccgatgtgtcaagcaccggtcaaggggtgatcgacaaagacagcttggggcctctgttgctgcaggcacttgacgggttcctgtttgtggtgaacagggatggaaatattgtctttgtcagcgagaacgtcacccaatatttacaatataagcaggaggatttagtcaacacatccgtgtacaacattttgcatgaggaagataggaaggattttctgaaaaatctgccgaagagcaccgtgaatggggtgagctggacaaatgaaacacagcgacagaaatcgcataccttcaattgcaggatgctcatgaaaactccacacgacatcttggaagatattaatgccagccccgaaatgagacaacgctatgaaaccatgcagtgtttcgcactgagtcaacctagggcaatgatggaagagggtgaggatcttcagagctgcatgatttgcgtggcgagaaggatcacgacaggcgagaggacctttccttccaatcccgagagctttatcacccgacacgacctgtcagggaaagttgtcaatattgatactaactctcttaggtcctctatgcgcccaggctttgaggatatcattaggcgttgtattcaacggtttttctcgcttaacgacggccagtcatggtcacagaagcgccattaccaagaagcttaccttaacggacacgcggaaacacccgtctaccggttttctctggctgatggcaccattgtgacagcacaaacaaagtcaaagctcttcaggaatcccgtgaccaacgacagacatggattcgtgagtacacacttcctgcagcgtgaacagaacggatatagacccaatcccaatcctgtggggcagggaataaggcctccaatggctggatgtaactctagcgtgggtggcatgagcatgtcccccaatcagggcttgcagatgccatcctctagggcctatgggctggctgatccttctaccaccggtcaaatgtcaggcgccagatatggaggatcaagcaacattgccagcctgactcctggccccggcatgcagtccccctccagttaccagaacaacaattacggactgaatatgagctccccaccccacggctctcccggcctggcccccaatcagcagaatatcatgatttcccccagaaatcggggcagccccaaaatcgcctcacatcagttctccccggtggctggggtgcacagtcccatggccagcagcgggaatacaggaaaccacagctttagtagttcctcccttagcgccctgcaggctattagtgagggcgtcggaacctcacttctttccactctcagttcccccggccccaagctggataactcgcccaacatgaatatcacacagcccagtaaggtgtccaatcaagacagcaagtcccccctcggcttctactgtgaccaaaaccctgtggaatcatctatgtgccagagtaactctcgagaccatctgtccgataaggaatctaaagaaagttctgtggaaggggctgagaatcaacgaggaccattggaatctaaagggcataagaagcttcttcagctgctgacatgctcatccgacgaccgcggccattccagcttgaccaattctccgctggacagtagctgcaaggaatcctcagtaagtgtgacaagcccgagcggagttagttcctctacatctggcggtgtttccagcacctctaatatgcatgggtccttattacaagagaaacaccgaatactgcataagctcctgcagaatggcaactctcctgcagaggtcgccaagataactgctgaggctacaggtaaggacacatcgagcatcacgagctgtggcgacggtaacgttgtcaagcaggagcaactgtcaccaaagaagaaagaaaacaatgcattactgagatacctgttggaccgggatgatccctctgatgcgctcagcaaggaactccaaccacaggtcgagggcgtggacaacaagatgtcacagtgtacctcttctaccataccgtcctccagtcaggaaaaggatcccaagatcaagactgaaaccagcgaagaaggttcaggcgacctcgacaacctcgacgcgattctgggggaccttacctcttccgacttctacaataacagcatatcaagcaacggctcccacctcgggactaagcaacaggtgtttcaggggactaattctctcggccttaaatcttcacagtccgtgcagagtatcaggcccccttacaatcgagccgtgagtctggatagccctgtgtccgtgggcagctccccgccagtcaagaatatctccgcatttcctatgcttccaaaacagcccatgctgggcgggaaccccagaatgatggactcacaagaaaattacggctcttctatgggaggtcccaataggaatgtgaccgttactcaaacaccctccagtggggattgggggctccctaattccaaagccggtagaatggagcccatgaacagtaattccatgggacggccaggaggtgactacaatacttcattacctcgcccggctctgggcggttcaattcctacactgccccttagatcgaattcaatccccggggcccgcccagttttacaacagcagcagcagatgcttcagatgaggcccggagaaattccaatgggaatgggggcgaatccttatggccaggccgcagcttctaatcagctgggatcctggccagatgggatgctgagtatggaacaggtgtctcacggcacacagaataggccattgctgcggaactcactggatgatctggtggggccacctagtaatttggaggggcagtcggacgagcgcgctctattagaccagctgcacactttactgtccaatactgacgccacgggtctggaggaaattgacagagccctggggatacccgagctggtgaatcaaggacaggcactggaaccaaaacaggatgcctttcaaggtcaggaggctgcagtcatgatggatcagaaggccggtctctacggacagacatacccagcccaaggaccgccaatgcaaggaggttttcacttacaggggcagtcccctagctttaatagtatgatgaatcagatgaatcagcagggcaacttcccactgcagggtatgcaccctagagccaatattatgcgccctcgcactaacaccccaaagcaactgcgcatgcagctgcagcagcggttgcaaggccagcaattcctcaatcagtccaggcaagctctcgaactaaagatggagaaccctactgccggtggagccgcggtgatgcgaccgatgatgcaacctcagcagggcttcctgaacgctcaaatggtagcccagaggagcagagaactgctgtcccatcactttcgacaacagagagtagctatgatgatgcagcagcagcagcagcagcaacagcagcagcagcagcaacagcagcagcagcagcaacagcagcagcagcagcagcagcagcagcagacgcaagctttctccccacctccaaacgtgaccgcctctcccagtatggatggcctgctcgccggccccaccatgccccaggcacctccccagcagttcccctatcaacctaactacggtatgggccaacagcctgaccccgcatttggcagagtgtccagtccacctaacgctatgatgtcctcaaggatgggcccctctcagaatcctatgatgcaacacccgcaggccgccagcatttatcaatcctccgaaatgaaaggctggccgagtggcaacctggctaggaattcaagtttctcacagcagcaatttgcccaccaggggaatccagccgtttactctatggtgcacatgaacggatcttcagggcatatgggacagatgaatatgaatcctatgcctatgtcaggcatgcctatgggacccgaccagaaatactgttag

SEQ ID NO: 165995 - DNA, 774 bp, Artificial Sequence
  derived and/or modified sequence
atgatggaggaaggagaagacctgcagtcatgtatgatttgcgtcgcacgccgaattacaacaggtgagaggacttttcccagtaatcccgagtcatttatcacacgtcatgacctgtccggtaaagtggtgaatattgacacaaattcactccgcagttcaatgagaccagggtttgaggacataattcgacggtgcattcagcgatttttcagtctgaacgatggccagtcctggtcacaaaaacggcattaccaggaggcctacctgaatggtcatgcagagactcccgtttaccgattctctctggctgacggtacaatcgtgactgcacagaccaaaagcaagttgtttaggaacccggtgacaaacgaccgacatggattcgtgagtactcacttcctgcaacgagagcagaatggatatcggccaaaccctaaccccgtcggccaagggatccggccgcccatggcaggatgcaacagtagtgttggtggaatgtcaatgagccccaaccaaggccttcagatgcctagttcccgcgcttacggactagcggaccctagcactaccgggcaaatgagtggcgcccggtatggaggatcgtccaatatcgcttccctcactcccggcccaggcatgcagagcccatcttcctaccaaaacaacaactacggcctaaacatgagtagtcccccccatggttcacccggtctagctccgaaccagcagaatatcatgattttgctagtgatcgtgggtgtgcagcgctag

SEQ ID NO: 165996 - DNA, 4263 bp, Artificial Sequence
  derived and/or modified sequence
atgagcggcctgggggagaacctggaccccctggccagtgacagcaggaagaggaagctgccctgtgacaccccaggccagggcctgacctgcagcggggagaagagaagaagagagcaggagagcaagtacatcgaggagctggccgagctgatcagcgccaacctgagtgacatcgacaacttcaacgtgaagccagacaagtgtgccatcctgaaggagaccgtgcggcagatccggcagatcaaggagcagggcaagaccatcagcaatgatgatgatgtgcagaaggcagatgtgagcagcacaggccagggcgtcatcgacaaggacagcctgggccccctgctgctgcaggccctggatggcttcctgtttgtggtgaacagagatggcaacatcgtgtttgtgtctgaaaatgtgacccagtacctgcagtacaagcaggaggacctggtgaacacctctgtgtacaacatcctgcacgaggaggacaggaaggacttcctgaagaacctgcccaagagcacagtgaatggagtgtcctggaccaatgagacccagaggcagaagagccacaccttcaactgcaggatgctgatgaagacccctcatgacatcctggaggacatcaatgccagccctgagatgaggcagagatatgagaccatgcagtgctttgccctgagccagccccgggccatgatggaggagggggaggacctgcagagctgcatgatctgtgtggcccggcgcatcaccactggagagaggaccttccccagcaaccctgagagcttcatcaccaggcatgacctgagcggcaaggtggtgaacatcgacaccaacagcctgcggagctccatgaggcctggctttgaggacatcatccgccgctgcatccagcgcttcttcagcctgaatgatggccagagctggagccagaagaggcactaccaggaggcctacctgaatggacatgctgagacccctgtgtaccgcttcagcctggctgatggcaccatcgtgacagcccagaccaagagcaagctgttcagaaatcctgtgaccaatgacagacatggctttgtgtccacccacttcctgcagcgggagcagaatggctaccggcccaaccccaaccctgtgggccagggcatccggccccccatggccggctgcaacagctctgtgggcggcatgtccatgagccccaaccagggcctgcagatgcccagcagccgggcctacggcctggccgaccccagcaccaccggccagatgtctggggcccgctatggaggcagcagcaacatcgccagcctgaccccaggccctggcatgcagagccccagcagctaccagaacaacaactacggcctgaacatgagcagccccccccacggcagccctggcctggcccccaaccagcagaacatcatgatcagccccaggaacagaggcagccccaagatcgccagccaccagttcagccctgtggccggcgtgcacagccccatggccagcagcggcaacacaggcaaccacagcttcagcagcagcagcctgagcgccctgcaggccatcagcgagggcgtgggcaccagcctgctgagcaccctgagcagccctggccccaagctggacaacagccccaacatgaacatcacccagcccagcaaggtgagcaaccaggacagcaagagccccctgggcttctactgtgaccagaaccctgtggagagctccatgtgccagagcaacagccgggaccacctgagtgacaaggagagcaaggagagctctgtggagggcgctgagaaccagaggggccccctggagagcaagggccacaagaagctgctgcagctgctgacctgcagcagtgatgaccggggccacagcagcctgaccaacagccccctggacagcagctgcaaggagagctctgtgtctgtgaccagccccagcggcgtgagcagcagcaccagcggcggcgtgagcagcaccagcaacatgcacggcagcctgctgcaggagaagcaccgcatcctgcacaagctgctgcagaatggaaacagccctgctgaggtggccaagatcacagctgaggccaccgggaaggacaccagcagcatcaccagctgtggagatggaaatgtggtgaagcaggagcagctgagccccaagaagaaggaaaataatgccctgctgcgctacctgctggacagagatgaccccagtgatgccctgagcaaggagctgcagccccaggtggagggcgtggacaacaagatgagccagtgcaccagcagcaccatccccagcagcagccaggagaaggaccccaagatcaagacagagaccagcgaggagggcagcggggacctggacaacctggatgccatcctgggggacctgaccagcagtgacttctacaacaacagcatcagcagcaatggcagccacctgggcaccaagcagcaggtgttccagggcaccaacagcctgggcctgaagagcagccagagcgtgcagagcatccggcccccctacaacagagctgtgtccctggacagccctgtgtctgtgggcagcagcccccctgtgaagaacatcagcgccttccccatgctgcccaagcagcccatgctgggcggcaaccccaggatgatggacagccaggagaactacggcagctccatgggcggccccaacagaaatgtgacagtgacccagacccccagcagcggggactggggcctgcccaacagcaaggccggccgcatggagcccatgaacagcaacagcatgggccggcctggaggagactacaacaccagcctgcccaggcctgccctgggcggcagcatccccaccctgcccctgcggagcaacagcatccctggggcccggcctgtgctgcagcagcagcagcagatgctgcagatgaggcctggagagatccccatgggcatgggcgccaacccctacggccaggccgccgccagcaaccagctgggctcctggccagatggcatgctgtccatggagcaggtgagccacggcacccagaaccggcccctgctgaggaacagcctggatgacctggtgggcccccccagcaacctggagggccagagtgatgagcgggccctgctggaccagctgcacaccctgctgagcaacacagatgccaccggcctggaggagattgaccgggccctgggcatccctgagctggtgaaccagggccaggccctggagcccaagcaggatgccttccagggccaggaggccgctgtgatgatggaccagaaggccggcctgtatggccagacctacccagcccagggcccccccatgcagggcggcttccacctgcagggccagagccccagcttcaacagcatgatgaaccagatgaaccagcagggcaacttccccctgcagggcatgcacccccgggccaacatcatgaggcccaggaccaacacccccaagcagctgaggatgcagctgcagcagaggctgcagggccagcagttcctgaaccagagccggcaggccctggagctgaagatggagaaccccacagctgggggcgctgctgtgatgaggcccatgatgcagccccagcagggcttcctgaatgcccagatggtggcccagaggagccgggagctgctgagccaccacttccggcagcagagggtggccatgatgatgcagcagcagcagcagcagcagcagcagcagcagcagcagcagcagcagcagcagcagcagcagcagcagcagcagcagcagcagcagacccaggccttcagccccccaccaaatgtgacagccagccccagcatggatggcctgctggccggccccaccatgccccaggccccaccccagcagttcccctaccagcccaactacggcatgggccagcagcctgaccctgccttcggccgggtgagcagccccccaaatgccatgatgagcagcaggatgggccccagccagaaccccatgatgcagcacccccaggccgccagcatctaccagagcagcgagatgaagggctggcccagcggcaacctggccaggaacagcagcttcagccagcagcagtttgcccaccagggcaacccagctgtgtacagcatggtgcacatgaatggcagcagcggccacatgggccagatgaacatgaaccccatgcccatgagcggcatgcccatgggccctgaccagaagtactgctag

SEQ ID NO: 165997 - DNA, 774 bp, Artificial Sequence
  derived and/or modified sequence
atgatggaggagggggaggacctgcagagctgcatgatctgtgtggcccggcgcatcaccactggagagaggaccttccccagcaaccctgagagcttcatcaccaggcatgacctgagcggcaaggtggtgaacatcgacaccaacagcctgcggagctccatgaggcctggctttgaggacatcatccgccgctgcatccagcgcttcttcagcctgaatgatggccagagctggagccagaagaggcactaccaggaggcctacctgaatggacatgctgagacccctgtgtaccgcttcagcctggctgatggcaccatcgtgacagcccagaccaagagcaagctgttcagaaatcctgtgaccaatgacagacatggctttgtgtccacccacttcctgcagcgggagcagaatggctaccggcccaaccccaaccctgtgggccagggcatccggccccccatggccggctgcaacagctctgtgggcggcatgtccatgagccccaaccagggcctgcagatgcccagcagccgggcctacggcctggccgaccccagcaccaccggccagatgtctggggcccgctatggaggcagcagcaacatcgccagcctgaccccaggccctggcatgcagagccccagcagctaccagaacaacaactacggcctgaacatgagcagccccccccacggcagccctggcctggcccccaaccagcagaacatcatgatcctgctggtgattgtgggcgtgcagaggtag

SEQ ID NO: 165998 - DNA, 4263 bp, Artificial Sequence
  derived and/or modified sequence
atgagcggcctgggcgagaacctggaccccctggccagcgacagcagaaagcggaagttgccttgtgatacccctggacagggcttaacttgctccggcgagaaaaggagacgcgagcaggaaagcaaatatatcgaagaattggctgagctgattagtgccaacctgagcgacatcgataattttaacgtgaaaccggacaagtgcgccatccttaaggagaccgttcgccagatccgacagattaaggagcagggaaagacgatctctaacgacgacgatgttcagaaggcggatgtcagctctaccggccagggggttatcgacaaagactccctgggtcctctattattacaggcgcttgacggattcctattcgtggtgaaccgcgacggaaacatcgtgttcgtcagcgagaacgttacccagtacctacagtacaaacaggaagatttagtcaatacgtctgtctacaacattctgcacgaggaggatcggaaggacttcctgaagaacttgcccaagtcaaccgtgaacggggtttcatggactaacgaaacacaacgccagaagtcacacacattcaattgtagaatgttgatgaagactccccatgacatattggaagatatcaatgcttctccagagatgcggcagcgctatgagacaatgcagtgctttgctctgagtcaaccccgggccatgatggaggagggggaggatctgcagagctgtatgatctgcgtggctcgaaggataactacaggagaaaggactttcccaagtaaccccgaaagctttattactcgacacgacctgtctggaaaggtggttaacattgataccaattccctcagatcttccatgagaccgggatttgaagacatcattcgacggtgcatccagcggtttttttctttgaacgatgggcaatcgtggtcacagaaacgtcactaccaggaggcatacctgaacggacatgcagagacccccgtctacagatttagcttagcagatggcaccatagttacggcccaaaccaagtctaaactctttaggaatcctgtaacgaacgaccggcatgggttcgtctcaacccacttcttgcagagagagcagaatggctatcgcccaaatcctaaccctgtgggacagggcattagacccccaatggctggatgcaatagctctgtaggggggatgagcatgagcccaaatcagggcctgcagatgcctagtagccgcgcttacggtcttgccgacccatctaccacaggccaaatgagcggtgccagatatggcggaagtagcaacattgcctcgctcactccgggaccgggcatgcagtctccttctagctatcagaataacaattatggcttgaatatgtcatcacccccccatggatcaccggggctagctccaaaccagcaaaacattatgatttctcctcggaatcggggctcacccaaaatcgcttcccaccagttctcccctgtagctggggtacacagccccatggcaagctcgggcaacacaggaaaccacagttttagcagctcctctctctcagccttgcaggccatttcggagggcgtgggcactagcctgctaagcaccttgagcagtcccggcccaaagctagataactcgcccaatatgaacatcacacaaccttccaaggtttcaaatcaggatagcaagtcccctctggggttttactgtgatcagaatcccgttgaatcttctatgtgtcagtcgaactctcgcgaccacctaagcgataaagagagcaaggaatcatccgtggaaggcgcagaaaatcaacggggcccacttgagagcaagggccataagaagttactccagctgttgacctgtagctctgacgaccgcggtcactccagtcttacgaactccccactggattcttcctgcaaagaatcgtcagtgtccgtgaccagtccctccggcgtgtcctcatctactagcggaggtgtctcctccacaagcaacatgcacgggagcctgctgcaggagaagcaccgtattctgcacaaattgcttcaaaacggtaactcccccgccgaggttgccaagattacagctgaggccacaggaaaggacacttccagcatcaccagctgcggggacggaaacgtggtgaaacaggaacagcttagccctaagaagaaagaaaacaacgcactgctgcggtacctgctagaccgagacgacccgagcgacgcattaagcaaagagctccaaccccaggtcgagggtgtagacaataagatgagccagtgtacaagttctaccatccccagctcctcccaggaaaaggacccgaagatcaagaccgagacctcagaagagggatccggcgatttagataacctggatgctatcctgggtgatctgacaagcagcgatttttataataacagcatatccagcaacggaagtcatctgggaaccaaacagcaagtgtttcaagggaccaactctctgggactgaagtcttcacagtccgttcagagtattcgtccaccctacaatcgggccgtgagcctggactcccccgtaagtgtcggtagctcgcctcccgtaaagaatatcagcgccttccctatgcttcctaaacagcccatgctcggcggaaatcctcggatgatggactctcaggagaactatggatcttccatgggcggtcccaatcgaaatgtaactgtcactcagaccccttctagcggcgattggggcctcccaaattccaaggccggacgaatggagcccatgaactctaactcaatgggacggcccgggggagactacaacacctcccttcctagacctgcactgggcgggagcattcccaccctaccactgcgatctaattcaatccccggcgcaagacccgtgctccaacagcagcagcagatgctgcagatgcggcctggagagattcctatggggatgggggctaacccatatggccaggctgctgcatcaaaccagctgggaagttggccagacggaatgttaagcatggaacaggtctcccacggaacccagaaccgccctctcttgcggaacagcttggatgacctggtagggcccccctccaatctggagggacagagtgacgagcgcgcactgcttgaccaactgcacacccttctctctaatacagatgccactggtctggaggaaatcgacagagctctgggcatccctgagttggtgaaccaggggcaagcgctggaacctaaacaggacgcgtttcagggtcaggaggccgccgttatgatggaccagaaagctggactgtacggtcaaacctacccagcacagggcccccctatgcagggcgggttccatctgcagggtcagtcccccagctttaattctatgatgaatcagatgaaccagcaggggaattttccccttcagggcatgcacccgagagccaacatcatgagacctcggaccaatacacccaaacagcttcggatgcagctgcagcagaggttgcaggggcaacagttccttaatcagagccgccaagccctagagctgaagatggagaaccctacagcaggcggtgccgcggtcatgcgccctatgatgcagccacagcaggggttcctaaatgcccagatggtagcccagcgcagtcgcgagctactgtcccatcacttcaggcagcagagagtcgccatgatgatgcagcaacagcagcagcagcagcagcagcaacagcagcagcagcaacagcagcagcaacagcagcagcagcaacaacagcagcagcagacacaggctttttctcctccaccgaacgtcaccgcctctccttccatggatggtttgctggcggggccgaccatgccccaggctccaccacagcagtttccctaccagccaaactacgggatgggccagcagcctgaccccgcgtttggaagagtgagcagccccccaaatgctatgatgtcttccagaatgggccccagtcagaaccccatgatgcagcacccacaggcagcatcaatctaccagagttccgagatgaaaggctggccgagcggtaacctcgctagaaattcttccttcagccaacagcaattcgcccaccaaggcaacccggcggtttacagcatggtacacatgaacggatcgtccggacatatgggtcaaatgaatatgaaccccatgccaatgtccggaatgcctatgggccccgatcagaagtattgttag

SEQ ID NO: 165999 - DNA, 4263 bp, Artificial Sequence
  derived and/or modified sequence
atgagcggcctgggcgagaacctggaccccctggccagcgacagccgcaaacggaaactcccttgtgacacgcccggtcaagggctgacgtgcagtggcgagaaacgcagacgagagcaggagtctaagtacatagaagagctcgcagagctcatttctgctaatctctcagatattgataacttcaatgtcaaacctgataagtgcgctatcctgaaagaaacagtgagacagatcaggcagatcaaagagcaggggaaaacgatctctaatgacgacgatgttcagaaggcagatgtgagtagtactggccaaggagtgattgacaaggactcactgggaccactgctgctgcaggctctggacggttttctgttcgtagtgaacagagacggaaacatcgtgtttgtgagcgagaacgtgacacagtacctccaatacaagcaggaggatctggtcaataccagcgtgtacaatatcctgcacgaggaagatcggaaagattttttgaagaacctgcctaagagcacagtcaacggcgtaagttggacaaatgaaacacaacgccagaaatcccacacgttcaactgtcgtatgctgatgaaaaccccccacgatattctggaggatatcaatgcgagtcccgagatgaggcagaggtatgagacaatgcaatgctttgctctttcccagcctagggccatgatggaagaaggcgaggatcttcagagctgcatgatttgcgttgccaggaggatcaccaccggcgagcggactttcccaagcaatcccgagagctttataacgcgacacgatctgagtggcaaggtggtgaacattgacacgaattcactcagatcgtcaatgcggcccggcttcgaagacatcattaggaggtgcatccagcggttctttagtttgaatgatgggcagagttggagccaaaagcggcattaccaggaggcatatctcaacggacacgccgaaacccccgtgtatcgcttctcacttgctgatggtacaatcgtaaccgcacagaccaaatcaaagctcttccgaaaccctgttacaaacgataggcatggctttgtttccacccattttttacagcgggagcaaaatggctatcgccctaaccccaaccccgtaggccaaggcattcgaccaccaatggcagggtgtaattctagtgttggagggatgtctatgagccccaatcagggcctgcagatgccgtcaagtcgcgcatatggcttagccgacccatccaccactggacaaatgtcaggcgccaggtatggcggatcgtccaacatcgctagcctaacacctggacctggaatgcagagcccctcgagttaccaaaataataattatggactcaatatgtcgtctccaccgcacggcagccccgggctcgcgcctaatcaacaaaatatcatgatatcacctcgcaacagagggtcccccaagatagcttcacaccaatttagtccagttgccggggtccatagtcccatggcctcgtctggtaatactggtaaccattcttttagtagctcctctttatctgcattacaggcgatctctgaaggcgtgggaacctcactgctgtcgacactctcctctcctggccctaaacttgataatagcccaaatatgaatattacgcagcccagcaaggtgtccaaccaagattccaagtcaccattagggttttactgcgatcagaatcccgttgagtctagcatgtgccaatccaactcccgggaccacctgtcagataaagagtctaaagagtccagcgtcgaaggggcagaaaaccagcgagggccattggaatctaagggccacaagaaattgcttcagttactgacatgtagttccgatgacagaggtcattcttctcttaccaattcaccactggacagctcatgcaaggagagttccgttagcgtaacctccccatcaggtgtgtccagttccacatctggaggagtttctagcaccagcaacatgcacggcagtctgctacaggagaagcacaggattctccataagctgttacagaacggcaactctccagctgaagtggcaaagatcacagccgaggctactggcaaagacacaagctctattacttcatgcggtgacggcaacgttgtaaagcaggagcagctgtcccctaaaaagaaggagaacaatgcgctgttacgttacttgctagaccgggacgacccaagcgatgctctttccaaagaactgcagccgcaggtggagggagtggataataagatgagccagtgcacttcatccaccattccaagttccagtcaagaaaaagacccgaagatcaaaaccgaaacatcagaggaaggatctggagaccttgataacctggacgccatcctgggggatcttacctcgtctgacttttataacaacagcatttccagtaatgggtcgcacctgggtactaaacaacaggtattccagggtactaactcgctaggcttgaagtcctcccagtcagtgcaaagtatcagacctccttataatcgggctgtgtccctcgatagtcctgtgtccgtggggagctccccacctgtgaaaaacatctctgcattccctatgttgcctaaacaacctatgctgggtggaaacccacgcatgatggactctcaggaaaactacggcagctccatgggggggccgaatagaaacgtcactgtgacccagactccgagcagcggcgattggggcttgcccaatagcaaggctgggaggatggagcctatgaattccaattcaatgggacggcccggcggagattacaatacgtccctgccacggccagccctgggaggttcgattccgaccctcccattgagaagcaacagcattcctggggccagacctgtgctccagcagcaacagcaaatgcttcaaatgcgccctggggagatccctatgggcatgggcgcgaatccctatgggcaggccgccgcctccaatcagctcggctcctggcctgatggaatgttgtctatggaacaagttagccatggcacccaaaataggccgctgctgcggaattcattggatgaccttgtcggcccaccgagtaatctcgaaggccagagcgacgagagggcactcttagaccagctccacactttgctctcaaacaccgatgctacaggactggaagagatcgacagggctttggggatacccgagctggtgaaccagggtcaggcgttagagccgaaacaggacgcttttcaggggcaggaggcagccgtcatgatggaccagaaggcaggtttgtacggacagacatacccagcacagggtccacctatgcagggcgggttccacctccaggggcagtccccctcctttaatagcatgatgaatcaaatgaatcaacaggggaattttcccctccaggggatgcatccacgggccaacatcatgcgcccccgcaccaatacgcctaagcaactccggatgcaactacaacagagacttcaggggcagcagttcctaaatcagtcacgtcaagcactggaactgaaaatggagaatcctaccgcaggcggagctgcagtaatgagacccatgatgcagccccagcagggatttcttaatgcacaaatggtcgcacagagaagtcgcgagcttctctcgcatcatttcaggcagcagagagtggcaatgatgatgcaacagcagcaacagcagcagcagcagcagcagcaacagcagcagcagcagcaacaacagcagcagcagcagcagcagcagcaacagactcaggccttctcacccccaccaaatgttactgcttcccctagcatggacggtctgctggccggacccactatgccccaggcacctccgcagcaattcccgtaccagccaaactacggaatgggacaacagcctgaccccgcatttggacgtgtgagctcccctccgaacgctatgatgagcagtcgtatgggtccttcccagaacccaatgatgcagcatccacaggccgcaagcatctaccaatcttccgagatgaagggctggccaagtggaaacctggcgagaaattcctctttctctcagcagcagttcgctcaccaggggaaccccgcagtatacagtatggtccatatgaacggctcctcagggcacatgggtcagatgaatatgaaccctatgcctatgtcaggcatgccaatggggcctgatcaaaagtattgttag

SEQ ID NO: 166000 - DNA, 774 bp, Artificial Sequence
  derived and/or modified sequence
atgatggaggagggcgaggacctgcagagctgcatgatctgcgtggcgaggaggattacaaccggcgaaagaactttcccaagtaatccggagagcttcataacccgccacgacctatcaggcaaggtagttaatattgacaccaattctctacgttccagcatgcgaccgggcttcgaggacattattaggcgctgcattcaacgcttctttagcctcaacgacggtcagtcatggagccagaaaagacactaccaggaggcctaccttaacgggcatgccgagactccagtctacagatttagtctcgccgatggcaccatcgtcactgcacagacaaagtcaaagttatttcgtaacccagttacaaatgacaggcatggcttcgtgagcacacatttcctgcagcgcgaacagaacgggtacaggccaaaccccaatcccgtgggacaaggtatccggccaccgatggccgggtgcaattcgagcgtaggaggaatgtccatgtcgccgaatcaaggactgcagatgccttccagccgcgcgtatggcctggctgacccctcaacaacaggacaaatgagcggtgccaggtacggcggctcctcaaacattgctagcctgacaccggggccaggcatgcagagcccatcaagctatcagaacaacaattatggtctaaacatgagctccccaccacacggatcgcccggcctagcccccaaccagcaaaacattatgattctactggtcatcgtgggcgtacaaagatag

SEQ ID NO: 166001 - DNA, 7984 bp, Artificial Sequence
  derived and/or modified sequence
atatcccagtggcccccgtgcggcgactttagctgctgctgtctcagccgctccacagcgacggcagcggctgcggcttagtcggtggcggccggcggcggctgcgggctgagcggcgagtttccgatttaaagctgagctgcgaggaaaatggcggcgggaggatcaaaatacttgctggatggtggactcagagaccaataaaaataaactgcttgaacatcctttgactggttagccagttgctgatgtatattcaagatgagtggattaggagaaaacttggatccactggccagtgattcacgaaaacgcaaattgccatgtgatactccaggacaaggtcttacctgcagtggtgaaaaacggagacgggagcaggaaagtaaatatattgaagaattggctgagctgatatctgccaatcttagtgatattgacaatttcaatgtcaaaccagataaatgtgcgattttaaaggaaacagtaagacagatacgtcaaataaaagagcaaggaaaaactatttccaatgatgatgatgttcaaaaagccgatgtatcttctacagggcagggagttattgataaagactccttaggaccgcttttacttcaggcattggatggtttcctatttgtggtgaatcgagacggaaacattgtatttgtatcagaaaatgtcacacaatacctgcaatataagcaagaggacctggttaacacaagtgtttacaatatcttacatgaagaagacagaaaggattttcttaagaatttaccaaaatctacagttaatggagtttcctggacaaatgagacccaaagacaaaaaagccatacatttaattgccgtatgttgatgaaaacaccacatgatattctggaagacataaacgccagtcctgaaatgcgccagagatatgaaacaatgcagtgctttgccctgtctcagccacgagctatgatggaggaaggggaagatttgcaatcttgtatgatctgtgtggcacgccgcattactacaggagaaagaacatttccatcaaaccctgagagctttattaccagacatgatctttcaggaaaggttgtcaatatagatacaaattcactgagatcctccatgaggcctggctttgaagatataatccgaaggtgtattcagagattttttagtctaaatgatgggcagtcatggtcccagaaacgtcactatcaagaagcttatcttaatggccatgcagaaaccccagtatatcgattctcgttggctgatggaactatagtgactgcacagacaaaaagcaaactcttccgaaatcctgtaacaaatgatcgacatggctttgtctcaacccacttccttcagagagaacagaatggatatagaccaaacccaaatcctgttggacaagggattagaccacctatggctggatgcaacagttcggtaggcggcatgagtatgtcgccaaaccaaggcttacagatgccgagcagcagggcctatggcttggcagaccctagcaccacagggcagatgagtggagctaggtatgggggttccagtaacatagcttcattgacccctgggccaggcatgcaatcaccatcttcctaccagaacaacaactatgggctcaacatgagtagccccccacatgggagtcctggtcttgccccaaaccagcagaatatcatgatttctcctcgtaatcgtgggagtccaaagatagcctcacatcagttttctcctgttgcaggtgtgcactctcccatggcatcttctggcaatactgggaaccacagcttttccagcagctctctcagtgccctgcaagccatcagtgaaggtgtggggacttcccttttatctactctgtcatcaccaggccccaaattggataactctcccaatatgaatattacccaaccaagtaaagtaagcaatcaggattccaagagtcctctgggcttttattgcgaccaaaatccagtggagagttcaatgtgtcagtcaaatagcagagatcacctcagtgacaaagaaagtaaggagagcagtgttgagggggcagagaatcaaaggggtcctttggaaagcaaaggtcataaaaaattactgcagttacttacctgttcttctgatgaccggggtcattcctccttgaccaactcccccctagattcaagttgtaaagaatcttctgttagtgtcaccagcccctctggagtctcctcctctacatctggaggagtatcctctacatccaatatgcatgggtcactgttacaagagaagcaccggattttgcacaagttgctgcagaatgggaattcaccagctgaggtagccaagattactgcagaagccactgggaaagacaccagcagtataacttcttgtggggacggaaatgttgtcaagcaggagcagctaagtcctaagaagaaggagaataatgcacttcttagatacctgctggacagggatgatcctagtgatgcactctctaaagaactacagccccaagtggaaggagtggataataaaatgagtcagtgcaccagctccaccattcctagctcaagtcaagagaaagaccctaaaattaagacagagacaagtgaagagggatctggagacttggataatctagatgctattcttggtgatctgactagttctgacttttacaataattccatatcctcaaatggtagtcatctggggactaagcaacaggtgtttcaaggaactaattctctgggtttgaaaagttcacagtctgtgcagtctattcgtcctccatataaccgagcagtgtctctggatagccctgtttctgttggctcaagtcctccagtaaaaaatatcagtgctttccccatgttaccaaagcaacccatgttgggtgggaatccaagaatgatggatagtcaggaaaattatggctcaagtatgggtgggccaaaccgaaatgtgactgtgactcagactccttcctcaggagactggggcttaccaaactcaaaggccggcagaatggaacctatgaattcaaactccatgggaagaccaggaggagattataatacttctttacccagacctgcactgggtggctctattcccacattgcctcttcggtctaatagcataccaggtgcgagaccagtattgcaacagcagcagcagatgcttcaaatgaggcctggtgaaatccccatgggaatgggggctaatccctatggccaagcagcagcatctaaccaactgggttcctggcccgatggcatgttgtccatggaacaagtttctcatggcactcaaaataggcctcttcttaggaattccctggatgatcttgttgggccaccttccaacctggaaggccagagtgacgaaagagcattattggaccagctgcacactcttctcagcaacacagatgccacaggcctggaagaaattgacagagctttgggcattcctgaacttgtcaatcagggacaggcattagagcccaaacaggatgctttccaaggccaagaagcagcagtaatgatggatcagaaggcaggattatatggacagacatacccagcacaggggcctccaatgcaaggaggctttcatcttcagggacaatcaccatcttttaactctatgatgaatcagatgaaccagcaaggcaattttcctctccaaggaatgcacccacgagccaacatcatgagaccccggacaaacacccccaagcaacttagaatgcagcttcagcagaggctgcagggccagcagtttttgaatcagagccgacaggcacttgaattgaaaatggaaaaccctactgctggtggtgctgcggtgatgaggcctatgatgcagccccagcagggttttcttaatgctcaaatggtcgcccaacgcagcagagagctgctaagtcatcacttccgacaacagagggtggctatgatgatgcagcagcagcagcagcagcaacagcagcagcagcagcagcagcagcagcaacagcaacagcaacagcaacagcagcaacagcagcaaacccaggccttcagcccacctcctaatgtgactgcttcccccagcatggatgggcttttggcaggacccacaatgccacaagctcctccgcaacagtttccatatcaaccaaattatggaatgggacaacaaccagatccagcctttggtcgagtgtctagtcctcccaatgcaatgatgtcgtcaagaatgggtccctcccagaatcccatgatgcaacacccgcaggctgcatccatctatcagtcctcagaaatgaagggctggccatcaggaaatttggccaggaacagctccttttcccagcagcagtttgcccaccaggggaatcctgcagtgtatagtatggtgcacatgaatggcagcagtggtcacatgggacagatgaacatgaaccccatgcccatgtctggcatgcctatgggtcctgatcagaaatactgctgacatctctgcaccaggacctcttaaggaaaccactgtacaaatgacactgcactaggattattgggaaggaatcattgttccaggcatccatcttggaagaaaggaccagctttgagctccatcaagggtattttaagtgatgtcatttgagcaggactggattttaagccgaagggcaatatctacgtgtttttcccccctccttctgctgtgtatcatggtgttcaaaacagaaatgttttttggcattccacctcctagggatataattctggagacatggagtgttactgatcataaaacttttgtgtcacttttttctgccttgctagccaaaatctcttaaatacacgtaggtgggccagagaacattggaagaatcaagagagattagaatatctggtttctctagttgcagtattggacaaagagcatagtcccagccttcaggtgtagtagttctgtgttgaccctttgtccagtggaattggtgattctgaattgtcctttactaatggtgttgagttgctctgtccctattatttgccctaggctttctcctaatgaaggttttcatttgccattcatgtcctgtaatacttcacctccaggaactgtcatggatgtccaaatggctttgcagaaaggaaatgagatgacagtatttaatcgcagcagtagcaaacttttcacatgctaatgtgcagctgagtgcactttatttaaaaagaatggataaatgcaatattcttgaggtcttgagggaatagtgaaacacattcctggtttttgcctacacttacgtgttagacaagaactatgatttttttttttaaagtactggtgtcaccctttgcctatatggtagagcaataatgctttttaaaaataaacttctgaaaacccaaggccaggtactgcattctgaatcagaatctcgcagtgtttctgtgaatagatttttttgtaaatatgacctttaagatattgtattatgtaaaatatgtatatacctttttttgtaggtcacaacaactcatttttacagagtttgtgaagctaaatatttaacattgttgatttcagtaagctgtgtggtgaggctaccagtggaagagacatcccttgacttttgtggcctgggggaggggtagtgctccacagcttttccttccccaccccccagccttagatgcctcgctcttttcaatctcttaatctaaatgctttttaaagagattatttgtttagatgtaggcattttaattttttaaaaattcctctaccagaactaagcactttgttaatttggggggaaagaatagatatggggaaataaacttaaaaaaaaatcaggaatttaaaaaaacgagcaatttgaagagaatcttttggattttaagcagtccgaaataatagcaattcatgggctgtgtgtgtgtgtgtatgtgtgtgtgtgtgtgtgtatgtttaattatgttaccttttcatcccctttaggagcgttttcagattttggttgctaagacctgaatcccatattgagatctcgagtagaatccttggtgtggtttctggtgtctgctcagctgtcccctcattctactaatgtgatgctttcattatgtccctgtggattagaatagtgtcagttatttcttaagtaactcagtacccagaacagccagttttactgtgattcagagccacagtctaactgagcaccttttaaacccctccctcttctgccccctaccacttttctgctgttgcctctctttgacacctgttttagtcagttgggaggaagggaaaaatcaagtttaattccctttatctgggttaattcatttggttcaaatagttgacggaattgggtttctgaatgtctgtgaatttcagaggtctctgctagccttggtatcattttctagcaataactgagagccagttaattttaagaatttcacacatttagccaatctttctagatgtctctgaaggtaagatcatttaatatctttgatatgcttacgagtaagtgaatcctgattatttccagacccaccaccagagtggatcttattttcaaagcagtatagacaattatgagtttgccctctttcccctaccaagttcaaaatatatctaagaaagattgtaaatccgaaaacttccattgtagtggcctgtgcttttcagatagtatactctcctgtttggagacagaggaagaaccaggtcagtctgtctctttttcagctcaattgtatctgacccttctttaagttatgtgtgtggggagaaatagaatggtgctcttatctttcttgactttaaaaaaattattaaaaacaaaaaaaaaataaatttttttgcaatcctttcctcagacctggctccaggctaactggaaggcagcactcccttttttatatagtagaaaaatgaagtttattataagtttttatattttctacttgttcatttggtgcaaactcaagatttcttttaataggtgcagtctttgagataatttgtttttacctgtattgccctttatcttttttaggtaattctttgtactcctgctgtctacctctcctcacaccccagcaccccccattttttcaaaccttggtatctgttgggtgaacagtataatcttttcatctgcttttagaatgtgggatatttccagtacctactttttttttttttttttgctgaatccaaagatatataaataaaatatatatattttataaagatcagaatgatataaaggagatacatgtttcttcctttaaaaaataaacggaagttacattgttaatgttcatattatgatgccacttttctaaactgcatctggattgaaaggtgtaaatatcaataacagtgctacttagttatcagtatttaatatctgaggtgagttgggggtatctatattaggggtagggtattacagaagataattggcttgatgtcctagaagttctttgatccagaggtgggtgcagctgaaagtaaacagaatggattgccagttacatgtatgcctgcccagttccctttttatttgcagaagctgtgagttttgttcacaattaggttcctaggagcaaaacctcaaggattgatttattgttttcaactccaaggcacactgttaataaacgagcagggtgttttctctcttcctttctaatatatggagtttcgaagaataaaatatgagagcaatatttaaattctcaggaattgacttatactcttgagaatgaattcagtttcaatcaagtttacattatgttgcttaaaaaaatagaaattattctttatcttgcaaagaattgaaaccacatgaaatgacttatgggggatggtgagctgtgactgctttgctgaccattttggatgtcattgtaaataaaggtttctatttaaaattgga

SEQ ID NO: 166002 - DNA, 6851 bp, Artificial Sequence
  derived and/or modified sequence
agccgctccacagcgacggcagcggctgcggcttagtcggtggcggccggcggcggctgcgggctgagcggcgagtttccgatttaaagctgagctgcgaggaaaatggcggcgggaggatcaaaatacttgctggatggtggactcagagaccaataaaaataaactgcttgaacatcctttgactggttagccagagttgctgatgtatattcaagatgagtggattaggagaaaacttggatccactggccagtgattcacgaaaacgcaaattgccatgtgatactccaggacaaggtcttacctgcagtggtgaaaaacggagacgggagcaggaaagtaaatatattgaagaattggctgagctgatatctgccaatcttagtgatattgacaatttcaatgtcaaaccagataaatgtgcgattttaaaggaaacagtaagacagatacgtcaaataaaagagcaaggaaaaactatttccaatgatgatgatgttcaaaaagccgatgtatcttctacagggcagggagttattgataaagactccttaggaccgcttttacttcaggcattggatggtttcctatttgtggtgaatcgagacggaaacattgtatttgtatcagaaaatgtcacacaatacctgcaatataagcaagaggacctggttaacacaagtgtttacaatatcttacatgaagaagacagaaaggattttcttaagaatttaccaaaatctacagttaatggagtttcctggacaaatgagacccaaagacaaaaaagccatacatttaattgccgtatgttgatgaaaacaccacatgatattctggaagacataaacgccagtcctgaaatgcgccagagatatgaaacaatgcagtgctttgccctgtctcagccacgagctatgatggaggaaggggaagatttgcaatcttgtatgatctgtgtggcacgccgcattactacaggagaaagaacatttccatcaaaccctgagagctttattaccagacatgatctttcaggaaaggttgtcaatatagatacaaattcactgagatcctccatgaggcctggctttgaagatataatccgaaggtgtattcagagattttttagtctaaatgatgggcagtcatggtcccagaaacgtcactatcaagaagcttatcttaatggccatgcagaaaccccagtatatcgattctcgttggctgatggaactatagtgactgcacagacaaaaagcaaactcttccgaaatcctgtaacaaatgatcgacatggctttgtctcaacccacttccttcagagagaacagaatggatatagaccaaacccaaatcctgttggacaagggattagaccacctatggctggatgcaacagttcggtaggcggcatgagtatgtcgccaaaccaaggcttacagatgccgagcagcagggcctatggcttggcagaccctagcaccacagggcagatgagtggagctaggtatgggggttccagtaacatagcttcattgacccctgggccaggcatgcaatcaccatcttcctaccagaacaacaactatgggctcaacatgagtagccccccacatgggagtcctggtcttgccccaaaccagcagaatatcatgatttctcctcgtaatcgtgggagtccaaagatagcctcacatcagttttctcctgttgcaggtgtgcactctcccatggcatcttctggcaatactgggaaccacagcttttccagcagctctctcagtgccctgcaagccatcagtgaaggtgtggggacttcccttttatctactctgtcatcaccaggccccaaattggataactctcccaatatgaatattacccaaccaagtaaagtaagcaatcaggattccaagagtcctctgggcttttattgcgaccaaaatccagtggagagttcaatgtgtcagtcaaatagcagagatcacctcagtgacaaagaaagtaaggagagcagtgttgagggggcagagaatcaaaggggtcctttggaaagcaaaggtcataaaaaattactgcagttacttacctgttcttctgatgaccggggtcattcctccttgaccaactcccccctagattcaagttgtaaagaatcttctgttagtgtcaccagcccctctggagtctcctcctctacatctggaggagtatcctctacatccaatatgcatgggtcactgttacaagagaagcaccggattttgcacaagttgctgcagaatgggaattcaccagctgaggtagccaagattactgcagaagccactgggaaagacaccagcagtataacttcttgtggggacggaaatgttgtcaagcaggagcagctaagtcctaagaagaaggagaataatgcacttcttagatacctgctggacagggatgatcctagtgatgcactctctaaagaactacagccccaagtggaaggagtggataataaaatgagtcagtgcaccagctccaccattcctagctcaagtcaagagaaagaccctaaaattaagacagagacaagtgaagagggatctggagacttggataatctagatgctattcttggtgatctgactagttctgacttttacaataattccatatcctcaaatggtagtcatctggggactaagcaacaggtgtttcaaggaactaattctctgggtttgaaaagttcacagtctgtgcagtctattcgtcctccatataaccgagcagtgtctctggatagccctgtttctgttggctcaagtcctccagtaaaaaatatcagtgctttccccatgttaccaaagcaacccatgttgggtgggaatccaagaatgatggatagtcaggaaaattatggctcaagtatgggtgggccaaaccgaaatgtgactgtgactcagactccttcctcaggagactggggcttaccaaactcaaaggccggcagaatggaacctatgaattcaaactccatgggaagaccaggaggagattataatacttctttacccagacctgcactgggtggctctattcccacattgcctcttcggtctaatagcataccaggtgcgagaccagtattgcaacagcagcagcagatgcttcaaatgaggcctggtgaaatccccatgggaatgggggctaatccctatggccaagcagcagcatctaaccaactgggttcctggcccgatggcatgttgtccatggaacaagtttctcatggcactcaaaataggcctcttcttaggaattccctggatgatcttgttgggccaccttccaacctggaaggccagagtgacgaaagagcattattggaccagctgcacactcttctcagcaacacagatgccacaggcctggaagaaattgacagagctttgggcattcctgaacttgtcaatcagggacaggcattagagcccaaacaggatgctttccaaggccaagaagcagcagtaatgatggatcagaaggcaggattatatggacagacatacccagcacaggggcctccaatgcaaggaggctttcatcttcagggacaatcaccatcttttaactctatgatgaatcagatgaaccagcaaggcaattttcctctccaaggaatgcacccacgagccaacatcatgagaccccggacaaacacccccaagcaacttagaatgcagcttcagcagaggctgcagggccagcagtttttgaatcagagccgacaggcacttgaattgaaaatggaaaaccctactgctggtggtgctgcggtgatgaggcctatgatgcagccccagcagggttttcttaatgctcaaatggtcgcccaacgcagcagagagctgctaagtcatcacttccgacaacagagggtggctatgatgatgcagcagcagcagcagcagcaacagcagcagcagcagcagcagcagcagcaacagcaacagcaacagcaacagcagcaacagcagcaaacccaggccttcagcccacctcctaatgtgactgcttcccccagcatggatgggcttttggcaggacccacaatgccacaagctcctccgcaacagtttccatatcaaccaaattatggaatgggacaacaaccagatccagcctttggtcgagtgtctagtcctcccaatgcaatgatgtcgtcaagaatgggtccctcccagaatcccatgatgcaacacccgcaggctgcatccatctatcagtcctcagaaatgaagggctggccatcaggaaatttggccaggaacagctccttttcccagcagcagtttgcccaccaggggaatcctgcagtgtatagtatggtgcacatgaatggcagcagtggtcacatgggacagatgaacatgaaccccatgcccatgtctggcatgcctatgggtcctgatcagaaatactgctgacatctctgcaccaggacctcttaaggaaaccactgtacaaatgacactgcactaggattattgggaaggaatcattgttccaggcatccatcttggaagaaaggaccagctttgagctccatcaagggtattttaagtgatgtcatttgagcaggactggattttaagccgaagggcaatatctacgtgtttttcccccctccttctgctgtgtatcatggtgttcaaaacagaaatgttttttggcattccacctcctagggatataattctggagacatggagtgttactgatcataaaacttttgtgtcacttttttctgccttgctagccaaaatctcttaaatacacgtaggtgggccagagaacattggaagaatcaagagagattagaatatctggtttctctagttgcagtattggacaaagagcatagtcccagccttcaggtgtagtagttctgtgttgaccctttgtccagtggaattggtgattctgaattgtcctttactaatggtgttgagttgctctgtccctattatttgccctaggctttctcctaatgaaggttttcatttgccattcatgtcctgtaatacttcacctccaggaactgtcatggatgtccaaatggctttgcagaaaggaaatgagatgacagtatttaatcgcagcagtagcaaacttttcacatgctaatgtgcagctgagtgcactttatttaaaaagaatggataaatgcaatattcttgaggtcttgagggaatagtgaaacacattcctggtttttgcctacacttacgtgttagacaagaactatgatttttttttttaaagtactggtgtcaccctttgcctatatggtagagcaataatgctttttaaaaataaacttctgaaaacccaaggccaggtactgcattctgaatcagaatctcgcagtgtttctgtgaatagatttttttgtaaatatgacctttaagatattgtattatgtaaaatatgtatatacctttttttgtaggtcacaacaactcatttttacagagtttgtgaagctaaatatttaacattgttgatttcagtaagctgtgtggtgaggctaccagtggaagagacatcccttgacttttgtggcctgggggaggggtagtgctccacagcttttccttccccaccccccagccttagatgcctcgctcttttcaatctcttaatctaaatgctttttaaagagattatttgtttagatgtaggcattttaattttttaaaaattcctctaccagaactaagcactttgttaatttggggggaaagaatagatatggggaaataaacttaaaaaaaaatcaggaatttaaaaaaacgagcaatttgaagagaatcttttggattttaagcagtccgaaataatagcaattcatgggctgtgtgtgtgtgtgtatgtgtgtgtgtgtgtgtgtatgtttaattatgttaccttttcatcccctttaggagcgttttcagattttggttgctaagacctgaatcccatattgagatctcgagtagaatccttggtgtggtttctggtgtctgctcagctgtcccctcattctactaatgtgatgctttcattatgtccctgtggattagaatagtgtcagttatttcttaagtaactcagtacccagaacagccagttttactgtgattcagagccacagtctaactgagcaccttttaaacccctccctcttctgccccctaccacttttctgctgttgcctctctttgacacctgttttagtcagttgggaggaagggaaaaatcaagtttaattccctttatctgggttaattcatttggttcaaatagttgacggaattgggtttctgaatgtctgtgaatttcagaggtctctgctagccttggtatcattttctagcaataactgagagccagttaattttaagaatttcacacatttagccaatctttctagatgtctctgaaggtaagatcatttaatatctttgatatgcttacgagtaagtgaatcctgattatttccagacccaccaccagagtggatcttattttcaaagcagtatagacaattatgagtttgccctctttcccctaccaagttcaaaatatatctaagaaagattgtaaatccgaaaacttccattgtagtggcctgtgcttttcagatagtatactctcctgtttggagacagaggaagaaccaggtcagtctgtctctttttcagctcaattgtatctgacccttctttaagttatgtgtgtggggagaaatagaatggtgctcttatctttcttgactttaaaaaaattattaaaaacaaaaaaaaaataaa

SEQ ID NO: 166003 - DNA, 1016 bp, Artificial Sequence
  derived and/or modified sequence
ctttgccctgtctcagccacgagctatgatggaggaaggggaagatttgcaatcttgtatgatctgtgtggcacgccgcattactacaggagaaagaacatttccatcaaaccctgagagctttattaccagacatgatctttcaggaaaggttgtcaatatagatacaaattcactgagatcctccatgaggcctggctttgaagatataatccgaaggtgtattcagagattttttagtctaaatgatgggcagtcatggtcccagaaacgtcactatcaagaagcttatcttaatggccatgcagaaaccccagtatatcgattctcgttggctgatggaactatagtgactgcacagacaaaaagcaaactcttccgaaatcctgtaacaaatgatcgacatggctttgtctcaacccacttccttcagagagaacagaatggatatagaccaaacccaaatcctgttggacaagggattagaccacctatggctggatgcaacagttcggtaggcggcatgagtatgtcgccaaaccaaggcttacagatgccgagcagcagggcctatggcttggcagaccctagcaccacagggcagatgagtggagctaggtatgggggttccagtaacatagcttcattgacccctgggccaggcatgcaatcaccatcttcctaccagaacaacaactatgggctcaacatgagtagccccccacatgggagtcctggtcttgccccaaaccagcagaatatcatgattctcctcgtaatcgtgggagtccaaagatagcctcacatcagttttctcctgttgcaggtgtgcactctcccatggcatcttctggcaatactgggaaccacagcttttccagcagctctctcagtgccctgcaagccatcagtgaaggtgtggggacttcccttttatctactctgtcatcaccaggccccaaattggataactctcccaatatgaatattacccaaccaagtaaagtaagcaatca

SEQ ID NO: 166004 - DNA, 4263 bp, Artificial Sequence
  derived and/or modified sequence
atgtcaggattgggagagaatctcgacccccttgctagtgattctcggaagcggaagctaccgtgcgatacccctggacaaggcctgacctgcagcggagaaaaaaggaggagggaacaggaaagcaaatatattgaggagcttgccgaacttatatccgccaacctgtctgatatcgacaactttaacgtcaagccggacaaatgcgccatcctgaaggagaccgtacgccaaattcggcagatcaaggagcagggaaagacaatatctaacgacgacgatgttcagaaagccgatgtgtcttctaccgggcagggcgtaatcgataaagactccctcggaccgttacttctccaagccctcgacggctttctcttcgtggtgaatcgtgacgggaatattgtcttcgtgtctgagaacgtgacccagtacctccaatacaagcaggaagatctcgtgaacacctctgtttacaacatcctgcacgaagaggaccgaaaagactttctgaaaaatctccccaagagcaccgtgaacggagtctcctggactaacgaaacacagaggcagaaatcccacacgtttaactgcaggatgttgatgaaaaccccccatgacatcctcgaagacattaatgcaagtcccgagatgcggcagcggtatgaaaccatgcagtgttttgcgttgagtcagccacgagccatgatggaagaaggggaggacctccaaagttgcatgatctgcgttgcccgtcgaattactaccggggagcgcacatttcctagcaatcccgaatcttttattacgcgccacgacctgagtgggaaggtcgtgaatatcgatacaaactcactcagatcctctatgcgacccggatttgaagatattattcgcagatgtatccagcgttttttctcattgaacgatggccagtcctggtcacaaaagcgccattatcaagaagcctatctcaacggccatgcagagacccctgtgtacagattttccctcgccgacggcacaatagttaccgctcagactaagtccaaactgtttcgcaatcccgtgaccaatgatcggcacggattcgtgagcacccacttcctccagagagagcagaatggctacaggccaaatcccaacccagtggggcaaggtatccggcctcccatggccggttgcaacagcagtgtaggcggaatgtccatgtcccccaatcaagggttacagatgccatcgagccgggcttatggtcttgctgacccatctacaacaggccagatgagtggagccaggtatggaggctcgtccaacatcgcttctcttacccccggtccgggtatgcaaagccccagcagctaccagaataataactacggactaaatatgagtagcccgccacacggcagcccaggtctggccccaaaccagcagaatataatgatttcccctcgtaaccggggttctcctaagattgcttcacatcagtttagccccgtggcaggtgtgcactctcccatggcgtcttctgggaacaccggaaatcactcttttagctccagcagtctttccgccctccaggcgatttcagagggcgtcggcacatctttgctgagcacattgtccagccctggccctaagctcgacaacagtcccaatatgaacattactcagccttccaaagtaagcaaccaggactctaaatctccactgggtttttactgtgaccagaatccagttgagtcatccatgtgccagtcaaactcgagggatcacctgagcgacaaagaatctaaggagtcctctgtagaaggcgcagagaatcaacgtggacccctcgaatcaaagggacacaaaaagctcctccagttactgacatgctccagcgacgatcggggacatagctctttaacaaattcccccttggactccagttgcaaagaaagtagcgtttcagtgacgagcccatccggggtgagctcatcgaccagcgggggagtctcttcgacctcaaacatgcatggatcactgcttcaggagaaacataggatccttcacaaactattacagaacgggaatagcccggcagaagtagctaaaattactgctgaggctacaggcaaggatacctcttctatcacttcatgcggcgatggaaatgtggtgaagcaagaacagctgagcccaaaaaaaaaagagaacaatgccctgctacggtatttgctcgatcgtgatgatccttctgatgccctgtctaaagagcttcaacctcaggtagagggcgtcgataacaaaatgagtcagtgcacttcctccacaatcccctcttcatctcaagagaaggatcccaagatcaagactgagacttccgaggagggaagtggcgacctggataacttggatgctattcttggagacttgacctcctcggatttctacaataacagcattagctcaaatggctcccatttaggcaccaagcagcaagtgttccagggcacaaacagcctaggtctcaagtcctcccagtctgtccagtctattaggcctccatataatagggcagtgtcgttagattctccagttagtgtcggctcctcgccccctgtaaagaacatcagcgcttttcctatgctccccaaacaacctatgttgggcggtaatcccagaatgatggattctcaggagaactatggaagcagcatggggggacctaatcgcaatgtgacagtaacccagactccaagctcaggcgattgggggctgcctaatagcaaggcgggacggatggagcccatgaactcaaatagcatgggcagaccaggaggggattacaacactagtctgccccgtcccgctttgggaggctcaatcccaacactgcctctgcgcagtaacagcatcccgggagcgcgacccgttttacagcaacagcagcagatgctgcagatgagacctggagagattcccatggggatgggggcaaacccctacggccaggcagcggcttcaaaccagctgggcagctggcctgacggtatgctctctatggaacaagtgtcccacggaacccagaacagaccacttctgcggaattctctggacgacctggtgggccctccttccaacctggaaggacagtcagatgaaagggccctcttggaccagctccacaccctgctgtcgaacaccgatgccactggtctggaagagatagatcgtgcccttggcatccccgagctcgttaaccagggacaggctctggaacctaaacaagatgcatttcagggtcaggaagctgctgtcatgatggatcaaaaggccggactgtatggccagacatatcccgctcaaggacctccaatgcagggaggatttcacctccagggtcagtctccctcatttaacagcatgatgaaccagatgaaccaacaggggaactttcccttacagggtatgcacccaagggctaacattatgaggcctaggacaaatacacccaagcagctgcgcatgcagctccagcaacggctccaaggccagcagttcctgaatcaatctagacaggctctggaactgaagatggaaaaccccactgcgggaggcgctgccgttatgagacccatgatgcagccccagcaagggtttctaaacgctcagatggtcgcccagagaagcagggaattgcttagccaccactttcgacagcagcgcgtggcaatgatgatgcaacagcaacaacagcaacaacaacagcagcagcagcagcagcagcaacagcagcagcagcaacagcaacaacaacagcaacagcaaacgcaggcattctctccaccccctaacgttaccgcgagcccgtccatggatggactgctggctggacctaccatgcctcaggctcccccacaacagtttccctatcagcccaattacggaatgggccagcagcccgatcccgctttcggaagagtgagttctccccctaatgcaatgatgtcgtccagaatgggaccaagccagaatccaatgatgcagcatccacaagcagcctcgatctaccagtcaagcgagatgaaaggctggcccagtggcaacctggcccgaaatagctccttcagccagcagcagtttgctcatcaagggaaccccgctgtttactcaatggtgcacatgaatggcagctccggccatatgggtcaaatgaacatgaaccctatgccaatgtccggcatgcccatgggaccagaccaaaagtattgttag

SEQ ID NO: 166005 - DNA, 4263 bp, Artificial Sequence
  derived and/or modified sequence
atgtcagggctgggtgagaatctggatccactggcctctgactcccgaaaacgcaagcttccttgtgatacgccaggtcagggtcttacatgcagcggagagaagcgaagacgcgagcaggagagcaaatacattgaagagttggcggagctgatctccgctaacttgtcagacattgacaacttcaatgtcaaaccagataaatgtgccattctgaaggagaccgtcagacagatacgccagattaaagagcagggcaagaccatttcaaatgacgacgacgtccaaaaggctgatgtttcctcaaccggacagggtgtcatcgataaggactccctgggcccactcttacttcaggcgcttgacggcttcttgtttgttgtcaaccgggatggtaacatcgtttttgtgagtgagaatgtgacgcagtatctgcagtataagcaggaggaccttgtgaatacaagcgtgtacaatattctgcacgaggaggacaggaaagattttctgaagaaccttcccaaatctactgtgaatggggtgagttggactaacgagacacagagacaaaagtcacacacctttaactgtaggatgctgatgaagacccctcacgatatcctggaggacatcaatgcttcgcccgagatgaggcagcgctatgagaccatgcaatgtttcgccctttcgcagccaagggcaatgatggaggagggcgaagatctgcagagttgtatgatctgtgtagcccgaagaataaccacaggggagagaacgttcccctccaatcccgagtcttttatcacccggcatgaccttagcggaaaagttgtcaacattgacacaaattcactacgatcgtcgatgcggcctggctttgaagacatcattcgcaggtgtatacagcgattcttcagtctgaacgacggacagtcctggtcccagaagcgtcactaccaagaggcttatctgaatggccatgccgagacaccagtgtataggttttcccttgctgacgggaccattgtcacggcccagaccaaatccaagcttttcagaaatcccgtgacaaatgatcggcatggatttgtttctacccatttcctgcagagggaacagaacggctacagacccaatcccaatccagtaggccaaggcatacggcctcccatggctgggtgtaacagtagcgtcggtggcatgagcatgagtccaaatcaaggtctccagatgcctagctctcgagcttacgggttggctgatccaagtacgacaggtcagatgtccggggctcggtacggagggagctccaacatcgcaagtctgactcccggacccggtatgcagtcaccatccagctaccagaataacaactacgggctgaatatgagttctcctccccacggttctccaggtcttgccccaaatcagcagaatatcatgattagccctaggaaccggggtagccccaaaatcgcatcgcaccagttctctcccgtagcaggggtgcattctccaatggcatcgagtggcaacacagggaaccacagtttcagcagttcttccctttccgcactccaggccatttcagagggcgttggaacctctctactcagtacactctcttctccaggccctaagcttgacaattcccctaacatgaacatcacccaaccatctaaggtgtctaaccaggactctaagagtcccctcgggttttactgtgatcagaaccccgttgagagcagcatgtgtcaaagcaactctagagatcacctgtccgacaaagagtctaaagagtcttccgttgagggagccgaaaaccaaaggggacctctggagtctaagggtcacaagaagctgttgcagctcttgacatgctcctcagatgacaggggccactcctctctgacgaattcccccctggattcttcctgcaaagaaagcagtgtatcggtgacgagtccaagcggggtgagctcaagtaccagtgggggtgtgtccagcaccagtaatatgcacgggtcactgctccaagagaagcaccgcattcttcataagttactgcagaacggaaactctcccgcagaggtggctaagataaccgccgaggcgaccggcaaagatacttcttccataacatcttgtggggacggaaatgtggtgaagcaggaacagctgtcgcccaagaaaaaggaaaacaacgctctcctcaggtatctcctggacagggatgacccctctgatgcactttccaaagaattgcagccacaggttgagggcgtggataacaagatgtcacagtgtacctccagcacaataccttcctctagtcaggaaaaagatcccaaaattaaaactgagacctccgaagagggttctggggacctggacaaccttgacgcgattcttggagacctgaccagtagcgacttctacaataatagcatctcctcaaatggtagtcatttgggcacgaaacagcaggtctttcagggcactaattcgctgggccttaagtcgtctcagtcagtgcagagcatacgtcctccctacaaccgcgcagtgtctctggactcaccggtgtcagtggggtctagcccaccggtcaaaaatatcagtgcctttccgatgctgccgaaacagcccatgcttggtggcaaccctcgcatgatggacagtcaagagaactatggctcaagcatggggggacccaaccgcaacgtgaccgtgactcagacgcctagtagtggagactggggattgcctaactctaaagcgggacgcatggagcccatgaactcaaatagcatgggacgccctggtggggattataacacgtccctcccaagaccagccttgggaggctccatccctactctgcctctgcgctccaacagtatccccggagccaggccggtgctgcagcagcaacagcagatgctccagatgcggccaggtgagattccgatgggtatgggcgcaaatccgtatggccaggccgctgcgagtaatcagctcggttcctggcctgatggcatgttgtctatggaacaggtttctcatggcacccagaatcgaccgctcctgcggaactcactggacgacctggttggcccaccttcgaaccttgaagggcagtccgatgaacgggctctcctggatcagctacacacactgttatctaataccgatgccactggattagaggagatcgacagagcactcggcatccctgaactcgtcaaccagggccaagccctcgaacctaaacaggacgcctttcagggtcaggaagccgctgtgatgatggaccagaaggccggtctgtatggacagacctatccagcccaggggccaccaatgcaggggggtttccaccttcaggggcagagcccatcattcaattctatgatgaatcagatgaaccagcaggggaactttcccctgcaagggatgcaccccagagccaatatcatgcggcctaggaccaacactcctaaacagctgcgaatgcaactccagcagaggctgcagggacaacagtttctgaatcagtcacgccaggcgcttgagcttaagatggaaaacccaacagctggaggcgcagctgtaatgcggcctatgatgcagccacagcagggctttttaaatgcccagatggtggcgcagcggagcagggagcttttaagtcaccactttagacagcagcgcgttgcaatgatgatgcaacagcaacagcagcaacaacagcagcaacagcaacaacagcaacaacagcagcagcagcaacagcagcagcaacagcagcagcagacccaggcattctcacctcccccaaatgtcacagccagcccctccatggacggcctcctcgccggtcctaccatgccccaagcaccccctcagcagttcccgtaccaaccgaactatgggatgggacagcaacccgatcctgctttcggtcgcgtgagttccccgccaaatgccatgatgtcttcgaggatggggccatcccagaatcccatgatgcagcatccccaagccgcaagcatctaccagtcttctgaaatgaagggctggcccagcgggaacttggcacgaaactccagcttttcacagcaacaattcgctcatcagggtaacccagcagtgtattccatggtgcacatgaatggatcttcaggtcacatgggacagatgaatatgaatccaatgcccatgagtggcatgccgatgggcccagaccaaaagtactgttag

SEQ ID NO: 166006 - DNA, 774 bp, Artificial Sequence
  derived and/or modified sequence
atgatggaagagggcgaggatcttcaatcttgcatgatctgcgtggcgagacgaattacaacaggggagcgcacttttccttctaaccctgagagtttcataactagacacgacctctccggcaaggtggtcaacattgacaccaattctctcagaagttcaatgcgaccgggattcgaagacatcatccgcaggtgcatccagcgattttttagccttaatgatggtcaatcatggtctcagaaaagacactatcaggaggcctatctgaatggccacgccgaaacccccgtttaccgatttagcctggctgatggcacaatagttacggcccagaccaagagcaaacttttccgaaatcccgtgactaacgatcgccacggatttgtaagcacccattttcttcagagagaacagaatggctacagaccaaatcctaacccagtgggccagggcatcaggcccccaatggcgggttgtaattcttccgtgggcggaatgtcgatgagccccaatcaaggtctgcaaatgccaagtagcagagcctatgggctcgcagaccctagcactacagggcagatgtccggcgctaggtacgggggaagttcaaacattgcaagcctgacccctggacccggtatgcagagtccaagttcctatcagaacaataattacggcctcaatatgtcatccccccctcacggcagtccgggattggcccctaatcagcaaaacattatgatcctccttgtaatcgtcggcgtacagcgttag

SEQ ID NO: 166007 - DNA, 4263 bp, Artificial Sequence
  derived and/or modified sequence
atgagcggcctgggcgagaacctggaccccctggccagcgacagcagaaagagaaagctgccctgcgacacccccggccagggcctgacctgcagcggcgagaagagaagaagagagcaggagagcaagtacatcgaggagctggccgagctgatcagcgccaacctgagcgacatcgacaacttcaacgtgaagcccgacaagtgcgccatcctgaaggagaccgtgagacagatcagacagatcaaggagcagggcaagaccatcagcaacgacgacgacgtgcagaaggccgacgtgagcagcaccggccagggcgtgatcgacaaggacagcctgggccccctgctgctgcaggccctggacggcttcctgttcgtggtgaacagagacggcaacatcgtgttcgtgagcgagaacgtgacccagtacctgcagtacaagcaggaggacctggtgaacaccagcgtgtacaacatcctgcacgaggaggacagaaaggacttcctgaagaacctgcccaagagcaccgtgaacggcgtgagctggaccaacgagacccagagacagaagagccacaccttcaactgcagaatgctgatgaagaccccccacgacatcctggaggacatcaacgccagccccgagatgagacagagatacgagaccatgcagtgcttcgccctgagccagcccagagccatgatggaggagggcgaggacctgcagagctgcatgatctgcgtggccagaagaatcaccaccggcgagagaaccttccccagcaaccccgagagcttcatcaccagacacgacctgagcggcaaggtggtgaacatcgacaccaacagcctgagaagcagcatgagacccggcttcgaggacatcatcagaagatgcatccagagattcttcagcctgaacgacggccagagctggagccagaagagacactaccaggaggcctacctgaacggccacgccgagacccccgtgtacagattcagcctggccgacggcaccatcgtgaccgcccagaccaagagcaagctgttcagaaaccccgtgaccaacgacagacacggcttcgtgagcacccacttcctgcagagagagcagaacggctacagacccaaccccaaccccgtgggccagggcatcagaccccccatggccggctgcaacagcagcgtgggcggcatgagcatgagccccaaccagggcctgcagatgcccagcagcagagcctacggcctggccgaccccagcaccaccggccagatgagcggcgccagatacggcggcagcagcaacatcgccagcctgacccccggccccggcatgcagagccccagcagctaccagaacaacaactacggcctgaacatgagcagccccccccacggcagccccggcctggcccccaaccagcagaacatcatgatcagccccagaaacagaggcagccccaagatcgccagccaccagttcagccccgtggccggcgtgcacagccccatggccagcagcggcaacaccggcaaccacagcttcagcagcagcagcctgagcgccctgcaggccatcagcgagggcgtgggcaccagcctgctgagcaccctgagcagccccggccccaagctggacaacagccccaacatgaacatcacccagcccagcaaggtgagcaaccaggacagcaagagccccctgggcttctactgcgaccagaaccccgtggagagcagcatgtgccagagcaacagcagagaccacctgagcgacaaggagagcaaggagagcagcgtggagggcgccgagaaccagagaggccccctggagagcaagggccacaagaagctgctgcagctgctgacctgcagcagcgacgacagaggccacagcagcctgaccaacagccccctggacagcagctgcaaggagagcagcgtgagcgtgaccagccccagcggcgtgagcagcagcaccagcggcggcgtgagcagcaccagcaacatgcacggcagcctgctgcaggagaagcacagaatcctgcacaagctgctgcagaacggcaacagccccgccgaggtggccaagatcaccgccgaggccaccggcaaggacaccagcagcatcaccagctgcggcgacggcaacgtggtgaagcaggagcagctgagccccaagaagaaggagaacaacgccctgctgagatacctgctggacagagacgaccccagcgacgccctgagcaaggagctgcagccccaggtggagggcgtggacaacaagatgagccagtgcaccagcagcaccatccccagcagcagccaggagaaggaccccaagatcaagaccgagaccagcgaggagggcagcggcgacctggacaacctggacgccatcctgggcgacctgaccagcagcgacttctacaacaacagcatcagcagcaacggcagccacctgggcaccaagcagcaggtgttccagggcaccaacagcctgggcctgaagagcagccagagcgtgcagagcatcagacccccctacaacagagccgtgagcctggacagccccgtgagcgtgggcagcagcccccccgtgaagaacatcagcgccttccccatgctgcccaagcagcccatgctgggcggcaaccccagaatgatggacagccaggagaactacggcagcagcatgggcggccccaacagaaacgtgaccgtgacccagacccccagcagcggcgactggggcctgcccaacagcaaggccggcagaatggagcccatgaacagcaacagcatgggcagacccggcggcgactacaacaccagcctgcccagacccgccctgggcggcagcatccccaccctgcccctgagaagcaacagcatccccggcgccagacccgtgctgcagcagcagcagcagatgctgcagatgagacccggcgagatccccatgggcatgggcgccaacccctacggccaggccgccgccagcaaccagctgggcagctggcccgacggcatgctgagcatggagcaggtgagccacggcacccagaacagacccctgctgagaaacagcctggacgacctggtgggcccccccagcaacctggagggccagagcgacgagagagccctgctggaccagctgcacaccctgctgagcaacaccgacgccaccggcctggaggagatcgacagagccctgggcatccccgagctggtgaaccagggccaggccctggagcccaagcaggacgccttccagggccaggaggccgccgtgatgatggaccagaaggccggcctgtacggccagacctaccccgcccagggcccccccatgcagggcggcttccacctgcagggccagagccccagcttcaacagcatgatgaaccagatgaaccagcagggcaacttccccctgcagggcatgcaccccagagccaacatcatgagacccagaaccaacacccccaagcagctgagaatgcagctgcagcagagactgcagggccagcagttcctgaaccagagcagacaggccctggagctgaagatggagaaccccaccgccggcggcgccgccgtgatgagacccatgatgcagccccagcagggcttcctgaacgcccagatggtggcccagagaagcagagagctgctgagccaccacttcagacagcagagagtggccatgatgatgcagcagcagcagcagcagcagcagcagcagcagcagcagcagcagcagcagcagcagcagcagcagcagcagcagcagcagcagcagacccaggccttcagccccccccccaacgtgaccgccagccccagcatggacggcctgctggccggccccaccatgccccaggcccccccccagcagttcccctaccagcccaactacggcatgggccagcagcccgaccccgccttcggcagagtgagcagcccccccaacgccatgatgagcagcagaatgggccccagccagaaccccatgatgcagcacccccaggccgccagcatctaccagagcagcgagatgaagggctggcccagcggcaacctggccagaaacagcagcttcagccagcagcagttcgcccaccagggcaaccccgccgtgtacagcatggtgcacatgaacggcagcagcggccacatgggccagatgaacatgaaccccatgcccatgagcggcatgcccatgggccccgaccagaagtactgctag

SEQ ID NO: 166008 - DNA, 774 bp, Artificial Sequence
  derived and/or modified sequence
atgatggaggagggcgaggacctgcagagctgcatgatctgcgtggccagaagaatcaccaccggcgagagaaccttccccagcaaccccgagagcttcatcaccagacacgacctgagcggcaaggtggtgaacatcgacaccaacagcctgagaagcagcatgagacccggcttcgaggacatcatcagaagatgcatccagagattcttcagcctgaacgacggccagagctggagccagaagagacactaccaggaggcctacctgaacggccacgccgagacccccgtgtacagattcagcctggccgacggcaccatcgtgaccgcccagaccaagagcaagctgttcagaaaccccgtgaccaacgacagacacggcttcgtgagcacccacttcctgcagagagagcagaacggctacagacccaaccccaaccccgtgggccagggcatcagaccccccatggccggctgcaacagcagcgtgggcggcatgagcatgagccccaaccagggcctgcagatgcccagcagcagagcctacggcctggccgaccccagcaccaccggccagatgagcggcgccagatacggcggcagcagcaacatcgccagcctgacccccggccccggcatgcagagccccagcagctaccagaacaacaactacggcctgaacatgagcagccccccccacggcagccccggcctggcccccaaccagcagaacatcatgatcctgctggtgatcgtgggcgtgcagagatag

SEQ ID NO: 166009 - protein, 498 aa, Artificial Sequence
  derived and/or modified sequence
MQSPPHLAVCRSNKSPWVCLTCSSVHCGRYVNGHAKKHYEDAQVPLTNHKKSEKQDKVQHTVCMDCSSYSTYCYRCDDFVVNDTKLGLVQKVREHLQNLENSAFTADRHKKRKLLENSTLNSKLLKVNGSTTAICATGLRNLGNTCFMNAILQSLSNIEQFCCYFKELPAVELRNGKTAGRRTYHTRSQGDNNVSLVEEFRKTLCALWQGSQTAFSPESLFYVVWKIMPNFRGYQQQDAHEFMRYLLDHLHLELQGGFNGVSRSAILQENSTLSASNKCCINGASTVVTAIFGGILQNEVNCLICGTESRKFDPFLDLSLDIPSQFRSKRSKNQENGPVCSLRDCLRSFTDLEELDETELYMCHKCKKKQKSTKKFWIQKLPKVLCLHLKRFHWTAYLRNKVDTYVEFPLRGLDMKCYLLEPENSGPESCLYDLAAVVVHHGSGVGSGHYTAYATHEGRWFHFNDSTVTLTDEETVVKAKAYILFYVEHQAKAGSDKL

SEQ ID NO: 166010 - protein, 520 aa, Artificial Sequence
  derived and/or modified sequence
MECPHLSSSVCIAPDSAKFPNGSPSSWCCSVCRSNKSPWVCLTCSSVHCGRYVNGHAKKHYEDAQVPLTNHKKSEKQDKVQHTVCMDCSSYSTYCYRCDDFVVNDTKLGLVQKVREHLQNLENSAFTADRHKKRKLLENSTLNSKLLKVNGSTTAICATGLRNLGNTCFMNAILQSLSNIEQFCCYFKELPAVELRNGKTAGRRTYHTRSQGDNNVSLVEEFRKTLCALWQGSQTAFSPESLFYVVWKIMPNFRGYQQQDAHEFMRYLLDHLHLELQGGFNGVSRSAILQENSTLSASNKCCINGASTVVTAIFGGILQNEVNCLICGTESRKFDPFLDLSLDIPSQFRSKRSKNQENGPVCSLRDCLRSFTDLEELDETELYMCHKCKKKQKSTKKFWIQKLPKVLCLHLKRFHWTAYLRNKVDTYVEFPLRGLDMKCYLLEPENSGPESCLYDLAAVVVHHGSGVGSGHYTAYATHEGRWFHFNDSTVTLTDEETVVKAKAYILFYVEHQAKAGSDKL

SEQ ID NO: 166011 - protein, 156 aa, Artificial Sequence [sequence omitted]

SEQ ID NO: 166012 - protein, 356 aa, Artificial Sequence [sequence omitted]

SEQ ID NO: 166013 - protein, 55 aa, Artificial Sequence
  derived and/or modified sequence
MECPHLSSSVCIAPDSAKFPNGSPSSWCCSVCRSNKSPWVCLTCSSVHCGRIWGT

SEQ ID NO: 166014 - DNA, 1563 bp, Artificial Sequence
  derived and/or modified sequence
atggagtgcccccacctgagcagcagcgtgtgcatcgcccccgacagcgccaagttccccaacggcagccccagcagctggtgctgcagcgtgtgcagaagcaacaagagcccctgggtgtgcctgacctgcagcagcgtgcactgcggcagatacgtgaacggccacgccaagaagcactacgaggacgcccaggtgcccctgaccaaccacaagaagagcgagaagcaggacaaggtgcagcacaccgtgtgcatggactgcagcagctacagcacctactgctacagatgcgacgacttcgtggtgaacgacaccaagctgggcctggtgcagaaggtgagagagcacctgcagaacctggagaacagcgccttcaccgccgacagacacaagaagagaaagctgctggagaacagcaccctgaacagcaagctgctgaaggtgaacggcagcaccaccgccatctgcgccaccggcctgagaaacctgggcaacacctgcttcatgaacgccatcctgcagagcctgagcaacatcgagcagttctgctgctacttcaaggagctgcccgccgtggagctgagaaacggcaagaccgccggcagaagaacctaccacaccagaagccagggcgacaacaacgtgagcctggtggaggagttcagaaagaccctgtgcgccctgtggcagggcagccagaccgccttcagccccgagagcctgttctacgtggtgtggaagatcatgcccaacttcagaggctaccagcagcaggacgcccacgagttcatgagatacctgctggaccacctgcacctggagctgcagggcggcttcaacggcgtgagcagaagcgccatcctgcaggagaacagcaccctgagcgccagcaacaagtgctgcatcaacggcgccagcaccgtggtgaccgccatcttcggcggcatcctgcagaacgaggtgaactgcctgatctgcggcaccgagagcagaaagttcgaccccttcctggacctgagcctggacatccccagccagttcagaagcaagagaagcaagaaccaggagaacggccccgtgtgcagcctgagagactgcctgagaagcttcaccgacctggaggagctggacgagaccgagctgtacatgtgccacaagtgcaagaagaagcagaagagcaccaagaagttctggatccagaagctgcccaaggtgctgtgcctgcacctgaagagattccactggaccgcctacctgagaaacaaggtggacacctacgtggagttccccctgagaggcctggacatgaagtgctacctgctggagcccgagaacagcggccccgagagctgcctgtacgacctggccgccgtggtggtgcaccacggcagcggcgtgggcagcggccactacaccgcctacgccacccacgagggcagatggttccacttcaacgacagcaccgtgaccctgaccgacgaggagaccgtggtgaaggccaaggcctacatcctgttctacgtggagcaccaggccaaggccggcagcgacaagctgtag

SEQ ID NO: 166015 - DNA, 471 bp, Artificial Sequence
  derived and/or modified sequence
atggagtgcccccacctgagcagcagcgtgtgcatcgcccccgacagcgccaagttccccaacggcagccccagcagctggtgctgcagcgtgtgcagaagcaacaagagcccctgggtgtgcctgacctgcagcagcgtgcactgcggcagatacgtgaacggccacgccaagaagcactacgaggacgcccaggtgcccctgaccaaccacaagaagagcgagaagcaggacaaggtgcagcacaccgtgtgcatggactgcagcagctacagcacctactgctacagatgcgacgacttcgtggtgaacgacaccaagctgggcctggtgcagaaggtgagagagcacctgcagaacctggagaacagcgccttcaccgccgacagacacaagaagagaaagctgctggagaacagcaccctgaacagcaagctgctgaaggtgaacgtgttcggcagaagagtgtag

SEQ ID NO: 166016 - DNA, 1071 bp, Artificial Sequence
  derived and/or modified sequence
atggactgcagcagctacagcacctactgctacagatgcgacgacttcgtggtgaacgacaccaagctgggcctggtgcagaaggtgagagagcacctgcagaacctggagaacagcgccttcaccgccgacagacacaagaagagaaagctgctggagaacagcaccctgaacagcaagctgctgaaggtgaacggcagcaccaccgccatctgcgccaccggcctgagaaacctgggcaacacctgcttcatgaacgccatcctgcagagcctgagcaacatcgagcagttctgctgctacttcaaggagctgcccgccgtggagctgagaaacggcaagaccgccggcagaagaacctaccacaccagaagccagggcgacaacaacgtgagcctggtggaggagttcagaaagaccctgtgcgccctgtggcagggcagccagaccgccttcagccccgagagcctgttctacgtggtgtggaagatcatgcccaacttcagaggctaccagcagcaggacgcccacgagttcatgagatacctgctggaccacctgcacctggagctgcagggcggcttcaacggcgtgagcagaagcgccatcctgcaggagaacagcaccctgagcgccagcaacaagtgctgcatcaacggcgccagcaccgtggtgaccgccatcttcggcggcatcctgcagaacgaggtgaactgcctgatctgcggcaccgagagcagaaagttcgaccccttcctggacctgagcctggacatccccagccagttcagaagcaagagaagcaagaaccaggagaacggccccgtgtgcagcctgagagactgcctgagaagcttcaccgacctggaggagctggacgagaccgagctgtacatgtgccacaagtgcaagaagaagcagaagagcaccaagaagttctggatccagaagctgcccaaggtgctgtgcctgcacctgaagagattccactggaccgcctacctgagaaacaaggtggacacctacgtggagttccccctgagaggcctggacatgaagtgctactactag

SEQ ID NO: 166017 - DNA, 168 bp, Artificial Sequence
  derived and/or modified sequence
atggagtgcccccacctgagcagcagcgtgtgcatcgcccccgacagcgccaagttccccaacggcagccccagcagctggtgctgcagcgtgtgcagaagcaacaagagcccctgggtgtgcctgacctgcagcagcgtgcactgcggcagaatctggggcacctag

SEQ ID NO: 166018 - DNA, 1563 bp, Artificial Sequence
  derived and/or modified sequence
atggagtgtcctcacctcagtagttctgtgtgcatcgcacccgacagcgccaagtttccaaacggcagcccaagctcctggtgttgctcagtctgtcgctctaacaaatccccgtgggtgtgccttacctgtagttcagtacactgcggacgctacgttaatgggcacgccaagaagcattatgaagacgcacaggtgcccctgaccaatcacaaaaaatccgaaaagcaggacaaagtacaacacaccgtatgtatggattgttcttcctattccacatactgttacagatgtgacgacttcgtcgtgaatgatacaaagttgggccttgtccaaaaggtccgggagcaccttcagaatctggagaactctgcatttaccgccgataggcacaagaagcgtaagttgttggaaaactccacgctgaattcaaaactgctcaaggtgaatggatctaccacagcaatatgtgccaccggtctccggaatctgggcaacacatgctttatgaatgctattcttcagtccctgtccaatatagagcaattttgctgctactttaaagagctcccggccgtagaattgaggaatggcaagactgccggcagacgaacctaccacactagatcacagggtgataacaacgtgtccctggtagaggagttccggaaaaccttatgcgccctgtggcaaggcagtcaaacagccttctctcctgagtctctgttctatgtggtttggaaaataatgcccaattttcggggataccaacagcaagatgcacatgagttcatgagatatctcctcgatcatttacacctggaactccagggaggcttcaatggcgtatcccggtccgccattctgcaagagaactcaacattgtccgcttccaacaagtgttgtattaacggtgcctctaccgtagtgaccgccatctttggcggaatcctgcagaatgaggttaactgcttgatttgcggaacggagtctcgtaaatttgacccgttccttgacctctctctcgacatacccagccagtttcggagcaagcgctcgaagaaccaagaaaacggacctgtctgtagcctcagagattgtttaagaagcttcacggacctggaagaacttgacgagaccgaactgtacatgtgtcataaatgtaaaaagaaacagaagtccaccaagaagttctggatccaaaaacttccaaaagtgctctgtctccacctaaagaggtttcactggactgcttacctccggaacaaagtggacacatacgtggagttccctttgaggggtctcgacatgaagtgctacctcctggaacctgaaaactctggccccgaatcctgtctgtatgacctagcggcggtggtggttcatcatggctctggagtcgggtccggccactacaccgcctacgcaactcatgaaggaaggtggttccattttaatgatagcacagtgactcttacagacgaagagactgtagtgaaagcaaaagcttatatcctgttctatgtcgagcatcaggccaaggccggatctgataaactgtag

SEQ ID NO: 166019 - DNA, 471 bp, Artificial Sequence
  derived and/or modified sequence
atggagtgcccccacctgtcctctagtgtctgtatcgctccagatagtgcaaagtttcccaatggctctccgagcagttggtgctgttcagtttgtagaagcaataagagtccatgggtctgcttaacttgctcatctgtgcactgcgggcggtacgttaatggtcacgcaaagaagcactacgaggacgcacaagtgccactgactaaccacaagaagagcgagaaacaggataaagtgcagcatacagtctgtatggattgcagttcctattctacctactgctataggtgcgatgactttgtggtgaatgacacaaagttaggtctggttcagaaggtgagagagcatctccagaacctcgagaacagtgcattcaccgctgacaggcataaaaaacggaagctcctcgagaacagtactctcaactccaaactcttgaaagtgaatgtgtttggaagacgcgtatag

SEQ ID NO: 166020 - DNA, 1071 bp, Artificial Sequence
  derived and/or modified sequence
atggactgctctagttacagcacctattgttacaggtgtgatgactttgtcgttaatgacacaaagctgggacttgtgcaaaaagtgagggaacatctacagaatctcgaaaactccgccttcaccgcagaccgccacaagaaaaggaaattgctggaaaactctactctgaattccaagctgcttaaagtcaacggctctaccacagctatctgtgctaccggactccgaaacctgggcaacacatgctttatgaatgcaatcttgcagtcactcagcaacatcgagcagttttgttgctacttcaaggagctacctgccgttgagctccgtaatggaaaaaccgcgggcagacggacttaccacactcggtcccaaggagacaacaacgtatcacttgtggaagagttcagaaagacactgtgcgccctgtggcagggctcccagaccgcattctctcctgagtcactcttctatgtggtgtggaagattatgcctaattttcggggataccagcagcaagatgcccacgagtttatgcgatacctcctggatcatctccatttggagttacaaggtggatttaatggcgtctcccgctcagctatactgcaagagaactccacgctgagcgcctcaaacaagtgttgcatcaacggcgctagcacggttgtgaccgctatatttgggggaatcctgcagaatgaggtgaactgcctgatctgtggcactgagtcacggaaattcgatccctttctcgacttatccctggatatacccagtcagttccggtcaaaacgaagcaaaaaccaggagaacggaccagtttgctcccttcgtgactgtttacgttcctttaccgatctggaagagctggacgagaccgaactgtacatgtgccataagtgtaaaaagaagcagaaatcaacaaagaaattctggatccagaagttgccaaaagtgctgtgtctgcaccttaaacggttccattggaccgcctatcttcgcaacaaggtggatacatacgttgagtttcctctcaggggcctggacatgaagtgctattattag

SEQ ID NO: 166021 - DNA, 168 bp, Artificial Sequence
  derived and/or modified sequence
atggagtgcccacatctgagttcaagtgtctgcatcgcaccagacagtgccaagtttcctaacggaagcccttcaagttggtgctgctctgtgtgtagatcaaataaatcaccttgggtttgtctaacgtgctcctctgtccattgtgggaggatctggggcacctag

SEQ ID NO: 166022 - DNA, 1563 bp, Artificial Sequence
  derived and/or modified sequence
atggagtgcccccacctgagcagctctgtgtgcatcgccccagacagcgccaagttccccaacggcagccccagctcctggtgctgcagcgtgtgccgcagcaacaagagcccctgggtgtgcctgacctgcagctctgtgcactgcggccgctacgtgaatggccacgccaagaagcactatgaagatgcccaggtgcccctgaccaaccacaagaagtctgagaagcaggacaaggtgcagcacacagtgtgcatggactgcagcagctacagcacctactgctaccgctgtgatgactttgtggtgaatgacaccaagctgggcctggtgcagaaggtgcgggagcacctgcagaacctggagaacagcgccttcaccgctgacagacacaagaagaggaagctgctggagaacagcaccctgaacagcaagctgctgaaggtgaatggcagcaccacagccatctgtgccaccggcctgaggaacctgggcaacacctgcttcatgaatgccatcctgcagagcctgagcaacatcgagcagttctgctgctacttcaaggagctgcctgctgtggagctgagaaatggcaagacagctggaagaaggacctaccacaccaggagccagggcgacaacaacgtgtccctggtggaggagttcaggaagaccctgtgtgccctgtggcagggcagccagacagccttcagccctgagagcctcttctacgtggtgtggaagatcatgcccaacttccggggctaccagcagcaggatgcccacgagttcatgagatacctgctggaccacctgcacctggagctgcagggcggcttcaatggagtgagccgcagcgccatcctgcaggagaacagcaccctgagcgccagcaacaagtgctgcatcaacggggccagcacagtggtgacagccatctttggaggcatcctgcagaatgaggtgaactgcctgatctgtggcacagagagcaggaagtttgaccccttcctggacctgagcctggacatccccagccagttccgcagcaagaggagcaagaaccaggagaatggacctgtgtgcagcctgcgggactgcctgcggagcttcacagacctggaggagctggatgaaacagagctgtacatgtgccacaagtgcaagaagaagcagaagagcaccaagaagttctggatccagaagctgcccaaggtgctgtgcctgcacctgaagcgcttccactggacagcctacctgaggaacaaggtggacacctacgtggagttccccctgcggggcctggacatgaagtgctacctgctggagccagaaaattctggccctgagagctgcctgtatgacctggccgctgtggtggtgcaccacggcagcggcgtgggcagcggccactacacagcctatgccacccatgagggccgctggttccacttcaatgacagcacagtgaccctgacagatgaggagaccgtggtgaaggccaaggcctacatcctcttctacgtggagcaccaggccaaggccggcagtgacaagctgtag

SEQ ID NO: 166023 - DNA, 471 bp, Artificial Sequence
  derived and/or modified sequence
atggagtgcccccacctgagcagctctgtgtgcatcgccccagacagcgccaagttccccaacggcagccccagctcctggtgctgcagcgtgtgccgcagcaacaagagcccctgggtgtgcctgacctgcagctctgtgcactgcggccgctacgtgaatggccacgccaagaagcactatgaagatgcccaggtgcccctgaccaaccacaagaagtctgagaagcaggacaaggtgcagcacacagtgtgcatggactgcagcagctacagcacctactgctaccgctgtgatgactttgtggtgaatgacaccaagctgggcctggtgcagaaggtgcgggagcacctgcagaacctggagaacagcgccttcaccgctgacagacacaagaagaggaagctgctggagaacagcaccctgaacagcaagctgctgaaggtgaatgtgtttggccggcgggtgtag

SEQ ID NO: 166024 - DNA, 1071 bp, Artificial Sequence
  derived and/or modified sequence
atggactgcagcagctacagcacctactgctaccgctgtgatgactttgtggtgaatgacaccaagctgggcctggtgcagaaggtgcgggagcacctgcagaacctggagaacagcgccttcaccgctgacagacacaagaagaggaagctgctggagaacagcaccctgaacagcaagctgctgaaggtgaatggcagcaccacagccatctgtgccaccggcctgaggaacctgggcaacacctgcttcatgaatgccatcctgcagagcctgagcaacatcgagcagttctgctgctacttcaaggagctgcctgctgtggagctgagaaatggcaagacagctggccgccgcacctaccacaccaggagccagggcgacaacaacgtgtccctggtggaggagttcaggaagaccctgtgtgccctgtggcagggcagccagacagccttcagccctgagagcctcttctacgtggtgtggaagatcatgcccaacttccggggctaccagcagcaggatgcccacgagttcatgagatacctgctggaccacctgcacctggagctgcagggcggcttcaacggggtgagccgcagcgccatcctgcaggagaacagcaccctgagcgccagcaacaagtgctgcatcaatggagccagcacagtggtgacagccatctttggaggcatcctgcagaatgaggtgaactgcctgatctgtggcacagagagcaggaagtttgaccccttcctggacctgagcctggacatccccagccagttccgcagcaagaggagcaagaaccaggagaatggacctgtgtgcagcctgcgggactgcctgcgctccttcacagacctggaggagctggatgaaacagagctgtacatgtgccacaagtgcaagaagaagcagaagagcaccaagaagttctggatccagaagctgcccaaggtgctgtgcctgcacctgaagcgcttccactggacagcctacctgaggaacaaggtggacacctacgtggagttccccctgcggggcctggacatgaagtgctactactag

SEQ ID NO: 166025 - DNA, 168 bp, Artificial Sequence
  derived and/or modified sequence
atggagtgcccccacctgagcagctctgtgtgcatcgccccagacagcgccaagttccccaacggcagccccagctcctggtgctgcagcgtgtgccgcagcaacaagagcccctgggtgtgcctgacctgcagctctgtgcactgcggccgcatctggggcacctag

SEQ ID NO: 166026 - DNA, 1563 bp, Artificial Sequence
  derived and/or modified sequence
atggagtgcccccacctgagcagcagcgtgtgcatcgcccccgactcagcgaagtttccaaacggctcaccaagctcttggtgctgttcagtctgtaggagcaacaagagtccatgggtgtgcctcacatgttcctctgtccattgcggaaggtatgtgaacgggcatgcaaagaaacactatgaggacgcacaggtgcctctgaccaaccataagaaaagcgagaaacaggataaagttcagcacaccgtgtgcatggattgcagttcctatagtacatactgctacaggtgcgacgacttcgtcgtgaatgatacaaagctggggctcgtccagaaggtcagagagcacctccagaacctcgagaatagcgccttcaccgctgatagacataagaagcggaagttgctggagaactccactctaaactctaagttacttaaagtgaacggaagtacaactgccatatgcgccaccggcctcagaaacttgggcaacacttgtttcatgaacgctattcttcagtccctgtcgaacatagaacaattctgctgttattttaaggaactgccggcagtcgagttgcggaacggtaagactgcaggaaggagaacctatcacacgaggtcccagggagacaataacgtctctcttgtcgaagagttcaggaagacgctgtgtgccctatggcaggggagccagacagcctttagtccagaatcgctgttctacgttgtctggaaaatcatgcccaacttcaggggataccaacaacaggatgcgcatgagttcatgcgctatcttctggaccacctgcatttggaactgcaaggcggatttaatggggtttctagaagcgctatcctgcaggagaattcgactctctctgcgagcaataagtgttgcataaacggcgcttccaccgtagtcactgctattttcgggggcattctgcagaatgaagtgaattgcctgatttgtggcaccgagtccagaaagtttgacccgttcctggacctctcactcgatattccaagtcagttccggagtaaaagatcaaagaaccaggagaatgggccggtgtgctccctccgggattgtctcagatcatttactgatctggaggagctggacgagaccgaactctacatgtgccataagtgtaagaaaaagcagaagtctaccaagaagttctggatccagaagctcccaaaggtgttgtgtctgcacctgaaaaggttccattggacagcgtaccttaggaataaagttgacacctatgttgagtttcccctgagaggtttagacatgaaatgctatctcttggaacctgagaattctggccctgaatcatgtctctatgacctggccgccgtcgtggtgcaccacggttctggggtcgggtctggtcactacaccgcatatgcgactcacgaagggcgatggttccacttcaatgattccacagtcaccctgacagatgaggagacagtggtcaaggccaaagcctatatcctgttttatgtggaacaccaagcaaaggccggaagtgacaaactatag

SEQ ID NO: 166027 - DNA, 471 bp, Artificial Sequence
  derived and/or modified sequence
atggagtgcccccacctgagcagcagcgtgtgcatcgcccccgacagcgccaagttcccaaatggcagcccttcctcctggtgttgctctgtatgtagaagcaacaaaagtccttgggtatgtcttacttgtagctcagtgcactgcgggcgatatgtaaacggccatgctaaaaagcactacgaggacgcccaagtgcctctcactaaccacaaaaaaagcgagaaacaggataaagtccagcacaccgtgtgtatggattgctcctcgtactccacctactgctatcgatgcgacgactttgtggtcaacgatacaaaactcggtctggtgcaaaaggtgcgggagcacctgcaaaacctggaaaactctgcttttaccgcagacagacacaagaagcgcaaactgctggagaacagcactctgaacagcaaactgttgaaggtgaacgtgttcgggcggagggtctag

SEQ ID NO: 166028 - DNA, 1071 bp, Artificial Sequence
  derived and/or modified sequence
atggactgcagcagctacagcacctactgctaccggtgcgacgacttcgtcgttaatgataccaaacttggtttggtacagaaggtgcgagaacacctacagaatctggagaatagcgccttcaccgccgaccgccacaaaaagcggaagctgctcgaaaattcaaccctcaattctaaactattgaaggttaatggttctaccacagccatttgcgccactggcctgcgcaacctgggtaacacctgtttcatgaacgccatcctacagtcgctttctaatatcgagcaattctgctgctactttaaagagctgccagcagttgaactgcgcaacgggaaaaccgccggcaggcggacttatcatacacggtctcagggagataacaacgtctcacttgtggaagaattccggaaaaccctgtgtgcactctggcaaggctcacagactgccttctccccagaaagtctgttttatgtcgtatggaaaatcatgccaaatttcagaggttaccagcagcaggatgcccatgagttcatgcggtacttactggaccatctacatttggaactgcagggcggtttcaacggcgtgtccaggtccgctattttacaggagaactccacactgtccgcatcaaacaagtgctgcatcaacggagcttcaaccgtggtgactgccattttcgggggaatcttacagaatgaggtgaattgtcttatatgcggaaccgaatcccgaaagttcgatcccttcctagacctttccctggacattccatctcagtttaggagcaagcgcagtaaaaaccaagaaaatggtccagtctgtagccttcgagactgcctcaggtcatttactgacctcgaggaactggatgagacagagctttacatgtgccacaagtgtaagaaaaaacaaaagtccacaaagaaattttggatccagaaattgccaaaggttctgtgcttgcaccttaaaagattccattggaccgcatacctacgtaacaaggttgatacatacgtagagtttccacttcgtggtctggacatgaaatgctactactag

SEQ ID NO: 166029 - DNA, 168 bp, Artificial Sequence
  derived and/or modified sequence
atggagtgcccccacctgagcagcagcgtgtgcatcgcccccgactctgcgaagttcccgaacggttctccctcaagttggtgctgtagtgtgtgccgctcaaataaatctccctgggtgtgcctgacctgttcttctgtacactgcgggcggatctggggcacatag

SEQ ID NO: 166030 - DNA, 1563 bp, Artificial Sequence
  derived and/or modified sequence
atggagtgcccccacctatcctcaagcgtgtgcatcgccccagattcggccaagtttccaaacggatcacccagttcctggtgttgttccgtgtgcagatcaaataaaagcccctgggtctgtcttacttgctcctcagtgcactgtggcagatatgtaaatggccatgctaagaagcattatgaagatgcacaggtgccactaaccaaccacaaaaagagcgaaaagcaggataaggtgcaacacaccgtgtgcatggactgcagcagttactccacctattgctatagatgcgatgacttcgtcgtgaacgacaccaagctgggattagtacagaaggtaagggagcacttacaaaacctggaaaattctgcatttacagccgaccgacacaagaagaggaaactgcttgagaactccactctcaactcaaagctgctgaaagtaaacggcagtactaccgccatttgtgctacagggctgcgaaacttggggaacacttgcttcatgaatgccatcttgcagtcactgtccaatatcgagcaattctgctgctacttcaaggaattgcctgccgtggagctgcggaacggtaaaactgcgggtcgcagaacttaccatacaaggtcccagggggataataatgtcagtctggtggaggagtttcgcaaaacactatgtgccctatggcaagggagtcagacagccttcagcccggagtctctattttacgtcgtgtggaaaatcatgcccaacttcagaggctaccagcaacaggatgctcacgaatttatgcggtacctccttgaccacttacacctggagcttcaggggggatttaacggcgtgagccgttcggctatcttgcaagagaatagtactctatcggcatccaataaatgttgtatcaacggggcttctacggtggttactgcaatatttggtggtatcctgcagaatgaagtgaactgcctgatttgcgggaccgaatcacgcaaatttgacccgtttctggatttatctctcgatatacctagtcagttccgttcaaaaagatccaaaaatcaagaaaacgggccagtttgtagcctgcgtgattgcctgcgctcatttaccgatttggaggagctggatgagaccgagctctacatgtgtcataaatgcaaaaaaaagcagaaatctaccaagaagttttggatccagaagctgcccaaagtcctgtgcttgcatctaaaacgcttccattggacagcttacctgcgcaataaggtagacacctacgtcgagttcccactgcggggtctcgatatgaaatgttatttgttagaacccgaaaattcaggccctgaaagttgcttgtacgatttggctgccgtggtggtgcaccacggaagtggagtgggtagcgggcactatacagcctacgccacccacgagggacgctggtttcattttaatgacagcaccgttacgctcacagacgaggagaccgttgtgaaagccaaagcttatatcctattctatgtggagcaccaggcaaaggccggttccgataagctttag

SEQ ID NO: 166031 - DNA, 471 bp, Artificial Sequence
  derived and/or modified sequence
atggaatgcccacacctgtcttccagcgtttgcatcgcacctgatagcgcgaagttcccaaatggctccccaagttcatggtgttgctccgtctgccgtagcaataagagcccctgggtctgcttaacctgtagcagtgtgcactgtggcaggtatgtcaacggccatgcaaagaagcattatgaagacgctcaagtgccgctcaccaatcataagaaatctgagaagcaggataaagttcagcacacagtgtgtatggactgtagttcttactcaacatactgctatcgatgtgacgatttcgtggtgaatgacactaagcttgggctcgtgcagaaggttcgtgagcatcttcagaatctggagaatagcgctttcacagccgaccggcacaagaagcgaaagctcctcgagaattctacactcaacagtaagctcctgaaggtgaacgtatttgggagacgagtgtag

SEQ ID NO: 166032 - DNA, 1071 bp, Artificial Sequence
  derived and/or modified sequence
atggactgctcttcttactctacatattgctataggtgtgatgactttgtggtcaatgatacgaaactgggtctcgtccagaaagttagagaacacctccagaatctggaaaacagcgccttcaccgccgatagacacaagaagcggaaactgcttgagaattcgaccttaaactcgaaactcctgaaagtcaatgggtcgacgaccgctatatgtgcgactggcctgcgcaatctgggcaacacttgcttcatgaacgccattctccaaagtctctctaacattgagcagttttgctgctattttaaagagctgcccgctgttgagctgcggaatggtaaaactgctgggaggagaacataccacacaagaagccaaggggataataacgtttcactggtggaggagtttagaaagactctatgtgccctatggcagggatcacaaacagctttcagtccggagagcctattttacgtggtgtggaagatcatgccgaatttcagaggatatcagcagcaagatgcacacgaatttatgaggtatttgctggatcacctgcaccttgagctgcagggtggctttaatggcgtgtcccgctcagctatcttgcaggaaaacagcaccctgagtgccagcaacaaatgttgcattaacggggctagcacagttgtgacagccatttttggtgggatactgcagaacgaagtgaattgcctgatttgtggcaccgagagtcgcaaattcgatccttttctggaccttagtctggatatcccttcacaattcagatccaagaggagtaaaaatcaggaaaatggccctgtctgctctctgagagactgcctgcgcagtttcaccgatctcgaggagctagatgaaaccgagttatacatgtgccacaagtgtaaaaagaaacaaaaatcgactaagaaattctggatccagaaactgccgaaagtcctatgcctacatttgaagagatttcattggactgcctatttgcggaataaagtggacacatatgtggaatttccacttcggggtctggatatgaaatgctattattag

SEQ ID NO: 166033 - DNA, 168 bp, Artificial Sequence
  derived and/or modified sequence
atggagtgtcctcatctatcatcttcggtgtgcattgcccctgattctgccaagttccctaacggaagtccctcctcctggtgctgttcagtgtgcagatcaaataaatctccttgggtctgtctcacctgtagctccgtacattgtggacggatttggggtacctag

SEQ ID NO: 166034 - DNA, 2439 bp, Artificial Sequence
  derived and/or modified sequence
gagcgcccggctagaagcgacaccagacggagcctccggagttcctccgcccccacctcgccgggtcctggagccgcagtcctcccagctgccctcctcgtggccatggagtgtccacacctgagctccagcgtctgcattgctccggactcagccaagttccccaacggctccccgtcgtcctggtgctgcagcgccttcaaatgtttatctggtgtgactgtattatgccctcagagagtactgtatgttgcccaggctggcctcgaactctaggctcaagtgattcttctgcctcagcctcccaagtagctgggactacagatgcaatcaccaccacacttggcagtgtgccggtccaacaaaagcccttgggtctgtttgacttgttcaagtgtccactgtggaaggtatgtgaatggccatgcaaaaaaacattatgaagatgcacaagtacctttaaccaaccataagaaatcagaaaagcaagataaagttcagcacacagtatgtatggattgcagtagctacagtacatactgttatcgctgtgatgattttgtggttaatgacaccaagctgggactggtacagaaagtcagagaacacttacagaacttggaaaactcagctttcacagctgacaggcataagaaaagaaaacttttggaaaactcaacactaaacagcaagttattaaaagtaaatggaagcaccactgccatttgtgccacaggccttcggaatttggggaacacatgtttcatgaatgccatccttcagtcactcagtaacattgagcagttttgctgttatttcaaagaactgcccgccgtggagttaaggaatgggaaaacagcaggaaggcggacataccacaccaggagccaaggggataacaatgtgtctttggtagaagagtttagaaagacactctgtgctttatggcaaggcagccagactgcatttagcccagagtccttattttatgttgtttggaagattatgccaaactttaggggctatcaacagcaggacgcccatgaattcatgcgctaccttttggaccacctacacttggaacttcagggcggtttcaacggtgtttcccgctcagcaattctgcaggagaattctactctgtctgcaagtaacaagtgttgcataaatggagcatctactgttgtcacggctatattcggaggcattctccaaaatgaggttaactgcctcatatgtgggacagaatctagaaagtttgatccattcctagacctttcattagatattccaagtcagttcagaagtaagcgctctaagaatcaagaaaatggaccagtttgttcgttacgagattgtcttcgcagttttaccgacttagaagaacttgatgagacagagttatatatgtgccataaatgcaaaaagaaacaaaagtccacaaaaaagttttggattcaaaaactacccaaggtgctatgcttacatttgaaaagatttcattggacagcatatttaagaaataaagttgatacatacgtagaatttccactgagaggcctagacatgaaatgctacttactagagcctgagaacagtggcccggagagctgcctgtatgacctcgccgctgtggtggtgcaccatggttccggggttggttctggacattacacagcatacgcaactcacgaaggccgctggttccacttcaatgacagtactgtaacactgactgacgaggagactgtggtgaaggcgaaggcctacatccttttctacgtggaacaccaggccaaagctggatcggataaactttaatacctcctccaaatcatcattcaccaaccataccagagaaacatttccagttttccacaaatacttgatacaagatttaatttcattatgcacttttcaatttcctattttggatttagttttgtcaatggtagtgacttactgaacatgggcaccaactaattttgttgttgttctaccagaaaacctcagcagatgttttgatttgctgctttagttgtaataattcaatttttataggtagttgtaagaacttagtcttatttgacttttttattttatgttaatgttttcagttctcactttgaggcacatttacatcaatgcttttgttcctctcacatgctgaaagcaagatgtgttccttattgtgaagagcgacacaactgcctgctgcctttccacagctataatggacatcaggttgactctaaatcaaggatcatgtgtgcacaatacttgtggcccacaaaatttcacaatgactgctgaggaatcattctttttgcctgtaaaatataacaaagggcatcattaagtagaccaggtaattactgcttgtctctcaaggctgctgtctttatcagcactaactaaataaatttgttggttcagttg

SEQ ID NO: 166035 - DNA, 2333 bp, Artificial Sequence
  derived and/or modified sequence
ctcgagacgcagccgccgtcggccgagcgcccggctagaagcgacaccagacggagcctccggagttcctccgcccccacctcgccgggtcctggagccgcagtcctcccagctgccctcctcgtggccatggagtgtccacacctgagctccagcgtctgcattgctccggactcagccaagttccccaacggctccccgtcgtcctggtgctgcagcgtgtgccggtccaacaaaagcccttgggtctgtttgacttgttcaagtgtccactgtggaaggtatgtgaatggccatgcaaaaaaacattatgaagatgcacaagtacctttaaccaaccataagaaatcagaaaagcaagataaagttcagcacacagtatgtatggattgcagtagctacagtacatactgttatcgctgtgatgattttgtggttaatgacaccaagctgggactggtacagaaagtcagagaacacttacagaacttggaaaactcagctttcacagctgacaggcataagaaaagaaaacttttggaaaactcaacactaaacagcaagttattaaaagtaaatggaagcaccactgccatttgtgccacaggccttcggaatttggggaacacatgtttcatgaatgccatccttcagtcactcagtaacattgagcagttttgctgttatttcaaagaactgcccgccgtggagttaaggaatgggaaaacagcaggaaggcggacataccacaccaggagccaaggggataacaatgtgtctttggtagaagagtttagaaagacactctgtgctttatggcaaggcagccagactgcatttagcccagagtccttattttatgttgtttggaagattatgccaaactttaggggctatcaacagcaggacgcccatgaattcatgcgctaccttttggaccacctacacttggaacttcagggcggtttcaacggtgtttcccgctcagcaattctgcaggagaattctactctgtctgcaagtaacaagtgttgcataaatggagcatctactgttgtcacggctatattcggaggcattctccaaaatgaggttaactgcctcatatgtgggacagaatctagaaagtttgatccattcctagacctttcattagatattccaagtcagttcagaagtaagcgctctaagaatcaagaaaatggaccagtttgttcgttacgagattgtcttcgcagttttaccgacttagaagaacttgatgagacagagttatatatgtgccataaatgcaaaaagaaacaaaagtccacaaaaaagttttggattcaaaaactacccaaggtgctatgcttacatttgaaaagatttcattggacagcatatttaagaaataaagttgatacatacgtagaatttccactgagaggcctagacatgaaatgctacttactagagcctgagaacagtggcccggagagctgcctgtatgacctcgccgctgtggtggtgcaccatggttccggggttggttctggacattacacagcatacgcaactcacgaaggccgctggttccacttcaatgacagtactgtaacactgactgacgaggagactgtggtgaaggcgaaggcctacatccttttctacgtggaacaccaggccaaagctggatcggataaactttaatacctcctccaaatcatcattcaccaaccataccagagaaacatttccagttttccacaaatacttgatacaagatttaatttcattatgcacttttcaatttcctattttggatttagttttgtcaatggtagtgacttactgaacatgggcaccaactaattttgttgttgttctaccagaaaacctcagcagatgttttgatttgctgctttagttgtaataattcaatttttataggtagttgtaagaacttagtcttatttgacttttttattttatgttaatgttttcagttctcactttgaggcacatttacatcaatgcttttgttcctctcacatgctgaaagcaagatgtgttccttattgtgaagagcgacacaactgcctgctgcctttccacagctataatggacatcaggttgactctaaatcaaggatcatgtgtgcacaatacttgtggcccacaaaatttcacaatgactgctgaggaatcattctttttgcctgtaaaatataacaaagggcatcattaagtagaccaggtaattactgcttgtctctcaaggctgctgtctttatcagcactaactaaataaatttgttggttcagttgtacttgtcctgcaaatacaagaa

SEQ ID NO: 166036 - DNA, 961 bp, Artificial Sequence
  derived and/or modified sequence
accagacggagcctccggagttcctccgcccccacctcgccgggtcctggagccgcagtcctcccagctgccctcctcgtggccatggagtgtccacacctgagctccagcgtctgcattgctccggactcagccaagttccccaacggctccccgtcgtcctggtgctgcagcgtgtgccggtccaacaaaagcccttgggtctgtttgacttgttcaagtgtccactgtggaaggtatgtgaatggccatgcaaaaaaacattatgaagatgcacaagtacctttaaccaaccataagaaatcagaaaagcaagataaagttcagcacacagtatgtatggattgcagtagctacagtacatactgttatcgctgtgatgattttgtggttaatgacaccaagctgggactggtacagaaagtcagagaacacttacagaacttggaaaactcagctttcacagctgacaggcataagaaaagaaaacttttggaaaactcaacactaaacagcaagttattaaaagtaaatgtctttggtagaagagtttagaaagacactctgtgctttatggcaaggcagccagactgcatttagcccagagtccttattttatgttgtttggaagattatgccaaactttaggggctatcaacagcaggacgcccatgaattcatgcgctaccttttggaccacctacacttggaacttcagggcggtttcaacggtgtttcccgctcagcaattctgcaggagaattctactctgtctgcaagtaacaagtgttgcataaatggagcatctactgttgtcacggctatattcggaggcattctccaaaatgaggttaactgcctcatatgtgggacagaatctagaaagtttgatccattcctagacctttcattagatattccaagtcagttcagaagtaagcgctctaagaatcaagaaaat

SEQ ID NO: 166037 - DNA, 2014 bp, Artificial Sequence
  derived and/or modified sequence
aagatgcacaagtacctttaaccaaccataagaaatcagaaaagcaagataaagttcagcacacagtatgtatggattgcagtagctacagtacatactgttatcgctgtgatgattttgtggttaatgacaccaagctgggactggtacagaaagtcagagaacacttacagaacttggaaaactcagctttcacagctgacaggcataagaaaagaaaacttttggaaaactcaacactaaacagcaagttattaaaagtaaatggaagcaccactgccatttgtgccacaggccttcggaatttggggaacacatgtttcatgaatgccatccttcagtcactcagtaacattgagcagttttgctgttatttcaaagaactgcccgccgtggagttaaggaatgggaaaacagcaggaaggcggacataccacaccaggagccaaggggataacaatgtgtctttggtagaagagtttagaaagacactctgtgctttatggcaaggcagccagactgcatttagcccagagtccttattttatgttgtttggaagattatgccaaactttaggggctatcaacagcaggacgcccatgaattcatgcgctaccttttggaccacctacacttggaacttcagggcggtttcaacggtgtttcccgctcagcaattctgcaggagaattctactctgtctgcaagtaacaagtgttgcataaatggagcatctactgttgtcacggctatattcggaggcattctccaaaatgaggttaactgcctcatatgtgggacagaatctagaaagtttgatccattcctagacctttcattagatattccaagtcagttcagaagtaagcgctctaagaatcaagaaaatggaccagtttgttcgttacgagattgtcttcgcagttttaccgacttagaagaacttgatgagacagagttatatatgtgccataaatgcaaaaagaaacaaaagtccacaaaaaagttttggattcaaaaactacccaaggtgctatgcttacatttgaaaagatttcattggacagcatatttaagaaataaagttgatacatacgtagaatttccactgagaggcctagacatgaaatgctactactagagcctgagaacagtggcccggagagctgcctgtatgacctcgccgctgtggtggtgcaccatggttccggggttggttctggacattacacagcatacgcaactcacgaaggccgctggttccacttcaatgacagtactgtaacactgactgacgaggagactgtggtgaaggcgaaggcctacatccttttctacgtggaacaccaggccaaagctggatcggataaactttaatacctcctccaaatcatcattcaccaaccataccagagaaacatttccagttttccacaaatacttgatacaagatttaatttcattatgcacttttcaatttcctattttggatttagttttgtcaatggtagtgacttactgaacatgggcaccaactaattttgttgttgttctaccagaaaacctcagcagatgttttgatttgctgctttagttgtaataattcaatttttataggtagttgtaagaacttagtcttatttgacttttttattttatgttaatgttttcagttctcactttgaggcacatttacatcaatgcttttgttcctctcacatgctgaaagcaagatgtgttccttattgtgaagagcgacacaactgcctgctgcctttccacagctataatggacatcaggttgactctaaatcaaggatcatgtgtgcacaatacttgtggcccacaaaatttcacaatgactgctgaggaatcattctttttgcctgtaaaatataacaaagggcatcattaagtagaccaggtaattactgcttgtctctcaaggctgctgtctttatcagcactaactaaataaatttgttggttcagttgtacttgtcctgcaaatac

SEQ ID NO: 166038 - DNA, 5499 bp, Artificial Sequence
  derived and/or modified sequence
gtggccatggagtgtccacacctgagctccagcgtctgcattgctccggactcagccaagttccccaacggctccccgtcgtcctggtgctgcagcgtgtgccggtccaacaaaagcccttgggtctgtttgacttgttcaagtgtccactgtggaaggatttggggaacctgaaaatactttgtacagataacttttttttaaaaaagaagaaaagtagaagcacttaaattctgcagttgaagagacagattcctctcctagattttgagaggtatgtgaatggccatgcaaaaaaacattatgaagatgcacaagtacctttaaccaaccataagaaatcagaaaagcaagataaagttcagcacacagtatgtatggattgcagtagctacagtacatactgttatcgctgtgatgattttgtggttaatgacaccaagctgggactggtacagaaagtcagagaacacttacagaacttggaaaactcagctttcacagctgacaggcataagaaaagaaaacttttggaaaactcaacactaaacagcaagttattaaaagtaaatggaagcaccactgccatttgtgccacaggccttcggaatttggggaacacatgtttcatgaatgccatccttcagtcactcagtaacattgagcagttttgctgttatttcaaagaactgcccgccgtggagttaaggaatgggaaaacagcaggaaggcggacataccacaccaggagccaaggggataacaatgtgtctttggtagaagagtttagaaagacactctgtgctttatggcaaggcagccagactgcatttagcccagagtccttattttatgttgtttggaagattatgccaaactttaggggctatcaacagcaggacgcccatgaattcatgcgctaccttttggaccacctacacttggaacttcagggcggtttcaacggtgtttcccgctcagcaattctgcaggagaattctactctgtctgcaagtaacaagtgttgcataaatggagcatctactgttgtcacggctatattcggaggcattctccaaaatgaggttaactgcctcatatgtgggacagaatctagaaagtttgatccattcctagacctttcattagatattccaagtcagttcagaagtaagcgctctaagaatcaagaaaatggaccagtttgttcgttacgagattgtcttcgcagttttaccgacttagaagaacttgatgagacagagttatatatgtgccataaatgcaaaaagaaacaaaagtccacaaaaaagttttggattcaaaaactacccaaggtgctatgcttacatttgaaaagatttcattggacagcatatttaagaaataaagttgatacatacgtagaatttccactgagaggcctagacatgaaatgctacttactagagcctgagaacagtggcccggagagctgcctgtatgacctcgccgctgtggtggtgcaccatggttccggggttggttctggacattacacagcatacgcaactcacgaaggccgctggttccacttcaatgacagtactgtaacactgactgacgaggagactgtggtgaaggcgaaggcctacatccttttctacgtggaacaccaggccaaagctggatcggataaactttaatacctcctccaaatcatcattcaccaaccataccagagaaacatttccagttttccacaaatacttgatacaagatttaatttcattatgcacttttcaatttcctattttggatttagttttgtcaatggtagtgacttactgaacatgggcaccaactaattttgttgttgttctaccagaaaacctcagcagatgttttgatttgctgctttagttgtaataattcaatttttataggtagttgtaagaacttagtcttatttgacttttttattttatgttaatgttttcagttctcactttgaggcacatttacatcaatgcttttgttcctctcacatgctgaaagcaagatgtgttccttattgtgaagagcgacacaactgcctgctgcctttccacagctataatggacatcaggttgactctaaatcaaggatcatgtgtgcacaatacttgtggcccacaaaatttcacaatgactgctgaggaatcattctttttgcctgtaaaatataacaaagggcatcattaagtagaccaggtaattactgcttgtctctcaaggctgctgtctttatcagcactaactaaataaatttgttggttcagttgtacttgtcctgcaaatacaagaattactctctttgttggtttttttggttttggggcatacttgtttgcggggaggtaagatgggagtaaagaccaaatacatgtaatgtttaaaaaaaatgctgtgactcactgacatggtataggtgttaccagtgaggtaaagccatggcgtctgcctccttttgaatcagtatctcattcccccttagttgtaccactggaagtcacgacatgtccattatagacttacttactgcttgtgtttggcatctgagtctgaggtgtgaccctctgggatttacttggatcatcacccgcacttcagtttatcactggggggtgtgcttccacaggaggaaatttagaatcttcgctgctctgggttttaacacctctctctggcctatcctgattgataggacaagttgaaaatactgttggagtaagtaagtggagttttcgttttgttttttgggggtttttggagacaagagtctctctctgttgcccaggctggagtgcagtggcacgatctcagctcattgcaacctcggcctcccgagtagcaattctcctgcctcaacctcctgagtagctgggattacaggtgcccaccactacacctggctaattttttttttgtatttttagtaaagacgggggtttaccatgttggctagggtggtctcaacctccctcctgacctcaggtgatccgcctgcctcagcctcccaaagtgctgagattacaggcgtgagccatcacgcccagacagttttgtttttaaaaaacagatttaactcaaagattcaaatttggaaccagaatcccatttaaagaaagcagttgtggtttctacaagtgttctaagacagtcctgtggtggttttttttttttcttttttttggttgggggcggtgggggttggtagacatagcctaccaattctccacaagggacaaaatgtatcttgtgttaagccaacgagactttctggcaattttttttttttttttttaatggagtcttactctgtccctcaggctggagtgcagtgtggcatgatcacagctcactgtagcctcaacctcccaggctcaagcgatcctcccacttcagcctcgaagtagctggcaccaccacacccagctaatttttaatatttttactagagatggggtttcaccacgttgcccaggctggtcttgcactcctgggctcaagtgatccacccaccttggcttcccaaggtgctagcattacaggcatgagccaccacgcccagcctgttctattaaaaacatcttgacctttttttttttttaagtttatgatataaaaacagtctggtggctttccctcaggttggatatctgaagttgtgggagcagatgtagctccatttccattttaatattaactggataaatcccacatcttcccagaacacatctgctaaacactttaacatgacaaggagcaaattacaattatgtgtaaacttatatcatccagtacaatggcccctagccacatgtgactgaaatttaaattagaaactcagtgccttcagtcacactagccacatttcaagtgctcagcacccacatacggcgtaggacaatgctggtctaaattttcactccaaagaataaaactttgccatcatgtttaggtcttacaactttgagtcctaaaagataatagggagatgtgtgcttaaattaatttacaatgctaaattatattaggttaaactgtatgaaaccctgctatttgatgagttctgatctacaaaaatgacagctccacctgatctgatgtatcacacattaacatcacatctaattcaacctgaaatgtgagtctcctttgatcttgcaaagtatctcctatgaatccgggctcttttgcttagaaggtagacagctgtaacctctaacattgatacttcgatcttcagtctctctgaatgggcagctgttaaacagtaaaggcctgggcagagttgatggtgaaaaaaagctgtatttttataccaaatggaacttcagcaacacgttggactactttgtcgggcagagtggtcttcagacaggtgatgctgttggcttaagagatgaacacgtcttctctctgaatttgtttttattggttggttttacttgaacagaaacgtttgaatggtgtgaagattctttagaaaagtgattggatccatctcaattgtgcacttgaacagcagtgatgtaaatgtgcttatttgtgttttcatttttaactgtgcagccttaccacacctattttgaaagctgatcttttgtcctcttcagggcttttcccttgtgccatgttgtctccagcaatatatgtggcttctggctcagagcttctgctgaggcagggcctcgcgctgagtcacatggctccttggaacaagaaaactttctcagaagtccccacacgggtgggtgacagaaacagtttgtggcaacacaaatctctctccatggtggagaaacctttgcttatccactgtattctactcagtgtatagtgatgacagatgtactagaattaaaccagtcaagtgtactggcccggggtgagtgttaaatgtgtatctcgcctgtggaacctactcagcagcttggtttctggggttgggggcatatttatttcttaaagccaaacctctccttcattggtttagtgtacataagtctatttagatacacttatcccactttaatctccaccagcccctaaactctctcctgtaccctctgttgctgaagtggcctcttcacctgggccctggaaaagccgatggaaaaagtctgttcctgcagccaaggcctgggtcccaggtgactaggagtagccataggaaggtgaggaaggagaagtgggcatgtggtgtcatctgtagtccaaggtctctgcgtctcgtcagtgggtgcagtgccttccccctcaggtgtgagcgtgatggactctagactgccttccatgagtgttggtcatgctatgatgtcatcatttgccattaaaacccagtttgtatgatgccaagaggattaattgtgcaagtgactgattcatttaaattgtaatcacatcccttttctgcttcaccaacctgaactgtttttaaaaatatcattaaaagtctgttctctttccttttga

SEQ ID NO: 166039 - DNA, 417 bp, Artificial Sequence
  derived and/or modified sequence
atggccaagcagccttcagacgtcagttccgaatgcgatcgagaaggcagacagttgcagccagccgagcgtcctccgcagcttcggcccggggccccaactagcttgcagaccgaaccccaagatcgttccccagcgcctatgagttgcgacaagagcacgcagacaccctcacctccctgtcaggcctttaatcactacctgagtgccatggccagcatgaggcaggctgagcccgccgacatgagacccgaaatctggattgcccaggaactgcgccggataggtgatgagttcaacgcctattacgctcgccgagtctttctcaacaactatcaagcagctgaagatcatccccggatggtcatcctgagactgttgcggtatatagtgcgattggtgtggcggatgcactag

SEQ ID NO: 166040 - DNA, 417 bp, Artificial Sequence
  derived and/or modified sequence
atggccaagcagcccagtgatgtgtccagtgaatgtgaccgggagggccggcagctgcagcctgctgagaggcctccccagctgcggcctggggcccccaccagcctgcagacagagccccaggacaggagccctgcccccatgagctgtgacaagagcacccagacccccagccccccctgccaggccttcaaccactacctgagcgccatggcctccatgaggcaggccgagcctgctgacatgaggcctgagatctggatcgcccaggagctgcggagaattggagatgagttcaatgcctactatgcccggcgggtcttcctgaacaactaccaggccgctgaggaccaccccaggatggtgatcctgcggctgctgcgctacatcgtgcggctggtgtggaggatgcactag

SEQ ID NO: 166041 - DNA, 417 bp, Artificial Sequence
  derived and/or modified sequence
atggccaagcagcccagcgacgtgagcagcgagtgcgaccgggaggggcggcagctgcagccagcggaacgacctcctcagctcaggcctggcgccccaactagtctgcagaccgaaccccaggacagatctcccgcccctatgagctgtgacaagagcacccagacaccttcccctccatgtcaggcattcaaccactatctctcagccatggcctccatgaggcaggccgagccagcagatatgagacccgaaatctggatagcccaggaactgcgccgcattggagatgagtttaatgcctattacgctaggagggtatttctgaataactaccaggccgcagaggaccaccccagaatggtgatcttgcgcctgctgcgatatatcgtccggctcgtgtggagaatgcattag

SEQ ID NO: 166042 - DNA, 417 bp, Artificial Sequence
  derived and/or modified sequence
atggccaaacaaccttcagacgtatcctcagaatgcgatagagagggtcggcaattgcagccagctgagaggccccctcagttgcgtcccggtgctccgacatccctacaaaccgagccgcaagaccggagtcccgcacccatgtcctgtgacaaatcgactcaaacacctagtcctccatgtcaggcctttaatcattatttatcggctatggcaagcatgcggcaggctgaaccagccgatatgcggccagagatttggattgcccaagagctcagaagaatcggtgacgaatttaatgcctattatgctcgacgggtgttcctgaataattaccaggcggcagaggaccaccccaggatggtgattctccgtctgcttcgatatatcgtgaggctggtgtggcggatgcattag

SEQ ID NO: 166043 - DNA, 417 bp, Artificial Sequence
  derived and/or modified sequence
atggccaagcagcccagcgacgtgagcagcgagtgcgacagagagggcagacagctgcagcccgccgagagacccccccagctgagacccggcgcccccaccagcctgcagaccgagccccaggacagaagccccgcccccatgagctgcgacaagagcacccagacccccagccccccctgccaggccttcaaccactacctgagcgccatggccagcatgagacaggccgagcccgccgacatgagacccgagatctggatcgcccaggagctgagaagaatcggcgacgagttcaacgcctactacgccagaagagtgttcctgaacaactaccaggccgccgaggaccaccccagaatggtgatcctgagactgctgagatacatcgtgagactggtgtggagaatgcactag

SEQ ID NO: 166044 - protein, 315 aa, Artificial Sequence
  derived and/or modified sequence
MRMCDRGIQMLITTVGAFAAFSLMTIAVGTDYWLYSRGVCRTKSTSDNETSRKNEEVMTHSGLWRTCCLEGAFRGVCKKIDHFPEDADYEQDTAEYLLRAVRASSVFPILSVTLLFFGGLCVAASEFHRSRHNVILSAGIFFVSAGLSNIIGIIVYISANAGDPGQRDSKKSYSYGWSFYFGAFSFIIAEIVGVVAVHIYIEKHQQLRAKSHSEFLKKSTFARLPPYRYRFRRRSSSRSTEPRSRDLSPISKGFHTIPSTDISMFTLSRDPSKITMGTLLNSDRDHAFLQFHNSTPKEFKESLHNNPANRRTTPV

SEQ ID NO: 166045 - DNA, 948 bp, Artificial Sequence
  derived and/or modified sequence
atgcggatgtgcgacaggggaatccagatgctcatcactaccgtgggtgcctttgctgccttctctctaatgacaatagccgtgggcacagactattggctttacagccgcggggtgtgtcgtaccaagagtacatctgacaatgagacatcgagaaagaatgaggaggtcatgacacactcaggactttggagaacatgttgcctggagggcgcctttcggggtgtgtgcaaaaaaattgaccacttccccgaagacgccgattatgagcaagatactgctgaatatctcctgagagctgtgagagccagctcagtcttccctatcttgagcgtgacactcctcttttttggtggcctgtgcgtggcagcaagtgaattccaccgaagtaggcacaacgtcattctctcagccggcattttcttcgtgtcggcaggactaagcaacatcataggcattatcgtgtatatttccgccaacgcaggtgatcctggacaaagggattccaagaagtcctactcatacgggtggtcattttacttcggggccttcagttttatcattgctgaaattgttggcgtggtggccgtgcacatttatattgagaaacaccagcagttaagggcgaagtctcattccgaattcctaaagaagtctaccttcgccagattgcccccgtaccgctacagatttagacgacgaagttcaagtaggtccaccgaacctcggtcacgggacctgtcacccataagcaaggggttccacaccattccttccacggacatctctatgttcaccctgtccagggatccatccaaaataacaatggggaccctcctgaacagtgaccgggaccacgcttttctccaattccacaatagcacaccaaaggagtttaaggagagtctgcataacaaccccgccaatagacggacaactccagtctag

SEQ ID NO: 166046 - DNA, 948 bp, Artificial Sequence
  derived and/or modified sequence
atgaggatgtgtgaccggggcatccagatgctgatcaccaccgtgggcgcctttgctgccttcagcctgatgaccatcgctgtgggcacagactactggctgtacagccggggcgtgtgcaggaccaagagcaccagtgacaatgagaccagcaggaagaatgaggaggtgatgacccacagcggcctgtggaggacctgctgcctggagggcgccttccggggcgtgtgcaagaagattgaccacttcccagaagatgctgactatgagcaggacacagctgagtacctgctgcgggctgtgcgggccagctctgtgttccccatcctgtctgtgaccctgctcttctttggaggcctgtgtgtggccgccagcgagttccacaggagccgccacaacgtcatcctgtctgctggcatcttctttgtgtctgctggcctgagcaacatcatcggcatcatcgtgtacatcagcgccaatgctggggaccccggccagagggacagcaagaagagctacagctatggctggagcttctactttggagccttctccttcatcatcgccgagatcgtgggcgtggtggccgtgcacatctacatcgagaagcaccagcagctgcgggccaagagccacagcgagttcctgaagaagagcacctttgcccggctgcccccctaccgctaccgcttcagaagaagaagcagcagccgcagcacagagcccaggagccgggacctgagccccatcagcaagggcttccacaccatccccagcacagacatctccatgttcaccctgagccgggaccccagcaagatcaccatgggcaccctgctgaacagcgaccgggaccacgccttcctgcagttccacaacagcacccccaaggagttcaaggagagcctgcacaacaacccagccaacagaaggaccacccctgtgtag

SEQ ID NO: 166047 - DNA, 948 bp, Artificial Sequence
  derived and/or modified sequence
atgcggatgtgcgaccggggcatccagatgctgatcaccaccgtgggggcattcgccgcctttagcctgatgacgatcgccgtgggcacagactattggctgtatagtagaggagtctgccgtactaagtccaccagtgacaatgagacaagtcgcaagaatgaggaggttatgacgcattctggattatggcgcacctgctgtctggagggagcttttcggggcgtttgtaagaagattgatcacttccccgaggatgctgactacgagcaggacaccgcagaatatttactgcgtgctgtgagagcatcctcagtgtttccgatcctgagcgtgacgctgttatttttcggtggcctgtgtgttgccgccagtgaatttcaccgcagccgccataacgtcatccttagcgctggcatattttttgtcagtgctggcctatcaaatatcatcggcatcatcgtgtacatctcagccaatgcaggggatcccggtcagagggattccaagaaatcctactcatatggttggtctttttattttggcgctttctcctttatcatcgctgaaatcgtgggggttgtcgcggtgcacatatacattgagaagcaccagcaactgcgggctaagagtcatagcgaatttctcaagaagtcaacgtttgcccgccttccaccctaccggtatcggttccgtcggcgttcatcctcaaggtccacagaaccacggtcccgggacctgtctccaatatccaaagggtttcacaccataccctcgacggatatcagtatgtttacactctctagagacccttctaagattactatgggcacactgctaaacagcgacagagaccacgccttcctccaatttcacaatagtacccctaaggagtttaaagaaagcctgcataacaaccccgctaaccgccgtactactcctgtgtag

SEQ ID NO: 166048 - DNA, 948 bp, Artificial Sequence
  derived and/or modified sequence
atgaggatgtgcgataggggcatccagatgctgataaccactgtcggagccttcgccgctttctctctgatgacaatcgccgtcggaaccgactattggctgtactctcggggagtgtgtagaacgaagtcaacttcagacaacgaaacgtcccggaaaaatgaggaagtcatgacccattcaggcttatggaggacttgttgcctcgagggcgcattcaggggcgtgtgcaagaaaatcgaccattttcccgaggatgcagactatgaacaggacacagctgaatacctgctaagagctgttcgagctagtagcgttttccctatcctgtccgtgaccctgttgttctttggcggactctgtgtggccgcatctgaatttcaccggagcagacataatgtgatcctgagcgcaggaatttttttcgtctcggccggattgagcaatatcatcggcatcattgtttacatcagcgctaatgcaggggatcccggacaacgagatagtaagaaatcttactcctacgggtggagcttctactttggagccttctcatttataattgcagagatcgtgggcgttgtggcagtgcatatatatatcgagaagcatcagcagcttagggcaaagtctcattccgaatttttaaagaagtccacattcgcgaggttgcccccttacaggtatcgcttcaggcggcgatccagttctcgaagcaccgaacctagatctagggaccttagtccaatttcaaagggctttcacactattcctagtacggacatctccatgtttaccctgagccgtgatccttcaaagatcacaatgggtaccctgttgaattctgacagggaccacgccttcctccagttccataatagcacgcctaaggagttcaaagagagtctacacaataatcctgcaaatcgtcgtaccactcccgtgtag

SEQ ID NO: 166049 - DNA, 948 bp, Artificial Sequence
  derived and/or modified sequence
atgcgaatgtgtgacagaggaattcagatgttgatcaccactgtgggcgccttcgcggccttttccctgatgaccatcgctgttggaactgactactggctgtactctagaggcgtttgcaggactaagagcacttcggacaacgaaacctctaggaaaaacgaagaagtgatgactcactctggcttgtggagaacctgttgtcttgaaggagccttccggggcgtctgtaaaaagatagatcatttcccagaggatgcggattacgagcaggacactgctgaatacctgctgcgagccgtcagggccagctctgtgtttcctatcctgtcagtgactttactttttttcggcgggctctgtgtcgctgcctcagaatttcacagatctcggcacaacgtgattctgagcgctggaatcttcttcgtctcagcgggcttaagtaacatcatcgggattatagtatacattagcgctaacgcaggcgaccccggccaacgcgactctaagaaaagctactcttacggttggagcttttattttggcgcgttttctttcatcatcgcagaaatcgtcggggtagttgccgttcatatctacatcgagaaacatcagcagctacgagccaagtcacattcagaatttctgaagaagtccacgttcgccagactacctccctatcggtatcggttcagaagaagatcatcctcccgttcaaccgagccccggtcgcgcgatctgtcacctataagtaaagggttccacacaatcccctccacggatatatcaatgtttaccctgtcccgggatccctcaaaaatcaccatgggaacactgctgaattctgacagagaccatgcttttctacagtttcacaatagtacaccaaaggagttcaaagaaagcctgcataacaacccagcaaatagacgtaccactccggtctag

SEQ ID NO: 166050 - DNA, 948 bp, Artificial Sequence
  derived and/or modified sequence
atgagaatgtgcgatcgtggtatccagatgctaatcacaactgtaggcgcctttgccgcgttctccctgatgactatcgccgtgggcaccgactattggctctactcaaggggcgtttgtcgtaccaagtcaacatccgataatgaaacttctaggaaaaatgaggaagtaatgacacactccggtctttggcggacatgctgtttagagggagcctttagaggcgtgtgtaagaaaattgaccactttcctgaagacgctgattacgaacaggacaccgctgaatatctattacgcgccgtcagagcttcaagtgtatttcctatcctgtccgtgaccctgctgttttttggagggctgtgtgtcgccgcttccgaatttcatagatcccgacacaatgttattctgtcagccggaatcttctttgtgtctgcgggtttgtctaacatcattgggatcatcgtttatatcagtgccaacgccggagaccctgggcaaagagattccaagaagtcgtactcttatggatggtctttctacttcggagctttttcattcatcattgcggaaatcgtaggtgtggtagccgtgcatatttatatcgagaagcatcagcagctccgcgctaaatcccattcagaattcttgaaaaaaagcacattcgcacgcttaccaccctaccgttacaggttcaggagacgctccagtagtagatctaccgaaccccgatcccgcgacctctctcccatcagtaaagggttccatacgatcccatctaccgacatttccatgttcaccctgtcccgtgatccaagtaaaatcaccatgggcacgctcctcaactccgatcgcgatcatgcgttcttgcagttccacaattcaactccaaaagaattcaaagagagcctccataacaatcctgccaatcgaagaacaaccccagtctag

SEQ ID NO: 166051 - DNA, 3088 bp, Artificial Sequence
  derived and/or modified sequence
actttttgcccgcctaagcgagccatagagccgtctccagagctgccggtgcctttaagaagactcggtctttcgggtcttctttttccccaatgggctccagtggtgcccgcagcaaaaggcaaacttgcctggctcatggggtgaaagggaggattgaagaatgccgcgttgggtgggtgctgagggagcgccagagtgcgctacgggcttcgctccccttcccctttccttaacccttcctagagcggaggaaccgggtcgtgctgcagcgcccaggagccagggcgctgactgtcctcggctccagaaactttgcgcggagagtgggcttgactgggcagagccgagccggctggctgacccgggaaggaacgggggaagggcggggtgagggaagaaagaccctttagcaccccgggtttctagcccgggcggcggtgtgcagctgcatgagggagctgtcccttcggcaccacggaccttaaagcctaggcgttaagacgacggaggcggggcaacaggcggggagctgtcccttcagcaccacggaccttggcgcccccagggaaaccagccggcccccgccccaggactctgtcttttctccagtttgagcgggggtgtcgggagcaggcggagagctttcctgcgaggctgtggaagcagtgaacactcttctcagcggctcgcctcccagcagtgctattttttgccatccgccctcacccccagcacacgcgctcgcacacacacgcacgcacgcacacacacacacacacacactcacacagagacctctctgggtttctttgccttgagtctcccggggctgtgagaagccaggcgcatctcaaaccgagctggcagctccaggctccggagccatgccctgcacggaccctcgtctttaccacgctcctgaggaatgaaaggaacccagggaccctcagaaggcagcagtgatgcggaccaaccccccggagcctgcacccttccgagggccataggcgacccagggaactggagagagctccagaaaggaaatcccagctttcccaaagtccctgtggatgctgacaaaaggagacctgaatttttggaagagcctgtactaggttacccggctgcagagtgattttcccctccggcactgactctccccctccaacccccagccgtccagagtaccatgaagaattatgaggatgtgtgacagaggtatccagatgttgatcaccactgtaggagcctttgccgcttttagtttaatgaccattgcagtgggcacggactactggttatattccagaggtgtgtgcaggactaaatctacaagtgataatgaaaccagcaggaagaatgaagaagtaatgacccattcggggctgtggaggacctgctgcctagaaggggctttccgaggcgtgtgcaagaaaatcgatcacttccctgaagatgctgactacgaacaggacacagccgaatatctcctgcgagctgtgagggcctccagtgtcttccccatcctcagtgtcacgctgctgttcttcggcgggctctgcgtggcagccagtgagttccaccgcagcagacacaacgtcattctcagcgcgggcatcttttttgtctctgcagggttaagcaacatcattggcatcatagtttatatatcagccaacgccggagaccccgggcagcgtgactccaaaaaaagttactcctatggttggtccttttatttcggagccttctctttcatcatcgcagaaattgtaggagtggttgccgtgcacatctatattgaaaaacatcagcagttacgagccaaatcccactcggagttcctgaagaaatctacttttgcccgcctcccaccctacaggtatcgattccggaggcggtcaagttctcgctccaccgagcccagatcccgagacctgtcccccatcagcaaaggcttccacaccatcccttccactgacatctcgatgttcaccctctcccgggacccctcaaagatcaccatggggaccctcctcaactccgaccgggaccacgcttttctacagttccacaattccacacccaaagagttcaaagagtcactgcataataatccggccaacaggcgcaccacgcccgtctgaactgacctctgacctctgccccacgcccagcacagccttgggggaagtgtacagagatgtctctgaggttgcatggcatggtccttgtgatggtattactttttacaaagaatgaaaccaaatggactcagccctctcccacattttcccctcaccctccaagtcctaacccctccatcctctctaacttttcaagccaatcccttaatgtcattcctctctctgtgtatctgtgccagatgttttcctttcttccttctttactggaaggacctccacattcttccctccttggaagaggactttactaaaagtcacaggtggtggccaggggggatttccgaatctccatcaggcgcgctcatagttgtccccattgtctacccacacaaatcctcaggaaaccaaccaccgcccaggtggccctgagggaggcattcacctttatgtgttagaaaaacatgaccagaaatcaaagatgtcagagccccgaagcagctaatgtaataagcactcatgttattaaaggttttgccttgtcgtaaccaaccgagccgggggtgttttgtttcttgtgggtgtttcctacacaaactcactcccctgcctccaaactggctcatgtccatcttggaagctgaactttgctcatccacacttgagccactaggaaggatctccctgcacctttggaagctagtaaggcattcccacaaatgtccaaatcaatgcatccttctacttgaattcctggaggctacctgggggtgggtgagtgaatgctggttttcaagatctaactttggcatgcaatagctctagaaccttgggcaagtcacctaagcctcaagcctcagtctcctcatctgtaaaatggaacatgataatagcactctcctccacagagttatgaggtttaaataaaactgtgtgtaaaa

SEQ ID NO: 166052 - DNA, 948 bp, Artificial Sequence
  derived and/or modified sequence
atgagaatgtgcgacagaggcatccagatgctgatcaccaccgtgggcgccttcgccgccttcagcctgatgaccatcgccgtgggcaccgactactggctgtacagcagaggcgtgtgcagaaccaagagcaccagcgacaacgagaccagcagaaagaacgaggaggtgatgacccacagcggcctgtggagaacctgctgcctggagggcgccttcagaggcgtgtgcaagaagatcgaccacttccccgaggacgccgactacgagcaggacaccgccgagtacctgctgagagccgtgagagccagcagcgtgttccccatcctgagcgtgaccctgctgttcttcggcggcctgtgcgtggccgccagcgagttccacagaagcagacacaacgtgatcctgagcgccggcatcttcttcgtgagcgccggcctgagcaacatcatcggcatcatcgtgtacatcagcgccaacgccggcgaccccggccagagagacagcaagaagagctacagctacggctggagcttctacttcggcgccttcagcttcatcatcgccgagatcgtgggcgtggtggccgtgcacatctacatcgagaagcaccagcagctgagagccaagagccacagcgagttcctgaagaagagcaccttcgccagactgcccccctacagatacagattcagaagaagaagcagcagcagaagcaccgagcccagaagcagagacctgagccccatcagcaagggcttccacaccatccccagcaccgacatcagcatgttcaccctgagcagagaccccagcaagatcaccatgggcaccctgctgaacagcgacagagaccacgccttcctgcagttccacaacagcacccccaaggagttcaaggagagcctgcacaacaaccccgccaacagaagaaccacccccgtgtag

SEQ ID NO: 166053 - protein, 335 aa, Artificial Sequence
  derived and/or modified sequence
MAAGAAEAAVAAVEEVGSAGQFEELLRLKAKSLLVVHFWAPWAPQCAQMNEVMAELAKELPQVSFVKLEAEGVPEVSEKYEISSVPTFLFFKNSQKIDRLDGAHAPELTKKVQRHASSGSFLPSANEHLKEDLNLRLKKLTHAAPCMLFMKGTPQEPRCGFSKQMVEILHKHNIQFSSFDIFSDEEVRQGLKAYSSWPTYPQLYVSGELIGGLDIIKELEASEELDTICPKAPKLEERLKVLTNKASVMLFMKGNKQEAKCGFSKQILEILNSTGVEYETFDILEDEEVRQGLKAYSNWPTYPQLYVKGELVGGLDIVKELKENGELLPILRGEN

SEQ ID NO: 166054 - DNA, 1008 bp, Artificial Sequence
  derived and/or modified sequence
atggctgcaggtgcagctgaggcagccgtggcggctgtcgaagaggtcggcagtgcaggccaatttgaagaactgttaaggctgaaggctaagtctcttttggtggtccatttttgggctccgtgggcgccccagtgcgcccagatgaatgaagtgatggccgaactggctaaggaactcccacaggtatcttttgtgaaattggaggccgagggagttcccgaagtctctgagaagtatgaaatatcatcagtgcccacgttcctgttctttaaaaacagccagaaaatcgaccggctcgatggtgctcacgccccagaactaacaaagaaagttcaacgccatgcaagctcaggatcgtttctgccttccgccaatgaacatcttaaagaagatcttaacctccggctcaaaaagctcactcatgccgcaccatgtatgttattcatgaagggcacccctcaagaacctcgctgtggatttagtaaacagatggtggagatcctccataagcataatattcagttctcttcctttgatatatttagcgacgaggaagtgaggcagggactgaaggcatactcctcatggcccacatatccccaattgtatgtctccggcgaactaatcggaggattagacatcatcaaggagctcgaggcaagcgaggagcttgacaccatatgcccaaaagcacctaagttggaagaaagactgaaggtcctgactaacaaggcctccgtgatgttgtttatgaaaggcaataaacaggaggctaagtgcggcttttcaaaacagatactggaaattctcaactctaccggcgtggaatacgagaccttcgatatcctggaggatgaagaggtccggcaggggctgaaagcctactccaactggcctacttatccgcagctgtacgtgaagggcgagctggtaggcggcctcgacatagtgaaagagctgaaagagaacggcgaactactcccaattctccgaggggagaattag

SEQ ID NO: 166055 - DNA, 1008 bp, Artificial Sequence
  derived and/or modified sequence
atggcagctggcgccgcggaagctgctgtcgccgcagttgaggaggtgggctcagccggccagtttgaagagttgctgaggttgaaggccaagtccctcctcgtagtgcacttttgggctccgtgggctcctcagtgcgcccagatgaatgaggtgatggcagaactcgccaaagagttgccacaggtgtcgttcgtaaagctggaagctgagggagtgcccgaggtgagcgagaaatatgaaatctccagcgttcccaccttcctcttctttaagaactcccagaaaatcgatcgcctcgacggagcacatgcccctgagctgactaaaaaggtccagcgccatgcctcttccggtagttttttacccagtgcaaatgaacacctgaaggaggatctcaatctacgtcttaagaagctgactcacgctgctccgtgcatgctttttatgaaaggcacaccacaggaacccagatgtggctttagcaagcaaatggttgagatcctccacaagcataacattcagttctcttcattcgatatcttttcagatgaggaggtgaggcaggggctgaaggcgtactcctcctggccaacctatccccaattatatgtgagcggagaactcattggtggattggatataatcaaggaactggaggccagcgaggaactggacaccatctgtcctaaagcccctaagttggaggagagactcaaagtgctgacaaacaaagcttcagtaatgttgtttatgaaggggaacaagcaagaggcaaagtgcgggttttcaaaacagatactggagatattaaattctaccggagtagaatatgagacattcgatatcctggaagacgaagaggtaaggcaagggctgaaagcttacagtaactggcccacatacccacagctgtatgtcaaaggtgagctcgttggaggcctggatattgtaaaagaattaaaagagaatggagagttgctgcccatcctgcggggggagaattag

SEQ ID NO: 166056 - DNA, 1008 bp, Artificial Sequence
  derived and/or modified sequence
atggcagcgggggctgcagaagctgccgttgctgccgtggaagaggttgggtccgcgggccagtttgaggaactcctgcgcctcaaggcaaaatccctgttggttgtgcacttctgggccccctgggccccccagtgtgcacaaatgaacgaagttatggcagagctagccaaggagttgcctcaagtgagcttcgtcaaactcgaggccgagggtgtacctgaagtgtctgaaaagtatgagattagcagtgtgcccacattcctcttttttaagaatagtcaaaaaattgataggctggatggggcgcatgcacccgaattgacaaaaaaggtgcagcgacacgcctcctccggttctttcctacctagtgccaacgaacatttgaaagaggacctgaatttacgattgaagaagctcacccacgctgccccatgcatgctctttatgaaaggtacaccccaggagcctcgatgtggctttagcaagcagatggtggaaatccttcacaagcataatatccagttttcaagcttcgacatattctcagacgaagaagttcgccaaggactgaaggcctattcgtcctggccaacatatccacagctctacgtaagcggggagctgattgggggcctcgatattattaaggagctggaggccagcgaggagctcgacaccatctgcccaaaagctcctaagctagaggagaggctaaaggtcctgactaacaaagctagcgtgatgcttttcatgaagggtaacaaacaggaggccaaatgtggattctcaaagcagatcctggagatcctcaacagcaccggggtggagtacgagacattcgacatcctggaggacgaggaagttagacagggcctgaaggcctactcgaattggcctacatacccacagctgtacgtgaagggggagctggtaggaggcctggacatcgttaaggaattgaaggaaaacggcgagctgctccccattttgaggggcgaaaattag

SEQ ID NO: 166057 - DNA, 1262 bp, Artificial Sequence
  derived and/or modified sequence
gcttctgtctggcggcggcagcatggcggcgggggcggctgaggcagctgtagcggccgtggaggaggtcggctcagccgggcagtttgaggagctgctgcgcctcaaagccaagtccctccttgtggtccatttctgggcaccatgggctccacagtgtgcacagatgaacgaagttatggcagagttagctaaagaactccctcaagtttcatttgtgaagttggaagctgaaggtgttcctgaagtatctgaaaaatatgaaattagctctgttcccacttttctgtttttcaagaattctcagaaaatcgaccgattagatggtgcacatgccccagagttgaccaaaaaagttcagcgacatgcatctagtggctccttcctacccagcgctaatgaacatcttaaagaagatctcaaccttcgcttgaagaaattgactcatgctgccccctgcatgctgtttatgaaaggaactcctcaagaaccacgctgtggtttcagcaagcagatggtggaaattcttcacaaacataatattcagtttagcagttttgatatcttctcagatgaagaggttcgacagggactcaaagcctattccagttggcctacctatcctcagctctatgtttctggagagctcataggaggacttgatataattaaggagctagaagcatctgaagaactagatacaatttgtcccaaagctcccaaattagaggaaaggctcaaagtgctgacaaataaagcttctgtgatgctctttatgaaaggaaacaaacaggaagcaaaatgtggattcagcaaacaaattctggaaatactaaatagtactggtgttgaatatgaaacattcgatatattggaggatgaagaagttcggcaaggattaaaagcttactcaaattggccaacataccctcagctgtatgtgaaaggggagctggtgggaggattggatattgtgaaggaactgaaagaaaatggtgaattgctgcctatactgagaggagaaaattaataaatcttaaacttggtgcccaactattgtaagaaatatttaattacattgggagcagttcatgatttagtcctcagaaatggactaggaatagaaaattcctgctttctcagttacatgttttgtgtatttcacaatgtcgtgctaaataaatgtatgttacatttttttcccaccaaaaatagaatgcaataaacatcttcaaattattaacaataattgtatgaaaaaa

SEQ ID NO: 166058 - DNA, 1322 bp, Artificial Sequence
  derived and/or modified sequence
gcttctgtctggcggcggcagcatggcggcgggggcggctgaggcagctgtagcggccgtggaggaggtcggctcagccgggcagtttgaggagctgctgcgcctcaaagccaagtccctccttgtggtccatttctgggcaccatgggctccacagtgtgcacagatgaacgaagttatggcagagttagctaaagaactccctcaagtttcatttgtgaagttggaagctgaaggtgttcctgaagtatctgaaaaatatgaaattagctctgttcccacttttctgtttttcaagaattctcagaaaatcgaccgattagatggtgcacatgccccagagttgaccaaaaaagttcagcgacatgcatctagtggctccttcctacccagcgctaatgaacatcttaaagaagatctcaaccttcgcttgaagaaattgactcatgctgccccctgcatgctgtttatgaaaggaactcctcaagaaccacgctgtggtttcagcaagcagatggtggaaattcttcacaaacataatattcagtttagcagttttgatatcttctcagatgaagaggttcgacagggactcaaagcctattccagttggcctacctatcctcagctctatgtttctggagagctcataggaggacttgatataattaaggagctagaagcatctgaagaactagatacaatttgtcccaaagctcccaaattagaggaaaggctcaaagtgctgacaaataaagcttctgtgatgctctttatgaaaggaaacaaacaggaagcaaaatgtggattcagcaaacaaattctggaaatactaaatagtactggtgttgaatatgaaacattcgatatattggaggatgaagaagttcggcaaggattaaaagcttactcaaattggccaacataccctcagctgtatgtgaaaggggagctggtgggaggattggatattgtgaaggaactgaaagaaaatggtgaattgctgcctatactgagaggagaaaattaataaatcttaaacttggtgcccaactattacggggtctggctctgtcacccaggctggagtgcagtggcacgattatggctcattgcagcctcgacttctcggggccaagcgatcctcctgcctcagccttctgagtagctgggaccacaggcgtgcaccaccatgcccacctaattttttatttcttgtagagatgaggtctcctgcctcagcctcccaaagtgctggaatttacaggtaggaccaccacacttggtccacttacttataataaacattgatttggtcgttc

SEQ ID NO: 166059 - DNA, 1921 bp, Artificial Sequence
  derived and/or modified sequence
gcttctgtctggcggcggcagcatggcggcgggggcggctgaggcagctgtagcggccgtggaggaggtcggctcagccgggcagtttgaggagctgctgcgcctcaaagccaagtccctccttgtggtccatttctgggcaccatgggctccacagtgtgcacagatgaacgaagttatggcagagttagctaaagaactccctcaagtttcatttgtgaagttggaagctgaaggtgttcctgaagtatctgaaaaatatgaaattagctctgttcccacttttctgtttttcaagaattctcagaaaatcgaccgattagatggtgcacatgccccagagttgaccaaaaaagttcagcgacatgcatctagtggctccttcctacccagcgctaatgaacatcttaaagaagatctcaaccttcgcttgaagaaattgactcatgctgccccctgcatgctgtttatgaaaggaactcctcaagaaccacgctgtggtttcagcaagcagatggtggaaattcttcacaaacataatattcagtttagcagttttgatatcttctcagatgaagaggttcgacagggactcaaagcctattccagttggcctacctatcctcagctctatgtttctggagagctcataggaggacttgatataattaaggagctagaagcatctgaagaactagatacaatttgtcccaaagctcccaaattagaggaaaggctcaaagtgctgacaaataaagcttctgtgatgctctttatgaaaggaaacaaacaggaagcaaaatgtggattcagcaaacaaattctggaaatactaaatagtactggtgttgaatatgaaacattcgatatattggaggatgaagaagttcggcaaggattaaaagcttactcaaattggccaacataccctcagctgtatgtgaaaggggagctggtgggaggattggatattgtgaaggaactgaaagaaaatggtgaattgctgcctatactgagaggagaaaattaataaatcttaaacttggtgcccaactattacggggtctggctctgtcacccaggctggagtgcagtggcacgattatggctcattgcagcctcgacttctcggggccaagcgatcctcctgcctcagccttctgagtagctgggaccacaggcgtgcaccaccatgcccacctaattttttatttcttgtagagatgaggtctcctgcctcagcctcccaaagtgctggaatttacaggagtgtcggctgtgccccttgtgatgggtgaggaaaggtatccacctttctgaatcagacacaagctgcagtagcttcctgatgcctcattcaccaggatgggtaactttaaagacaagttttataactggcatcccatctggtttcagagtcttgggggcttttttcatacagctttgtctgatatttagagacattcagattcagaagccatgagttcagttagctcatgggccgggcacgtgcactgactcactggctgcagcagaacacgttgagggagtcttggtgcacttaggtcactgtaaggttctagggctgggagctgggatttgaaccaggatctgtcagcgcagccccagtgctgtgcttgaagcctcgtgccacactggctttgaggtagcacgctgcaagttagtgagtggagttgcccaagtctggggcttctgaaatgacctggtatttttatgttcctgttagaaatggtgtggctttcacaaattaagtgccaggctgggcacaatggctcgtgcttgtaatcccagcactttgggaggcggaggcaggcgggttgcttgagctccggagcttgagaccagcctgagcaacatggcgaaacctcatatctacaaaaaataaaaaattaactggtca

SEQ ID NO: 166060 - DNA, 1008 bp, Artificial Sequence
  derived and/or modified sequence
atggctgctggagctgctgaggccgctgtggccgctgtggaggaggtgggcagcgctggccagtttgaggagctgctgcggctgaaggccaagagcctgctggtggtgcacttctgggccccctgggccccccagtgtgcccagatgaatgaggtgatggccgagctggccaaggagctgccccaggtgtcctttgtgaagctggaggccgagggcgtgcctgaggtgtctgagaagtatgagatcagctctgtgcccaccttcctgttcttcaagaacagccagaagattgaccggctggatggagcccacgcccctgagctgaccaagaaggtgcagagacatgccagcagcggcagcttcctgcccagcgccaatgagcacctgaaggaggacctgaacctgcggctgaagaagctgacccatgctgccccctgcatgctgttcatgaagggcaccccccaggagccccgctgtggcttcagcaagcagatggtggagatcctgcacaagcacaacatccagttcagcagctttgacatcttcagtgatgaggaggtgcggcagggcctgaaggcctacagctcctggcccacctacccccagctgtatgtgtctggagagctgattggaggcctggacatcatcaaggagctggaggccagcgaggagctggacaccatctgccccaaggcccccaagctggaggagcggctgaaggtgctgaccaacaaggcctctgtgatgctgttcatgaagggcaacaagcaggaggccaagtgtggcttcagcaagcagatcctggagatcctgaacagcactggagtggagtatgagacctttgacatcctggaggatgaggaggtgcggcagggcctgaaggcctacagcaactggcccacctacccccagctgtatgtgaagggggagctggtgggcggcctggacatcgtgaaggagctgaaggaaaatggagagctgctgcccatcctgcggggggagaactag

SEQ ID NO: 166061 - DNA, 1008 bp, Artificial Sequence
  derived and/or modified sequence
atggccgccggcgccgccgaggccgccgtggccgccgtggaggaggtcggatcggcggggcaattcgaagagctcctccggcttaaggcgaaatcgttactcgtggtgcatttttgggccccttgggccccgcagtgcgcacaaatgaacgaggtgatggccgaattagcaaaagaattgcctcaggtgtcgtttgtaaaactggaggctgagggggtccctgaagtgtccgaaaaatacgaaatctctagcgtgcctaccttcctgtttttcaagaattcccaaaaaatcgatcgactggacggcgcgcacgccccagagctgaccaagaaagttcaaagacatgcatccagcggcagctttctgcccagcgcgaacgaacatcttaaggaagatcttaatctccgcctcaaaaagctaacacacgcagcaccgtgtatgttgttcatgaaggggacccctcaggaacctcgctgtggctttagcaaacagatggtggaaattctgcacaaacacaacatccagttctccagtttcgacattttctcagatgaagaagtccgacaagggctgaaggcctactccagttggcccacatacccccagctgtatgttagcggcgagctgataggaggccttgacatcatcaaggagcttgaggcttccgaagaactcgatactatctgcccaaaggcacccaaattagaagaacgactgaaggtgctgacaaacaaggccagcgtgatgctcttcatgaagggaaacaaacaggaagccaaatgcgggttttccaaacaaatcctggagatcctgaatagcaccggcgtcgagtacgagacctttgacattctggaagacgaagaggtgaggcaggggctcaaagcctattccaattggcccacgtatccccaattgtatgttaagggcgaacttgtgggcggtttggacatcgtcaaggaattaaaggagaatggggagcttctccccatcttaagaggtgaaaattag

SEQ ID NO: 166062 - DNA, 1008 bp, Artificial Sequence
  derived and/or modified sequence
atggccgccggcgccgccgaggccgccgtggccgccgtggaggaggtcgggtctgccggccagttcgaggagctgttgcgtttgaaagcgaagagccttctggtcgtgcatttctgggccccatgggcgccccagtgcgctcagatgaacgaagtcatggcggaacttgcaaaagagctgcctcaagtttcttttgtgaagctggaggctgagggagttcccgaggtgagcgaaaagtacgagatatctagcgtcccaacattcctcttctttaaaaatagccaaaagatcgatagactcgatggtgctcatgcccccgagctgacgaaaaaggtccaacgacatgccagctctgggtcttttttgcctagcgcaaacgaacatttaaaggaggacctgaatctgcggttaaaaaaactcactcacgccgccccatgcatgctgttcatgaaaggtactccccaggagcccagatgcggattttccaagcagatggttgagattttgcacaagcataacatccagttctccagctttgatatctttagcgacgaagaggttagacagggtttaaaggcttacagttcgtggccgacatacccccagctatacgtgtctggagagctcattggcggattagatattatcaaggagcttgaggccagcgaagagttagataccatctgccccaaagctcccaaactcgaagaacgcctgaaagtgctgactaacaaagcaagcgtgatgctgtttatgaaaggcaacaagcaggaagctaagtgcggatttagcaagcagatactggagatcctgaacagtacgggggtggagtacgagacctttgacatcttagaagacgaagaggtcagacagggactgaaggcctactcaaactggccaacatacccccaactgtacgtgaagggcgaactggtgggagggctcgatatagttaaagaacttaaggaaaacggggaactactgcccatcctgcgtggggagaactag

SEQ ID NO: 166063 - DNA, 1008 bp, Artificial Sequence
  derived and/or modified sequence
atggccgccggcgccgccgaggccgccgtggccgccgtggaggaggtgggaagtgctggccagtttgaagaactcctgcggcttaaggccaagtctctgcttgtcgtacacttctgggccccttgggctccccagtgtgcacagatgaatgaggtgatggctgaactggcaaaagaattgcctcaggtgagctttgtgaaactcgaagcagaaggtgttccagaggtctctgagaagtatgagatatcctccgttccaacttttctcttctttaagaacagccagaagatcgaccggcttgacggcgctcacgctccagagctgacgaaaaaggtacagcggcacgcttccagcgggagcttcctgccatcagctaacgagcatttgaaggaagatctgaacctcagattgaagaaactcacccacgctgctccctgcatgctgttcatgaagggaacaccccaggagcccagatgcggatttagtaaacagatggtcgagatactgcataaacataatatacagttctctagctttgatatattctcggatgaggaagtgcgccagggtctgaaggcatacagttcgtggccaacctacccccagctgtacgtcagtggcgagcttatcggtggactggacattattaaagagctggaagcaagtgaggaactggatactatttgcccaaaggcacctaaattggaggaacgccttaaagtcctcactaacaaggccagcgtgatgctgttcatgaaaggtaacaaacaagaggctaagtgtggatttagcaagcagatactagagatacttaacagcactggagttgagtatgaaacctttgatatactggaggatgaagaggtgagacaaggactaaaggcatatagcaattggccgacctaccctcaactgtacgtaaaaggggagctcgtgggcggcctggatatcgtgaaggagctgaaggaaaacggcgaactcttacccatactgaggggcgaaaactag

SEQ ID NO: 166064 - DNA, 1008 bp, Artificial Sequence
  derived and/or modified sequence
atggcagctggggcagccgaggccgcagtagcagcagtagaggaagtaggcagcgcagggcagttcgaggaattgctccggttaaaggcaaaaagtctattggtggtccacttctgggccccatgggccccacagtgcgcccagatgaacgaggttatggccgaacttgcaaaagaactgcctcaggtgagctttgttaaactggaagcggagggtgtgcccgaagtctctgagaagtacgagatcagttcagtgcccacatttctcttttttaaaaattcgcagaaaatagatagactggatggcgcacacgcacccgagctgacaaaaaaagtgcagagacacgcatcatcagggtcatttctgccctccgcaaacgagcacctgaaggaggatctgaacttgcgactcaagaagctgactcacgcggctccctgcatgctgttcatgaagggcactccccaggaaccaaggtgcggcttctctaagcagatggtggagatcctgcacaagcacaatattcagttctcttcctttgatatcttctctgacgaggaggtccgccagggcctgaaagcctattccagttggccaacttatcctcaactctacgtgagtggtgagttaatcggaggactggacattattaaggaactggaggcaagcgaagagctcgacacgatctgcccgaaggctcctaagctcgaagagagattaaaagtactaacaaacaaagcctccgtgatgttgttcatgaagggcaacaaacaagaagcaaaatgcggcttttctaagcagatcctcgagatcttaaactctaccggtgttgaatacgagacatttgacatcttggaagatgaggaagttcggcagggtttgaaggcctactcaaactggcctacatatccccagctgtacgtgaaaggcgaactggtggggggtctggatatcgtcaaggaacttaaggagaacggggagctactacctatcttacgcggagagaactag

SEQ ID NO: 166065 - DNA, 1008 bp, Artificial Sequence
  derived and/or modified sequence
atggccgctggagccgctgaggctgccgttgcggcagtcgaagaagtcggctcggccggacagttcgaagagctcctgaggctgaaggctaaaagtcttcttgtcgtgcacttctgggcgccttgggcccctcagtgtgctcagatgaatgaggttatggctgaactggccaaagagctcccccaggtgtcatttgtgaagctcgaggcagaaggggtccctgaggtgagcgaaaagtatgagatatcttcagtacccacattcctgttttttaagaatagtcagaagattgataggttggatggggctcacgcgccagagttaaccaaaaaggtgcagcgccacgcctcctcaggttccttcctaccttccgctaatgagcacctgaaggaggatttgaacctacggttgaagaaactgacccatgctgccccatgtatgctgttcatgaagggcacacctcaggaacctcggtgtggtttctcaaaacagatggttgagatcctgcataagcacaatattcaattttcttctttcgacattttcagtgacgaggaggtaaggcaggggctgaaggcatactcctcctggcccacttatcctcagttgtatgttagcggcgagcttataggcggactcgacatcatcaaagagctggaggcaagcgaggaactggacactatttgcccgaaggctcccaagctggaggagagattgaaggtcctgaccaataaggcctctgtaatgctgtttatgaaaggaaacaaacaggaggccaaatgcgggttctctaagcagatcttagagatcctcaactctacaggcgtagaatatgaaacgttcgatattcttgaggatgaagaggtccggcaaggcctgaaggcgtattccaattggcccacctatcctcaactgtacgttaagggcgaactggtgggaggcctggacatcgttaaggagcttaaggaaaatggggaactcctaccgatcctgcgcggtgaaaactag

SEQ ID NO: 166066 - DNA, 1008 bp, Artificial Sequence
  derived and/or modified sequence
atggctgccggtgcagcagaggcggctgtcgctgcagtcgaagaggtgggtagcgcaggtcagttcgaagaactcttgagacttaaagccaagtccctactggtggtgcatttctgggctccatgggcgccacaatgcgcacagatgaatgaggttatggccgaacttgcgaaagaattgcctcaggttagcttcgtgaagcttgaggccgagggggttcccgaagtgtctgaaaagtatgagatatcctcggtccctacgttcctgttcttcaagaatagtcagaagatcgacaggctcgatggagcacatgccccagaattgacgaagaaggtgcaaagacacgcctcttcaggatccttcctccctagtgccaatgagcacctcaaggaggatctgaatctacggttgaaaaagttgacccacgcggcaccttgtatgttatttatgaaggggactcctcaggaacctagatgcgggtttagcaaacagatggtcgagatcctccacaaacataacatccagtttagttccttcgacatctttagcgacgaggaggtgcggcaaggcctcaaggcttatagctcctggcccacctatccacaattgtatgtgagcggggaactgatcggaggcctcgacatcattaaagagctcgaggcaagcgaggaactagataccatttgccctaaagctccaaaactggaagagcggcttaaagttctgaccaacaaggcctctgttatgctctttatgaaagggaataagcaggaggccaagtgtggattttctaagcagatcctggaaatactaaatagcaccggtgtggagtatgaaacatttgacatcctggaggatgaagaagtaaggcagggtctgaaggcctatagtaactggccgacatatccacagctgtacgtaaagggagagctggtcggcggtctagacattgtaaaggagctgaaagagaatggcgagctgctgcccatcctcagaggcgagaactag

SEQ ID NO: 166067 - DNA, 1008 bp, Artificial Sequence
  derived and/or modified sequence
atggccgccggcgccgccgaggccgccgtggccgccgtggaggaggtgggcagcgccggccagttcgaggagctgctgagactgaaggccaagagcctgctggtggtgcacttctgggccccctgggccccccagtgcgcccagatgaacgaggtgatggccgagctggccaaggagctgccccaggtgagcttcgtgaagctggaggccgagggcgtgcccgaggtgagcgagaagtacgagatcagcagcgtgcccaccttcctgttcttcaagaacagccagaagatcgacagactggacggcgcccacgcccccgagctgaccaagaaggtgcagagacacgccagcagcggcagcttcctgcccagcgccaacgagcacctgaaggaggacctgaacctgagactgaagaagctgacccacgccgccccctgcatgctgttcatgaagggcaccccccaggagcccagatgcggcttcagcaagcagatggtggagatcctgcacaagcacaacatccagttcagcagcttcgacatcttcagcgacgaggaggtgagacagggcctgaaggcctacagcagctggcccacctacccccagctgtacgtgagcggcgagctgatcggcggcctggacatcatcaaggagctggaggccagcgaggagctggacaccatctgccccaaggcccccaagctggaggagagactgaaggtgctgaccaacaaggccagcgtgatgctgttcatgaagggcaacaagcaggaggccaagtgcggcttcagcaagcagatcctggagatcctgaacagcaccggcgtggagtacgagaccttcgacatcctggaggacgaggaggtgagacagggcctgaaggcctacagcaactggcccacctacccccagctgtacgtgaagggcgagctggtgggcggcctggacatcgtgaaggagctgaaggagaacggcgagctgctgcccatcctgagaggcgagaactag

SEQ ID NO: 166068 - protein, 643 aa, Artificial Sequence
  derived and/or modified sequence
MATTAELFEEPFVADEYIERLVWRTPGGGSRGGPEAFDPKRLLEEFVNHIQELQIMDERIQRKVEKLEQQCQKEAKEFAKKVQELQKSNQIKEAADIIQKLHLIAQELPFDRFSEVKSKIASKYHDLECQLIQEFTSAQRRGEISRMREVAAVLLHFKGYSHCVDVYIKQCQEGAYLRNDIFEDAGILCQRVNKQVGDIFSNPETVLAKLIQNVFEIKLQSFVKEQLEECRKSDAEQYLKNLYDLYTRTTNLSSKLMEFNLGTDKQTFLSKLIKSIFISYLENYIEVETGYLKSRSAMILQRYYDSKNHQKRSIGTGGIQDLKERIRQRTNLPLGPSIDTHGETFLSQEVVVNLLQETKQAFERCHRLSDPSDLPRNAFRIFTILVEFLCIEHIDYALETGLAGIPSSDSRNANLYFLDVVQQANTIFHLFDKQFNDHLMPLISSSPKLSECLQKKKEIIEQMEMKLDTGIDRTLNCMIGQMKHILAAEQKKTDFKPEDENNVLIQYTNACVKVCAYVRKQVEKIKNSMDGKNVDTVLMELGVRFHRLIYEHLQQYSYSCMGGMLAICDVAEYRKCAKDFKIPMVLHLFDTLHALCNLLVVAPDNLKQVCSGEQLANLDKNILHSFVQLRADYRSARLARHFS

SEQ ID NO: 166069 - protein, 708 aa, Artificial Sequence
  derived and/or modified sequence
MATTAELFEEPFVADEYIERLVWRTPGGGSRGGPEAFDPKRLLEEFVNHIQELQIMDERIQRKVEKLEQQCQKEAKEFAKKVQELQKSNQVAFQHFQELDEHISYVATKVCHLGDQLEGVNTPRQRAVEAQKLMKYFNEFLDGELKSDVFTNSEKIKEAADIIQKLHLIAQELPFDRFSEVKSKIASKYHDLECQLIQEFTSAQRRGEISRMREVAAVLLHFKGYSHCVDVYIKQCQEGAYLRNDIFEDAGILCQRVNKQVGDIFSNPETVLAKLIQNVFEIKLQSFVKEQLEECRKSDAEQYLKNLYDLYTRTTNLSSKLMEFNLGTDKQTFLSKLIKSIFISYLENYIEVETGYLKSRSAMILQRYYDSKNHQKRSIGTGGIQDLKERIRQRTNLPLGPSIDTHGETFLSQEVVVNLLQETKQAFERCHRLSDPSDLPRNAFRIFTILVEFLCIEHIDYALETGLAGIPSSDSRNANLYFLDVVQQANTIFHLFDKQFNDHLMPLISSSPKLSECLQKKKEIIEQMEMKLDTGIDRTLNCMIGQMKHILAAEQKKTDFKPEDENNVLIQYTNACVKVCAYVRKQVEKIKNSMDGKNVDTVLMELGVRFHRLIYEHLQQYSYSCMGGMLAICDVAEYRKCAKDFKIPMVLHLFDTLHALCNLLVVAPDNLKQVCSGEQLANLDKNILHSFVQLRADYRSARLARHFS

SEQ ID NO: 166070 - DNA, 2632 bp, Artificial Sequence
  derived and/or modified sequence
acttccggcgtatgaggcggtgacaatgggagcagcgcgggcggcgccgggaggcagctgacaagcgtttgcggcttcgcttcatggccgctctcccgcccctcctgggatctgtggggagctggggagcccgcagcggcccggagccggagctggcgagccgagcggagacctgtgcgccgcgcctctgaggcgcagcatgtgaagcggagacggcatccagtggggggcgagcctctcagccggccgggatggctaccacggccgagctcttcgaggagccttttgtggcagatgaatatattgaacgtcttgtatggagaaccccaggaggaggctctagaggtggacctgaagcttttgatcctaaaagattattagaagaatttgtaaatcatattcaggaactccagataatggatgaaaggattcagaggaaagtagagaaactagagcaacaatgtcagaaagaagccaaggaatttgccaagaaggtacaagagctgcagaaaagcaatcagataaaggaagcagcagacatcattcagaagttgcacctaattgcccaagagttaccttttgatagattttcagaagttaaatccaaaattgcaagtaaataccatgatttagaatgccagctgattcaggagtttaccagtgctcaaagaagaggtgaaatctccagaatgagagaagtagcagcagttttacttcattttaagggttattcccattgtgttgatgtttatataaagcagtgccaggagggtgcttatttgagaaatgatatatttgaagacgctggaatactctgtcaaagagtgaacaaacaagttggagatatcttcagtaatccagaaacagtcctggctaaacttattcaaaatgtatttgaaatcaaactacagagttttgtgaaagagcagttagaagaatgtaggaagtccgatgcagagcaatatctcaaaaatctctatgatctgtatacaagaaccaccaatctttccagcaagctgatggagtttaatttaggtactgataaacagactttcttgtctaagcttatcaaatccattttcatttcctatttggagaactatattgaggtggagactggatatttgaaaagcagaagtgctatgatcctacagcgctattatgattcgaaaaaccatcaaaagagatccattggcacaggaggtattcaagatttgaaggaaagaattagacagcgtaccaacttaccacttgggccaagtatcgatactcatggggagacttttctatcccaagaagtggtggttaatcttttacaagaaaccaaacaagcctttgaaagatgtcataggctctctgatccttctgacttaccaaggaatgccttcagaatttttaccattcttgtggaatttttatgtattgagcatattgattatgctttggaaacaggacttgctggaattccctcttcagattctaggaatgcaaatctttattttttggacgttgtgcaacaggccaatactatttttcatctttttgacaaacagtttaatgatcaccttatgccactaataagctcttctcctaagttatctgaatgccttcagaagaaaaaagaaataattgaacaaatggagatgaaattggatactggcattgataggacattaaattgtatgattggacagatgaagcatattttggctgcagaacagaagaaaacagattttaagccagaagatgaaaacaatgttttgattcaatatactaatgcctgtgtaaaagtctgtgcttacgtaagaaaacaagtggagaagattaaaaattccatggatgggaagaatgtggatacagttttgatggaacttggagtacgttttcatcgacttatctatgagcatcttcaacaatattcctacagttgtatgggtggcatgttggccatttgtgatgtagccgaatataggaagtgtgccaaagacttcaagattccaatggtattacatctttttgatactctgcatgctctttgcaatcttctggtagttgccccagataatttaaagcaagtctgctcaggagaacaacttgctaatctggacaagaatatacttcactccttcgtacaacttcgtgctgattatagatctgcccgccttgctcgacacttcagctgagattgaatttacaaaggaattcagtgtcagttcctttacagaggaatgtcttatacttcagcagccctcggttgatagaaagcacaggagataccttatgacacagccaacattttgtgaaacaatgactggaacaaaacagcagccatacttacctttgaggttttatttaaagtttggataccactagctatattttgcttttttcccctcacattgaattttaattccattcttgaatgtagaaatttcagattctctaaaactacatgtcactgtttttatcctagaaaatgttgctgtcagaaggcaaaggaaatgttaccagtgttttcggttcttgtacttttaacatattccatttagaaattttgccattctgttttccattaataataggtgaaatacaggaaaactacatttgttattcctcagtttttaatgacctt

SEQ ID NO: 166071 - DNA, 7296 bp, Artificial Sequence
  derived and/or modified sequence
aaggatcaaagttcctcatacacggtagcgtcgagccttttttcggttctttcgccgctcgttttattcgccggcccctcccgacaacctccctggcgcgcgcagttccacttccggcgtatgaggcggtgacaatgggagcagcgcgggcggcgccgggaggcagctgacaagcgtttgcggcttcgcttcatggccgctctcccgcccctcctgggatctgtggggagctggggagcccgcagcggcccggagccggagctggcgagccgagcggagacctgtgcgccgcgcctctgaggcgcagcatgtgaagcggagacggcatccagtggggggcgagcctctcagccggccgggatggctaccacggccgagctcttcgaggagccttttgtggcagatgaatatattgaacgtcttgtatggagaaccccaggaggaggctctagaggtggacctgaagcttttgatcctaaaagattattagaagaatttgtaaatcatattcaggaactccagataatggatgaaaggattcagaggaaagtagagaaactagagcaacaatgtcagaaagaagccaaggaatttgccaagaaggtacaagagctgcagaaaagcaatcaggttgccttccaacatttccaagaactagatgagcacattagctatgtagcaactaaagtctgtcaccttggagaccagttagagggggtaaacacacccagacaacgggcagtggaggctcagaaattgatgaaatactttaatgagtttctagatggagaattgaaatctgatgtttttacaaattctgaaaagataaaggaagcagcagacatcattcagaagttgcacctaattgcccaagagttaccttttgatagattttcagaagttaaatccaaaattgcaagtaaataccatgatttagaatgccagctgattcaggagtttaccagtgctcaaagaagaggtgaaatctccagaatgagagaagtagcagcagttttacttcattttaagggttattcccattgtgttgatgtttatataaagcagtgccaggagggtgcttatttgagaaatgatatatttgaagacgctggaatactctgtcaaagagtgaacaaacaagttggagatatcttcagtaatccagaaacagtcctggctaaacttattcaaaatgtatttgaaatcaaactacagagttttgtgaaagagcagttagaagaatgtaggaagtccgatgcagagcaatatctcaaaaatctctatgatctgtatacaagaaccaccaatctttccagcaagctgatggagtttaatttaggtactgataaacagactttcttgtctaagcttatcaaatccattttcatttcctatttggagaactatattgaggtggagactggatatttgaaaagcagaagtgctatgatcctacagcgctattatgattcgaaaaaccatcaaaagagatccattggcacaggaggtattcaagatttgaaggaaagaattagacagcgtaccaacttaccacttgggccaagtatcgatactcatggggagacttttctatcccaagaagtggtggttaatcttttacaagaaaccaaacaagcctttgaaagatgtcataggctctctgatccttctgacttaccaaggaatgccttcagaatttttaccattcttgtggaatttttatgtattgagcatattgattatgctttggaaacaggacttgctggaattccctcttcagattctaggaatgcaaatctttattttttggacgttgtgcaacaggccaatactatttttcatctttttgacaaacagtttaatgatcaccttatgccactaataagctcttctcctaagttatctgaatgccttcagaagaaaaaagaaataattgaacaaatggagatgaaattggatactggcattgataggacattaaattgtatgattggacagatgaagcatattttggctgcagaacagaagaaaacagattttaagccagaagatgaaaacaatgttttgattcaatatactaatgcctgtgtaaaagtctgtgcttacgtaagaaaacaagtggagaagattaaaaattccatggatgggaagaatgtggatacagttttgatggaacttggagtacgttttcatcgacttatctatgagcatcttcaacaatattcctacagttgtatgggtggcatgttggccatttgtgatgtagccgaatataggaagtgtgccaaagacttcaagattccaatggtattacatctttttgatactctgcatgctctttgcaatcttctggtagttgccccagataatttaaagcaagtctgctcaggagaacaacttgctaatctggacaagaatatacttcactccttcgtacaacttcgtgctgattatagatctgcccgccttgctcgacacttcagctgagattgaatttacaaaggaattcagtgtcagttcctttacagaggaatgtcttatacttcagcagccctcggttgatagaaagcacaggagataccttatgacacagccaacattttgtgaaacaatgactggaacaaaacagcagccatacttacctttgaggttttatttaaagtttggataccactagctatattttgcttttttcccctcacattgaattttaattccattcttgaatgtagaaatttcagattctctaaaactacatgtcactgtttttatcctagaaaatgttgctgtcagaaggcaaaggaaatgttaccagtgttttcggttcttgtacttttaacatattccatttagaaattttgccattctgttttccattaataataggtgaaatacaggaaaactacatttgttattcctcagtttttaatgaccttttcagcatcaattgttaatcagattattttaggttttcgtaaataatttttttgcctctttcaaaaggttaacaattaagcatactttctgcagttggttgattggatttttttctgaggtacagcattaatactagtccaaaaaatgtcataaactgaactaaaatgatgaactattttatgtagacattaggagtggatcggaatacttctgctttctgggtaaaacttaaaagtttactatttcttatttggtaaatagattttaagccaattctagtaagaaattaataaaactaccttattttgtatttcacttaaggtggaggaccttaactaaaggaccatatttattcattattttaatattataagggaagtaaaaaaaagtgaggtatagtctaaatggtgcatataggaaatactgacagtgtttagcaacatgcagccctttgagatttctgtcgtaatgctaaacttgaataagatggaatggctgaacatgtggttagtcttttattttaagaagaattgagaattgatagatttggagatgagctttgcaaaggctgtttgcttttcatgtctataggtctgtcattgtcctttttcaaagcatttctgaagttattcctacttggatatagttaatggaattggcttaatttgatgacataataaatcacttataaaattttaaatatcaagtgaaaatttagaaaggccattactattctataaaccttataaacttgctctgggagaatgcattctaaattatatatagtgtttcagctcccattgtggtgttcatagtcttctaggaacagataaacttaagtattcaattcactcttggcattttttctttaatataggctttttagcctatttttggaaaactgcttttcttctgagaaccttattctgaatgtcatcaactttaccaaaccttctaagtccagagctaacttagtactgtttaagttactattgactgaattttcttcattttctgtttagtccagtgttaccaaggtaagctggggaatgaagtataccaacttctttcagagcattttaggacattatggcagctttagaaggctgtcttgtttctagccaagggagagccagcgcaggttttggatactagagaaagtcatttgcttgtactattgccattttagaaagctctgatgtgaattcaaattttacctctgttacttaaagccaacaattttaaggcagtagttttactggccatttaagctctttgtacagtgtcaatttgtaaaaaagaaaaaacgaaaaaaaatctcaaataaaacatgagataacattttaagacttccaaatcagagaagtgcttcaaattattttgtttggattaatttttaaaatgtaaagcatatacttgttgcttagttattttgtttattattttcatgtttgagttctgtgcaatattttctattatgtccgttgataggacagtgacaaaattcgtaagtgaatacttaatttaaaagtgttaacattaatgctcaataaacaaattccctgcagttgttttttttatttcactctttttatattttagagccatccatcctgaattttataaatgattttttatttaaaaatttgagatttttaaaatttttcacagcacaggtcttctcattttcttttttagcaaaaaatacttgactatataaacaagactagaaatttatcctaaacagatggtctttctctgagggaaaaaaaaaaatgtgtcatgtgaggcaatatgcattctttgtattctgattttttaagtgttttcatatttatagccatcacaaaattttgcccaaagtgtatggctcagaagagatgatcaataactaaaatgtttttcgttttgcacatggtaaaattttaggtagagagtggagctttgtataattggtaactttaaccaacatttacgtaagtacggtctttgcagtattacacaataccgcatgagctaatatgcagtatttaggtaatgcattgaatgaagttgaaaatatgctcttaacacactgtgcattgtttttctaaaattgagaaatatctgaaatacagaatacgaatttaataaaggaagcctaccttatgtaaattatgatgttgaaaatgacagtcaaccagagtagatgaagtgtccttatgaagaattattaaatagtagctggatggatctttagatggatgaccacctgaccattccaggacaatttttggtcccattttgaggattgccatagttgcaagtccttaggatcttccttgttttaaaaaactatcaaagtaggttaaattaaaatctaatttaaattaggttaatttatattacattgtagatcattcttttttcccccctctttcacttctaaatattttgctttctaaatactagccttctggttcacagtgaaataatttaattatcaatcagtagattgattccaagtggagaattcactgcttccctaaaatgcgtttttcttacctgtaatggtgaatatttacaaggatctggataaagagattttgatttttgaaatgccacaaaaccccttaaagtggtcaagtacctaaggtagtggctaaggcatgcttgaactgtgtttgagagacagcagttcagtcagtacataatttgttggtgactaacaaagctcacatctgggagattaactttttttaacgcaaaaatattctgcacattacccatatattgttgaattttacatacaaagcattttgtgctttcattcaattagtttaactatattcagtttctgtattatttctctctgatctatcctgtaattattctatactttagaagaaaagatcagttcatattgttagactgaataattctacatgaagttaaaagttagcaatttaaaaaattttgctgcataataaagataattatagttacatgtattgatttaagtctcacacactgtgctaataagtcctttgcacatattattggattctagagcaaccctaggatttgggtactattatttccatttgacagatgaaaaacctaatgcatagaaagataagtagaccagtcaaggtctacagctagtaaaatgctcagattgaaacctaaatcttttctcactcacttttaggttctatatgctattctccttacgtaacgttaaatagatcctttagtttgataggttcattagttttgcttaatcgttgcttccaatatgattcttattgtagtatttatattacaaagttggcatacagggtcaatatctaatttactgttgtgtttttcttaatatgttcaatgtatggtcatactttttaaatttgattttttaaatattataagtggtcatgaaattttaatgttaagtttgtacctaatagaaatatgtctatcacaaatctttattggtattattttatatacttttccagcttgataattttcacaatagaaagagaccaaatattttgtactatattttgtgacatagaagtaaatgacaactctaccttggaagatatgaagaaatcagtgtttttatgttcaaaaactattttaaatgtcataggcttgccaattgtgttaactatttagtacattggtagtttttaaatgactaatgctggagtgaaaatgtaaggcaaaatatttagtatattaacagtagatagtcattttcatgtaatcagaattgcatgttaagggttttaaaagctgtcataactcttaccttttatttctaccagtgatcaatcatttctctttacaaatttagggaggaaacaactgttcaaatgtataggggacagaaacctgacatttagagaacagaaattttaattgccaaattaaagcagctaggctgcccctgggcttaacaaaattcctatttttgaactagacccgaggtattttatcattattatttgataggtaccattaacctttgttttgtgattatcgacttttggggggaaagatgagtaattaaacacactcgcccattttctaagtggtttagaaggttgcagtctgcctcaccatacaaagccagtttaaataggaatatatcacatcatacttcacatagcagtcaacctcagaggaaagtcatttattcagaaggcatagattttgctagacagcagtgatgcattacaaatatataattatttgcactaatatttgagcaggtggaatggattagaacatggtcaacatcatgctgctgataacatgtatttttctatattaatatgtactgtgcaacatgtattaaaattgtcaataatt

SEQ ID NO: 166072 - DNA, 1932 bp, Artificial Sequence
  derived and/or modified sequence
atggctaccactgcagagctctttgaggagcctttcgtagccgacgaatacattgaaaggctggtgtggaggactcccggagggggttctcgtggcggccccgaagcctttgacccaaagcgtttgctggaagagtttgtgaaccatatccaagaactgcagataatggacgaacggatccaaaggaaagttgagaaactggagcagcagtgccagaaggaggcaaaggagttcgccaagaaggtgcaggagttacagaaaagcaatcagatcaaagaggccgctgacattatccagaaactgcatctgatcgcccaggaactacccttcgaccgtttcagcgaggtgaagagcaagatcgcgtccaagtaccatgatctggagtgccagctgatccaggagttcacgtcagcccagcgtcggggtgagatctctcggatgcgcgaggttgctgcagtccttcttcacttcaaaggatacagtcactgcgtggatgtatatatcaaacaatgccaagagggagcttacctcaggaatgatatatttgaggatgcagggatattgtgccagcgagtaaacaagcaggtcggagacatcttcagcaaccctgagaccgtgctggccaaactcattcaaaatgtcttcgagatcaagctccaatctttcgtaaaagagcagcttgaagagtgccgcaagtcagacgccgaacagtacttgaagaacttgtacgacctttatacaaggactacaaacctgagctccaagttgatggagtttaacttgggtaccgacaaacagacgtttctctccaagttaattaaatctatattcatcagctacttggagaactatatcgaggtcgagacggggtacctcaagtcgagaagtgccatgattctgcagagatactatgacagcaagaaccaccagaaaaggtccatcggtactggcgggatccaggaccttaaggagagaattcggcaaagaacaaaccttccactgggccccagcattgatactcacggcgagacgtttttgtcccaagaggtggtagtcaacctcctgcaggagacaaaacaggccttcgagcggtgtcacagattgtccgatccaagtgatctccccagaaacgctttccgaattttcaccattctggtggagttcctttgcatcgagcacattgattatgcgctggaaacaggcctggcagggattccatcatcggactctaggaatgctaatctgtacttcttagacgtcgtgcaacaggccaacactatctttcacctatttgacaagcagtttaacgatcacctgatgcccctcattagttcctctcctaaactatctgagtgcctccaaaagaagaaagaaataatagaacagatggagatgaagctagacaccggcatcgataggacgctcaactgtatgattggccagatgaagcatattctggccgcggaacaaaagaagaccgactttaagcctgaagacgagaacaacgtgttaatccagtatacaaatgcctgtgtgaaagtgtgcgcctacgtgcggaaacaggtagaaaagatcaaaaatagcatggacgggaaaaatgttgataccgtgttgatggagctcggcgtgcgttttcatcgcttgatctatgaacacctccagcagtactcttactcttgcatgggaggtatgctggctatctgcgacgtagccgagtatcggaaatgcgcaaaggattttaagattccaatggtgctgcatctgttcgataccctccacgcattgtgcaatctgctggtggtagcccccgataacctgaagcaagtgtgctcaggcgagcaattggctaatttagacaagaatatccttcacagctttgtacagctcagggcggattatcgatccgcacgtttagctcgacatttctcttag

SEQ ID NO: 166073 - DNA, 2127 bp, Artificial Sequence
  derived and/or modified sequence
atggctacaactgctgaactcttcgaagagccattcgtcgccgacgaatacatcgaacgcctagtttggcgtactccagggggcggctcacgtggcggccccgaggcctttgatcctaagaggttgctggaggaattcgtcaatcacatccaggagctgcagattatggatgaaagaatccaacgaaaagtggaaaaactagaacagcagtgtcaaaaggaggccaaggaattcgctaaaaaggtgcaggagttacaaaaatcaaaccaggtggcattccagcatttccaagaactcgatgagcatattagctacgtcgcaaccaaagtctgtcatctgggagaccaactggaaggagtgaacacaccgcgccagagggcggtcgaagctcagaagctgatgaaatattttaacgaatttttggatggtgagctcaaaagtgatgtgttcacgaactcagagaaaataaaggaagcagctgatattattcagaaacttcacctgatcgcccaggaacttccatttgacaggtttagtgaggtaaaatctaagatcgctagtaaatatcatgacttggaatgccaactcattcaggaatttacttccgcacagaggcggggggaaatttctcgcatgcgagaggtggcggccgtgctcctgcattttaagggctacagccactgtgtggatgtctatattaagcaatgtcaggagggagcttatctacggaacgacatattcgaggatgccgggattctttgccaacgcgtaaacaagcaagttggcgacatcttttccaatcccgaaactgtgctcgcaaagttaatccaaaacgttttcgaaattaaactccagtcctttgtgaaggaacagctagaggagtgcaggaaatccgatgccgagcagtacctgaaaaatttatatgatttgtacacacgcaccactaatttatccagtaagctaatggagttcaacctgggcaccgacaagcaaaccttcctgtccaaactcatcaaaagtatcttcatttcatatcttgaaaattacatagaagtagagacaggatatctgaagtcacggtctgccatgattcttcagcgctactacgactccaagaatcatcagaagcggagcatcggcacagggggcatacaggatctgaaggagagaatccgacagcggacaaatctgccactgggcccctccatcgacactcatggggaaacttttctgagccaagaggtggtggttaacctgctgcaagagactaaacaggcattcgagagatgccaccggctttctgacccctcagacctcccccggaatgctttccggatattcacaattcttgtggaattcttgtgcatagaacacattgactacgctttagagactgggcttgccggaatcccctcctccgacagtaggaacgcgaacctctactttttggatgttgtgcaacaagcaaataccatcttccatctgttcgacaagcagtttaacgatcacctgatgcctttaatctcatctagcccaaaactgtccgagtgtttgcaaaagaaaaaggagatcatcgagcagatggagatgaagttagacaccggcattgacagaactttgaactgtatgatcggacagatgaaacacattcttgctgccgaacagaaaaagacagatttcaagccagaggacgagaataatgtactgatccagtacacaaacgcttgcgtgaaagtctgtgcctatgtaaggaagcaagtcgagaagatcaagaattccatggatggcaagaacgttgacacagtgttgatggagttaggcgtcagatttcatcgtcttatctacgagcatttacagcagtattcgtacagttgtatgggcggaatgcttgccatttgcgacgtcgctgagtaccggaagtgcgccaaggacttcaagattccaatggttctccacttattcgacaccttgcacgcactatgtaatctacttgtggtagcaccagataacctgaagcaggtatgctcaggcgaacagttagctaacttggacaaaaacatactccattcatttgttcagctccgagcagactataggagcgcaagactggcccgccattttagctag

SEQ ID NO: 166074 - DNA, 1932 bp, Artificial Sequence
  derived and/or modified sequence
atggccaccacagctgagctgtttgaggagccctttgtggctgatgagtacatcgagcggctggtgtggaggacccctgggggcggcagccggggcggccctgaggcctttgaccccaagaggctgctggaggagtttgtgaaccacatccaggagctgcagatcatggatgagcgcatccagaggaaggtggagaagctggagcagcagtgccagaaggaggccaaggagtttgccaagaaggtgcaggagctgcagaagagcaaccagatcaaggaggccgctgacatcatccagaagctgcacctgattgcccaggagctgccctttgaccgcttcagcgaggtgaagagcaagatcgccagcaagtaccatgacctggagtgccagctgatccaggagttcaccagcgcccagaggagaggagagatcagcaggatgagggaggtggccgctgtgctgctgcacttcaagggctacagccactgtgtggatgtgtacatcaagcagtgccaggagggcgcctacctgagaaatgacatctttgaagatgctggcatcctgtgccagagggtgaacaagcaggtgggggacatcttcagcaaccctgagaccgtgctggccaagctgatccagaatgtgtttgagatcaagctgcagagctttgtgaaggagcagctggaggagtgcaggaagagtgatgctgagcagtacctgaagaacctgtatgacctgtacaccaggaccaccaacctgagcagcaagctgatggagttcaacctgggcacagacaagcagaccttcctgagcaagctgatcaagagcatcttcatctcctacctggagaactacatcgaggtggagaccggctacctgaagagccgcagcgccatgatcctgcagcgctactatgacagcaagaaccaccagaagaggagcatcggcaccggcggcatccaggacctgaaggagcgcatccggcagaggaccaacctgcccctgggccccagcattgacacccatggagagaccttcctgagccaggaggtggtggtgaacctgctgcaggagaccaagcaggcctttgagcgctgccaccggctgagtgaccccagcgacctgcccagaaatgccttccgcatcttcaccatcctggtggagttcctgtgcatcgagcacatcgactatgccctggagaccggcctggccggcatccccagcagtgacagcagaaatgccaacctgtacttcctggatgtggtgcagcaggccaacaccatcttccacctgtttgacaagcagttcaatgaccacctgatgcccctcatcagcagcagccccaagctgtctgaatgtctgcagaagaagaaggagatcatcgagcagatggagatgaagctggacacaggaattgacaggaccctgaactgcatgattggccagatgaagcacatcctggccgctgagcagaagaagacagacttcaagccagaagatgagaacaacgtgctgatccagtacaccaatgcctgtgtgaaggtgtgtgcctacgtgaggaagcaggtggagaagatcaagaacagcatggatggcaagaatgtggacacagtgctgatggagctgggcgtgcgcttccacaggctcatctatgagcacctgcagcagtacagctacagctgcatgggcggcatgctggccatctgtgatgtggccgagtacagaaaatgtgccaaggacttcaagatccccatggtgctgcacctgtttgacaccctgcacgccctgtgcaacctgctggtggtggccccagacaacctgaagcaggtgtgcagcggggagcagctggccaacctggacaagaacatcctgcacagctttgtgcagctgcgggctgactacagaagtgcccggctggcccggcacttctcctag

SEQ ID NO: 166075 - DNA, 2127 bp, Artificial Sequence
  derived and/or modified sequence
atggccaccacagctgagctgtttgaggagccctttgtggctgatgagtacatcgagcggctggtgtggaggacccctgggggcggcagccggggcggccctgaggcctttgaccccaagaggctgctggaggagtttgtgaaccacatccaggagctgcagatcatggatgagcgcatccagaggaaggtggagaagctggagcagcagtgccagaaggaggccaaggagtttgccaagaaggtgcaggagctgcagaagagcaaccaggtggccttccagcacttccaggagctggatgagcacatctcctatgtggccaccaaggtgtgccacctgggggaccagctggagggcgtgaacaccccccggcagagagctgtggaggcccagaagctgatgaagtacttcaatgagttcctggatggagagctgaagagtgatgtgttcaccaacagcgagaagatcaaggaggccgctgacatcatccagaagctgcacctgattgcccaggagctgccctttgaccgcttcagcgaggtgaagagcaagatcgccagcaagtaccatgacctggagtgccagctgatccaggagttcaccagcgcccagaggagaggagagatcagcaggatgagggaggtggccgctgtgctgctgcacttcaagggctacagccactgtgtggatgtgtacatcaagcagtgccaggagggcgcctacctgagaaatgacatctttgaagatgctggcatcctgtgccagagggtgaacaagcaggtgggggacatcttcagcaaccctgagaccgtgctggccaagctgatccagaatgtgtttgagatcaagctgcagagctttgtgaaggagcagctggaggagtgcaggaagagtgatgctgagcagtacctgaagaacctgtatgacctgtacaccaggaccaccaacctgagcagcaagctgatggagttcaacctgggcacagacaagcagaccttcctgagcaagctgatcaagagcatcttcatctcctacctggagaactacatcgaggtggagaccggctacctgaagagccgcagcgccatgatcctgcagcgctactatgacagcaagaaccaccagaagaggagcattggaactggaggcatccaggacctgaaggagcgcatccggcagaggaccaacctgcccctgggccccagcattgacacccacggggagaccttcctgagccaggaggtggtggtgaacctgctgcaggagaccaagcaggcctttgagcgctgccaccggctgagtgaccccagcgacctgcccagaaatgccttccgcatcttcaccatcctggtggagttcctgtgcatcgagcacattgattatgccctggagaccggcctggccggcatccccagcagtgacagcagaaatgccaacctgtacttcctggatgtggtgcagcaggccaacaccatcttccacctgtttgacaagcagttcaatgaccacctgatgcccctcatcagcagcagccccaagctgtctgagtgcctgcagaagaagaaggagatcatcgagcagatggagatgaagctggacaccggcatcgacaggaccctgaactgcatgattggccagatgaagcacatcctggccgctgagcagaagaagacagacttcaagccagaagatgaaaataatgtgctgatccagtacaccaatgcctgtgtgaaggtgtgtgcctacgtgaggaagcaggtggagaagatcaagaacagcatggatggcaagaatgtggacacagtgctgatggagctgggcgtgcgcttccacaggctcatctatgagcacctgcagcagtacagctacagctgcatgggcggcatgctggccatctgtgatgtggccgagtacagaaaatgtgccaaggacttcaagatccccatggtgctgcacctgtttgacaccctgcacgccctgtgcaacctgctggtggtggccccagacaacctgaagcaggtgtgcagcggggagcagctggccaacctggacaagaacatcctgcacagctttgtgcagctgcgggctgactaccgcagcgcccggctggcccggcacttctcctag

SEQ ID NO: 166076 - DNA, 1932 bp, Artificial Sequence
  derived and/or modified sequence
atggccaccaccgccgagctgttcgaggagcccttcgtggccgacgagtacatcgagcgcttggtgtggagaacacctgggggggggtcacgaggcggccctgaggcttttgatcccaaaagactgctggaggaatttgtgaatcatatacaagagctccagatcatggacgaaaggatccaacgcaaagtggagaagctagagcagcaatgccagaaagaggctaaggaattcgccaagaaagtccaagagctgcagaagtcaaatcagatcaaggaggccgctgatatcatccagaaactgcatctcatcgcacaggagctaccgttcgatcgtttttcagaagtgaagagtaaaattgccagtaaataccatgacctggaatgccaactcattcaagagtttacaagcgcacagagacgcggggaaattagcaggatgcgggaggtggctgcggtccttctccacttcaagggctacagccactgcgtggacgtgtacattaagcagtgtcaggaaggtgcctaccttcgcaatgacatctttgaggacgcaggaatcctgtgccaacgggtcaacaagcaggttggcgacatattcagcaatccggaaacagttctcgccaagttgatccagaatgttttcgaaataaaactccagagttttgtcaaagagcagctggaggagtgtcgcaagagtgatgcggaacagtatctgaagaacttgtacgatctttacacaagaacaaccaacctgagttcaaagctcatggagttcaatctcggaacagataaacaaactttcctctcaaaactgataaagtcaattttcatcagctacctcgagaattacattgaggtggaaacaggctatcttaaaagcaggagcgctatgatcctacagagatattacgattcaaagaaccatcagaaaagaagcataggcacggggggaattcaggatctcaaggagcggattcgacagcggacaaatctgcctctgggaccttcgatagatactcatggcgagactttcctttcccaggaggtggtcgtgaacctgcttcaggagaccaagcaggcattcgagcgctgccataggctctcagatccttccgatctgcctaggaacgccttccgaatttttactattctagtggaattcctttgcatcgaacatatagattacgctctggaaaccgggttagctgggattcctagttctgacagccgtaacgcaaatctttacttcttggacgtggtgcagcaggccaatacaatcttccacctgttcgataaacaatttaatgatcaccttatgccactgatatcttcttcacccaagctttccgagtgcttgcagaaaaaaaaggaaattatcgaacagatggagatgaagctagacaccgggattgatagaactcttaattgcatgatcggccagatgaagcacatcctggcagccgagcagaaaaagactgatttcaagccggaggacgaaaataacgtcctgattcagtacaccaacgcttgcgtcaaggtgtgcgcatatgtcagaaagcaagtggagaagataaaaaactctatggacggcaaaaacgtcgatactgtcctaatggagctgggcgtgcggtttcatcgtttaatctatgaacacctgcagcagtactcttacagctgtatgggcgggatgttagccatttgcgatgtcgctgagtaccgcaaatgtgcaaaggacttcaaaattcccatggtgctgcatctgtttgataccctccatgcactatgtaacctgcttgtggtggcccccgataatttgaagcaggtgtgctccggggaacagctggccaacctggacaaaaatatcctccatagcttcgtgcagctgagggcagattacaggagcgcccgtttagcacgccatttctcttag

SEQ ID NO: 166077 - DNA, 2127 bp, Artificial Sequence
  derived and/or modified sequence
atggccaccaccgccgagctgttcgaggagcccttcgtggccgacgagtacatcgaaaggctagtgtggcggacccctggggggggcagtcgcggggggccggaagccttcgatccaaagcgtctattggaggaattcgtgaaccacatccaggagctacagatcatggacgaacgaattcagcgcaaagttgaaaaactggagcagcagtgccagaaggaggctaaggaattcgccaagaaagtgcaggagttgcagaaatctaaccaggtagcctttcagcatttccaggaactggacgaacacatatcctacgtggcaactaaagtctgccatctgggcgaccaattagaaggagtgaacacccctagacagagagcagtcgaagcccaaaagcttatgaagtacttcaacgagttcttggacggagaacttaaatctgatgtattcacaaatagcgaaaaaataaaggaggcggccgacattatccaaaaactgcacttgatcgcccaggagctgcctttcgacagattttccgaggtgaaaagcaagatagcatccaaatatcacgacctggagtgccaactgatacaggaatttacgtcggctcagcgacggggagaaatcagtcggatgagagaagttgcagccgttctattgcacttcaagggctattcgcactgcgtggacgtttacataaagcagtgtcaggagggtgcctaccttaggaatgacatctttgaggatgcgggcatactttgccagagagttaacaagcaggtcggtgacatcttcagcaatcccgagactgtgctggccaagcttattcagaatgtattcgaaataaaactgcaatctttcgtgaaggagcagctggaggaatgccgcaagtcagacgctgaacaatatcttaagaatttatacgatctctatactaggaccacgaatctgtcatctaagctcatggaatttaatctgggcactgacaaacaaacattcctgagcaagcttattaagtccatctttatctcctatctggaaaactacatcgaggtggagacgggttacctcaagtctcgaagcgcgatgatcctccagcgttactacgattcaaagaatcaccaaaagagatccatcgggactgggggtatccaggaccttaaagaacgtattcgccagaggactaacttgcctcttggccccagcatcgacacacatggagaaacttttctatctcaggaggtggtggtcaatttgctacaagaaacaaaacaggcctttgaaaggtgccaccgcctgtccgaccccagcgatctcccccggaacgcgtttcgcatcttcactatcctggtggagtttctctgcatcgagcacatagactacgcattagaaactggtctggccgggattccttcctcagactccaggaacgctaatctttattttctggatgtcgtgcaacaggccaataccatctttcacctgttcgacaaacagttcaacgaccacctgatgccgctgattagttccagtcccaagctgagcgaatgtttacagaaaaagaaggagattatcgaacagatggaaatgaagctggatacagggatcgatcgcaccctcaactgtatgattggtcagatgaagcatattttggctgctgagcaaaagaaaacagattttaagccagaggacgagaataacgtgctcatacaatatactaatgcctgcgtgaaggtgtgtgcctacgtgagaaagcaggttgagaagattaaaaactcgatggacggcaagaacgtcgacacggtgcttatggaattaggagtgagatttcataggctaatctatgagcatttgcagcagtactcttactcatgcatggggggcatgttggcgatctgtgacgtggcggagtatcgtaagtgcgccaaggacttcaaaattcctatggtgttacatctgtttgatacgttgcatgccctatgcaatttactcgtggtcgcccccgacaacctgaaacaggtctgttcaggagagcagcttgccaatctggataagaacattctgcactcttttgtgcaactcagagcagactatagatccgcaagactggcgcggcacttctcctag

SEQ ID NO: 166078 - DNA, 1932 bp, Artificial Sequence
  derived and/or modified sequence
atggctacaaccgcggagctttttgaagagccctttgtggccgatgagtacattgaacggctcgtgtggcgcacacccggtggcggttctcggggaggtcctgaagcgtttgatccaaaacgcctactcgaggaatttgtgaaccacatccaggagcttcagattatggatgagcgcattcagagaaaggtggagaaactcgaacaacagtgtcaaaaagaagccaaggagtttgctaagaaagttcaggaactccaaaagagtaaccaaattaaagaagctgcagacatcatacagaagctgcatctgatcgctcaggagctgccatttgatcgattctccgaggtgaaatccaaaattgcgtcaaaatatcacgatttggaatgccaactgatacaggaatttaccagcgcacagcgacggggtgaaatcagccgcatgcgggaggtcgcggctgttctgctgcactttaagggatactctcattgcgtggatgtatacattaaacagtgtcaggaaggcgcttatctgcgaaacgatattttcgaagacgccggtatcctgtgtcagcgcgtgaacaaacaggtgggcgacatcttttctaaccccgagaccgtcctcgccaagctaatccaaaacgtgttcgagataaagcttcagtctttcgtcaaggagcagctcgaggaatgtcgaaagtccgatgcagagcaatacttgaaaaacctgtatgatctgtacacccgtacaaccaacttgtcctccaaactgatggaatttaacctgggcactgataagcaaacctttctctcaaaactgattaaatctatttttatctcctatctcgaaaactatattgaggttgaaacgggctacttaaaaagtcgtagcgctatgattctccaacggtactacgatagcaagaatcaccagaagagatcaattgggacagggggaatccaagacctaaaagagcgaataagacagcgaacaaacctgccccttgggccttccattgatactcatggggaaactttcttatcgcaagaggtggtggtaaaccttctgcaggaaacgaagcaggcctttgagagatgccaccgactgtctgatccttcagacctgcctcggaatgcttttcggatttttacaatcttggtggagttcctgtgcatagaacacatcgactacgcacttgagacgggactcgctggaataccatccagtgatagccgcaatgctaatttatactttcttgacgtggtgcagcaggccaacaccatcttccacttgtttgataaacaattcaacgaccatctgatgccgcttatctccagttcaccaaaactgtccgagtgtctgcagaagaagaaggagataatcgagcaaatggagatgaagctggacacgggcattgatagaaccctgaactgcatgatcgggcagatgaagcatattctggccgcagaacagaaaaaaacggacttcaagccagaggacgaaaataacgttctcatacagtacaccaatgcttgcgtgaaggtgtgcgcttatgtccgcaagcaggtggagaagattaaaaatagcatggatggcaagaacgtcgatacagtcctcatggagctgggcgtaagattccaccgccttatttacgaacatctccagcagtactcttactcctgcatgggagggatgctggccatttgcgacgtggcggagtacagaaaatgtgcaaaggacttcaagatccccatggtcctgcatttattcgacactctccacgctctttgtaaccttctggtggtggccccagacaatcttaagcaggtctgttccggtgagcagttggctaacttggataagaatattctgcacagtttcgtacagctgagagccgattaccgcagcgcaaggctcgcaagacacttctcttag

SEQ ID NO: 166079 - DNA, 2127 bp, Artificial Sequence
  derived and/or modified sequence
atggccacgacagctgaactgttcgaggagcctttcgtggctgacgagtatatcgagcggcttgtgtggcgaaccccaggaggcggaagccggggagggccagaagcctttgacccaaagagattgttagaggagttcgtcaaccacatccaggaactccagattatggatgaacgcattcagcggaaagtggagaaattggagcaacagtgccagaaagaggccaaagagttcgcaaaaaaagtgcaggagttacagaagagtaaccaggtggcatttcagcacttccaagagctcgacgaacacatatcatacgtggccacaaaagtttgccacctcggcgaccaattagaaggagtgaacacccccaggcagcgggcagtggaggcccagaaactgatgaagtatttcaacgagtttctggatggcgagctgaaatccgatgtgttcacaaactcggagaagataaaagaagccgctgatatcatccagaagttgcacctgattgctcaggagctacccttcgaccgctttagcgaggtgaagtcaaagatagcctcaaagtaccacgacctagaatgtcaattgatccaggagtttacttcggctcagcgcaggggcgagatctcgcgcatgagggaggtcgcagcggtgctactgcacttcaagggatatagtcattgcgttgatgtctatattaaacagtgccaggagggcgcttacctgcgaaacgacatctttgaagacgccggtattctatgccaacgcgtgaacaaacaagtgggagatattttttctaacccggagacagtgctggcaaaactcattcagaatgtcttcgaaattaaactgcaaagctttgtcaaagagcagctggaggagtgtcggaagtcggacgccgagcagtatcttaaaaacctctatgacctgtacacaaggacaacaaacttgagcagcaagctcatggaatttaaccttgggaccgacaagcagacttttctttccaaactaattaagtcaattttcatctcttaccttgaaaactacatcgaagttgagaccggataccttaaaagcagatccgccatgattttgcagaggtactacgactccaagaaccaccaaaagcggtccatcggcactggtggcattcaagatcttaaggaaaggatacgccagcggactaacctgccactcggcccaagtatagacactcacggggagacattcctgtcacaggaggtagtggtcaacctccttcaagaaacaaagcaggccttcgagaggtgccaccgattaagtgacccaagcgacctccccagaaacgcgttcagaatcttcactattctcgtagagttcctttgtattgaacacattgactacgccctcgagacgggcttggcaggaatcccgagcagcgattcacgcaacgcaaatttgtacttcttagatgtggtgcaacaggctaatacaatctttcatctctttgacaaacagtttaacgaccatctgatgccactgatatctagcagtcctaagctgtctgagtgcctacaaaaaaagaaggaaataatagagcaaatggagatgaagttagacactggcatagaccgcacactcaactgcatgataggccagatgaagcatatcttggccgctgaacagaaaaaaacagactttaaacccgaagatgagaacaacgtgctgatccagtatacaaatgcctgtgttaaggtctgtgcctacgttcggaaacaggtggagaaaataaagaattccatggacggaaagaatgtcgacacggtgctcatggaactgggcgtgcggtttcatcggttgatctatgagcacttgcaacagtactcttactcatgtatggggggtatgctggccatttgcgacgtagctgaatatagaaaatgtgctaaggattttaaaattcctatggtgctccatctgttcgacacgttacatgccctgtgcaacctgctagtcgtagcgccagataatctgaagcaagtttgtagtggtgagcagctagcaaatctcgataagaatatacttcattcatttgtgcagctgcgggcagattaccgctcagctaggcttgcgagacatttttcttag

SEQ ID NO: 166080 - DNA, 1932 bp, Artificial Sequence
  derived and/or modified sequence
atggccaccaccgccgagctgttcgaggagcccttcgtggccgacgagtacatcgagagactggtgtggagaacccccggcggcggcagcagaggcggccccgaggccttcgaccccaagagactgctggaggagttcgtgaaccacatccaggagctgcagatcatggacgagagaatccagagaaaggtggagaagctggagcagcagtgccagaaggaggccaaggagttcgccaagaaggtgcaggagctgcagaagagcaaccagatcaaggaggccgccgacatcatccagaagctgcacctgatcgcccaggagctgcccttcgacagattcagcgaggtgaagagcaagatcgccagcaagtaccacgacctggagtgccagctgatccaggagttcaccagcgcccagagaagaggcgagatcagcagaatgagagaggtggccgccgtgctgctgcacttcaagggctacagccactgcgtggacgtgtacatcaagcagtgccaggagggcgcctacctgagaaacgacatcttcgaggacgccggcatcctgtgccagagagtgaacaagcaggtgggcgacatcttcagcaaccccgagaccgtgctggccaagctgatccagaacgtgttcgagatcaagctgcagagcttcgtgaaggagcagctggaggagtgcagaaagagcgacgccgagcagtacctgaagaacctgtacgacctgtacaccagaaccaccaacctgagcagcaagctgatggagttcaacctgggcaccgacaagcagaccttcctgagcaagctgatcaagagcatcttcatcagctacctggagaactacatcgaggtggagaccggctacctgaagagcagaagcgccatgatcctgcagagatactacgacagcaagaaccaccagaagagaagcatcggcaccggcggcatccaggacctgaaggagagaatcagacagagaaccaacctgcccctgggccccagcatcgacacccacggcgagaccttcctgagccaggaggtggtggtgaacctgctgcaggagaccaagcaggccttcgagagatgccacagactgagcgaccccagcgacctgcccagaaacgccttcagaatcttcaccatcctggtggagttcctgtgcatcgagcacatcgactacgccctggagaccggcctggccggcatccccagcagcgacagcagaaacgccaacctgtacttcctggacgtggtgcagcaggccaacaccatcttccacctgttcgacaagcagttcaacgaccacctgatgcccctgatcagcagcagccccaagctgagcgagtgcctgcagaagaagaaggagatcatcgagcagatggagatgaagctggacaccggcatcgacagaaccctgaactgcatgatcggccagatgaagcacatcctggccgccgagcagaagaagaccgacttcaagcccgaggacgagaacaacgtgctgatccagtacaccaacgcctgcgtgaaggtgtgcgcctacgtgagaaagcaggtggagaagatcaagaacagcatggacggcaagaacgtggacaccgtgctgatggagctgggcgtgagattccacagactgatctacgagcacctgcagcagtacagctacagctgcatgggcggcatgctggccatctgcgacgtggccgagtacagaaagtgcgccaaggacttcaagatccccatggtgctgcacctgttcgacaccctgcacgccctgtgcaacctgctggtggtggcccccgacaacctgaagcaggtgtgcagcggcgagcagctggccaacctggacaagaacatcctgcacagcttcgtgcagctgagagccgactacagaagcgccagactggccagacacttcagctag

SEQ ID NO: 166081 - DNA, 2127 bp, Artificial Sequence
  derived and/or modified sequence
atggccaccaccgccgagctgttcgaggagcccttcgtggccgacgagtacatcgagagactggtgtggagaacccccggcggcggcagcagaggcggccccgaggccttcgaccccaagagactgctggaggagttcgtgaaccacatccaggagctgcagatcatggacgagagaatccagagaaaggtggagaagctggagcagcagtgccagaaggaggccaaggagttcgccaagaaggtgcaggagctgcagaagagcaaccaggtggccttccagcacttccaggagctggacgagcacatcagctacgtggccaccaaggtgtgccacctgggcgaccagctggagggcgtgaacacccccagacagagagccgtggaggcccagaagctgatgaagtacttcaacgagttcctggacggcgagctgaagagcgacgtgttcaccaacagcgagaagatcaaggaggccgccgacatcatccagaagctgcacctgatcgcccaggagctgcccttcgacagattcagcgaggtgaagagcaagatcgccagcaagtaccacgacctggagtgccagctgatccaggagttcaccagcgcccagagaagaggcgagatcagcagaatgagagaggtggccgccgtgctgctgcacttcaagggctacagccactgcgtggacgtgtacatcaagcagtgccaggagggcgcctacctgagaaacgacatcttcgaggacgccggcatcctgtgccagagagtgaacaagcaggtgggcgacatcttcagcaaccccgagaccgtgctggccaagctgatccagaacgtgttcgagatcaagctgcagagcttcgtgaaggagcagctggaggagtgcagaaagagcgacgccgagcagtacctgaagaacctgtacgacctgtacaccagaaccaccaacctgagcagcaagctgatggagttcaacctgggcaccgacaagcagaccttcctgagcaagctgatcaagagcatcttcatcagctacctggagaactacatcgaggtggagaccggctacctgaagagcagaagcgccatgatcctgcagagatactacgacagcaagaaccaccagaagagaagcatcggcaccggcggcatccaggacctgaaggagagaatcagacagagaaccaacctgcccctgggccccagcatcgacacccacggcgagaccttcctgagccaggaggtggtggtgaacctgctgcaggagaccaagcaggccttcgagagatgccacagactgagcgaccccagcgacctgcccagaaacgccttcagaatcttcaccatcctggtggagttcctgtgcatcgagcacatcgactacgccctggagaccggcctggccggcatccccagcagcgacagcagaaacgccaacctgtacttcctggacgtggtgcagcaggccaacaccatcttccacctgttcgacaagcagttcaacgaccacctgatgcccctgatcagcagcagccccaagctgagcgagtgcctgcagaagaagaaggagatcatcgagcagatggagatgaagctggacaccggcatcgacagaaccctgaactgcatgatcggccagatgaagcacatcctggccgccgagcagaagaagaccgacttcaagcccgaggacgagaacaacgtgctgatccagtacaccaacgcctgcgtgaaggtgtgcgcctacgtgagaaagcaggtggagaagatcaagaacagcatggacggcaagaacgtggacaccgtgctgatggagctgggcgtgagattccacagactgatctacgagcacctgcagcagtacagctacagctgcatgggcggcatgctggccatctgcgacgtggccgagtacagaaagtgcgccaaggacttcaagatccccatggtgctgcacctgttcgacaccctgcacgccctgtgcaacctgctggtggtggcccccgacaacctgaagcaggtgtgcagcggcgagcagctggccaacctggacaagaacatcctgcacagcttcgtgcagctgagagccgactacagaagcgccagactggccagacacttcagctag

SEQ ID NO: 166082 - protein, 380 aa, Artificial Sequence
  derived and/or modified sequence
MGSGCRIECIFFSEFHPTLGPKITYQVPEDFISRELFDTVQVYIITKPELQNKLITVTAMEKKLIGCPVCIEHKKYSRNALLFNLGFVCDAQAKTCALEPIVKKLAGYLTTLELESSFVSMEESKQKLVPIMTILLEELNASGRCTLPIDESNTIHLKVIEQRPDPPVAQEYDVPVFTKDKEDFFNSQWDLTTQQILPYIDGFRHIQKISAEADVELNLVRIAIQNLLYYGVVTLVSILQYSNVYCPTPKVQDLVDDKSLQEACLSYVTKQGHKRASLRDVFQLYCSLSPGTTVRDLIGRHPQQLQHVDERKLIQFGLMKNLIRRLQKYPVRVTREEQSHPARLYTGCHSYDEICCKTGMSYHELDERLENDPNIIICWK

SEQ ID NO: 166083 - DNA, 1700 bp, Artificial Sequence
  derived and/or modified sequence
atggaaattgtagttccctgctgcggtcccagttacagcgtgaatcccttagcgcaccgcctccccaagtgctgccagcatgctgcccctccacgctagggacttgcctgcctctgccgcagcgcagatctgatgcggtggtttcctccaaagaaagcgggatactccgggccctgccgcgcgcaccgccgctccgtcacggagccgctttacttccgggtgcgacgtctacccacccaggacttcctgggacgagccgtcccccgccccagccacgcctctgagtcgcgctgcgcaggcgccattgggcagagggattggcaagcttgcgtgccccagcgacacaggcctcgaggctgtctctgacaagtgttcacaggaggtggggacgcctctgcgcgaggaacgaggagctacgggcctgggcccggttattgccatgggcagcggctgccgcatcgaatgcatattcttcagcgagttccaccccacgctgggacccaagatcacctatcaggtccctgaagacttcatctcccgagagctgtttgacacagtccaagtgtacatcatcaccaagccagagctgcagaacaagcttatcactgtcacagctatggaaaagaagctgatcggctgtcctgtgtgcatcgaacacaagaagtacagccgcaatgctctcctcttcaacctgggcttcgtgtgtgatgcccaggccaagacctgcgccctcgagcccattgttaaaaagctggctggctatctgaccacactagagctagagagcagcttcgtgtccatggaggagagcaagcagaagttggtgcccatcatgaccatcttgctggaggagctaaatgcctcaggccggtgcactctgcccattgatgagtccaacaccatccacttgaaggtgattgagcagcggccagaccctccggtggcccaggagtatgatgtacctgtctttaccaaagacaaggaggatttcttcaactcacagtgggacctcactacacaacaaatcctgccctacattgatgggttccgccacatccagaagatttcagcagaggcagatgtggagctcaacctggtgcgcattgctatccagaacctgctgtactacggcgttgtgacactggtgtccatcctccagtactccaatgtatactgcccaacgcccaaggtccaggacctggtagatgacaagtccctgcaagaggcatgtctatcctacgtgaccaagcaagggcacaagagggccagtctccgggatgtgttccagctatactgcagcctgagccctggcactaccgtgcgagacctcattggccgccacccccagcagctgcagcatgttgatgaacggaagctgatccagttcgggcttatgaagaacctcatcaggcgactacagaagtatcctgtgcgggtgactcgggaagagcagagccaccctgcccggctttatacaggctgccacagctatgacgagatctgctgcaagacaggcatgagctaccatgagctggatgagcggcttgaaaatgaccccaacatcatcatctgctggaagtgaggctggtagtgactggatggacacattgctgtgggtagtccctcctactaggaggcttgtcatactgtctagaggttgactcttagttctgtaaataaagacatccatttcaaacagc

SEQ ID NO: 166084 - DNA, 1143 bp, Artificial Sequence
  derived and/or modified sequence
atgggcagcggttgccgaatcgagtgtatcttcttttctgagtttcaccctacacttggacctaagatcacatatcaggtacccgaagacttcatcagccgtgaactgtttgacaccgtacaggtctacataattaccaagccggaactccagaataagctgatcacagtcactgccatggaaaaaaagttaatcggatgtcctgtgtgtattgaacacaaaaaatactcccggaacgctctactcttcaatttgggtttcgtgtgcgacgcacaagcaaagacctgtgccttggagccaatcgtgaagaagcttgcagggtatctgacgacgttggagctcgagtcttcatttgtgagcatggaggagagcaagcagaagctggtgcccattatgaccatccttcttgaggagcttaacgcgagcggccgctgtaccttgccaattgatgaatccaacacgatccatttgaaagtcatcgaacagcgaccggatccgcccgttgcccaagagtacgacgtgcctgtgttcactaaagataaggaagacttcttcaattctcagtgggatctgaccacacagcagatacttccttacattgacggattcagacacatccaaaagatttcagctgaagctgatgtcgaactgaacctggtgagaattgcgatacaaaatctcctctactacggagtggtaacactcgtgagtattcttcagtacagcaatgtttattgcccgacgccaaaggtgcaggacttggtggacgacaagtcactccaggaggcgtgcctcagctacgtcacaaaacagggccacaaacgggcctctcttagggatgtgttccagttgtactgctcactctctccgggcactactgtacgtgacctgattggcaggcacccccaacagctccaacatgtggacgagcggaagttaatccagttcggtctgatgaagaatttgattaggagactgcagaagtatcccgtgagagtcactagagaagagcagagccaccctgcaagactgtataccgggtgtcactcctacgacgaaatctgctgtaagacgggcatgtcctaccatgaactcgatgagcgccttgaaaatgatcctaatattattatctgctggaagtag

SEQ ID NO: 166085 - DNA, 1143 bp, Artificial Sequence
  derived and/or modified sequence
atgggcagcggctgcagaattgagtgcatcttcttcagcgagttccaccccaccctgggccccaagatcacctaccaggtgcctgaggacttcatcagccgggagctgtttgacacagtgcaggtgtacatcatcaccaagccagagctgcagaacaagctgatcaccgtgacagccatggagaagaagctgattggctgccctgtgtgcatcgagcacaagaagtacagcagaaatgccctgctcttcaacctgggctttgtgtgtgatgcccaggccaagacctgtgccctggagcccatcgtgaagaagctggccggctacctgaccaccctggagctggagagcagctttgtgtccatggaggagagcaagcagaagctggtgcccatcatgaccatcctgctggaggagctgaatgccagcggccgctgcaccctgcccattgatgagagcaacaccatccacctgaaggtgattgagcagaggccagacccccctgtggcccaggagtatgatgtgcctgtgttcaccaaggacaaggaggacttcttcaacagccagtgggacctgaccacccagcagatcctgccctacattgatggcttccgccacatccagaagatctctgctgaggctgatgtggagctgaacctggtgcgcatcgccatccagaacctgctgtactacggcgtggtgaccctggtgtccatcctgcagtacagcaatgtgtactgccccacccccaaggtgcaggacctggtggatgacaagagcctgcaggaggcctgcctgtcctatgtgaccaagcagggccacaagagggccagcctgagagatgtgttccagctgtactgcagcctgagccctggcaccaccgtgcgggacctgattggccgccacccccagcagctgcagcacgtggatgagaggaagctgatccagtttggcctgatgaagaacctgatccggcggctgcagaagtaccctgtgcgggtgacccgggaggagcagagccacccagcccggctgtacacaggctgccacagctatgatgagatctgctgcaagacaggcatgagctaccacgagctggatgagcggctggagaatgaccccaacatcatcatctgctggaagtag

SEQ ID NO: 166086 - DNA, 1143 bp, Artificial Sequence
  derived and/or modified sequence
atgggcagcggctgccggatcgagtgcatcttcttcagcgagttccaccctacacttggaccgaagattacctatcaggttcctgaggattttatatctcgggagctgttcgacactgtccaagtgtacatcatcacgaagccagagctgcagaataagctcatcacagtcacagcaatggaaaagaaactcataggatgccctgtctgcatagagcacaaaaagtacagccggaatgctctgctgttcaatttaggatttgtgtgcgacgcccaggctaagacatgcgccctggagcctattgtgaagaagctagctggttacttgactacccttgaactggagtcttccttcgttagcatggaggaaagcaaacagaagctggttcccattatgaccatactcctcgaggaattgaacgctagtggccggtgtactttgcctatcgatgaaagtaacactatacacctcaaggtaatagagcagcgcccagaccctcccgtagcacaagaatacgatgtcccagtttttacaaaagataaggaagatttcttcaacagccagtgggacttaaccactcagcaaattttgccttacattgacggctttaggcacatccagaagatctcagctgaagcggatgtcgagctgaacctggtccggatcgctatccaaaatctgctctattatggagtggtcaccttggtgtcaatcctgcagtactccaatgtgtattgtcccacccccaaggttcaggatttggtggatgataaaagccttcaggaggcctgcttgagttacgtgaccaaacagggccacaaacgcgccagcctgagagatgtgttccagctgtactgttccctgagccccggtacgacagttcgagacctcatcggccgtcaccctcaacagctgcagcacgtggacgagagaaaactcatacaattcggtctgatgaaaaacctgatcagacggctgcagaagtacccagttagagtcactcgggaggagcagtcacatcctgctcgcctgtataccgggtgccacagttacgatgagatctgctgcaagacgggcatgtcctaccacgaactggacgagcggttagaaaacgatcctaacattataatttgttggaaatag

SEQ ID NO: 166087 - DNA, 1143 bp, Artificial Sequence
  derived and/or modified sequence
atgggttccggctgccggatcgaatgcatttttttctcagaattccatccgacactgggccctaagatcacttaccaagtgccagaggacttcatctcccgagagctgtttgacactgtgcaggtgtatattatcacgaagcccgaactccaaaacaagcttataaccgttaccgctatggagaaaaaactcattggttgtccagtatgtatcgagcataagaagtacagtagaaatgctctccttttcaatttgggattcgtatgtgacgcccaggcaaaaacttgtgccttagaacccatcgtcaagaagctcgctggctaccttactacactagagctggaatcctcgtttgtgtcaatggaggagtccaagcagaagctggtgccaataatgaccattctgttagaggaattgaacgcgtccgggagatgcaccctccctatcgacgagtccaacacaattcatctcaaagtcatcgaacaaagaccagaccctcccgtcgcgcaggagtacgatgtgcccgtgtttaccaaagacaaggaggactttttcaattctcaatgggacctgacgacacaacaaatcttaccatatattgacggctttagacatatccagaagatttccgcagaggccgacgtggaacttaatttggtacgtattgcgattcagaatctgctttattatggggtcgttactctcgtgagcatactacagtacagtaatgtgtattgccccaccccaaaggtccaggatttggttgatgataagtctttgcaggaagcctgcctgtcttatgtgacgaaacaggggcataaacgtgccagccttagggacgttttccagctttactgcagtttgtctcccggaacgactgttagagacctgattggtcgccatccccagcagttgcagcacgtggatgagcggaagctgatacagtttggcctgatgaagaacctcatcagaagacttcagaaataccctgtaagggtgactagagaggagcaaagccatccagcgaggctttacactggctgtcattcatatgacgaaatttgctgcaagactggtatgagctatcatgagctcgatgagcggctagagaacgaccctaacataataatctgctggaagtag

SEQ ID NO: 166088 - DNA, 1143 bp, Artificial Sequence
  derived and/or modified sequence
atgggcagcggctgcagaatcgagtgcatcttcttcagcgagttccaccccaccctgggccccaagatcacctaccaggtgcccgaggacttcatcagcagagagctgttcgacaccgtgcaggtgtacatcatcaccaagcccgagctgcagaacaagctgatcaccgtgaccgccatggagaagaagctgatcggctgccccgtgtgcatcgagcacaagaagtacagcagaaacgccctgctgttcaacctgggcttcgtgtgcgacgcccaggccaagacctgcgccctggagcccatcgtgaagaagctggccggctacctgaccaccctggagctggagagcagcttcgtgagcatggaggagagcaagcagaagctggtgcccatcatgaccatcctgctggaggagctgaacgccagcggcagatgcaccctgcccatcgacgagagcaacaccatccacctgaaggtgatcgagcagagacccgacccccccgtggcccaggagtacgacgtgcccgtgttcaccaaggacaaggaggacttcttcaacagccagtgggacctgaccacccagcagatcctgccctacatcgacggcttcagacacatccagaagatcagcgccgaggccgacgtggagctgaacctggtgagaatcgccatccagaacctgctgtactacggcgtggtgaccctggtgagcatcctgcagtacagcaacgtgtactgccccacccccaaggtgcaggacctggtggacgacaagagcctgcaggaggcctgcctgagctacgtgaccaagcagggccacaagagagccagcctgagagacgtgttccagctgtactgcagcctgagccccggcaccaccgtgagagacctgatcggcagacacccccagcagctgcagcacgtggacgagagaaagctgatccagttcggcctgatgaagaacctgatcagaagactgcagaagtaccccgtgagagtgaccagagaggagcagagccaccccgccagactgtacaccggctgccacagctacgacgagatctgctgcaagaccggcatgagctaccacgagctggacgagagactggagaacgaccccaacatcatcatctgctggaagtag

SEQ ID NO: 166089 - protein, 577 aa, Artificial Sequence
  derived and/or modified sequence
MNKLYIGNLNESVTPADLEKVFAEHKISYSGQFLVKSGYAFVDCPDEHWAMKAIETFSGKVELQGKRLEIEHSVPKKQRSRKIQIRNIPPQLRWEVLDSLLAQYGTVENCEQVNTESETAVVNVTYSNREQTRQAIMKLNGHQLENHALKVSYIPDEQIAQGPENGRRGGFGSRGQPRQGSPVAAGAPAKQQQVDIPLRLLVPTQYVGAIIGKEGATIRNITKQTQSKIDVHRKENAGAAEKAISVHSTPEGCSSACKMILEIMHKEAKDTKTADEVPLKILAHNNFVGRLIGKEGRNLKKVEQDTETKITISSLQDLTLYNPERTITVKGAIENCCRAEQEIMKKVREAYENDVAAMSLQSHLIPGLNLAAVGLFPASSSAVPPPPSSVTGAAPYSSFMQAPEQEMVQVFIPAQAVGAIIGKKGQHIKQLSRFASASIKIAPPETPDSKVRMVIITGPPEAQFKAQGRIYGKLKEENFFGPKEEVKLETHIRVPASAAGRVIGKGGKTVNELQNLTAAEVVVPRDQTPDENDQVIVKIIGHFYASQMAQRKIRDILAQVKQQHQKGQSNQAQARRK

SEQ ID NO: 166090 - DNA, 8274 bp, Artificial Sequence
  derived and/or modified sequence
atttagaggcggcgccagggcggccgcggagaaacgtgacacaccagccctctcggaggggtttcggaccgaagggaagaagctgcgccgtgtcgtccgtctccctgcgcgccgcgggcacttctcctgggctctccccgaactctcccgcgacctctgcgcgccctcaggccgccttccccgccctgggctcgggacaacttctggggtggggtgcaaagaaagtttgcggctcctgccgccggcctctccgcctcttggcctaggaggctcgccgcccgcgcccgctcgttcggccttgcccgggaccgcgtcctgccccgagaccgccaccatgaacaagctttacatcggcaacctcaacgagagcgtgacccccgcggacttggagaaagtgtttgcggagcacaagatctcctacagcggccagttcttggtcaaatccggctacgccttcgtggactgcccggacgagcactgggcgatgaaggccatcgaaactttctccgggaaagtagaattacaaggaaaacgcttagagattgaacattcggtgcccaaaaaacaaaggagccggaaaattcaaatccgaaatattccaccccagctccgatgggaagtactggacagcctgctggctcagtatggtacagtagagaactgtgagcaagtgaacaccgagagtgagacggcagtggtgaatgtcacctattccaaccgggagcagaccaggcaagccatcatgaagctgaatggccaccagttggagaaccatgccctgaaggtctcctacatccccgatgagcagatagcacagggacctgagaatgggcgccgagggggctttggctctcggggtcagccccgccagggctcacctgtggcagcgggggccccagccaagcagcagcaagtggacatcccccttcggctcctggtgcccacccagtatgtgggtgccattattggcaaggagggggccaccatccgcaacatcacaaaacagacccagtccaagatagacgtgcataggaaggagaacgcaggtgcagctgaaaaagccatcagtgtgcactccacccctgagggctgctcctccgcttgtaagatgatcttggagattatgcataaagaggctaaggacaccaaaacggctgacgaggttcccctgaagatcctggcccataataactttgtagggcgtctcattggcaaggaaggacggaacctgaagaaggtagagcaagataccgagacaaaaatcaccatctcctcgttgcaagaccttaccctttacaaccctgagaggaccatcactgtgaagggggccatcgagaattgttgcagggccgagcaggaaataatgaagaaagttcgggaggcctatgagaatgatgtggctgccatgagcctgcagtctcacctgatccctggcctgaacctggctgctgtaggtcttttcccagcttcatccagcgcagtcccgccgcctcccagcagcgttactggggctgctccctatagctcctttatgcaggctcccgagcaggagatggtgcaggtgtttatccccgcccaggcagtgggcgccatcatcggcaagaaggggcagcacatcaaacagctctcccggtttgccagcgcctccatcaagattgcaccacccgaaacacctgactccaaagttcgtatggttatcatcactggaccgccagaggcccaattcaaggctcagggaagaatctatggcaaactcaaggaggagaacttctttggtcccaaggaggaagtgaagctggagacccacatacgtgtgccagcatcagcagctggccgggtcattggcaaaggtggaaaaacggtgaacgagttgcagaatttgacggcagctgaggtggtagtaccaagagaccagacccctgatgagaacgaccaggtcatcgtgaaaatcatcggacatttctatgccagtcagatggctcaacggaagatccgagacatcctggcccaggttaagcagcagcatcagaagggacagagtaaccaggcccaggcacggaggaagtgaccagcccctccctgtcccttcgagtccaggacaacaacgggcagaaatcgagagtgtgctctccccggcaggcctgagaatgagtgggaatccgggacacctgggccgggctgtagatcaggtttgcccacttgattgagaaagatgttccagtgaggaaccctgatctctcagccccaaacacccacccaattggcccaacactgtctgcccctcggggtgtcagaaattctagcgcaaggcacttttaaacgtggattgtttaaagaagctctccaggccccaccaagagggtggatcacacctcagtgggaagaaaaataaaatttccttcaggttttaaaaacatgcagagaggtgttttaatcagccttaaaggatggttcatttcttgaccttaatgtttttccaatcttcttccccctacttgggtaattgattaaaatacctccatttacggcctctttctatatttacactaatttttttatctttattgctaccagaaaaaaatgcgaacgaatgcattgctttgcttacagtattgactcaagggaaaagaactgtcagtatctgtagattaattccaatcactccctaaccaataggtacaatacggaatgaagaagaggggaaaatggggagaaagatggttaaaatacataataatccacgtttaaaaggagcgcacttgtggctgatctatgccagatcaccatcttcaaattggcacaactgaaatttccccactctgttggggcttccccaccacattcatgtccctctcccgtgtaggtttcacattatgtccaggtgcacataggtggtattgaatgctcagcagggtaggggctgaccactgtccctgattcccatcgttctcaggcggattttatatttttttaaagtctattttaatgattggatatgagcactgggaaggggacgctaactccccttgataaagtctcggttccatggaggacttgagtggccccaaaggctgccacggtgccctcaccccagcccatgtgctcccataagggctggttcctagaggcaggggttgtggggcactcccagccacggcactgttaccttggtggtgggacttggaacccaaccctgagctcccgataaagctaaagtccatcatctggcaaattcagtaaattggagagtacttgcttctgtttgtatctgagaggaatttttaactgacggcttctgtctccatgaatcattatcagcatgatgaaaggtgtgtctaaaaaacaattcagaataccagcagcattgtacagcaaggggtaaataagcttaatttattaatttaccaggcttaattaagatcccatggagtgtttagcccttgtgggagacagaagccatcagttaaatgaggttaggcctctcctcctaatatactgattgacaatgcatattagccaggtaatgcactttagctaccctggacaatgctatcaagtgtgctgggaagggaggaaggcctctctacatatggaaaagcccatgcgtggagttcccctcctttcaacattgcaacaacagtaacaacaagacaaccgcaacatgtgggcgtagtcaggcaatgctgtgtgcgaagtaaactacctcaaggtatgaagttacctcagcaattattttcctttttgttccccccaaccccattaaaaaaatttttttttgatttttgtttttttgcagcttgctgatattttatataaaaaagaaaagcaaagcaaaagagaagctgatagtcttgaatattttatttttttaatgaaaagaaaaaacaagaaagttatgtttcataatttcttacaacatgagccagtaaccctttaggaactctctatggagaacaggcctggtgggaaaggctttgggggctgcccccttaggaggaggctagtgctaagagggaaggcccaggtttgagagagcccagaggggcagagcccagagccttgtttggccctgatctctgacttctagagccccagctgctggcggctgctggaatatcctacctgataggattaaaaggcctagtggagctgggggctctcagtggttaaacaatgcccaacaaccaaccagctggcccttggtctcctctctttcctcctttggttaaagagcatctcagccagcttttcccaccagtggtgctgttgagatattttaaaatattgcctccgttttatcgaggagagaaataataactaaaaaatataccctttaaaaaaacctatatttctctgtctaaaaatatgggagctgagattccgttcgtggaaaaaagacaaggccaccctctcgccctcagagaggtccacctggtttgtcattgcaatgcttttcattttttttttttgttattgtttcatttcagttccgtcttgctattcttcctaatctatatccatagatctaaggggcaaacagatactagttaactgcccccacctctgtctccctgtcttctttagatcggtctgattgattttaaaagtggacccaaacttagggaattcttgatttagggtggctggtggcaaggaggggcaggggatatggggacgtgactgggacaggttcctgccttatcattttctccctaggacattcccttgtagcccccagaattgtctggcccaaattgaatagaagcagaaaaacatttagggataacatcaggccagtagaattaagcctctccacctgtcccaaccataaaaagggtctcccagctttccatctctggctctatatgctttatcccaaaacaaagcagataacgttcagacgtcggccatttagtaatttaaagcgaatttccagcagcaagcatgctttgatatctggttcagactatcatcaggaagaaaaaaaaatcccacagtacctgaaatgtgattgttgcagtgttcagtttccttgggggcctgctcccttcacaccttgagcccaagtccttttccgttggctgattcagctcccagaagagacgaggaagtgtgtggcaagggactggaaaacttcacttgcttggattaggcaaggctccactcattgttgatatttgcccagcaggaaaatcatgtaagttataccaccagaaagcaaaaggagcatggtttggtggttaaggtttagtgggatgaaggacctgtcttggtgggccgggccctcttgtgccccgtaggctaggtcttagggcaactccttgccctcctgctcagcacctccatttccccatccttggtgagataacaagctatcgcgaaaagcacttgggagatttggatgatttgagaagagtgacttaaaaaaaatgcttctgtgctctaagatatatatgtgtgtgtgtgtgctacatatatatttttaagaaaggaccatctctttaggatatatttttaaattctttgaaacacataaccaaaatggtttgattcactgactgactttgaagctgcatctgccagttacaccccaaatggctttaatcccctctcgggtctggttgccttttgcagtttgggttgtggactcagctcctgtgaggggtctggttaggagagagccatttttaaggacagggagttttatagcccttttctactttcctcccctcctcccagtccttatcaatcttttttcctttttcctgaccccctccttctggaggcagttgggagctatccttgtttatgcctcactattggcagaaaagaccccatttaaaacccagagaacactggagggggatgctctagttggttctgtgtccattttcctctgtgccaaagacagacagacagaggctgagagaggctgttcctgaatcaaagcaatagccagctttcgacacatacctggctgtctgaggaggaaggcctcctggaaactgggagctaagggcgaggcccttcccttcagaggctcctgggggattagggtgtggtgtttgccaagccaaggggtagggagccgagaaattggtctgtcggctcctggttgcactttggggaaggagaggaagtttggggctccaggtagctccctgttgtgggactgctctgtcccctgcccctactgcagagatagcactgccgagttcccttcaggcctggcagacgggcagtgaggaggggcctcagttagctctcaagggtgccttcccctcctcccaacccagacataccctctgccaaactgggaaccagcagtgctagtaactacctcacagagccccagagggcctgcttgagccttcttgctccacaggagaagctggtgcctctaggcaaccccttcctcccacctctcatcaggggtgggggttctcctttctttcccctgaagtgtttatggggagatcctagtggctttgccattcaaaccactcgactgtttgcctgtttcttgaaaaccagtagaagggaaacagcacagcctgtcacagtaattgcaggaagattgaagaaaaatcctcatcaatgccaggggacataaaagccatttcccttccaaatactcgacaatttagatgcagaacatttctctgtattcagacttagagtaacaccagctgaaaactgcagtttctttcctttggatacataaggcttctctatcggggtacgggacagggaggaggcctcatgtctgaagggggatttaggggcgagagccccagccctgaccctcggtcctgtgcaccgctttggggcacagtctgatggcgcctttgctggcgccttagtatggttgactccggatggacaaaagaaaaaaaattttttttcttgaatgaaatagcaggaagctcctcgggagcatgtgttttgattaaccgcaggtgatggatgctacgagtataaatggattaactacctcaatccttacagtaagattggaactaagggcagggactcatgcataagggtatgaatcccagccaggacaagtgagttgaggcttgtgccacaaaaggtttgtccttggggaacaggcaggcctgccaggatcccccccatatcgattgggctgggagggctggccatgaggtccccactttctgctttccttgcccatgtgtcacccctttggcctccagcttgtccctctctcactttctatagctttgttggaccagatggtgaggaaaggaatggcctcttcccttctagagggggctggctggagtgagacctggggcttggcctggaacccaccacacagccccaaagtcaggaagcctggggaaaccagagctgagacctcttcaacagggtttctttgagatcctacacctccattgggccctttttcagtcttcaatgggggcccagttggctctagaaggagaagaggtgaagcaggatcctttgccctgggggagtctgagggcgcggtccttggactcattcaggccgtctttgtagttgggggagttccactgggcgatcccagcccctccccacccaccctctaatggacctcctcatagaagccccatttcacttttgttttatctacctcttagcaaaacaatagataaattaggtagtggcagctccacttgcttaggttagggggggaaaaagatttctttttccaaaggaaaaaaatattaccttgagaatactttccaaaaaataaaattaaaaaaaaaaaaaccaaaaaaaaaaatttttttttaaaagggagacattttccagtgaccactggattgttttaatttcccaagcttttttttcccccataaataagtttcactctttggcgattttcttcacttgtttaagataacgtgctagctattccaacaggtaacagctttcacagtctgcccctggcctgtctcaccccatcccccaccctattcctgccagtgagtccttcctgtgcttctctcccttctcccctcccagccagctgacttcagtcacccctgtcccccctcccctgccaataagctcccccaggaataaaggctttgttttggggatgcttaaatcttgactggcacttcccggctgtgggggctggggagccacttgtaacatttctgtgcagattttatgttagccactgctatgtaaaagcacgttcaaaatgaatttcagcagattatgtgttaccataatgaataaacgtcctctatcaccatt

SEQ ID NO: 166091 - DNA, 1734 bp, Artificial Sequence
  derived and/or modified sequence
atgaacaagctgtacattggcaatcttaacgagagcgttactccagctgatctagagaaagtgttcgccgaacacaagatttcatacagtggacaatttctggtgaagagcgggtacgccttcgtagactgcccagatgagcactgggccatgaaggctatcgagacattcagtggcaaggtcgagctgcagggtaaacgactcgaaattgagcactccgtccccaagaaacagaggtcgaggaagatccagatccggaacatcccaccccagctcagatgggaggtgctagattcccttctggcgcagtatggaactgtggaaaattgtgagcaggttaacaccgagagcgaaaccgctgtggtgaacgtaacttactcaaatcgcgagcaaacccgccaagccattatgaaactgaacggacaccagctggagaaccacgctctcaaggtgagctatatcccggacgagcagatcgcccaaggtccagagaacggtcgccgagggggtttcgggtctagaggtcagcccagacaggggtccccagtggccgctggtgctccagccaagcagcaacaggtcgacattcccctgcgtctattagtccccactcaatatgttggcgccataattggaaaagagggggcaacgataaggaatattacgaaacagactcagagtaaaatcgatgtgcaccggaaagagaacgcaggggctgccgagaaggcaatttctgtgcattctaccccagagggctgctccagcgcctgcaaaatgatcctcgaaatcatgcataaagaggctaaagatactaagaccgctgatgaggttccactgaaaatcctggcccacaataatttcgtgggaaggctgatcggtaaggaaggacggaacctcaagaaagtggagcaggacaccgagaccaagatcaccatttcaagcctgcaagaccttacgctatacaatcctgagcggacgattaccgtcaagggcgctattgagaactgttgtcgggcagaacaggagataatgaaaaaagtgagggaagcgtacgagaatgatgtggctgcaatgtctctgcaaagccacttaattcctggcctcaatctcgctgccgttggcctcttccccgctagttccagcgccgtgcccccacctcctagcagcgtcacaggagctgcaccgtacagctcatttatgcaggctccagaacaggagatggtgcaggtgtttattcctgcccaggcggttggcgctattatcgggaaaaaggggcagcatataaagcagctgtctagatttgcaagcgcttccattaagatcgcgcccccagagacaccagactctaaagtcagaatggttatcatcacgggaccgcctgaagcccagttcaaagcccaggggcggatctacggaaagttgaaggaggagaatttcttcggccctaaggaagaagtgaagctggagacccatattagagttcctgcatcagccgcaggcagagtaatagggaagggcggcaagactgtaaacgaattacagaacctgactgcggctgaggtcgtcgtcccacgagaccagacacctgacgagaacgaccaggtgattgtgaagatcatcgggcatttctatgcatcacagatggctcagcgtaagatccgagacatactcgcacaagtcaagcaacaacaccagaaggggcagtcaaaccaggctcaggcccgccggaagtag

SEQ ID NO: 166092 - DNA, 1734 bp, Artificial Sequence
  derived and/or modified sequence
atgaacaagctgtacatcggcaacctgaatgaatctgtgaccccagctgacctggagaaggtgtttgctgagcacaagatctcctacagcggccagttcctggtgaagagcggctacgcctttgtggactgcccagatgagcactgggccatgaaggccatcgagaccttcagcggcaaggtggagctgcagggcaagaggctggagattgagcacagcgtgcccaagaagcagaggagcaggaagatccagatccggaacatccccccccagctgcgctgggaggtgctggacagcctgctggcccagtatggcaccgtggagaactgtgagcaggtgaacacagaaagtgaaacagctgtggtgaatgtgacctacagcaaccgggagcagacccggcaggccatcatgaagctgaatggccaccagctggagaaccacgccctgaaggtgtcctacatcccagatgagcagatcgcccagggcccagaaaatggaagaagaggaggcttcggcagccggggccagccccggcagggcagccctgtggccgccggggccccagccaagcagcagcaggtggacatccccctgcggctgctggtgcccacccagtatgtgggcgccatcatcggcaaggagggcgccaccatccggaacatcaccaagcagacccagagcaagattgatgtgcacaggaaagaaaatgctggagctgctgagaaggccatctctgtgcacagcaccccagagggctgcagcagcgcctgcaagatgatcctggagatcatgcacaaggaggccaaggacaccaagacagcagatgaggtgcccctgaagatcctggcccacaacaactttgtgggccgcctcatcggcaaggagggcaggaacctgaagaaggtggagcaggacacagagaccaagatcaccatcagcagcctgcaggacctgaccctgtacaaccctgagaggaccatcaccgtgaagggggccatcgagaactgctgcagagctgagcaggagatcatgaagaaggtgcgggaggcctatgaaaatgatgtggccgccatgagcctgcagagccacctgatccctggcctgaacctggccgctgtgggcctcttccctgccagcagcagcgctgtgcccccaccacccagctctgtgactggagctgccccctacagcagcttcatgcaggcccctgagcaggagatggtgcaggtgttcatcccagcccaggccgtgggcgccatcatcggcaagaagggccagcacatcaagcagctgagcagatttgccagcgccagcatcaagatcgcccctcctgagaccccagacagcaaggtgaggatggtgatcatcactggacctcctgaggcccagttcaaggcccagggccgcatctacggcaagctgaaggaggagaacttcttcggccccaaggaggaggtgaagctggagacccacatccgggtgcctgccagcgctgctggccgggtgattggaaaaggaggcaagacagtgaatgagctgcagaacctgacagctgctgaggtggtggtgccccgggaccagaccccagatgaaaatgaccaggtgattgtgaagatcatcggccacttctacgccagccagatggcccagaggaagatccgggacatcctggcccaggtgaagcagcagcaccagaagggccagagcaaccaggcccaggcccggaggaagtag

SEQ ID NO: 166093 - DNA, 1734 bp, Artificial Sequence
  derived and/or modified sequence
atgaacaagctgtacatcggcaacctgaacgagagcgtgacccccgccgacctagaaaaagtattcgctgaacacaaaatttcctattccggtcagtttttggttaagtccgggtacgcatttgtcgactgtcctgatgaacattgggcgatgaaggcaatcgagacctttagcgggaaagtggaactgcagggcaaacggctggagatcgagcacagtgtcccaaagaagcagcgctcaagaaagatccaaattcgtaacattcctccccaactgagatgggaagtgcttgactctctattggctcagtacgggactgtagaaaattgtgagcaggtgaataccgaaagtgaaacggccgtggtgaatgtgacttatagcaacagagagcagacccgacaggccatcatgaaactgaatgggcaccaactcgaaaatcacgccctgaaggtatcctatattcctgacgagcagatagcccagggacccgaaaacggccgtagggggggctttggctctcgcggccaaccaagacagggaagccccgttgcagcaggggcacctgcaaagcagcagcaggtagatatccctctgagactgctggtccctactcagtatgtgggcgccatcataggaaaggagggcgccacgatccgaaacatcacaaagcagacacagtccaaaatcgacgtgcatcggaaagaaaacgcaggggccgccgaaaaagccatttctgtccacagtaccccggaagggtgctcctccgcatgcaaaatgattctggaaatcatgcacaaagaagctaaggacacgaaaacagccgacgaggtaccactgaaaatacttgctcacaacaatttcgttggaagactgattggaaaggagggccgcaacctgaagaaggtggagcaggatacagagactaaaatcaccatctctagcttgcaggatttaaccctgtacaatcccgagagaaccattacagtcaagggggcaattgagaattgctgtagagcagagcaggagattatgaagaaagtccgggaggcatatgaaaatgatgtagctgccatgagcctccagagccatctgatccctgggctaaatctcgctgcagtagggctgttccccgcttcctccagcgccgtcccccctcctccgtcctcagttaccggcgccgcgccgtactccagtttcatgcaggcccctgaacaagagatggttcaggtgtttattccagcccaggccgtcggcgcaataattgggaaaaagggacaacacataaaacagctgtccaggtttgcctccgcatcaatcaaaatagcccccccagaaactcctgattcaaaggttagaatggtgattatcactggccctccagaagctcagttcaaggcccaggggaggatctacggaaaattaaaggaggagaatttcttcggtcctaaggaggaggtgaagttggagacccacattcgcgtgccagccagtgctgctggacgcgtgataggcaaggggggaaagactgtgaatgagttacagaatctcacagccgctgaagtcgtcgtgccgcgggaccagacacccgatgagaatgaccaggttatcgtgaagattataggtcacttttatgcaagccagatggcccagcgcaagattagggacatattggcgcaggtcaagcagcagcatcagaagggccagagcaatcaggcccaggccaggcgcaaatag

SEQ ID NO: 166094 - DNA, 1734 bp, Artificial Sequence
  derived and/or modified sequence
atgaataagctatatatcggaaacctgaatgaatctgtcactccggctgatctagaaaaagtgttcgcagaacataaaattagttacagcgggcagtttctcgtcaagtctggatatgcgtttgtggattgcccagatgaacactgggcaatgaaagctattgagacattcagtggcaaggtcgagctccagggtaaacgcttagagatagaacatagtgttcccaagaagcagcggagccgcaagatacagattcggaacatacccccacagcttcgatgggaggtgctggatagcctcctcgcgcagtacgggacagtggagaattgtgaacaggttaacaccgagagcgaaacagctgtggttaatgtgacatatagcaaccgagagcagacacgccaggcaattatgaagcttaacggacatcagctggaaaatcacgctctgaaagtctcctacatcccagacgagcagattgctcaaggcccagaaaacggtagacggggaggctttggcagtcgcggacagcctagacaagggagcccagtggccgcaggtgcgcctgcaaaacaacagcaagtcgatattcctctgcggctgcttgtccctactcagtacgtgggggctatcataggcaaggagggcgcaacaatcagaaatatcaccaaacagacgcagagcaaaattgacgtacaccgcaaggagaacgccggtgcagccgaaaaggccattagcgtgcactctacgcccgagggttgttcttctgcatgcaagatgattctagagataatgcacaaagaggcaaaggacacaaaaacagccgacgaagttcctctgaaaatcctggcacacaacaactttgtaggacgacttatcggaaaggagggcagaaatctaaaaaaagtggagcaggatactgaaaccaaaatcaccatttcctctctgcaggacctcaccctctacaaccctgagcggaccattacggtaaaaggtgccattgagaactgttgccgagccgaacaggaaattatgaaaaaggtgcgcgaggcatacgaaaacgacgttgcggctatgagtctgcagagccatttgattcctggtctgaacctcgctgccgtcggactgttccctgcaagcagctccgccgtgcctcctcctccttcgagcgttactggggcagccccttactcatctttcatgcaggcacctgaacaggagatggtccaggtcttcatccccgcacaggccgtcggtgctatcataggcaagaagggccagcacattaagcagctgtcacggtttgccagcgcttcaatcaagattgccccacctgagacgcccgactccaaggtgcgcatggttattatcacggggcctccagaagctcagtttaaagcacagggcagaatttatgggaaactgaaagaagaaaattttttcgggccaaaggaagaggtgaagctggagacgcacatcagggtgcccgcttccgcagcaggcagggtgattggaaagggagggaagaccgtgaacgaactccagaacctcacggcagccgaagtggtcgtcccacgggaccaaactccagacgagaacgatcaggtgattgtcaagattattggccacttttacgcttcccagatggcacagcgtaagattcgcgatatcctcgcacaggtcaaacagcagcaccagaagggtcagagtaaccaggctcaagcacgtcgaaaatag

SEQ ID NO: 166095 - DNA, 1734 bp, Artificial Sequence
  derived and/or modified sequence
atgaacaagctgtacatcggcaacctgaacgagagcgtgacccccgccgacctggagaaggtgttcgccgagcacaagatcagctacagcggccagttcctggtgaagagcggctacgccttcgtggactgccccgacgagcactgggccatgaaggccatcgagaccttcagcggcaaggtggagctgcagggcaagagactggagatcgagcacagcgtgcccaagaagcagagaagcagaaagatccagatcagaaacatccccccccagctgagatgggaggtgctggacagcctgctggcccagtacggcaccgtggagaactgcgagcaggtgaacaccgagagcgagaccgccgtggtgaacgtgacctacagcaacagagagcagaccagacaggccatcatgaagctgaacggccaccagctggagaaccacgccctgaaggtgagctacatccccgacgagcagatcgcccagggccccgagaacggcagaagaggcggcttcggcagcagaggccagcccagacagggcagccccgtggccgccggcgcccccgccaagcagcagcaggtggacatccccctgagactgctggtgcccacccagtacgtgggcgccatcatcggcaaggagggcgccaccatcagaaacatcaccaagcagacccagagcaagatcgacgtgcacagaaaggagaacgccggcgccgccgagaaggccatcagcgtgcacagcacccccgagggctgcagcagcgcctgcaagatgatcctggagatcatgcacaaggaggccaaggacaccaagaccgccgacgaggtgcccctgaagatcctggcccacaacaacttcgtgggcagactgatcggcaaggagggcagaaacctgaagaaggtggagcaggacaccgagaccaagatcaccatcagcagcctgcaggacctgaccctgtacaaccccgagagaaccatcaccgtgaagggcgccatcgagaactgctgcagagccgagcaggagatcatgaagaaggtgagagaggcctacgagaacgacgtggccgccatgagcctgcagagccacctgatccccggcctgaacctggccgccgtgggcctgttccccgccagcagcagcgccgtgccccccccccccagcagcgtgaccggcgccgccccctacagcagcttcatgcaggcccccgagcaggagatggtgcaggtgttcatccccgcccaggccgtgggcgccatcatcggcaagaagggccagcacatcaagcagctgagcagattcgccagcgccagcatcaagatcgccccccccgagacccccgacagcaaggtgagaatggtgatcatcaccggcccccccgaggcccagttcaaggcccagggcagaatctacggcaagctgaaggaggagaacttcttcggccccaaggaggaggtgaagctggagacccacatcagagtgcccgccagcgccgccggcagagtgatcggcaagggcggcaagaccgtgaacgagctgcagaacctgaccgccgccgaggtggtggtgcccagagaccagacccccgacgagaacgaccaggtgatcgtgaagatcatcggccacttctacgccagccagatggcccagagaaagatcagagacatcctggcccaggtgaagcagcagcaccagaagggccagagcaaccaggcccaggccagaagaaagtag

SEQ ID NO: 166096 - protein, 579 aa, Artificial Sequence
  derived and/or modified sequence
MNKLYIGNLSENAAPSDLESIFKDAKIPVSGPFLVKTGYAFVDCPDESWALKAIEALSGKIELHGKPIEVEHSVPKRQRIRKLQIRNIPPHLQWEVLDSLLVQYGVVESCEQVNTDSETAVVNVTYSSKDQARQALDKLNGFQLENFTLKVAYIPDEMAAQQNPLQQPRGRRGLGQRGSSRQGSPGSVSKQKPCDLPLRLLVPTQFVGAIIGKEGATIRNITKQTQSKIDVHRKENAGAAEKSITILSTPEGTSAACKSILEIMHKEAQDIKFTEEIPLKILAHNNFVGRLIGKEGRNLKKIEQDTDTKITISPLQELTLYNPERTITVKGNVETCAKAEEEIMKKIRESYENDIASMNLQAHLIPGLNLNALGLFPPTSGMPPPTSGPPSAMTPPYPQFEQSETETVHLFIPALSVGAIIGKQGQHIKQLSRFAGASIKIAPAEAPDAKVRMVIITGPPEAQFKAQGRIYGKIKEENFVSPKEEVKLEAHIRVPSFAAGRVIGKGGKTVNELQNLSSAEVVVPRDQTPDENDQVVVKITGHFYACQVAQRKIQEILTQVKQHQQQKALQSGPPQSRRK

SEQ ID NO: 166097 - DNA, 4250 bp, Artificial Sequence
  derived and/or modified sequence
ggccgaagccaaaggggttgggaaggaagagacaaaaagtagttttttcccctcctcctcctcctttctcttgctaatcccgcctcctcctaagacttaggaagactggtggatgcgtttgggttgtagctaggctttttcttttctttctcttttaaaacacatctagacaaggaaaaaacaagcctcggatctgatttttcactcctcgttcttgtgcttggttcttactgtgtttgtgtattttaaaggcgagaagacgaggggaacaaaaccagctggatccatccatcaccgtgggtggttttaatttttcgttttttctcgttatttttttttaaacaaccactcttcacaatgaacaaactgtatatcggaaacctcagcgagaacgccgccccctcggacctagaaagtatcttcaaggacgccaagatcccggtgtcgggacccttcctggtgaagactggctacgcgttcgtggactgcccggacgagagctgggccctcaaggccatcgaggcgctttcaggtaaaatagaactgcacgggaaacccatagaagttgagcactcggtcccaaaaaggcaaaggattcggaaacttcagatacgaaatatcccgcctcatttacagtgggaggtgctggatagtttactagtccagtatggagtggtggagagctgtgagcaagtgaacactgactcggaaactgcagttgtaaatgtaacctattccagtaaggaccaagctagacaagcactagacaaactgaatggatttcagttagagaatttcaccttgaaagtagcctatatccctgatgaaatggccgcccagcaaaaccccttgcagcagccccgaggtcgccgggggcttgggcagaggggctcctcaaggcaggggtctccaggatccgtatccaagcagaaaccatgtgatttgcctctgcgcctgctggttcccacccaatttgttggagccatcataggaaaagaaggtgccaccattcggaacatcaccaaacagacccagtctaaaatcgatgtccaccgtaaagaaaatgcgggggctgctgagaagtcgattactatcctctctactcctgaaggcacctctgcggcttgtaagtctattctggagattatgcataaggaagctcaagatataaaattcacagaagagatccccttgaagattttagctcataataactttgttggacgtcttattggtaaagaaggaagaaatcttaaaaaaattgagcaagacacagacactaaaatcacgatatctccattgcaggaattgacgctgtataatccagaacgcactattacagttaaaggcaatgttgagacatgtgccaaagctgaggaggagatcatgaagaaaatcagggagtcttatgaaaatgatattgcttctatgaatcttcaagcacatttaattcctggattaaatctgaacgccttgggtctgttcccacccacttcagggatgccacctcccacctcagggcccccttcagccatgactcctccctacccgcagtttgagcaatcagaaacggagactgttcatctgtttatcccagctctatcagtcggtgccatcatcggcaagcagggccagcacatcaagcagctttctcgctttgctggagcttcaattaagattgctccagcggaagcaccagatgctaaagtgaggatggtgattatcactggaccaccagaggctcagttcaaggctcagggaagaatttatggaaaaattaaagaagaaaactttgttagtcctaaagaagaggtgaaacttgaagctcatatcagagtgccatcctttgctgctggcagagttattggaaaaggaggcaaaacggtgaatgaacttcagaatttgtcaagtgcagaagttgttgtccctcgtgaccagacacctgatgagaatgaccaagtggttgtcaaaataactggtcacttctatgcttgccaggttgcccagagaaaaattcaggaaattctgactcaggtaaagcagcaccaacaacagaaggctctgcaaagtggaccacctcagtcaagacggaagtaaaggctcaggaaacagcccaccacagaggcagatgccaaaccaaagacagattgcttaaccaacagatgggcgctgaccccctatccagaatcacatgcacaagtttttacctagccagttgtttctgaggaccaggcaacttttgaactcctgtctctgtgagaatgtatactttatgctctctgaaatgtatgacacccagctttaaaacaaacaaacaaacaaacaaaaaaagggtgggggagggagggaaagagaagagctctgcacttccctttgttgtagtctcacagtataacagatattctaattcttcttaatattcccccataatgccagaaattggcttaatgatgctttcactaaattcatcaaatagattgctcctaaatccaattgttaaaattggatcagaataattatcacaggaacttaaatgttaagccattagcatagaaaaactgttctcagttttatttttacctaacactaacatgagtaacctaagggaagtgctgaatggtgttggcaggggtattaaacgtgcatttttactcaactacctcaggtattcagtaatacaatgaaaagcaaaattgttccttttttttgaaaattttatatactttataatgatagaagtccaaccgttttttaaaaaataaatttaaaatttaacagcaatcagctaacaggcaaattaagatttttacttctggctggtgacagtaaagctggaaaattaatttcagggttttttgaggcttttgacacagttattagttaaatcaaatgttcaaaaatacggagcagtgcctagtatctggagagcagcactaccatttattctttcatttatagttgggaaagtttttgacggtactaacaaagtggtcgcaggagattttggaacggctggtttaaatggcttcaggagacttcagttttttgtttagctacatgattgaatgcataataaatgctttgtgcttctgactatcaatacctaaagaaagtgcatcagtgaagagatgcaagactttcaactgactggcaaaaagcaagctttagcttgtcttataggatgcttagtttgccactacacttcagaccaatgggacagtcatagatggtgtgacagtgtttaaacgcaacaaaaggctacatttccatggggccagcactgtcatgagcctcactaagctattttgaagatttttaagcactgataaattaaaaaaaaaaaattagactccaccttaagtagtaaagtataacaggatttctgtatactgtgcaatcagttctttgaaaaaaaagtcaaaagatagagaatacaagaaaagtttttgggatataatttgaatgactgtgaaaacatatgacctttgataacgaactcatttgctcactccttgacagcaaagcccagtacgtacaattgtgttgggtgtgggtggtctccaaggccacgctgctctctgaattgattttttgagttttgtttgtaagatgatcacagtcatgttacactgatctaaaggacatatatataaccctttaaaaaaaaaatcactgcctcattcttatttcaagatgaatttctatacagactagatgtttttctgaagatcaattagacattttgaaaatgatttaaagtgttttccttaatgttctctgaaaacaagtttcttttgtagttttaaccaaaaaagtgccctttttgtcactggattctcctagcattcatgatttttttttcatacaatgaattaaaattgctaaaatcatggactggctttctggttggatttcaggtaagatgtgtttaaggccagagcttttctcagtatttgatttttttccccaatatttgattttttaaaaatatacacataggtgctgcatttatatctgctggtttaaattctgtcatatttcacttctagccttttagtatggcaaatcatattttacttttacttaagcatttgtaatttggagtatctggtactagctaagaaataattctataattgagttttgtactcaccatatatggatcattcctcatgtataatgtgccccaaatgcagcttcattttccagataccttgacgcagaataaattttttcatcatttaggtgca

SEQ ID NO: 166098 - DNA, 1740 bp, Artificial Sequence
  derived and/or modified sequence
atgaataaactctacatcgggaacctgtccgagaatgccgcccctagtgaccttgagagcatctttaaagatgcaaagattccggtgagcggtccattcctcgttaaaactggctacgcgtttgtcgactgtccagatgaatcgtgggcgctaaaggccatagaagctctgtcaggaaaaatcgagctgcacggcaaaccaattgaggtggaacactccgttccgaagcgccagaggatccgcaaactccagattcggaatatccccccccatctccagtgggaggtacttgatagcctgctggtgcagtacggcgtcgtcgaaagctgcgaacaggtgaatactgacagcgaaaccgcagtggtgaatgtgacatatagctctaaggatcaggcccggcaggcactcgacaaactcaacggcttccagctcgagaacttcaccttgaaggtggcgtatattcctgatgagatggcagcacagcaaaacccactgcagcaaccaagggggcggagaggcctaggacaacgcggttcctcacgtcaaggatctcccggctctgtttcaaagcagaagccatgcgacctgcccctccgactactcgtccctacacaatttgtgggggcaataatagggaaggaaggggcgaccattcggaacattaccaagcaaacccaaagtaaaattgatgtgcatcgtaaggaaaacgccggagccgccgagaagagcataaccattctgtctacccccgaggggacgtcagccgcatgcaaatccattctcgagattatgcataaggaggcacaggatatcaaattcacggaggagatcccccttaagatcctagcccacaacaacttcgtgggtcgtctcattgggaaagaagggcgcaacctgaagaaaatcgagcaggacactgatacaaaaatcactatctctcctctccaggagctaacactgtataatccagaaaggaccatcaccgtgaaaggaaatgttgaaacttgcgcaaaagccgaggaggagataatgaaaaagatacgagagtcttacgaaaatgatattgcttctatgaatctgcaggctcatctcatccctggactcaatctaaacgccctcggcctatttcctccgacctctgggatgccccccccaacctctggtcccccatccgcaatgactcctccgtatccccaattcgaacaatccgagaccgaaaccgtgcatctgtttattcctgccctttcagtcggtgcgatcattggtaaacaggggcagcacattaagcagctgtcccgctttgccggcgccagtattaagattgcacccgctgaagcgcctgatgctaaagtccgcatggtcataatcacaggccccccagaggcccagttcaaagctcaaggacgcatttacggcaagatcaaggaagaaaacttcgtaagcccaaaagaagaggtcaagctagaggcccacatccgggtgcccagcttcgctgccggaagagtcatcggcaaaggcggcaagactgtgaacgaactgcagaatttgtcctcggccgaggtggttgtcccaagagaccagacccctgacgaaaacgaccaggtagtggtcaaaattactggacacttttatgcatgccaggtggcccagcggaaaatccaggagatcctaacacaggttaagcaacaccagcaacagaaggctctgcagtcgggccccccccaaagccggcgcaaatag

SEQ ID NO: 166099 - DNA, 1740 bp, Artificial Sequence
  derived and/or modified sequence
atgaacaagctgtacatcggcaacctgtctgaaaatgctgcccccagcgacctggagagcatcttcaaggatgccaagatccctgtgtctggccccttcctggtgaagacaggctacgcctttgtggactgcccagatgagagctgggccctgaaggccatcgaggccctgagcggcaagattgagctgcacggcaagcccatcgaggtggagcacagcgtgcccaagaggcagaggatcaggaagctgcagatccggaacatccccccccacctgcagtgggaggtgctggacagcctgctggtgcagtatggagtggtggagagctgtgagcaggtgaacacagattctgaaacagctgtggtgaatgtgacctacagcagcaaggaccaggcccggcaggccctggacaagctgaatggcttccagctggagaacttcaccctgaaggtggcctacatcccagatgagatggccgcccagcagaaccccctgcagcagccccggggcagaagaggcctgggccagaggggcagcagccggcagggcagccctggctctgtgtccaagcagaagccctgtgacctgcccctgcggctgctggtgcccacccagtttgtgggcgccatcatcggcaaggagggcgccaccatccggaacatcaccaagcagacccagagcaagattgatgtgcacaggaaagaaaatgctggagctgctgagaagagcatcaccatcctgagcaccccagagggcaccagcgctgcctgcaagagcatcctggagatcatgcacaaggaggcccaggacatcaagttcacagaggagatccccctgaagatcctggcccacaacaactttgtgggccgcctcatcggcaaggagggcaggaacctgaagaagattgagcaggacacagacaccaagatcaccatcagccccctgcaggagctgaccctgtacaaccctgagaggaccatcaccgtgaagggaaatgtggagacctgtgccaaggccgaggaggagatcatgaagaagatccgggagagctatgaaaatgacatcgcctccatgaacctgcaggcccacctgatccctggcctgaacctgaatgccctgggcctcttcccccccaccagcggcatgcccccacccaccagcggccccccatctgccatgaccccaccctacccccagtttgagcagagcgagacagaaacagtgcacctgttcatcccagccctgtctgtgggcgccatcatcggcaagcagggccagcacatcaagcagctgagcagatttgctggggccagcatcaagatcgccccagctgaggccccagatgccaaggtgaggatggtgatcatcactggacctcctgaggcccagttcaaggcccagggccgcatctacggcaagatcaaggaggagaactttgtgagccccaaggaggaggtgaagctggaggcccacatccgggtgcccagctttgctgctggccgggtgattggaaaaggaggcaagacagtgaatgagctgcagaacctgagcagcgctgaggtggtggtgccccgggaccagaccccagatgaaaatgaccaggtggtggtgaagatcaccggccacttctacgcctgccaggtggcccagaggaagatccaggagatcctgacccaggtgaagcagcaccagcagcagaaggccctgcagagcggccccccccagagcaggaggaagtag

SEQ ID NO: 166100 - DNA, 1740 bp, Artificial Sequence
  derived and/or modified sequence
atgaacaagctgtacatcggcaacctgagcgagaacgccgccccctcagatctcgagtcaatattcaaagacgctaagattccggtgtcaggcccctttctggtgaagacgggttatgcctttgtggactgccccgacgaatcttgggcactgaaagcaattgaggccctctccggaaagattgagcttcatgggaagccaattgaagtagagcatagtgttcctaaacgtcagcgtatcagaaagctacagattcggaatataccgcctcatctgcaatgggaagtacttgatagcctgctggtgcagtatggggtggtcgaaagttgtgagcaggtaaacacagactccgagacggctgtagtgaatgtgacatacagttctaaggaccaggccagacaggccctggacaaattgaacggctttcagttagagaacttcacactcaaggtcgcctatattccagatgaaatggccgcccagcaaaatcctctgcagcagccgcgagggcgcagggggctgggacagaggggctccagtagacagggttcccctggcagtgtctccaaacagaaaccctgcgatcttcctctgaggctgctcgtccctactcaattcgtcggggctattattgggaaggaaggggccacaataagaaatatcaccaagcagacgcagtcaaagatagatgtacatcggaaggaaaacgcaggagctgccgagaagtccatcacgatcctttcaacccccgagggcactagtgcagcctgtaagtccatcttagagattatgcataaggaagcccaggacattaaattcaccgaggagatccccctcaagattctcgcccataataacttcgtggggaggctcattggaaaggaaggccgaaatctgaagaagatagagcaggataccgatactaagatcacgatttcacccctgcaggaattgacattgtataatcctgagagaactattacggtgaaaggcaatgtagagacctgcgccaaggccgaagaggagatcatgaagaaaattagagagagctatgaaaatgacattgccagcatgaatctgcaggctcatttgatccccggactgaatcttaacgcccttggactgttccctcctacctctggaatgcctccacccacatctgggccaccttcggccatgactcccccctacccccaattcgagcagtctgagactgaaaccgtccacctgttcattccggccctgtctgttggagccatcatcgggaaacagggacagcacatcaagcagctgtcccggtttgccggagcaagtatcaaaatcgcaccagccgaagcccccgacgcaaaggtgcggatggtaatcataacagggcccccagaggcgcagttcaaggcccaaggtagaatatacggaaagatcaaagaggaaaacttcgtaagccctaaggaggaggtcaaactcgaggcacatattcgcgttccttccttcgccgccggccgcgtgatcgggaagggcggaaagactgtcaacgaactacagaacctttcatccgcggaggttgtggtcccacgagatcagactcctgatgagaatgaccaagttgtggttaagataacagggcatttctatgcatgccaggtcgcccaaagaaaaatccaggaaattctgacacaggtcaagcagcatcagcagcagaaagcactgcagagcgggccaccccagtcccggaggaaatag

SEQ ID NO: 166101 - DNA, 1740 bp, Artificial Sequence
  derived and/or modified sequence
atgaacaagctgtacatagggaatctttcagaaaacgccgctcctagcgatctggagagcattttcaaggacgcgaagattccggtttcagggccatttttggtcaaaacaggatatgctttcgtggattgtcccgatgaaagctgggccctgaaggcaatagaagccctttctggcaaaatagaactgcatgggaaacctattgaagtcgaacacagtgtgcccaaacgacaacgcatccggaaactgcaaataagaaatatcccccctcaccttcagtgggaagtcctggacagcctgctggtgcaatacggggtcgtggagtcgtgcgagcaggttaatacagactccgaaacagctgtcgttaatgtgacatattcatcaaaagaccaggcacgccaggcactggacaaactgaatggattccagcttgaaaatttcactctgaaagtggcttatatacccgatgagatggcggcacagcagaatccgctgcagcaaccgagggggagacgaggtctggggcagcggggaagcagtcggcaggggtcccctggcagtgtaagcaagcagaagccctgtgatcttcccctgcggctactcgtccccactcagtttgtcggagccataatcggcaaagagggggctacaataagaaatataactaaacagactcagagcaagattgatgtacaccggaaagaaaacgccggagcagccgaaaagtcaattactatcctaagcacacccgaggggaccagcgcagcatgtaagtctatcttggagattatgcacaaggaagctcaagatataaaatttacggaagagatcccactcaagatcttggctcacaacaatttcgtaggccgtcttatcggaaaagagggtcggaatctcaagaagatcgaacaggacactgatacgaagattacgatctctcccctgcaggaactgactctttacaaccccgagcgtaccatcactgtaaagggtaatgtggagacttgcgctaaggctgaggaggagattatgaagaaaatcagagaatcctacgagaacgacatcgccagcatgaacctccaagcacacctaatcccaggcctaaatctgaacgcactgggcctgttcccaccaacctcaggcatgccgccaccaactagtgggccacccagtgctatgacgcccccttatcctcagtttgagcaaagcgaaaccgagaccgtgcaccttttcatcccggcactgtctgtaggcgctatcatcggaaagcagggccagcacatcaagcaactctctcgatttgccggtgcgagtataaagatcgcccctgccgaggcacccgacgctaaagtcaggatggtaatcattactgggcctccggaagcccagtttaaagcccagggacggatctatgggaaaatcaaggaggaaaatttcgtatcacctaaagaggaggtcaaactcgaggctcatattagggtacccagcttcgcagcaggcagggtcatcggaaaaggcggaaagactgttaacgagcttcagaatctatctagcgctgaagtggtggtccctcgagatcagacacccgacgagaatgatcaggtggtcgtgaagatcacagggcatttctacgcctgtcaagtcgctcagaggaagatacaagagatcctgacacaggtgaaacaacaccagcaacaaaaggcccttcaatccggtcctcctcagtcgagacggaagtag

SEQ ID NO: 166102 - DNA, 1740 bp, Artificial Sequence
  derived and/or modified sequence
atgaacaagctgtacatcggcaacctgagcgagaacgccgcccccagcgacctggagagcatcttcaaggacgccaagatccccgtgagcggccccttcctggtgaagaccggctacgccttcgtggactgccccgacgagagctgggccctgaaggccatcgaggccctgagcggcaagatcgagctgcacggcaagcccatcgaggtggagcacagcgtgcccaagagacagagaatcagaaagctgcagatcagaaacatccccccccacctgcagtgggaggtgctggacagcctgctggtgcagtacggcgtggtggagagctgcgagcaggtgaacaccgacagcgagaccgccgtggtgaacgtgacctacagcagcaaggaccaggccagacaggccctggacaagctgaacggcttccagctggagaacttcaccctgaaggtggcctacatccccgacgagatggccgcccagcagaaccccctgcagcagcccagaggcagaagaggcctgggccagagaggcagcagcagacagggcagccccggcagcgtgagcaagcagaagccctgcgacctgcccctgagactgctggtgcccacccagttcgtgggcgccatcatcggcaaggagggcgccaccatcagaaacatcaccaagcagacccagagcaagatcgacgtgcacagaaaggagaacgccggcgccgccgagaagagcatcaccatcctgagcacccccgagggcaccagcgccgcctgcaagagcatcctggagatcatgcacaaggaggcccaggacatcaagttcaccgaggagatccccctgaagatcctggcccacaacaacttcgtgggcagactgatcggcaaggagggcagaaacctgaagaagatcgagcaggacaccgacaccaagatcaccatcagccccctgcaggagctgaccctgtacaaccccgagagaaccatcaccgtgaagggcaacgtggagacctgcgccaaggccgaggaggagatcatgaagaagatcagagagagctacgagaacgacatcgccagcatgaacctgcaggcccacctgatccccggcctgaacctgaacgccctgggcctgttcccccccaccagcggcatgcccccccccaccagcggcccccccagcgccatgacccccccctacccccagttcgagcagagcgagaccgagaccgtgcacctgttcatccccgccctgagcgtgggcgccatcatcggcaagcagggccagcacatcaagcagctgagcagattcgccggcgccagcatcaagatcgcccccgccgaggcccccgacgccaaggtgagaatggtgatcatcaccggcccccccgaggcccagttcaaggcccagggcagaatctacggcaagatcaaggaggagaacttcgtgagccccaaggaggaggtgaagctggaggcccacatcagagtgcccagcttcgccgccggcagagtgatcggcaagggcggcaagaccgtgaacgagctgcagaacctgagcagcgccgaggtggtggtgcccagagaccagacccccgacgagaacgaccaggtggtggtgaagatcaccggccacttctacgcctgccaggtggcccagagaaagatccaggagatcctgacccaggtgaagcagcaccagcagcagaaggccctgcagagcggccccccccagagcagaagaaagtag

SEQ ID NO: 166103 - protein, 599 aa, Artificial Sequence
  derived and/or modified sequence
MMNKLYIGNLSPAVTADDLRQLFGDRKLPLAGQVLLKSGYAFVDYPDQNWAIRAIETLSGKVELHGKIMEVDYSVSKKLRSRKIQIRNIPPHLQWEVLDGLLAQYGTVENVEQVNTDTETAVVNVTYATREEAKIAMEKLSGHQFENYSFKISYIPDEEVSSPSPPQRAQRGDHSSREQGHAPGGTSQARQIDFPLRILVPTQFVGAIIGKEGLTIKNITKQTQSRVDIHRKENSGAAEKPVTIHATPEGTSEACRMILEIMQKEADETKLAEEIPLKILAHNGLVGRLIGKEGRNLKKIEHETGTKITISSLQDLSIYNPERTITVKGTVEACASAEIEIMKKLREAFENDMLAVNQQANLIPGLNLSALGIFSTGLSVLSPPAGPRGAPPAAPYHPFTTHSGYFSSLYPHHQFGPFPHHHSYPEQEIVNLFIPTQAVGAIIGKKGAHIKQLARFAGASIKIAPAEGPDVSERMVIITGPPEAQFKAQGRIFGKLKEENFFNPKEEVKLEAHIRVPSSTAGRVIGKGGKTVNELQNLTSAEVIVPRDQTPDENEEVIVRIIGHFFASQTAQRKIREIVQQVKQQEQKYPQGVASQRSK

SEQ ID NO: 166104 - DNA, 3688 bp, Artificial Sequence
  derived and/or modified sequence
ggggggcggaggaggaggagagacgagggcagcggaggaggcgaggagcgccgggtaccgggccgggggagccgcgggctctcggggaagagacggatgatgaacaagctttacatcgggaacctgagccccgccgtcaccgccgacgacctccggcagctctttggggacaggaagctgcccctggcgggacaggtcctgctgaagtccggctacgccttcgtggactaccccgaccagaactgggccatccgcgccatcgagaccctctcgggtaaagtggaattgcatgggaaaatcatggaagttgattactcagtctctaaaaagctaaggagcaggaaaattcagattcgaaacatccctcctcacctgcagtgggaggtgttggatggacttttggctcaatatgggacagtggagaatgtggaacaagtcaacacagacacagaaaccgccgttgtcaacgtcacatatgcaacaagagaagaagcaaaaatagccatggagaagctaagcgggcatcagtttgagaactactccttcaagatttcctacatcccggatgaagaggtgagctccccttcgccccctcagcgagcccagcgtggggaccactcttcccgggagcaaggccacgcccctgggggcacttctcaggccagacagattgatttcccgctgcggatcctggtccccacccagtttgttggtgccatcatcggaaaggagggcttgaccataaagaacatcactaagcagacccagtcccgggtagatatccatagaaaagagaactctggagctgcagagaagcctgtcaccatccatgccaccccagaggggacttctgaagcatgccgcatgattcttgaaatcatgcagaaagaggcagatgagaccaaactagccgaagagattcctctgaaaatcttggcacacaatggcttggttggaagactgattggaaaagaaggcagaaatttgaagaaaattgaacatgaaacagggaccaagataacaatctcatctttgcaggatttgagcatatacaacccggaaagaaccatcactgtgaagggcacagttgaggcctgtgccagtgctgagatagagattatgaagaagctgcgtgaggcctttgaaaatgatatgctggctgttaaccaacaagccaatctgatcccagggttgaacctcagcgcacttggcatcttttcaacaggactgtccgtgctatctccaccagcagggccccgcggagctccccccgctgccccctaccaccccttcactacccactccggatacttctccagcctgtacccccatcaccagtttggcccgttcccgcatcatcactcttatccagagcaggagattgtgaatctcttcatcccaacccaggctgtgggcgccatcatcgggaagaagggggcacacatcaaacagctggcgagattcgccggagcctctatcaagattgcccctgcggaaggcccagacgtcagcgaaaggatggtcatcatcaccgggccaccggaagcccagttcaaggcccagggacggatctttgggaaactgaaagaggaaaacttctttaaccccaaagaagaagtgaagctggaagcgcatatcagagtgccctcttccacagctggccgggtgattggcaaaggtggcaagaccgtgaacgaactgcagaacttaaccagtgcagaagtcatcgtgcctcgtgaccaaacgccagatgaaaatgaggaagtgatcgtcagaattatcgggcacttctttgctagccagactgcacagcgcaagatcagggaaattgtacaacaggtgaagcagcaggagcagaaataccctcagggagtcgcctcacagcgcagcaagtgaggctcccacaggcaccagcaaaacaacggatgaatgtagcccttccaacacctgacagaatgagaccaaacgcagccagccagatcgggagcaaaccaaagaccatctgaggaatgagaagtctgcggaggcggccagggactctgccgaggccctgagaaccccaggggccgaggaggggcggggaaggtcagccaggtttgccagaaccaccgagccccgcctcccgccccccagggcttctgcaggcttcagccatccacttcaccatccactcggatctctcctgaactcccacgacgctatcccttttagttgaactaacataggtgaacgtgttcaaagccaagcaaaatgcacaccctttttctgtggcaaatcgtctctgtacatgtgtgtacatattagaaagggaagatgttaagatatgtggcctgtgggttacacagggtgcctgcagcggtaatatattttagaaataatatatcaaataactcaactaactccaatttttaatcaattattaatttttttttctttttaaagagaaagcaggcttttctagactttaaagaataaagtctttgggaggtctcacggtgtagagaggagctttgaggccacccgcacaaaattcacccagagggaaatctcgtcggaaggacactcacggcagttctggatcacctgtgtatgtcaacagaagggataccgtctccttgaagaggaaactctgtcactcctcatgcctgtctagctcatacacccatttctctttgcttcacaggttttaaactggttttttgcatactgctatataattctctgtctctctctgtttatctctcccctccctcccctccccttcttctccatctccattcttttgaatttcctcatccctccatctcaatcccgtatctacgcacccccccccccccaggcaaagcagtgctctgagtatcacatcacacaaaaggaacaaaagcgaaacacacaaaccagcctcaacttacacttggttactcaaaagaacaagagtcaatggtacttgtcctagcgttttggaagaggaaaacaggaacccaccaaaccaaccaatcaaccaaacaaagaaaaaattccacaatgaaagaatgtattttgtctttttgcattttggtgtataagccatcaatattcagcaaaatgattcctttctttaaaaaaaaaaaatgtggaggaaagtagaaatttaccaaggttgttggcccagggcgttaaattcacagatttttttaacgagaaaaacacacagaagaagctacctcaggtgtttttacctcagcaccttgctcttgtgtttcccttagagattttgtaaagctgatagttggagcatttttttatttttttaataaaaatgagttggaaaaaaaataagatatcaactgccagcctggagaaggtgacagtccaagtgtgcaacagctgttctgaattgtcttccgctagccaagaacctatatggccttcttttggacaaaccttgaaaatgtttatttaaaaaaaaaaaagatgacaaagaaaaacagagagagagaatattggagatgtcctgaattttaatagggtacgcgccattagggctttttgcgctaaaggatgaacatgtactggtttatgtggacaagccattataccaccagactgcaatgccagtttcctctactgcaaacagtgttctgtgacaaaaaaaaaaaaaaaaaaaagaaaaaaaaagaaaaaacagaaatatatccagctaacaaga

SEQ ID NO: 166105 - DNA, 1800 bp, Artificial Sequence
  derived and/or modified sequence
atgatgaacaagttatacatcggcaatctcagtccagctgtcacagctgatgacttacgacagctgtttggagatcgcaagttgccgcttgccgggcaggtcttgttgaagtccggctacgcattcgtcgattaccctgatcagaattgggctatcagggcaattgaaacactgagtgggaaggttgaactgcacggaaagattatggaggtggactactcagtgagcaaaaaactacgttcacggaaaatccagattcgcaacatacctccacatttgcagtgggaagttcttgatggcctgttggctcagtacggaaccgtcgagaacgtcgaacaggtgaacaccgataccgaaaccgccgtggtgaatgttacttatgcaacccgcgaagaggctaagatagccatggagaagctttctggtcaccagttcgagaattattctttcaaaatctcatacatccctgacgaagaagtgagcagtccctcaccacctcaaagagctcaacggggggatcatagcagccgcgagcaggggcacgctccaggcgggacttcacaagccaggcagatcgactttccacttaggattctggtcccgactcagttcgttggcgcaatcattggtaaagaagggctgactataaagaacatcacaaaacagactcagtctagagtggacattcacaggaaggaaaatagcggagccgcagaaaaacccgttaccattcacgcaacacccgagggaacctctgaagcctgcagaatgatcttagagataatgcaaaaggaggcagacgaaactaagttagccgaagaaattcctctaaagatactcgcccacaatggtctcgttggtagacttatcgggaaagaaggcagaaatcttaagaaaatcgagcacgagaccggcactaaaatcaccatatcatcattacaggacctatccatatacaatcccgagcggactattacggtgaagggtactgtggaggcgtgcgcatcagccgaaatcgaaataatgaaaaagctccgggaagcattcgagaatgatatgctggctgtgaaccagcaggcgaatttgatccctggcttgaaccttagtgcactgggcattttttccactgggttgagtgtcctatcccctcctgctggacccagaggagcccccccagccgctccgtatcatccatttaccacacattccggatacttcagtagcctgtacccgcaccaccagtttgggcccttcccacaccaccattcgtacccagagcaagagatagtgaacctgtttatccctacacaggccgttggggccattataggcaagaagggtgcacacatcaagcagctcgcccgtttcgccggtgcatctataaaaatcgcccctgctgagggtccagatgtttcagaacggatggtaatcataaccggaccgcctgaagcacagttcaaagcccagggaaggatcttcggaaaattgaaagaggagaatttcttcaacccaaaggaggaggtaaagctcgaagcccacatcagggtacccagctctacagccggtcgggtgatcggtaagggcggaaagactgttaatgaactgcaaaacctgacctctgctgaggtgatcgtgccgcgagatcaaacccctgatgagaatgaagaggttatcgtgcggataatcgggcatttctttgcatctcaaacagctcaaaggaagattcgggagatcgtacagcaagtcaaacaacaggagcagaagtacccacagggcgttgcttcccagcggtcgaaatag

SEQ ID NO: 166106 - DNA, 1800 bp, Artificial Sequence
  derived and/or modified sequence
atgatgaacaagctgtacatcggcaacctgagccctgctgtgacagcagatgacctgcggcagctgtttggagacaggaagctgcccctggccggccaggtgctgctgaagagcggctacgcctttgtggactacccagaccagaactgggccatccgggccatcgagaccctgagcggcaaggtggagctgcacggcaagatcatggaggtggactacagcgtgtccaagaagctgcggagcaggaagatccagatccggaacatccccccccacctgcagtgggaggtgctggatggcctgctggcccagtatggaacagtggagaatgtggagcaggtgaacacagacacagaaacagctgtggtgaatgtgacctacgccacccgggaggaggccaagatcgccatggagaagctgagcggccaccagtttgagaactacagcttcaagatctcctacatcccagatgaggaggtgagcagccccagccccccccagagggcccagagaggagaccacagcagccgggagcagggccacgcccctgggggcaccagccaggcccggcagattgacttccccctgcgcatcctggtgcccacccagtttgtgggcgccatcatcggcaaggagggcctgaccatcaagaacatcaccaagcagacccagagccgggtggacatccacaggaaagaaaattctggagctgctgagaagcctgtgaccatccacgccaccccagagggcaccagcgaggcctgcaggatgatcctggagatcatgcagaaggaggctgatgagaccaagctggccgaggagatccccctgaagatcctggcccacaacggcctggtgggccgcctcatcggcaaggagggcaggaacctgaagaagattgagcacgagaccggcaccaagatcaccatcagcagcctgcaggacctgagcatctacaaccctgagaggaccatcaccgtgaagggcaccgtggaggcctgtgccagcgctgagattgagatcatgaagaagctgcgggaggcctttgaaaatgacatgctggccgtgaaccagcaggccaacctgatccctggcctgaacctgagcgccctgggcatcttcagcacaggcctgtctgtgctgagccccccagctggccccaggggggcccctcctgctgccccctaccaccccttcaccacccacagcggctacttcagcagcctgtacccccaccaccagtttggccccttcccccaccaccacagctacccagagcaggagatcgtgaacctcttcatccccacccaggccgtgggcgccatcatcggcaagaagggggcccacatcaagcagctggccaggtttgctggggccagcatcaagatcgccccagctgagggcccagatgtgtctgagaggatggtgatcatcactggacctcctgaggcccagttcaaggcccagggccgcatctttgggaagctgaaggaggagaacttcttcaaccccaaggaggaggtgaagctggaggcccacatccgggtgcccagcagcacagctggccgggtgattggaaaaggaggcaagacagtgaatgagctgcagaacctgaccagcgctgaggtgattgtgccccgggaccagaccccagatgaaaatgaggaggtgattgtgcgcatcatcggccacttctttgccagccagacagcccagaggaagatccgggagatcgtgcagcaggtgaagcagcaggagcagaagtacccccagggcgtggccagccagaggagcaagtag

SEQ ID NO: 166107 - DNA, 1800 bp, Artificial Sequence
  derived and/or modified sequence
atgatgaacaagctgtacatcggcaacctgagccccgccgtgaccgctgacgatttgagacaactgtttggcgatagaaaattgccacttgcaggtcaagtgctgctgaagagcggatacgcctttgtggactaccctgatcagaactgggctattagggcaatcgaaactcttagtgggaaagtggagctgcatggcaagatcatggaggtggactactccgtgtctaagaagttgaggtcgcgaaaaatacaaattcgtaacatccctccacacttgcagtgggaagtattggacggattactagcgcaatacggtaccgtagaaaacgtggaacaggtgaacaccgacaccgagaccgccgtcgtgaacgtcacatacgccacacgggaggaagcaaagattgccatggaaaaactttccggtcaccagttcgagaactattcatttaagatatcctatattccagacgaggaggtgagttcccccagccctccccaacgggcccaaagaggagaccactcttccagggaacagggacatgctcccggggggacaagtcaggccagacagatcgattttcctctcaggattctggtgcctacccagtttgtaggagcaatcatcggaaaagaaggccttacgatcaagaatatcactaaacaaacacagtcccgcgtggatatccacaggaaggagaactctggtgcagccgaaaagccagtcaccatccacgccactccagagggcacctcagaggcttgcagaatgattttggaaattatgcagaaagaggcggatgagacaaaactagctgaagagatcccactcaagattctggcccacaacgggctggttgggcgcttaattggcaaagaaggaaggaatctcaagaagattgaacatgaaactggaacaaagatcacaatttcatctttgcaagacctttcaatctacaatcctgaacgtacaataacggtcaaaggcacggtagaggcttgcgccagcgccgagatcgaaattatgaagaaactgagagaggccttcgaaaacgatatgcttgcggtcaaccagcaggcgaacctcatccctggtctgaatctcagtgcactcggaatcttcagtacaggactcagcgtactctcaccacctgctgggccaaggggcgctccacctgccgccccttatcatccatttactacccattccggctacttttcttcactttatccacaccaccaattcggaccattcccacaccaccacagctaccccgagcaggaaatagtaaatttgtttataccgactcaagctgtgggggccatcattggaaagaagggagcccacatcaaacagctcgcaagattcgcgggggcgtccatcaagatagcgcctgctgaagggcccgatgtgtccgaaaggatggtgattatcactggaccacctgaggcgcagtttaaggctcaggggcgtatattcggcaaactgaaggaggaaaattttttcaacccaaaagaggaagttaaactggaagcacatatacgcgtgccttcttcaacagctggcagagtgatcggcaagggtggtaaaaccgtgaatgaactccagaatctgacaagcgcagaggtgatcgtccccagggatcagactcccgacgagaatgaggaggtcatagtgaggattatcggtcattttttcgcaagtcagactgcccaacggaagattcgcgagattgtgcagcaggtcaagcagcaggaacagaagtaccctcaaggagtggcctcccagcgctccaagtag

SEQ ID NO: 166108 - DNA, 1800 bp, Artificial Sequence
  derived and/or modified sequence
atgatgaataagctctacatcgggaacctgtcacccgcagtgacagcagatgatttgcggcagctgtttggagacaggaaacttccgctggccggacaggtactgctcaaatctggttacgcctttgtggattacccagatcaaaactgggctatacgagcaatagaaactctatccgggaaggtggaactgcacgggaagatcatggaggtggactattcagtgtctaagaaattacggagtcggaagatccagatccggaatataccaccccaccttcaatgggaagtactggacggcctgcttgcccaatacggaaccgtggagaacgttgagcaggtgaatacggataccgaaaccgctgtcgttaacgtcacctacgcaacccgcgaagaggctaaaatcgccatggagaagcttagtggacaccaattcgaaaattatagtttcaagatttcctacatacctgacgaggaggtgagtagtcctagcccaccacagcgagcacagcgtggcgatcattcttcgagagagcagggacatgctcccggtggtacctcacaggccaggcaaatagacttccccctgcggattctggtacctactcagtttgtgggggcaatcattgggaaagaaggcctgacaattaagaatatcaccaagcagactcagtctcgtgtggacatacatcggaaggagaacagcggcgctgccgagaagccagtgactattcatgctacccccgaagggactagcgaagcctgtcgtatgattctagaaatcatgcaaaaggaagctgatgagacgaagctggcagaggaaatcccactgaaaattctggcacacaacggtctggtcggacgcctgatcgggaaagagggccgaaacctgaagaagattgagcacgaaacgggaactaaaatcacaattagcagtctccaagatctatcaatctataacccagagcggacaattactgtgaaggggaccgtcgaagcatgtgcttccgccgagattgaaatcatgaagaagctcagggaggcttttgagaatgacatgctcgccgtgaatcaacaagccaacttgattccgggtcttaacctgtcggccctcgggattttctctacaggactcagcgtcctctcaccccctgcgggaccacgcggagcacctccagcagcgccttaccatccctttacaacgcactccggctacttctcatcactttaccctcaccatcagttcgggcctttcccacatcatcattcttatcctgagcaagagattgtgaatctctttatccctacacaggccgtgggcgctattatcggcaaaaagggggctcacatcaaacagttggccagatttgcaggcgcatcaattaagattgcacctgctgagggcccagatgtatccgagcggatggtaatcattactggacccccagaggcacagtttaaggctcagggtaggatcttcggaaaattgaaagaggaaaatttctttaatcccaaagaagaagtgaagctggaggcacatatcagggtacccagctctacagctgggagagtgattggtaagggaggcaagactgttaacgaattgcagaatctgacctcagctgaggtgattgttccgagggaccagacccctgacgaaaatgaagaggtcattgtccggattataggacacttttttgcctcgcaaaccgctcaaagaaaaatacgtgaaatagttcagcaggtcaagcagcaggaacagaaatacccacagggtgtagcaagtcaacgtagcaagtag

SEQ ID NO: 166109 - DNA, 1800 bp, Artificial Sequence
  derived and/or modified sequence
atgatgaacaagctgtacatcggcaacctgagccccgccgtgaccgccgacgacctgagacagctgttcggcgacagaaagctgcccctggccggccaggtgctgctgaagagcggctacgccttcgtggactaccccgaccagaactgggccatcagagccatcgagaccctgagcggcaaggtggagctgcacggcaagatcatggaggtggactacagcgtgagcaagaagctgagaagcagaaagatccagatcagaaacatccccccccacctgcagtgggaggtgctggacggcctgctggcccagtacggcaccgtggagaacgtggagcaggtgaacaccgacaccgagaccgccgtggtgaacgtgacctacgccaccagagaggaggccaagatcgccatggagaagctgagcggccaccagttcgagaactacagcttcaagatcagctacatccccgacgaggaggtgagcagccccagccccccccagagagcccagagaggcgaccacagcagcagagagcagggccacgcccccggcggcaccagccaggccagacagatcgacttccccctgagaatcctggtgcccacccagttcgtgggcgccatcatcggcaaggagggcctgaccatcaagaacatcaccaagcagacccagagcagagtggacatccacagaaaggagaacagcggcgccgccgagaagcccgtgaccatccacgccacccccgagggcaccagcgaggcctgcagaatgatcctggagatcatgcagaaggaggccgacgagaccaagctggccgaggagatccccctgaagatcctggcccacaacggcctggtgggcagactgatcggcaaggagggcagaaacctgaagaagatcgagcacgagaccggcaccaagatcaccatcagcagcctgcaggacctgagcatctacaaccccgagagaaccatcaccgtgaagggcaccgtggaggcctgcgccagcgccgagatcgagatcatgaagaagctgagagaggccttcgagaacgacatgctggccgtgaaccagcaggccaacctgatccccggcctgaacctgagcgccctgggcatcttcagcaccggcctgagcgtgctgagcccccccgccggccccagaggcgccccccccgccgccccctaccaccccttcaccacccacagcggctacttcagcagcctgtacccccaccaccagttcggccccttcccccaccaccacagctaccccgagcaggagatcgtgaacctgttcatccccacccaggccgtgggcgccatcatcggcaagaagggcgcccacatcaagcagctggccagattcgccggcgccagcatcaagatcgcccccgccgagggccccgacgtgagcgagagaatggtgatcatcaccggcccccccgaggcccagttcaaggcccagggcagaatcttcggcaagctgaaggaggagaacttcttcaaccccaaggaggaggtgaagctggaggcccacatcagagtgcccagcagcaccgccggcagagtgatcggcaagggcggcaagaccgtgaacgagctgcagaacctgaccagcgccgaggtgatcgtgcccagagaccagacccccgacgagaacgaggaggtgatcgtgagaatcatcggccacttcttcgccagccagaccgcccagagaaagatcagagagatcgtgcagcaggtgaagcagcaggagcagaagtacccccagggcgtggccagccagagaagcaagtag

SEQ ID NO: 166110 - protein, 90 aa, Artificial Sequence
  derived and/or modified sequence
MKLSVCLLLVTLALCCYQANAEFCPALVSELLDFFFISEPLFKLSLAKFDAPPEAVAAKLGVKRCTDQMSLQKRSLIAEVLVKILKKCSV

SEQ ID NO: 166111 - DNA, 273 bp, Artificial Sequence
  derived and/or modified sequence
atgaagctgtccgtatgtttgcttctggtaacgctcgcactttgttgctatcaggctaatgccgaattctgcccagctctggtttccgaactcctcgatttctttttcattagcgagccgctgtttaagctgtctctggctaagttcgacgctccgcctgaagcggtggctgccaagctgggcgtgaagcgctgtactgaccagatgagcctgcagaaaagatcactgattgcggaggtgctggtcaagatcctgaagaagtgttctgtgtag

SEQ ID NO: 166112 - DNA, 273 bp, Artificial Sequence
  derived and/or modified sequence
atgaagttatccgtgtgcctccttctcgtcactctggcactgtgctgttatcaggctaacgcagagttttgccccgcgctagtgtccgagttgttagacttcttcttcatcagcgagcctctcttcaaactttctcttgctaaattcgacgctccccctgaggcggtggcagctaaactgggagtcaaaagatgtacggaccaaatgagtctccagaagaggtccctcatcgccgaagttctagtgaaaattctcaagaagtgtagtgtgtag

SEQ ID NO: 166113 - DNA, 480 bp, Artificial Sequence
  derived and/or modified sequence
acaaatagccctgggctctgcagctccacaggctcctggggtggagtccaaatcactcattgtttgtgaaagctgagctcacagcaaaacaagccaccatgaagctgtcggtgtgtctcctgctggtcacgctggccctctgctgctaccaggccaatgccgagttctgcccagctcttgtttctgagctgttagacttcttcttcattagtgaacctctgttcaagttaagtcttgccaaatttgatgcccctccggaagctgttgcagccaagttaggagtgaagagatgcacggatcagatgtcccttcagaaacgaagcctcattgcggaagtcctggtgaaaatattgaagaaatgtagtgtgtgacatgtaaaaactttcatcctggtttccactgtctttcaatgacaccctgatcttcactgcagaatgtaaaggtttcaacgtcttgctttaataaatcacttgctctcca

SEQ ID NO: 166114 - DNA, 273 bp, Artificial Sequence
  derived and/or modified sequence
atgaagctgagcgtgtgcctgctgctggtgaccctggccctgtgctgctaccaggccaacgccgagttctgccccgccctggtgagcgagctgctggacttcttcttcatcagcgagcccctgttcaagctgagcctggccaagttcgacgccccccccgaggccgtggccgccaagctgggcgtgaagagatgcaccgaccagatgagcctgcagaagagaagcctgatcgccgaggtgctggtgaagatcctgaagaagtgcagcgtgtag

SEQ ID NO: 166115 - DNA, 273 bp, Artificial Sequence
  derived and/or modified sequence
atgaaactatctgtctgtctattacttgtaactctggccctgtgttgctaccaggctaacgcagagttctgccctgcactcgtctctgagctcctcgatttcttttttatttccgagcccctctttaagctctcactggctaaattcgacgcaccgcccgaggcagttgcagctaaactgggcgttaagaggtgtaccgaccaaatgagcctgcagaagcgctctctaatcgctgaagttctggtcaaaatcctgaagaaatgctcagtttag

SEQ ID NO: 166116 - DNA, 273 bp, Artificial Sequence
  derived and/or modified sequence
atgaagctgtctgtgtgcctgctgctggtgaccctggccctgtgctgctaccaggccaatgctgagttctgcccagccctggtgtctgagctgctggacttcttcttcatcagcgagcccctcttcaagctgagcctggccaagtttgatgcccctcctgaggccgtggccgccaagctgggcgtgaagcgctgcacagaccagatgagcctgcagaagaggagcctgattgctgaggtgctggtgaagatcctgaagaagtgcagcgtgtag

SEQ ID NO: 166117 - DNA, 273 bp, Artificial Sequence
  derived and/or modified sequence
atgaagctgagcgtgtgcctgctgctggtgaccctggccctgtgctgttaccaggccaacgccgaattttgtccagctctggtcagtgaactcttggattttttcttcatttcagaacctctgtttaaactcagcctggccaagtttgacgcaccgccggaggccgtcgctgccaagctgggagtgaaacggtgtacagatcagatgtccctacagaagagatcactcattgcagaagtgctagtgaagatcctgaaaaagtgcagcgtatag

SEQ ID NO: 166118 - RNA, 273 nt, Artificial Sequence
  derived and/or modified sequence
augaaguuauccgugugccuccuucucgucacucuggcacugugcuguuaucaggcuaacgcagaguuuugccccgcgcuaguguccgaguuguuagacuucuucuucaucagcgagccucucuucaaacuuucucuugcuaaauucgacgcucccccugaggcgguggcagcuaaacugggagucaaaagauguacggaccaaaugagucuccagaagaggucccucaucgccgaaguucuagugaaaauucucaagaaguguaguguguag

SEQ ID NO: 166119 - protein, 90 aa, Artificial Sequence
  derived and/or modified sequence
MRLSVCLLLLTLALCCYRANAVVCQALGSEITGFLLAGKPVFKFQLAKFKAPLEAVAAKMEVKKCVDTMAYEKRVLITKTLGKIAEKCDR

SEQ ID NO: 166120 - DNA, 273 bp, Artificial Sequence
  derived and/or modified sequence
atgagactcagcgtctgtttactcctgctgacactggcactatgctgttatcgggctaacgctgtggtttgtcaggccctcgggtcagaaattacaggcttcctgttggccggtaagcctgtgttcaaattccagctcgccaagtttaaggcaccactggaagccgtggctgccaagatggaagtgaaaaagtgtgtggacactatggcctacgagaaacgagttcttatcaccaagaccttggggaaaattgcagagaagtgcgaccgctag

SEQ ID NO: 166121 - DNA, 273 bp, Artificial Sequence
  derived and/or modified sequence
atgcgactgagcgtgtgcctgctgctgttaaccctcgccttgtgttgttacagagcaaatgccgtagtgtgccaggcgctggggtccgaaataacaggcttcctgctggcaggtaaacccgtgttcaagtttcaactggctaagttcaaggcccctctggaggccgttgctgcaaaaatggaggttaagaaatgcgtagataccatggcctacgaaaaacgagtgctgataaccaaaacattaggcaaaatcgctgagaaatgcgacaggtag

SEQ ID NO: 166122 - DNA, 273 bp, Artificial Sequence
  derived and/or modified sequence
atgagactgagcgtgtgcctgctgctgctgaccctggccctgtgctgctacagagccaacgccgtggtgtgccaggccctgggcagcgagatcaccggcttcctgctggccggcaagcccgtgttcaagttccagctggccaagttcaaggcccccctggaggccgtggccgccaagatggaggtgaagaagtgcgtggacaccatggcctacgagaagagagtgctgatcaccaagaccctgggcaagatcgccgagaagtgcgacagatag

SEQ ID NO: 166123 - DNA, 453 bp, Artificial Sequence
  derived and/or modified sequence
aggctcccggggctgagtctaaatcactcatcattggttaaagccgagctcacagcagaataagccaccatgaggctgtcggtgtgtctcctgctgctcacgctggccctttgctgctaccgggcaaatgcagtggtctgccaagctcttggttctgaaatcacaggcttcttattagctggaaaacctgtgttcaagttccaacttgccaaatttaaggcacctctggaagctgttgcagccaagatggaagtgaagaaatgcgtggatacgatggcctatgagaaaagagtgctaattacaaaaacattgggaaaaatagcagagaaatgtgatcgctgagatgtaaaaagtttttaatgctagtttccaccatctttcaatgataccctgatcttcactgcagaatgtaaaggtttcaacgtcttgctctaataaatcacttgccctgaa

SEQ ID NO: 166124 - DNA, 273 bp, Artificial Sequence
  derived and/or modified sequence
atgaggctatctgtgtgcctcttgctgctcacactggcactgtgctgctatagggccaacgcagttgtatgccaggcccttgggtccgaaatcactgggtttctgttagctgggaagcccgtttttaaattccaactggcaaaatttaaggcaccactggaagctgtggccgcaaagatggaggttaaaaagtgcgtcgacactatggcgtacgagaaacgagttctcattactaaaacccttgggaagatcgccgaaaaatgtgatcgttag

SEQ ID NO: 166125 - DNA, 273 bp, Artificial Sequence
  derived and/or modified sequence
atgaggctgtctgtgtgcctgctgctgctgaccctggccctgtgctgctaccgggccaatgctgtggtgtgccaggccctgggcagcgagatcaccggcttcctgctggccggcaagcctgtgttcaagttccagctggccaagttcaaggcccccctggaggccgtggccgccaagatggaggtgaagaagtgtgtggacaccatggcctatgagaagagggtgctgatcaccaagaccctgggcaagattgctgagaagtgtgacagatag

SEQ ID NO: 166126 - DNA, 273 bp, Artificial Sequence
  derived and/or modified sequence
atgcggctgagcgtgtgcctgctgctgctgaccctggccctgtgctgttacagagcaaatgctgttgtgtgtcaggccctgggatccgagatcactggctttctgttagccggaaagcctgtttttaaattccagttggcgaaattcaaggccccacttgaggctgtcgcggctaagatggaagtaaagaaatgtgtggacacaatggcatacgaaaaacgcgttcttataaccaaaacattgggcaaaatcgctgagaaatgcgaccggtag

SEQ ID NO: 166127 - RNA, 273 nt, Artificial Sequence
  derived and/or modified sequence
augcgacugagcgugugccugcugcuguuaacccucgccuuguguuguuacagagcaaaugccguagugugccaggcgcugggguccgaaauaacaggcuuccugcuggcagguaaacccguguucaaguuucaacuggcuaaguucaaggccccucuggaggccguugcugcaaaaauggagguuaagaaaugcguagauaccauggccuacgaaaaacgagugcugauaaccaaaacauuaggcaaaaucgcugagaaaugcgacagguag

SEQ ID NO: 166128 - protein, 263 aa, Artificial Sequence
  derived and/or modified sequence
MSLVAEAFVSQIAAAEPWPENATLYQQLKGEQILLSDNAASLAVQAFLQMCNLPIKVVCRANAEYMSPSGKVPFIHVGNQVVSELGPIVQFVKAKGHSLSDGLEEVQKAEMKAYMELVNNMLLTAELYLQWCDEATVGEITHARYGSPYPWPLNHILAYQKQWEVKRKMKAIGWGKKTLDQVLEDVDQCCQALSQRLGTQPYFFNKQPTELDALVFGHLYTILTTQLTNDELSEKVKNYSNLLAFCRRIEQHYFEDRGKGRLS

SEQ ID NO: 166129 - protein, 253 aa, Artificial Sequence
  derived and/or modified sequence
MYIAAEPWPENATLYQQLKGEQILLSDNAASLAVQAFLQMCNLPIKVVCRANAEYMSPSGKVPFIHVGNQVVSELGPIVQFVKAKGHSLSDGLEEVQKAEMKAYMELVNNMLLTAELYLQWCDEATVGEITHARYGSPYPWPLNHILAYQKQWEVKRKMKAIGWGKKTLDQVLEDVDQCCQALSQRLGTQPYFFNKQPTELDALVFGHLYTILTTQLTNDELSEKVKNYSNLLAFCRRIEQHYFEDRGKGRLS

SEQ ID NO: 166130 - DNA, 792 bp, Artificial Sequence
  derived and/or modified sequence
atgagcctggtggccgaggccttcgtgagccagatcgccgccgccgagccctggcccgagaacgccaccctgtaccagcagctgaagggcgagcagatcctgctgagcgacaacgccgccagcctggccgtgcaggccttcctgcagatgtgcaacctgcccatcaaggtggtgtgcagagccaacgccgagtacatgagccccagcggcaaggtgcccttcatccacgtgggcaaccaggtggtgagcgagctgggccccatcgtgcagttcgtgaaggccaagggccacagcctgagcgacggcctggaggaggtgcagaaggccgagatgaaggcctacatggagctggtgaacaacatgctgctgaccgccgagctgtacctgcagtggtgcgacgaggccaccgtgggcgagatcacccacgccagatacggcagcccctacccctggcccctgaaccacatcctggcctaccagaagcagtgggaggtgaagagaaagatgaaggccatcggctggggcaagaagaccctggaccaggtgctggaggacgtggaccagtgctgccaggccctgagccagagactgggcacccagccctacttcttcaacaagcagcccaccgagctggacgccctggtgttcggccacctgtacaccatcctgaccacccagctgaccaacgacgagctgagcgagaaggtgaagaactacagcaacctgctggccttctgcagaagaatcgagcagcactacttcgaggacagaggcaagggcagactgagctag

SEQ ID NO: 166131 - DNA, 762 bp, Artificial Sequence
  derived and/or modified sequence
atgtacatcgccgccgagccctggcccgagaacgccaccctgtaccagcagctgaagggcgagcagatcctgctgagcgacaacgccgccagcctggccgtgcaggccttcctgcagatgtgcaacctgcccatcaaggtggtgtgcagagccaacgccgagtacatgagccccagcggcaaggtgcccttcatccacgtgggcaaccaggtggtgagcgagctgggccccatcgtgcagttcgtgaaggccaagggccacagcctgagcgacggcctggaggaggtgcagaaggccgagatgaaggcctacatggagctggtgaacaacatgctgctgaccgccgagctgtacctgcagtggtgcgacgaggccaccgtgggcgagatcacccacgccagatacggcagcccctacccctggcccctgaaccacatcctggcctaccagaagcagtgggaggtgaagagaaagatgaaggccatcggctggggcaagaagaccctggaccaggtgctggaggacgtggaccagtgctgccaggccctgagccagagactgggcacccagccctacttcttcaacaagcagcccaccgagctggacgccctggtgttcggccacctgtacaccatcctgaccacccagctgaccaacgacgagctgagcgagaaggtgaagaactacagcaacctgctggccttctgcagaagaatcgagcagcactacttcgaggacagaggcaagggcagactgagctag

SEQ ID NO: 166132 - DNA, 792 bp, Artificial Sequence
  derived and/or modified sequence
atgtctttagtggctgaggcctttgtctcccaaattgctgcagctgaaccatggccagagaacgctacactgtaccaacagcttaaaggagagcagatactcctgtccgacaacgccgcgagtctcgctgtgcaggcatttctgcagatgtgcaatttaccaatcaaggtggtgtgcagagccaacgccgaatacatgagtccctccggtaaagtgcctttcatccatgttggcaaccaggtggtctctgagcttgggccgattgtgcagttcgtgaaagccaaggggcacagcctctcagacggactagaagaggtacagaaggctgagatgaaagcatacatggaactggtgaataacatgttgttaaccgctgagctgtatctccagtggtgcgatgaggcaacagttggggagattacccacgcaaggtatggatctccatacccctggcccctcaaccatattctcgcttaccagaagcaatgggaagtgaaaaggaaaatgaaggccatcggttgggggaaaaaaactctggaccaagtgctcgaagatgtggaccagtgctgtcaggcccttagccaacggctaggaacacaaccctatttttttaataaacagcctacggaattagacgcattggttttcgggcacctgtatactatacttaccacacagcttacaaatgacgagctgtcagaaaaagttaaaaattacagcaacttactggctttttgccgccggattgaacagcactactttgaggatagaggcaaggggaggttatcatag

SEQ ID NO: 166133 - DNA, 762 bp, Artificial Sequence
  derived and/or modified sequence
atgtacatcgctgctgaaccgtggcccgaaaacgctacactgtatcagcagctgaagggtgagcaaatcctgctgtctgataacgcagcctctttggccgttcaggcatttctacaaatgtgtaatttaccaataaaagtggtatgccgggccaatgccgaatatatgagtccctcgggcaaggtacctttcatacatgtaggcaatcaagtagtctcagagctggggcctatcgtgcaatttgtgaaagccaagggccacagcttgagcgatggcctggaggaggtccagaaagcagagatgaaagcgtacatggagctggtgaacaatatgctcctcaccgccgagctctacctgcagtggtgtgacgaggcgactgtaggcgagattactcatgctcggtacggatccccttatccctggcccctgaaccacatactggcgtaccaaaagcaatgggaggtgaagagaaagatgaaagccattggatggggcaaaaaaactttggaccaggtgcttgaagatgttgaccagtgctgtcaggctctgtcacagcgccttggaacacagccatatttttttaacaaacaacctactgagttagacgctctggtgtttggccacctctacactatcttaacaacccagctcactaatgatgagctgtccgaaaaagtgaagaattactccaacctcctcgccttctgtcgcagaatcgagcagcactattttgaggatcgaggaaagggccgactgtcttag

SEQ ID NO: 166134 - DNA, 792 bp, Artificial Sequence
  derived and/or modified sequence
atgagcctggtggccgaggcctttgtgtcccagattgctgctgctgagccctggccagaaaatgccaccctgtaccagcagctgaagggggagcagatcctgctgagtgacaatgctgccagcctggccgtgcaggccttcctgcagatgtgcaacctgcccatcaaggtggtgtgccgggccaatgctgagtacatgagccccagcggcaaggtgcccttcatccacgtgggcaaccaggtggtgtctgagctgggccccatcgtgcagtttgtgaaggccaagggccacagcctgagtgatggcctggaggaggtgcagaaggccgagatgaaggcctacatggagctggtgaacaacatgctgctgacagctgagctgtacctgcagtggtgtgatgaggccaccgtgggggagatcacccacgcccgctatggcagcccctacccctggcccctgaaccacatcctggcctaccagaagcagtgggaggtgaagaggaagatgaaggccatcggctggggcaagaagaccctggaccaggtgctggaggatgtggaccagtgctgccaggccctgagccagaggctgggcacccagccctacttcttcaacaagcagcccacagagctggatgccctggtgtttggccacctgtacaccatcctgaccacccagctgaccaatgatgagctgtctgagaaggtgaagaactacagcaacctgctggccttctgcagaagaattgagcagcactactttgaagatcggggcaagggccgcctgtcctag

SEQ ID NO: 166135 - DNA, 762 bp, Artificial Sequence
  derived and/or modified sequence
atgtacatcgctgctgagccctggccagaaaatgccaccctgtaccagcagctgaagggggagcagatcctgctgagtgacaatgctgccagcctggccgtgcaggccttcctgcagatgtgcaacctgcccatcaaggtggtgtgccgggccaatgctgagtacatgagccccagcggcaaggtgcccttcatccacgtgggcaaccaggtggtgtctgagctgggccccatcgtgcagtttgtgaaggccaagggccacagcctgagtgatggcctggaggaggtgcagaaggccgagatgaaggcctacatggagctggtgaacaacatgctgctgacagctgagctgtacctgcagtggtgtgatgaggccaccgtgggggagatcacccacgcccgctatggcagcccctacccctggcccctgaaccacatcctggcctaccagaagcagtgggaggtgaagaggaagatgaaggccatcggctggggcaagaagaccctggaccaggtgctggaggatgtggaccagtgctgccaggccctgagccagaggctgggcacccagccctacttcttcaacaagcagcccacagagctggatgccctggtgtttggccacctgtacaccatcctgaccacccagctgaccaatgatgagctgtctgagaaggtgaagaactacagcaacctgctggccttctgcagaagaattgagcagcactactttgaagatcggggcaagggccgcctgtcctag

SEQ ID NO: 166136 - DNA, 1364 bp, Artificial Sequence
  derived and/or modified sequence
tgccgttgtcggctgcgccggaagtccctagccaggcctggcggtaaccttgggggcctcactgcagccgccgctgctgttggagtgggctttgcgagtctgaacgttggcggggctaggctcgttaactgccgagagcctccgggtttgcggtggaggacgctgaggcccgtggggggcaggcacccgggcgccgggcctcccagccgacatgtctctagtggcggaagccttcgtctcccagattgcagctgcagaaccttggcctgaaaatgctacattatatcagcaattgaaaggggagcaaattttactttctgacaatgcagcttctcttgcagtgcaggcctttttgcaaatgtgtaacttgcctatcaaagtagtttgtagggcaaatgcagaatatatgtctccatctggtaaagtaccttttattcatgtgggaaatcaagtagtatcagaacttggtccaatagtccaatttgttaaagccaagggccattctcttagtgatgggctggaggaagtccaaaaagcagaaatgaaagcttacatggaattagtcaacaatatgctgttgactgcagagctgtatcttcagtggtgtgatgaagctacagtaggggagatcactcatgctaggtatggatctccttacccttggcctctgaatcatattttggcctatcaaaaacagtgggaagtcaaacgtaagatgaaagctattggatggggaaagaagactctggaccaggtcttagaggatgtagaccagtgctgtcaagctctctctcaaagactgggaacacaaccgtatttcttcaataagcagcctactgaacttgacgcactggtatttggccatctatacaccattcttaccacacaattgacaaatgatgaactttctgagaaggtgaaaaactatagcaacctccttgctttctgtaggagaattgaacagcactattttgaagatcgtggtaaaggcaggctgtcatagagttatgtgttagtctcaggagtcttaacttttgaaatatgttttacttgaatgttacattagatattggtgtcagaattttaaaaccaaattactgctttttgaaacctcaaattatataatgtatcttatgtatgtgctttatattgttatttgtgtatacattaaaataattctgaattatttaatctgatatgttgtattctgtatcttgaaatttttgtttccttgaaacatgcatgcatttaaaaataaagcttaaacaactgtatggatgttacatttactttcttttgatttttctgaaagtcattcactgaattttacacatgtggaataaacagtgtcttttctaaggcaa

SEQ ID NO: 166137 - DNA, 1521 bp, Artificial Sequence
  derived and/or modified sequence
gcggtaaccttgggggcctcactgcagccgccgctgctgttggagtgggctttgcgagtctgaacgttggcggggctaggctcgttaactgccgagagcctccgggtttgcggtggaggacgctgaggcccgtggggggcaggcacccgggcgccgggcctcccagccgacatgtctctagtggcggaagccttcgtctcccagattgcaggctggagtgcagtggcacaacctgggctcactgcaacctccgcttcccgggttcaagcgattctcctgccttagcctcccgagtagttgggattacaggcgcccgccaccacgcccgcgcggattcatggaaaatttttaaatctgcatgtactttaaagaaatacttttgagtcggtggactgaacatgactgatgtatatagctgcagaaccttggcctgaaaatgctacattatatcagcaattgaaaggggagcaaattttactttctgacaatgcagcttctcttgcagtgcaggcctttttgcaaatgtgtaacttgcctatcaaagtagtttgtagggcaaatgcagaatatatgtctccatctggtaaagtaccttttattcatgtgggaaatcaagtagtatcagaacttggtccaatagtccaatttgttaaagccaagggccattctcttagtgatgggctggaggaagtccaaaaagcagaaatgaaagcttacatggaattagtcaacaatatgctgttgactgcagagctgtatcttcagtggtgtgatgaagctacagtaggggagatcactcatgctaggtatggatctccttacccttggcctctgaatcatattttggcctatcaaaaacagtgggaagtcaaacgtaagatgaaagctattggatggggaaagaagactctggaccaggtcttagaggatgtagaccagtgctgtcaagctctctctcaaagactgggaacacaaccgtatttcttcaataagcagcctactgaacttgacgcactggtatttggccatctatacaccattcttaccacacaattgacaaatgatgaactttctgagaaggtgaaaaactatagcaacctccttgctttctgtaggagaattgaacagcactattttgaagatcgtggtaaaggcaggctgtcatagagttatgtgttagtctcaggagtcttaacttttgaaatatgttttacttgaatgttacattagatattggtgtcagaattttaaaaccaaattactgctttttgaaacctcaaattatataatgtatcttatgtatgtgctttatattgttatttgtgtatacattaaaataattctgaattatttaatctgatatgttgtattctgtatcttgaaatttttgtttccttgaaacatgcatgcatttaaaaataaagcttaaacaactgtatggatgttacatttactttcttttgatttttctgaaagtcattcactgaattttacacatgtggaataaacagtgtcttttct

SEQ ID NO: 166138 - DNA, 792 bp, Artificial Sequence
  derived and/or modified sequence
atgagcctggtggccgaggccttcgtgagccagatcgccgccgccgagccttggccggaaaacgctacactgtaccagcaactcaagggagagcaaatcttgctgagtgacaacgcagcaagccttgccgttcaggcctttcttcaaatgtgcaacctgccaattaaagtggtttgccgagccaacgccgagtacatgtcccccagcggcaaggttccttttatccacgtgggcaatcaagtcgtgtctgagctgggaccgatcgtacaatttgtgaaagccaaaggtcatagtctgtcggatgggctcgaagaggtccagaaagccgagatgaaagcctatatggagctggttaacaatatgctgctgactgcagaactatatctccagtggtgtgacgaggccactgtcggcgagattactcacgctcggtacggcagcccctacccttggcctctcaaccatatcttggcctaccagaagcagtgggaagtcaaaaggaaaatgaaggcgatcgggtggggtaagaaaacactcgaccaagtcctagaagacgtcgatcagtgttgtcaggcgctgagccagcgcctgggcacccagccttacttctttaataagcagcccaccgagctagatgcgttggtgttcggacacctgtataccatactgaccacacagttaaccaacgatgaactgtccgagaaggtaaagaactactctaacctgctggctttctgtaggaggattgagcaacattacttcgaggatcgcggcaaaggtcggctttcttag

SEQ ID NO: 166139 - DNA, 762 bp, Artificial Sequence
  derived and/or modified sequence
atgtacatcgccgccgagccctggcccgagaacgccaccctgtaccagcagttgaagggagagcagattctcttgtcagataatgcagcttcactggccgttcaagcctttctccaaatgtgcaatctgccaatcaaggttgtttgccgggcaaacgcagagtacatgtcccctagcgggaaggtaccttttatccatgtcggcaaccaggttgtgagcgaactgggccctatcgtgcagttcgtgaaagccaaaggccactccctcagcgacggactggaggaggtgcaaaaggcagagatgaaggcctatatggagttagtaaacaatatgctactcacagctgagctgtatctgcagtggtgcgatgaggctacagtcggcgaaattactcatgcgagatacgggtccccatatccttggccattgaaccatatcctggcataccagaaacagtgggaggtgaagcggaagatgaaagctatcgggtggggcaagaagactttagaccaggtactggaggacgtggaccagtgctgccaggcactgtcacagcgactcggaactcagccttattttttcaataaacagccgacagagctcgacgccctggtgttcggacacctgtacacgatcctgactactcagctgacaaacgacgagttaagcgaaaaagttaaaaactacagcaacctgttagccttctgtagacgcatcgaacagcactatttcgaagacagaggtaaggggcgactgtcttag

SEQ ID NO: 166140 - DNA, 792 bp, Artificial Sequence
  derived and/or modified sequence
atgagccttgttgccgaagccttcgttagccagattgctgcggctgagccatggccagaaaacgccacactgtatcaacagttgaagggggaacagatcctgcttagcgacaatgcagcttcgcttgcggtccaagctttcctgcaaatgtgcaatctgccaataaaggttgtgtgccgtgcgaacgcagagtacatgtctccttctggcaaagtccccttcatccacgttggcaaccaggtggtatccgagctgggtcctattgtgcagttcgtgaaggctaagggtcattcactcagcgatgggttagaggaggttcagaaagcagagatgaaagcatacatggaactggttaataatatgctgctgacagcggaactctatttgcaatggtgtgacgaagccacagtgggagagatcacgcacgcgagatatggaagtccttatccctggcccctgaaccatattctggcctaccagaagcagtgggaggtcaaaagaaagatgaaggccatcgggtggggtaagaaaacgttagaccaagtgctggaagacgttgatcagtgttgccaggctctctcccagagactgggaactcaaccatacttcttcaataaacagcccactgagctggatgcactggtctttggacatttatatactatattaactacacaactgaccaatgacgaactcagcgaaaaggtgaaaaactattccaatctgctcgccttctgtaggagaatcgagcaacattatttcgaagaccgcggaaaaggtcggctgtcctag

SEQ ID NO: 166141 - DNA, 762 bp, Artificial Sequence
  derived and/or modified sequence
atgtatatcgcagccgagccatggccagagaatgccactttgtatcagcagttgaagggggagcagatacttctgagcgataatgccgcttcactggcggtgcaggcattcctgcaaatgtgcaatttacccatcaaagtggtttgccgcgcaaacgctgaatatatgtccccctccggaaaagtgcccttcatccacgttggaaatcaggtcgtgtcagagttgggaccaatagtacagtttgtaaaggccaaaggccacagccttagcgacgggctggaggaagttcagaaggccgaaatgaaggcctatatggaactggtgaacaatatgctgctcactgcagaattgtatctgcagtggtgcgatgaagccacagtcggcgagatcacccatgccaggtatggctccccatacccatggccactcaatcacatcctcgcctatcagaaacagtgggaggtcaagcggaagatgaaggccattggctgggggaagaaaaccttggaccaggtactggaagatgtcgaccagtgctgtcaggccctgtctcaaagactcgggacccagccctattttttcaacaagcagcccaccgagctcgacgctctggtgttcgggcatctctatactatcctgaccacccaactgaccaatgacgaactgagcgagaaggttaagaactatagcaacttgctagctttttgtcgaaggatcgagcaacactatttcgaggataggggtaaggggcgactctcctag

SEQ ID NO: 166142 - protein, 198 aa, Artificial Sequence
  derived and/or modified sequence
MKLYSLSVLYKGEAKVVLLKAAYDVSSFSFFQRSSVQEFMTFTSQLIVERSSKGTRASVKEQDYLCHVYVRNDSLAGVVIADNEYPSRVAFTLLEKVLDEFSKQVDRIDWPVGSPATIHYPALDGHLSRYQNPREADPMTKVQAELDETKIILHNTMESLLERGEKLDDLVSKSEVLGTQSKAFYKTARKQNSCCAIM

SEQ ID NO: 166143 - protein, 164 aa, Artificial Sequence
  derived and/or modified sequence
MKLYSLSVLYKGEAKVVLLKAAYDVSSFSFFQRSSVQEFMTFTSQLIVERSSKGTRASVKEQDYLCHVYVRNDSLAGVVIADNEYPSRVAFTLLEKVLDEFSKQVDRIDWPVGSPATIHYPALDGHLSRYQNPREADPMTKVQAELDETKIILARKQNSCCAIM

SEQ ID NO: 166144 - DNA, 495 bp, Artificial Sequence
  derived and/or modified sequence
atgaagctgtacagcctgagcgtgctgtacaagggcgaggccaaggtggtgctgctgaaggccgcctacgacgtgagcagcttcagcttcttccagagaagcagcgtgcaggagttcatgaccttcaccagccagctgatcgtggagagaagcagcaagggcaccagagccagcgtgaaggagcaggactacctgtgccacgtgtacgtgagaaacgacagcctggccggcgtggtgatcgccgacaacgagtaccccagcagagtggccttcaccctgctggagaaggtgctggacgagttcagcaagcaggtggacagaatcgactggcccgtgggcagccccgccaccatccactaccccgccctggacggccacctgagcagataccagaaccccagagaggccgaccccatgaccaaggtgcaggccgagctggacgagaccaagatcatcctggccagaaagcagaacagctgctgcgccatcatgtag

SEQ ID NO: 166145 - DNA, 495 bp, Artificial Sequence
  derived and/or modified sequence
atgaaactctacagcctcagtgttctctacaaaggtgaggcaaaggtcgtcctcctcaaggcagcctatgatgtgagttcttttagcttttttcagcggtcttccgtacaggagtttatgacattcactagccagttgatcgtggaacgctctagtaagggcacacgggctagcgtaaaagaacaggattatctttgtcacgtgtacgtgcgaaacgacagccttgccggggtcgtgatcgctgataatgagtaccctagtcgtgtagcattcacacttcttgagaaggtgctagatgagttcagcaaacaagtggatcgcatcgattggcccgtgggatcacctgccaccatccattaccctgcacttgacgggcatctgtccaggtaccagaacccgcgcgaggccgacccaatgacgaaagtgcaggccgagctggacgagaccaagattatacttgctaggaagcaaaatagttgttgcgctataatgtag

SEQ ID NO: 166146 - DNA, 495 bp, Artificial Sequence
  derived and/or modified sequence
atgaagctgtacagcctgtctgtgctgtacaagggggaggccaaggtggtgctgctgaaggccgcctatgatgtgtcctccttctccttcttccagaggagctctgtgcaggagttcatgaccttcaccagccagctgattgtggagaggagcagcaagggcacccgggcctctgtgaaggagcaggactacctgtgccacgtgtatgtgagaaatgacagcctggccggcgtggtgattgctgacaatgagtaccccagccgggtggccttcaccctgctggagaaggtgctggatgagttcagcaagcaggtggacagaattgactggcctgtgggcagccctgccaccatccactacccagccctggatggccacctgagccgctaccagaacccccgggaggccgaccccatgaccaaggtgcaggccgagctggatgagaccaagatcatcctggccaggaagcagaacagctgctgtgccatcatgtag

SEQ ID NO: 166147 - DNA, 495 bp, Artificial Sequence
  derived and/or modified sequence
atgaagctgtacagcctgagcgtgctgtacaagggcgaggccaaggtggtcctgttaaaagctgcctatgatgtgagctcattttccttttttcagaggagcagtgttcaagaattcatgacgttcaccagccagctgattgtggaaaggtcttccaaagggaccagggcaagtgtgaaagagcaagactatctgtgtcatgtatatgttagaaacgactcactggcaggggtcgtgatcgccgacaatgagtatcccagtagagtggccttcacgctcttagaaaaagtcctagacgagtttagtaaacaggttgacagaatcgattggcctgtgggcagccccgcgacaatccactatcccgctttagacgggcacctgagccgataccagaaccctcgtgaggcagatcctatgactaaggtacaagccgagctggatgagactaagatcattttagcccgtaagcagaatagttgctgtgcgattatgtag

SEQ ID NO: 166148 - DNA, 495 bp, Artificial Sequence
  derived and/or modified sequence
atgaaattgtattctctgagcgtgctctacaaaggagaggccaaagtggtgctgttgaaggctgcttatgacgtatcatccttcagcttttttcagcgctccagtgtgcaggaattcatgacctttacttctcagttgatcgtggagcgctccagcaaaggcactcgcgctagcgtaaaggaacaggactacctttgccacgtctacgtgcgtaatgattctctcgccggagttgtgattgccgacaatgagtatccatcccgtgtagcgttcacccttctggaaaaggttctcgacgaattttccaagcaggtggatagaattgactggcccgtgggctccccagcaaccattcactatcctgcccttgacggtcacttgtctcgttatcagaatccgagagaggccgacccaatgactaaggtacaggcggagctcgacgagaccaaaatcatcctggccaggaaacagaacagttgttgtgccataatgtag

SEQ ID NO: 166149 - DNA, 2696 bp, Artificial Sequence
  derived and/or modified sequence
gcggcggtcccgaggggcggcggccgcgctgctccctgagaacgggtcccgcagctgggcaggcgggcggcctgagggcgcggagccatgaagctgtacagcctcagcgtcctctacaaaggcgaggccaaggtggtgctgctcaaagccgcatacgatgtgtcttccttcagctttttccagagatccagcgttcaggaattcatgaccttcacgagtcaactgattgtggagcgctcatcgaaaggcactagagcttctgtcaaagaacaagactatctgtgccacgtctacgtccggaatgatagtcttgcaggtgtggtcattgctgacaatgaatacccatcccgggtggcctttaccttgctggagaaggtactagatgaattctccaagcaagtcgacaggatagactggccagtaggatcccctgctacaatccattacccagccctggatggtcacctcagtagataccagaacccacgagaagctgatcccatgactaaagtgcaggccgaactagatgagaccaaaatcattctgcacaacaccatggagtctctgttagagcgaggtgagaagctagatgacttggtgtccaaatccgaggtgctgggaacacagtctaaagccttctataaaactgcccggaaacaaaactcatgctgtgccatcatgtgatgcagcctgccagaggcccaatgctggaatggcaccatcattcacatcagaactgcagcccctggaaaagaagagacagccatagacgaggagccagagtgggggcagactggccatttttattttgaagttcctgcgagaaatggatggtggaagggtggcgaatgttcaaattcatatgtgtggtagtgattcttggaaagaatttgaggtccccaaaggtgtatttttgggcaaatgaaaccataaactccgactggcttctgtagatgccaaagggctctttttcagctaaccctgggaaggctctgtgggagggaggtcggagccagctgtttctcgatctttggtatatctttggatcttatttgtacattaatgatattaacactccagtggggggtggggagtccctgatgctagggctggggtgggtggagtttgaagactcttgggaaagcctctcctggggccactgttgggggtgggagtgagcccaccacagaggccacaggcaggcccccacttcaggcccaaggcctggggcggggggaacagtcactgggtctcagattctgagactgttgtttagcttacctttctgctaggattggcttcccgcagagggcagggcccatcctaagcagcttccaagtcccacaaaggtggcttgtgggaggatttggaaggagctgcattgtgggcggggagtgtgtgggttgggttcgtaccagcaagtagactaggaactgagcccaggaaagggggatgttttcctggtgtttggatggtcagctgggagtgtccatcatcaggggaagatcaaacacaggtgcactcagctgcccagggcctctgggacacttgccttgacttgcaacttgccttgaacatcacgatcaaagcagcaggtgctgtggtctctcaaaattgatttttatttgactctgtggctctaagactgccttgaaccgcctgaggcctatgcatctgaacaagtgggtctctcccttgagcaccaggagtgggtgccagccggccccgaggattcccagcaccccacctatggtcttgccagcataggcttgctagttccttcttggtcagaggtagctgcagaggggggaggccaagggtttggtctaagctgtgccctgccacctggcaggaggcccactcactgcccaagtcatggcaacaggctggagcagcccaggagatgggcctaaaatgttctggatcccttgggtcctagtgttatgttccagtctgcccacctgtgctcaggatgcagccctgggatccagcacccatggaagcttctgctgggatggtgtcacctatgggttttgaaccagtgtggtatggtccttgggagctctgctctgagcttgccacactgctgagagcacccactgtcctgaccagagtctcagtggtcctgacccccaatgtgggcaggggctgggcaggagggtggggtctgctgtgggttcagaggactccacctcctggctggtttacctgctgctgcccattttctctgggtactgctggccagaggactttagcctacccctgaagagcctgtccatgtcattttcctactgccatagataccctaagcccagggccccttgaggcccagactcagcctgcccactggtgccggagacggagtggagtgggcctggatccgagggatgctacctctccctttcccacttgaggaccctggggagagatgggggcggggaaaatggaggtatgaatttggggtaagaggaagtgagatctccgcttgcaggtcagcccctgccttgcagggcgggctggcttgactcaggccctgtgagatagagggcccagcccagccccacccacagatcccctgctcctgttgtgttctgttgtaaatcatttggcgagactgtattttagtaactgctgcctaacttccctgtgttctatttgagaggcgcctgtctggataaagttgtcttgaaatttca

SEQ ID NO: 166150 - DNA, 1270 bp, Artificial Sequence
  derived and/or modified sequence
atccggaagtggattgcgagccaggaggaggaagccggcggtggccccgtcagcagccggctgctgagaggccggtaggcggcggcggtcccgaggggcggcggccgcgctgctccctgagaacgggtcccgcagctgggcaggcgggcggcctgagggcgcggagccatgaagctgtacagcctcagcgtcctctacaaaggcgaggccaaggtggtgctgctcaaagccgcatacgatgtgtcttccttcagctttttccagagatccagcgttcaggaattcatgaccttcacgagtcaactgattgtggagcgctcatcgaaaggcactagagcttctgtcaaagaacaagactatctgtgccacgtctacgtccggaatgatagtcttgcaggtgtggtcattgctgacaatgaatacccatcccgggtggcctttaccttgctggagaaggtactagatgaattctccaagcaagtcgacaggatagactggccagtaggatcccctgctacaatccattacccagccctggatggtcacctcagtagataccagaacccacgagaagctgatcccatgactaaagtgcaggccgaactagatgagaccaaaatcattctggcccggaaacaaaactcatgctgtgccatcatgtgatgcagcctgccagaggcccaatgctggaatggcaccatcattcacatcagaactgcagcccctggaaaagaagagacagccatagacgaggagccagagtgggggcagactggccatttttattttgaagttcctgcgagaaatggatggtggaagggtggcgaatgttcaaattcatatgtgtggtagtgattcttggaaagaatttgaggtccccaaaggtgtatttttgggcaaatgaaaccataaactccgactggcttctgtagatgccaaagggctctttttcagctaaccctgggaaggctctgtgggagggaggtcggagccagctgtttctcgatctttggtatatctttggatcttatttgtacattaatgatattaacactccagtggggggtggggagtccctgatgctagggctggggtgggtggagtttgaagactcttgggaaagcctctcctggggccactgttgggggtgggagtgagcccaccacagaggccacaggcaggcccccacttcaggcccaaggcctggggcggggggaacagtcactgggtctcagattctgagactgttgtttagcttacctttctgcta

SEQ ID NO: 166151 - DNA, 597 bp, Artificial Sequence
  derived and/or modified sequence
atgaagctgtatagcttatccgttctgtacaagggggaggcaaaagttgtactcctgaaagcagcttacgatgtcagctccttctctttttttcaacgctcgagcgtgcaggagtttatgacgtttacctctcaactgatcgtggaacggtcctccaagggtacaagagcttccgttaaagaacaggactacctatgccacgtgtacgttcgcaacgacagtctcgcaggcgttgtgatcgccgacaatgaatacccttctagggtggcctttaccctgctggaaaaggtccttgacgaattcagcaagcaggtggacagaatcgactggcctgtcggcagccctgctactattcattatcccgctttggacggacacctgtcaaggtaccagaacccacgcgaagccgatcctatgactaaggtgcaagcggagttggatgagaccaagataatactacacaacaccatggaatctctgctggagcggggtgaaaaactggacgatctagtgtcaaaatctgaagtgctggggacccagagcaaggccttttataagaccgctcgcaagcagaattcatgttgtgctattatgtag

SEQ ID NO: 166152 - DNA, 597 bp, Artificial Sequence
  derived and/or modified sequence
atgaagctgtacagcctgtctgtgctgtacaagggggaggccaaggtggtgctgctgaaggccgcctatgatgtgtcctccttctccttcttccagaggagctctgtgcaggagttcatgaccttcaccagccagctgattgtggagaggagcagcaagggcacccgggcctctgtgaaggagcaggactacctgtgccacgtgtatgtgagaaatgacagcctggccggcgtggtgattgctgacaatgagtaccccagccgggtggccttcaccctgctggagaaggtgctggatgagttcagcaagcaggtggacagaattgactggcctgtgggcagccctgccaccatccactacccagccctggatggccacctgagccgctaccagaacccccgggaggccgaccccatgaccaaggtgcaggccgagctggatgagaccaagatcatcctgcacaacaccatggagagcctgctggagcggggggagaagctggatgacctggtgtccaagtctgaggtgctgggcacccagagcaaggccttctacaagacagccaggaagcagaacagctgctgtgccatcatgtag

SEQ ID NO: 166153 - DNA, 597 bp, Artificial Sequence
  derived and/or modified sequence
atgaagctgtacagcctgagcgtgctgtacaagggcgaggccaaggtcgtccttcttaaggcggcttacgatgtttctagttttagtttcttccagcgtagcagcgtgcaggagtttatgaccttcactagccagctcatagtagagaggagttcaaagggaacaagagcaagtgtgaaagagcaggattacctgtgtcacgtgtatgtgaggaacgacagtctggctggcgtggtcatcgccgataacgagtaccccagtagagtagcctttaccctgttggagaaggtactggatgagttctctaagcaagtcgatcgaatcgattggcccgtgggatcgccagcaacgatacattacccggcccttgatggacacctgtcaaggtaccagaaccctcgcgaggcagacccaatgaccaaagtccaggccgagctggacgagacaaaaatcattctgcacaacacaatggagtctctccttgagaggggtgaaaagctggacgacttagtgtccaaatccgaggtgctgggaacacagtcgaaagccttttacaagactgcaagaaaacagaatagttgttgtgcaatcatgtag

SEQ ID NO: 166154 - DNA, 597 bp, Artificial Sequence
  derived and/or modified sequence
atgaaactgtattccctgtcagttctttataaaggcgaggctaaagttgtccttctgaaggcagcatacgatgttagtagtttctcctttttccagcgctcaagcgttcaggagttcatgacctttacctcacagttaatcgttgaacgttcctcgaaggggactcgcgcatcggtgaaggagcaggattacctatgtcatgtgtacgtccgcaacgattccctggctggcgttgtgatcgctgacaatgagtacccatcgagggtcgcgttcacacttctggagaaagtgctggatgagttcagtaaacaggtggaccggatagattggccggtcgggtctcctgctacaatccattacccagctctggatgggcatctgagccggtaccagaacccaagagaggccgaccctatgaccaaagtgcaagccgagcttgacgagactaagattatactccacaataccatggagtcactgctggaacgtggcgaaaaactggatgacttggtctccaaatctgaggtgctcggtacacagtcgaaagctttctataaaaccgcgagaaagcaaaattcatgttgcgcgatcatgtag

SEQ ID NO: 166155 - DNA, 597 bp, Artificial Sequence
  derived and/or modified sequence
atgaagctgtacagcctgagcgtgctgtacaagggcgaggccaaggtggtgctgctgaaggccgcctacgacgtgagcagcttcagcttcttccagagaagcagcgtgcaggagttcatgaccttcaccagccagctgatcgtggagagaagcagcaagggcaccagagccagcgtgaaggagcaggactacctgtgccacgtgtacgtgagaaacgacagcctggccggcgtggtgatcgccgacaacgagtaccccagcagagtggccttcaccctgctggagaaggtgctggacgagttcagcaagcaggtggacagaatcgactggcccgtgggcagccccgccaccatccactaccccgccctggacggccacctgagcagataccagaaccccagagaggccgaccccatgaccaaggtgcaggccgagctggacgagaccaagatcatcctgcacaacaccatggagagcctgctggagagaggcgagaagctggacgacctggtgagcaagagcgaggtgctgggcacccagagcaaggccttctacaagaccgccagaaagcagaacagctgctgcgccatcatgtag

SEQ ID NO: 166156 - protein, 192 aa, Artificial Sequence
  derived and/or modified sequence
MAPLGGAPRLVLLFSGKRKSGKDFVTEALQSRLGADVCAVLRLSGPLKEQYAQEHGLNFQRLLDTSTYKEAFRKDMIRWGEEKRQADPGFFCRKIVEGISQPIWLVSDTRRVSDIQWFREAYGAVTQTVRVVALEQSRQQRGWVFTPGVDDAESECGLDNFGDFDWVIENHGVEQRLEEQLENLIEFIRSRL

SEQ ID NO: 166157 - DNA, 579 bp, Artificial Sequence
  derived and/or modified sequence
atggctcctttggggggagccccacgcctcgtcctgctcttttctggaaagcggaaatcaggaaaagactttgtaactgaggctctgcagtcgcgactcggtgccgacgtttgcgccgtgctgcgtttgtcaggccccctcaaggagcagtacgctcaggagcatggcctcaatttccagcgcctcctagacacttcaacatacaaggaagcttttcgcaaagatatgatacgctggggagaggaaaagcggcaggctgacccaggatttttctgtaggaaaatcgtagagggcatttcccagccaatctggctggtgagcgacacaaggagggtcagcgacattcagtggttcagggaggcttacggagccgtcacccagaccgtcagggtggtagcgctggaacagagccggcaacagaggggttgggtgttcacccctggggtggacgatgccgaatctgaatgcggactggataatttcggggatttcgattgggtgatagagaatcacggcgtagaacagaggcttgaagaacagctagaaaatttaattgaatttattagatctagattgtag

SEQ ID NO: 166158 - DNA, 579 bp, Artificial Sequence
  derived and/or modified sequence
atggcccccctgggcggggccccccggctggtgctgctcttcagcggcaagaggaagagcggcaaggactttgtgacagaggccctgcagagccggctgggcgcagatgtgtgtgctgtgctgcggctgagcggccccctgaaggagcagtatgcccaggagcacggcctgaacttccagaggctgctggacaccagcacctacaaggaggccttcaggaaggacatgatccgctggggcgaggagaagaggcaggccgaccccggcttcttctgcaggaagatcgtggagggcatcagccagcccatctggctggtgtctgacacccggcgggtgtctgacatccagtggttccgggaggcctacggggctgtgacccagacagtgcgggtggtggccctggagcagagccggcagcagaggggctgggtgttcaccccaggagtggatgatgctgagagtgaatgtggcctggacaactttggagactttgactgggtgattgaaaatcatggagtggagcagaggctggaggagcagctggagaacctgattgagttcatccgcagccggctgtag

SEQ ID NO: 166159 - DNA, 579 bp, Artificial Sequence
  derived and/or modified sequence
atggcccccctgggcggcgccccccggctggtgctgctgttcagcggaaaacgcaagagcggcaaggattttgtcacagaggcattgcagagtcggctcggtgcggatgtctgcgctgtgctgcggctgtctgggccacttaaggaacagtatgctcaagagcacggcctcaatttccagaggctgctcgacacttccacgtacaaggaggcttttcgaaaggacatgataagatggggagaagaaaagcgacaggcagaccccggcttcttttgccggaagatcgtcgaggggattagccagcccatttggctagtgtccgatactcgcagagtgagcgacatccagtggtttagggaagcatatggggcagtgacccagaccgtgcgcgtggttgctctcgagcagtctagacaacagcgaggctgggtttttacccctggggtggacgacgctgagagcgagtgtggccttgataacttcggggatttcgactgggtcatcgagaatcacggtgtggagcagcggctcgaagaacagctggaaaacctgattgagtttatcaggagccgcctttag

SEQ ID NO: 166160 - DNA, 1280 bp, Artificial Sequence
  derived and/or modified sequence
gaaggttctgggcggggctggactgttctaagtgagttcgggtgggggagcttcacgaggggaggctgctctgtgaaggaaccgcctttctctccgcgtgtctcacccttttctccccatatctgtttggacatgagctgagggcacggtcgcgggcggtcagccctgttcgcagctacggcgaggaggggcgcgattgttccttgttgccgctccgcttagtggccgcgtccattccgcgcggtgtcccgattttaggggtagggagaagtgtcagcttcaggcatcgcgaggcgtggcggccccatggccccgctgggaggcgccccgcggctggtactgctgttcagcggcaagaggaaatccgggaaggacttcgtgaccgaggcgctgcagagcagacttggagctgatgtctgtgctgtcctccggctctctggtccactcaaggaacagtatgctcaggagcatggcttgaacttccagagactcctggacaccagcacctacaaggaggcctttcggaaggacatgatccgctggggagaggagaaacgccaggctgacccaggcttcttttgcaggaagattgtggagggcatctcccagcccatctggctggtgagtgacacacggagagtgtctgacatccagtggtttcgggaggcctatggggccgtgacgcagacggtccgcgttgtagcgttggagcagagccgacagcagcggggctgggtgttcacgccaggggtggacgatgctgagtcagaatgtggcctggacaacttcggggactttgactgggtcatcgagaaccatggagttgaacagcgcctggaggagcagttggagaacctgatagaatttatccgctccagactttagtcactaggttctaggagtgagctggggcctgctgaggtgggggtggggctgactctgcaaaatgggggtgtcccccgatcctggccgaggtgaggaacagacagggggggtctagattctgagggggttggtggatattgggcaaggcaggaaacctctggagacctcattttctccatggggaagacagccatgctcttcaggaggagactccaagggcaaaggagggtgtcttggctgtgcttgaaggcgaaaccctgccatatccccagtgccagtcccctcagcctgtggtggccttgcatcctgactggatgttctcagccccttgttctgggcaagaacccagagctccccagtgtggatactaataaacctcttggagcacactctca

SEQ ID NO: 166161 - DNA, 579 bp, Artificial Sequence
  derived and/or modified sequence
atggccccacttggcggtgcaccaaggctggtgctgctgtttagtggtaagaggaaatccggtaaggactttgtgaccgaggcactccaatcccgtctgggagcagacgtctgcgctgtattacggttatcaggccctctgaaagagcagtacgcccaggaacacgggctgaactttcagcggctgctggatacatctacttataaagaggcgtttagaaaagacatgatcaggtggggagaggagaagcgccaggccgaccccggatttttctgtcgtaagatagtggagggcattagccagcccatttggctggtttctgacaccaggagagtatcagatatccagtggtttagagaagcctacggtgccgttactcaaacggtgcgtgtcgtagcgctggagcagtctagacaacaacggggatgggtgttcaccccaggtgtggacgacgcggagtcggaatgtggcctggataacttcggggacttcgattgggtgattgagaaccatggggtggagcagagattggaggagcagctggaaaatctcatcgagtttatccggtcacggctttag

SEQ ID NO: 166162 - DNA, 579 bp, Artificial Sequence
  derived and/or modified sequence
atggcccccctgggcggcgcccccagactggtgctgctgttcagcggcaagagaaagagcggcaaggacttcgtgaccgaggccctgcagagcagactgggcgccgacgtgtgcgccgtgctgagactgagcggccccctgaaggagcagtacgcccaggagcacggcctgaacttccagagactgctggacaccagcacctacaaggaggccttcagaaaggacatgatcagatggggcgaggagaagagacaggccgaccccggcttcttctgcagaaagatcgtggagggcatcagccagcccatctggctggtgagcgacaccagaagagtgagcgacatccagtggttcagagaggcctacggcgccgtgacccagaccgtgagagtggtggccctggagcagagcagacagcagagaggctgggtgttcacccccggcgtggacgacgccgagagcgagtgcggcctggacaacttcggcgacttcgactgggtgatcgagaaccacggcgtggagcagagactggaggagcagctggagaacctgatcgagttcatcagaagcagactgtag

SEQ ID NO: 166163 - protein, 346 aa, Artificial Sequence
  derived and/or modified sequence
MEEKYLPELMAEKDSLDPSFTHALRLVNQEIEKFQKGEGKDEEKYIDVVINKNMKLGQKVLIPVKQFPKFNFVGKLLGPRGNSLKRLQEETLTKMSILGKGSMRDKAKEEELRKSGEAKYFHLNDDLHVLIEVFAPPAEAYARMGHALEEIKKFLIPDYNDEIRQAQLQELTYLNGGSENADVPVVRGKPTLRTRGVPAPAITRGRGGVTARPVGVVVPRGTPTPRGVLSTRGPVSRGRGLLTPRARGVPPTGYRPPPPPPTQETYGEYDYDDGYGTAYDEQSYDSYDNSYSTPAQSGADYYDYGHGLSEETYDSYGQEEWTNSRHKAPSARTAKGVYRDQPYGRY

SEQ ID NO: 166164 - DNA, 1977 bp, Artificial Sequence
  derived and/or modified sequence
gagtgcgcggggcggcgcgcggcgtgcaggtcgcagctgtggctcgggtgctggcaggtgctggcgggactggcggggatcgccgtggactgcctcaggggcgccgcagcccgctcggcccgagggcccgcctaaccgcgccgcccgcgcccgctcctcctcggcccgcgcccggagcgcgggggccgccggcgctgggtactcggcggccaccggggatcggggctgagcggtcggttcccgcccccgtgccgccgccgccgccttccggccgaccgcccggcttggccgctgctgccgcgtctggcccccgggtccccgccgctgggggcgcgggcggggtcgggggttgccgggcgccgccccccgtgcgcctggagtccacatcccgggcccggcggccggcgagcatggaggagaagtacctgcccgagctgatggcggagaaggactccctggacccctccttcacgcacgccctgcgcctggtgaaccaagaaatagaaaagtttcaaaaaggagaaggcaaggatgaagaaaagtacatcgatgtggtgattaataagaacatgaagctgggacagaaagtgttaattcccgtaaaacagttccctaagttcaactttgtggggaaacttttgggtccacgtggcaattctctgaagcgtttacaagaagaaaccttgacaaaaatgtccatccttgggaaaggttccatgagagacaaggccaaggaagaagagttgaggaaaagtggagaagcgaagtacttccatctcaatgatgatctccatgttctcattgaagtgtttgccccacctgcagaagcttatgccaggatgggacatgctttggaagaaatcaaaaagttcctcatccctgattataatgatgagatcaggcaagcacagctccaggagttaacatatttgaatggtggttcagaaaatgcagatgttccagtggttcgagggaaacccaccttgcgtacaagaggtgtaccagccccagcaataaccaggggaaggggaggagttacagcccggccagttggagttgtagtaccacgagggacgccaactcccagaggagtcctgtccacccgagggccagtgagtcggggaagaggacttctcactcccagagcaagaggagtccccccaactgggtacagacctccaccgccacccccgacacaagagacttatggagaatatgactatgatgatggatatggcactgcttatgatgaacagagttatgattcctatgataacagctatagcaccccagcccaaagtggtgctgattactatgattacggacatggactcagtgaggagacttatgattcctacgggcaagaagagtggactaactcaagacacaaggcaccttcagcgaggacagcaaagggcgtctacagagaccagccatatggcagatactgattgtactgtctgatgttgtgaaatagccaatctccaccagtcctgtatactgttcaaagtaatttttttctatgaacaatccctttttaaataaatcagaatgcttaaaatctgaatggatggaacttaaaactactttgttgaaacatcaacctgggcagaaaaaaaaaaaaaaagacatgtaaaattttgttatttccagtctgtatatgaaaaaataggtcatcaaaaggaaaaaaaataactttgattaactagtgttaaacaaaaaataggtttactaaatatgttaatctattcttttaacataagcctcacctttcattttaaaggtttccatagaatttagttattttatctttcagccatatgctagtttttttttctcttgccaacatgcgtaaaaagggaagccaattacaagtgcaaataatgtggtattcttttgtaactcaagtcttgaaatgttctgtagtgttaagcaaagtctcctcttgcttgatactaaataaacttttgaaagaaa

SEQ ID NO: 166165 - DNA, 1041 bp, Artificial Sequence
  derived and/or modified sequence
atggaggagaaatacctgcccgagttgatggccgaaaaggattctcttgatccttcgttcacacatgctttgcgccttgtgaaccaagaaattgaaaagtttcagaaaggggaaggcaaagacgaggaaaagtacatcgatgtcgtcataaacaaaaatatgaaactgggccagaaggttctcattcccgtaaaacagttccccaagtttaattttgtgggtaagctgctgggcccccgcgggaattctctcaaaaggctgcaggaggagactctcaccaagatgtcaatcctgggaaagggcagtatgcgagacaaagctaaagaggaggagttacggaagtctggagaagcaaaatattttcatctgaatgacgaccttcacgtactcattgaggtgttcgctcccccagctgaagcatacgcacgcatgggccatgctctggaggaaatcaaaaagttcctcattccagattacaacgatgagatccgacaggctcagttacaggagttgacatacctcaacggaggctcggagaacgccgacgtcccagtggttcgcggcaaacctaccctgagaacccgcggcgtgcccgcacctgccattacacgtgggcgcggcggggtcactgcacgcccagtgggcgttgtggtcccacgaggcacccctacccctaggggcgtgctatccactcgtgggcctgtttcgcgcggtcggggactactaactccaagggccagaggagtacccccgacaggctatcgccctccccccccaccgcccactcaagaaacttacggtgaatacgattatgatgacggctatggaaccgcctacgacgagcagtcttacgatagctatgataactcgtactctaccccggctcagtccggggcggattattacgactatgggcacggcctgagcgaggagacctacgattcctacgggcaggaagaatggaccaattccaggcacaaggcaccctctgccagaacagcaaagggcgtctatcgcgaccagccgtacggcaggtactag

SEQ ID NO: 166166 - DNA, 1041 bp, Artificial Sequence
  derived and/or modified sequence
atggaggagaagtacctgcctgagctgatggccgagaaggacagcctggaccccagcttcacccacgccctgcggctggtgaaccaggagattgagaagttccagaagggggagggcaaggatgaggagaagtacattgatgtggtgatcaacaagaacatgaagctgggccagaaggtgctgatccctgtgaagcagttccccaagttcaactttgtgggcaagctgctgggcccccggggcaacagcctgaagaggctgcaggaggagaccctgaccaagatgagcatcctgggcaagggctccatgagggacaaggccaaggaggaggagctgaggaagtctggagaggccaagtacttccacctgaatgatgacctgcacgtgctgattgaggtgtttgcccccccagctgaggcctatgccaggatgggccacgccctggaggagatcaagaagttcctgatcccagactacaatgatgagatccggcaggcccagctgcaggagctgacctacctgaatggaggctctgaaaatgctgatgtgcctgtggtgcggggcaagcccaccctgcggacccggggcgtgcctgccccagccatcacccggggccggggcggcgtgacagcccggcctgtgggcgtggtggtgccccggggcacccccaccccccggggcgtgctgagcacccggggccctgtgtcccggggccggggcctgctgaccccccgggcccggggcgtgccccccaccggctaccggcccccacctcctccacccacccaggagacctacggggagtatgactatgatgatggctatggaacagcctatgatgagcagagctatgacagctatgacaacagctacagcaccccagcccagagcggggctgactactatgactatggccacggcctgtctgaggagacctatgacagctatggccaggaggagtggaccaacagccgccacaaggcccccagcgccaggacagccaagggcgtgtacagagaccagccctacggccgctactag

SEQ ID NO: 166167 - DNA, 1041 bp, Artificial Sequence
  derived and/or modified sequence
atggaggagaagtacctgcccgagctgatggccgagaaggacagcctcgacccaagctttacccacgcactgcgactcgtaaaccaagagatcgaaaagttccagaagggggaaggaaaagatgaagaaaagtatattgatgtggtcatcaataagaacatgaagctgggccagaaagtgcttatacctgtcaagcaattccccaaattcaatttcgtggggaagctgctggggcctaggggtaactccttgaagcggcttcaagaggagacacttaccaagatgagtattctaggcaagggctccatgagggataaggccaaagaagaggagctaaggaagtcaggggaagctaaatacttccatttgaatgacgatctgcacgtgctcatcgaagtcttcgcccctccagcagaagcctatgcccggatgggtcacgccctggaggaaattaagaagttccttataccagactacaacgacgagattcgccaggcccagttacaagagctgacttatctaaacggaggctcagaaaacgcggatgtgccggttgtgcggggcaagcccacactgcgtactcgtggggtcccagcccccgccatcacccggggccggggtggggtgactgcccgacccgtaggcgttgtggtgccccggggtacgcctactcctagaggagtgttgagcactagagggcctgtctctagaggcagaggcttgcttacccctagggcccggggtgtccctcccaccggctatagacccccccctccacctccaacccaggaaacatatggggaatacgactacgacgatgggtacggcacagcctacgacgaacagagctacgactcgtatgacaatagttattcgactccagcccagagcggggcggactattacgattatggtcatggtctgtctgaagaaacttacgactcgtacggccaagaggagtggaccaactcccggcataaagccccctccgcccggaccgccaagggagtgtaccgcgaccagccctacggcaggtactag

SEQ ID NO: 166168 - DNA, 1041 bp, Artificial Sequence
  derived and/or modified sequence
atggaggaaaagtacctacctgagctgatggcggagaaggactccctagacccatcatttacccacgcattgaggcttgtgaatcaggagattgagaaattccaaaaaggagaggggaaggacgaagagaagtacattgacgtggtgattaacaaaaatatgaagctggggcaaaaagtcctgataccagtgaagcaatttcccaaatttaacttcgtgggcaagctccttgggccacggggaaatagtctaaagcggttgcaggaagagacacttacaaaaatgtcaatattgggtaaaggttccatgagggataaggccaaggaggaggagctgagaaaatcaggggaagccaagtatttccatctcaacgacgacttgcacgtgctgatcgaggtgtttgctccacctgcagaggcatacgctcgaatgggacatgctctggaggaaataaaaaaattcttgattcctgactacaacgatgagattcgccaagcacagctccaggagctgacctaccttaacggagggagtgagaacgctgacgtaccggtggtgagaggcaaaccaaccctccgcactcgaggggtgcccgcaccggcaatcacacgcggtagggggggtgtcactgctagaccagtcggcgtggttgtgccaagaggcacaccaacccccaggggcgtactgtcgacacgcggtcccgtgagccggggtcggggactcttgaccccacgggcacggggtgtgccccctaccggttatcgcccacctccgcctcctccaacccaggagacttacggggagtacgattacgacgacgggtacggtactgcttatgacgaacaatcgtacgactcatatgataattcttatagtacacccgcacagtccggcgcagactactacgattatgggcacggactgagtgaagagacttatgacagctatggccaggaggagtggacaaactcgcgtcacaaggctccctctgccaggactgcaaaaggtgtctatcgtgatcagccttacggacgctactag

SEQ ID NO: 166169 - DNA, 1041 bp, Artificial Sequence
  derived and/or modified sequence
atggaggagaagtacctgcccgagctgatggccgagaaggacagcctggaccccagcttcacccacgccctgagactggtgaaccaggagatcgagaagttccagaagggcgagggcaaggacgaggagaagtacatcgacgtggtgatcaacaagaacatgaagctgggccagaaggtgctgatccccgtgaagcagttccccaagttcaacttcgtgggcaagctgctgggccccagaggcaacagcctgaagagactgcaggaggagaccctgaccaagatgagcatcctgggcaagggcagcatgagagacaaggccaaggaggaggagctgagaaagagcggcgaggccaagtacttccacctgaacgacgacctgcacgtgctgatcgaggtgttcgccccccccgccgaggcctacgccagaatgggccacgccctggaggagatcaagaagttcctgatccccgactacaacgacgagatcagacaggcccagctgcaggagctgacctacctgaacggcggcagcgagaacgccgacgtgcccgtggtgagaggcaagcccaccctgagaaccagaggcgtgcccgcccccgccatcaccagaggcagaggcggcgtgaccgccagacccgtgggcgtggtggtgcccagaggcacccccacccccagaggcgtgctgagcaccagaggccccgtgagcagaggcagaggcctgctgacccccagagccagaggcgtgccccccaccggctacagaccccccccccccccccccacccaggagacctacggcgagtacgactacgacgacggctacggcaccgcctacgacgagcagagctacgacagctacgacaacagctacagcacccccgcccagagcggcgccgactactacgactacggccacggcctgagcgaggagacctacgacagctacggccaggaggagtggaccaacagcagacacaaggcccccagcgccagaaccgccaagggcgtgtacagagaccagccctacggcagatactag

SEQ ID NO: 166170 - protein, 482 aa, Artificial Sequence
  derived and/or modified sequence
MNGTLDHPDQPDLDAIKMFVGQVPRTWSEKDLRELFEQYGAVYEINVLRDRSQNPPQSKGCCFVTFYTRKAALEAQNALHNMKVLPGMHHPIQMKPADSEKNNAVEDRKLFIGMISKKCTENDIRVMFSSFGQIEECRILRGPDGLSRGCAFVTFTTRAMAQTAIKAMHQAQTMEGCSSPMVVKFADTQKDKEQKRMAQQLQQQMQQISAASVWGNLAGLNTLGPQYLALLQQTASSGNLNTLSSLHPMGGLNAMQLQNLAALAAAASAAQNTPSGTNALTTSSSPLSVLTSSGSSPSSSSSNSVNPIASLGALQTLAGATAGLNVGSLAGMAALNGGLGSSGLSNGTGSTMEALTQAYSGIQQYAAAALPTLYNQNLLTQQSIGAAGSQKEGPEGANLFIYHLPQEFGDQDLLQMFMPFGNVVSAKVFIDKQTNLSKCFGFVSYDNPVSAQAAIQSMNGFQIGMKRLKVQLKRSKNDSKPY

SEQ ID NO: 166171 - DNA, 240 bp, Artificial Sequence
  derived and/or modified sequence
atgaacggcaccctggaccaccccgaccagcccgacctggacgccatcaagatgttcgtgggccaggtgcccagaacctggagcgagaaggacctgagagagctgttcgagcagtacggcgccgtgtacgagatcaacgtgctgagagacagaagccagaaccccccccagagcaagggctgctgcttcgtgaccttctacaccagaaaggccgccctggaggcccagaacgccctgtag

SEQ ID NO: 166172 - DNA, 1449 bp, Artificial Sequence
  derived and/or modified sequence
atgaatggtacactcgaccatcccgaccagccggacctcgatgcgattaaaatgttcgtcggccaagtgccccggacatggtccgagaaggatcttcgcgagctgtttgaacagtatggcgcagtgtacgagatcaacgtgctcagagaccgctcacagaaccctcctcagagtaaagggtgttgcttcgtgactttctacaccagaaaggctgctcttgaggcccagaatgccctccacaacatgaaggtccttcccggtatgcaccatcccatacagatgaaaccagccgattccgagaaaaataacgccgtggaggacaggaaacttttcattgggatgatctcgaaaaaatgtaccgaaaatgacatccgggtgatgtttagcagctttgggcagattgaagagtgtcgcatcctgaggggtcctgacgggctgagtagaggctgcgcatttgtgacattcaccacgcgtgctatggcacagacagccattaaggctatgcaccaggcccaaactatggaaggatgttcatcgcccatggtggtgaaattcgccgacacgcagaaggataaggaacaaaaaagaatggcgcaacagctccagcaacagatgcagcagatttcggccgcgagtgtttggggaaatctggctggactgaatacgcttggcccacaatatctcgcattgcttcaacagactgccagctccggtaacttaaacacattatcctccttgcatcccatgggaggcttgaacgcgatgcagctccagaatctcgcagctttggccgccgctgctagcgcagctcaaaacactccctctggcaccaatgccctaacgacaagttcatcgcctcttagcgttctgacctcctcaggctcatccccttcctcatcttcatccaatagtgttaacccaatcgcatcactcggcgccttacaaacactggccggggcgaccgctgggttgaacgttggtagcctagccgggatggctgctttgaatgggggcctgggctcttctggcttgtccaatgggacaggtagtaccatggaggctctgacacaagcttattcaggaatccagcagtatgccgctgcggctctcccgactctgtacaaccaaaacctgctcactcagcagagcatcggcgccgccggctcccagaaagaaggcccagagggagcaaatctgttcatttaccaccttccccaggaattcggagatcaggacttattacagatgttcatgccctttggcaacgttgtgtcagccaaagtgttcatagacaaacagaccaacctatcaaagtgcttcggatttgtcagctatgataatcctgtctctgcccaggcggccattcagagcatgaacggctttcagatagggatgaaaaggctcaaggtgcaactaaagcggagcaaaaatgactccaagccctactag

SEQ ID NO: 166173 - DNA, 240 bp, Artificial Sequence
  derived and/or modified sequence
atgaacgggaccctcgaccacccagaccagcctgatcttgacgcgataaagatgttcgtgggtcaggtccccaggacttggtccgagaaagatctgcgcgagctttttgagcagtacggcgccgtgtacgaaatcaatgtgttgcgagaccgtagccaaaatcctccacagtcaaagggttgttgtttcgtaactttctacactcgcaaagccgctctggaggcccagaacgcgttgtag

SEQ ID NO: 166174 - DNA, 1449 bp, Artificial Sequence
  derived and/or modified sequence
atgaatggcaccctggaccacccagaccagcctgacctggatgccatcaagatgtttgtgggccaggtgcccaggacctggagcgagaaggacctgcgggagctgtttgagcagtatggagctgtgtatgagatcaacgtgctgcgggacaggagccagaaccccccccagagcaagggctgctgctttgtgaccttctacaccaggaaggccgccctggaggcccagaatgccctgcacaacatgaaggtgctgcccggcatgcaccaccccatccagatgaagccagctgacagcgagaagaacaatgctgtggaggacaggaagctgttcatcggcatgatcagcaagaagtgcacagaaaatgacatccgggtgatgttcagcagctttggccagatcgaggagtgccgcatcctgcggggcccagatggcctgagccggggctgtgcctttgtgaccttcaccacccgggccatggcccagacagccatcaaggccatgcaccaggcccagaccatggagggctgcagcagccccatggtggtgaagtttgctgacacccagaaggacaaggagcagaagaggatggcccagcagctgcagcagcagatgcagcagatctctgctgcctctgtgtggggcaacctggccggcctgaacaccctgggcccccagtacctggccctgctgcagcagacagccagcagcggcaacctgaacaccctgagcagcctgcaccccatgggcggcctgaatgccatgcagctgcagaacctggccgccctggccgccgccgccagcgctgcccagaacaccccatctggcaccaatgccctgaccaccagcagcagccccctgtctgtgctgaccagcagcggcagcagccccagcagcagcagcagcaacagcgtgaaccccatcgccagcctgggcgccctgcagaccctggccggggccacagctggcctgaatgtgggcagcctggccggcatggccgccctgaatggaggcctgggcagcagcggcctgagcaatggcaccggcagcaccatggaggccctgacccaggcctacagcggcatccagcagtatgctgctgctgccctgcccaccctgtacaaccagaacctgctgacccagcagagcatcggggctgctggcagccagaaggagggccctgagggcgccaacctcttcatctaccacctgccccaggagtttggagaccaggacctgctgcagatgttcatgccctttggaaatgtggtgtctgccaaggtgttcatcgacaagcagaccaacctgagcaagtgcttcggctttgtgtcctatgacaaccctgtgtctgcccaggccgccatccagagcatgaatggcttccagatcggcatgaagaggctgaaggtgcagctgaagaggagcaagaatgacagcaagccctactag

SEQ ID NO: 166175 - DNA, 240 bp, Artificial Sequence
  derived and/or modified sequence
atgaatggcaccctggaccacccagaccagcctgacctggatgccatcaagatgtttgtgggccaggtgcccaggacctggagcgagaaggacctgcgggagctgtttgagcagtatggagctgtgtatgagatcaacgtgctgcgggacaggagccagaaccccccccagagcaagggctgctgctttgtgaccttctacaccaggaaggccgccctggaggcccagaatgccctgtag

SEQ ID NO: 166176 - DNA, 1449 bp, Artificial Sequence
  derived and/or modified sequence
atgaacggcaccctggaccaccccgaccagcccgacctggacgccatcaagatgttcgtcggccaggtgccgcgcacctggtcagagaaggatttgcgtgagttatttgaacagtacggagcagtctacgagattaacgtactccgtgacaggagtcaaaaccctccccaaagcaagggatgctgcttcgttaccttttacaccaggaaggcagccctggaggctcagaacgcccttcacaacatgaaggtcctccccgggatgcaccaccccatccaaatgaagccggcagattccgaaaagaataatgctgtggaagacagaaagctcttcatcggcatgatatccaagaagtgcactgagaatgacatacgagtaatgttctcctctttcggacagatcgaagagtgtcgcatactaagaggcccggacgggctgtcgcgcggctgcgccttcgtgacttttaccacccgggctatggcacagactgccatcaaagcaatgcaccaagcacaaacaatggaaggttgtagctctccaatggtggtgaagttcgcagatactcagaaagataaggagcaaaagcgaatggcacagcagctacagcagcagatgcaacagatcagtgccgctagcgtgtgggggaacctggcaggcttaaatacactgggtccccaatacctggcgctgttgcagcagaccgcaagctcaggtaatctcaataccctctctagcctacatcctatgggagggttgaacgcgatgcagttgcagaatctggccgctctggctgccgctgcgagcgcagctcagaacaccccatctggcacaaacgcccttacaacatcatctagcccgctgtccgtgttgacatcgtcaggcagctccccaagcagctcctcttctaattcagtgaaccccatcgcatccctgggtgccttacagaccctggccggcgcaactgctggcctgaacgttggctctctcgccgggatggccgctctgaacggcggattgggatcttccggcctctcaaacgggaccggcagtacaatggaagccctgacccaggcatattctgggatccaacagtacgccgccgccgccctgccaaccttgtacaaccagaacctgctgacccagcaatcaattggagccgccgggagccagaaagagggaccagaaggcgccaatctctttatctatcacctgcctcaggaatttggtgaccaggacctgttgcagatgttcatgcccttcggcaacgtggtgtccgcaaaggtatttatagacaaacagaccaatctgtcaaaatgctttgggttcgtgtcatatgacaacccagtgtcagcccaggcagctatccaatccatgaacgggttccaaattggtatgaaaaggcttaaggtgcagctcaagcgatccaaaaatgatagcaagccctactag

SEQ ID NO: 166177 - DNA, 240 bp, Artificial Sequence
  derived and/or modified sequence
atgaacggcaccctggaccaccccgaccagcccgacctggacgccatcaaaatgttcgtcggacaagtgcctcgtacctggtctgaaaaagaccttcgcgagctgtttgagcagtatggggccgtctacgaaataaacgttttgcgtgaccgctcccagaacccaccccaatcaaaggggtgctgtttcgtaacattctacactaggaaggcagccctcgaagctcagaacgccctttag

SEQ ID NO: 166178 - DNA, 1449 bp, Artificial Sequence
  derived and/or modified sequence
atgaatggcacattggatcacccagaccaacctgatctggatgctatcaagatgtttgtgggacaagtccccaggacttggtccgagaaagatctgagggagctctttgagcagtacggggcagtatacgagatcaatgtgctgcgagacagaagccagaatccccctcagtcaaaaggttgctgcttcgtaacattctacacgcgaaaagcggctctagaggcccagaacgcacttcataacatgaaagtgctaccgggtatgcatcaccccattcagatgaaaccagctgactccgagaaaaacaacgccgtggaggacaggaagctgttcataggcatgatatcaaaaaagtgtaccgagaacgacatccgtgtgatgttcagcagtttcggtcagattgaagagtgtaggattctccgtggccctgatgggttgtctcgcggatgtgccttcgtgacctttaccactcgggctatggctcagaccgcaataaaggccatgcatcaggcccagactatggagggttgttccagtcctatggtggtgaaattcgctgacacacaaaaggataaggagcagaaaagaatggctcagcagctgcagcagcagatgcagcagatttctgccgctagcgtctggggtaatctggccggactcaataccctaggacctcagtacctggcgctcctgcaacagacagctagttccggcaacctgaatacattatcgtccctgcaccccatgggcggtcttaatgccatgcagctgcagaacctggctgcattggctgcagcagcctctgcggcacaaaacaccccttcagggacgaacgctcttacaacctctagtagtccactgagtgtgctaacatcctcagggagtagcccgagctcaagctcgagcaactccgtgaaccctatagcctctctgggggctctccaaaccctcgcaggagctacagccggtttaaacgtgggttccctggctggtatggcagctttgaatgggggactggggtcaagtggcctgtccaacgggaccggatcaaccatggaggccttgacccaagcttattccggaatacagcagtatgctgcagccgctctcccgacactatacaaccaaaatctgctaactcagcaatctattggtgcagccggatcacagaaagagggacctgagggtgcaaacttgtttatttatcatttgccacaggagttcggagatcaagacctcttacaaatgtttatgccgttcggtaatgtagtgtctgccaaggtgttcatcgacaagcagacgaatctaagtaaatgctttggtttcgtgagctatgataaccccgtgtcagctcaggcagcaatacagtcaatgaacggttttcaaatcgggatgaagagactgaaggtccagctgaaaaggtctaagaacgactctaagccgtactag

SEQ ID NO: 166179 - DNA, 240 bp, Artificial Sequence
  derived and/or modified sequence
atgaacggcacactcgatcaccctgaccagccagacctagacgcgattaagatgttcgttgggcaggtgcccagaacctggtcggaaaaagacctgagagagctgttcgagcaatacggagccgtatatgagatcaacgtgctacgggaccgctcccagaaccctccacaatctaaaggatgctgttttgtgaccttctatacaaggaaggctgctttggaggcccaaaatgctttgtag

SEQ ID NO: 166180 - DNA, 2112 bp, Artificial Sequence
  derived and/or modified sequence
ggcagcggcagcggcggcgggacgcggaggctcccccgggattcggcctcagcagcgaggcggcggcggcggctgcggaggcgcaggcagcaactgaggcagcggcaggctcaggtgcagccgctgctcaaagaaaatgaacggcaccctggaccacccagaccaaccagatcttgatgctatcaagatgtttgtgggccaggttccaaggacctggtctgaaaaggacttgcgggaactcttcgaacagtatggtgctgtgtatgaaatcaacgtcctaagggataggagccaaaacccgcctcagagcaaagggtgctgttttgttacattttacacccgtaaagctgcattagaagctcagaatgctcttcacaacatgaaagtcctcccagggatgcatcaccctatacagatgaaacctgctgacagtgagaagaacaatgcagtggaagacaggaagctgtttattggtatgatttccaagaagtgcactgaaaatgacatccgagtcatgttctcttcgtttggacagattgaagaatgccggatattgcggggacctgatggcctgagccgaggttgtgcatttgtgacttttacaacaagagccatggcacagacggctatcaaggcaatgcaccaagcacagaccatggagggttgctcatcacccatggtggtaaaatttgctgatacacagaaggacaaagaacagaagagaatggcccagcagctccagcagcagatgcagcaaatcagcgcagcatctgtgtggggaaaccttgctggtctaaatactcttggaccccagtatttagcactccttcagcagactgcctcctctgggaacctcaacaccctgagcagcctccacccaatgggagggttgaatgcaatgcagttacagaatttggctgcactagctgctgcagctagtgcagctcagaacacaccaagtggtaccaatgctctcactacatccagcagtcccctcagcgtgctcactagttcagggtcctcacctagctctagcagcagtaattctgtcaaccccatagcctcacttggagccctgcagacattagctggagcaacggctggcctcaatgttggctctttggcaggaatggctgctttaaatggtggcctgggcagcagtggcctttccaatggcaccgggagcaccatggaggccctcactcaggcctactcgggtatccagcaatatgctgctgctgcgctccccactctgtacaaccagaatcttctgacacagcagagtattggtgctgctggaagccagaaggaaggtccagagggagccaacctgttcatctaccacctgccccaggagtttggtgatcaggacctgctgcagatgtttatgccctttgggaatgtcgtgtctgccaaggttttcatagacaagcagacaaacctgagcaagtgttttggttttgtaagttacgacaatcctgtttcggcccaagctgccatccagtccatgaacggctttcagattggcatgaagcggcttaaagtgcagctcaaacgttcgaagaatgacagcaagccctactgagcgtgctcccctctgagactggagtgagagggtcttctgattcctgccgtttgttcatcgttgtgcctaaagcatgtcgatgtggcgtcaagtacatcgtccaaatccctgtctcttcagcttctctgatgcttgaactctcacctttgaccttgtgttgacctttgatgctgatgtgtatttttattatgtttgtttctttcttcgtttttttttctttttttctttcctttttttttccttttgtgctgccaaattggttttgctagaacgactgctgaaggggaaatatttaaacttgcatttgaatataaaaaaaatctatttttctagaacttcataagataaccacttgattttgtgattccaattctttgtaattgtcttcagagcagccctactagcacataccgcgtggtgtttgtatttctgtgaacacacagccagtccgtttctaggctttgtttctctgtgtgcttagttttaaagacaactttgaagtaaacaatgaaataaaagatgtcact

SEQ ID NO: 166181 - DNA, 1449 bp, Artificial Sequence
  derived and/or modified sequence
atgaacggcaccctggaccaccccgaccagcccgacctggacgccatcaagatgttcgtgggccaggtgcccagaacctggagcgagaaggacctgagagagctgttcgagcagtacggcgccgtgtacgagatcaacgtgctgagagacagaagccagaaccccccccagagcaagggctgctgcttcgtgaccttctacaccagaaaggccgccctggaggcccagaacgccctgcacaacatgaaggtgctgcccggcatgcaccaccccatccagatgaagcccgccgacagcgagaagaacaacgccgtggaggacagaaagctgttcatcggcatgatcagcaagaagtgcaccgagaacgacatcagagtgatgttcagcagcttcggccagatcgaggagtgcagaatcctgagaggccccgacggcctgagcagaggctgcgccttcgtgaccttcaccaccagagccatggcccagaccgccatcaaggccatgcaccaggcccagaccatggagggctgcagcagccccatggtggtgaagttcgccgacacccagaaggacaaggagcagaagagaatggcccagcagctgcagcagcagatgcagcagatcagcgccgccagcgtgtggggcaacctggccggcctgaacaccctgggcccccagtacctggccctgctgcagcagaccgccagcagcggcaacctgaacaccctgagcagcctgcaccccatgggcggcctgaacgccatgcagctgcagaacctggccgccctggccgccgccgccagcgccgcccagaacacccccagcggcaccaacgccctgaccaccagcagcagccccctgagcgtgctgaccagcagcggcagcagccccagcagcagcagcagcaacagcgtgaaccccatcgccagcctgggcgccctgcagaccctggccggcgccaccgccggcctgaacgtgggcagcctggccggcatggccgccctgaacggcggcctgggcagcagcggcctgagcaacggcaccggcagcaccatggaggccctgacccaggcctacagcggcatccagcagtacgccgccgccgccctgcccaccctgtacaaccagaacctgctgacccagcagagcatcggcgccgccggcagccagaaggagggccccgagggcgccaacctgttcatctaccacctgccccaggagttcggcgaccaggacctgctgcagatgttcatgcccttcggcaacgtggtgagcgccaaggtgttcatcgacaagcagaccaacctgagcaagtgcttcggcttcgtgagctacgacaaccccgtgagcgcccaggccgccatccagagcatgaacggcttccagatcggcatgaagagactgaaggtgcagctgaagagaagcaagaacgacagcaagccctactag

SEQ ID NO: 166182 - protein, 521 aa, Artificial Sequence
  derived and/or modified sequence
MTSAFKLDFLPDMMVEGRLLVPDRINGTANKMNGALDHSDQPDPDAIKMFVGQIPRSWSEKELKELFEPYGAVYQINVLRDRSQNPPQSKGCCFVTFYTRKAALEAQNALHNIKTLPGMHHPIQMKPADSEKSNAVEDRKLFIGMVSKKCNENDIRVMFSPFGQIEECRILRGPDGLSRGCAFVTFSTRAMAQNAIKAMHQSQTMEGCSSPIVVKFADTQKDKEQRRLQQQLAQQMQQLNTATWGNLTGLGGLTPQYLALLQQATSSSNLGAFSGIQQMAGMNALQLQNLATLAAAAAAAQTSATSTNANPLSTTSSALGALTSPVAASTPNSTAGAAMNSLTSLGTLQGLAGATVGLNNINALAVAQMLSGMAALNGGLGATGLTNGTAGTMDALTQAYSGIQQYAAAALPTLYSQSLLQQQSAAGSQKEGPEGANLFIYHLPQEFGDQDILQMFMPFGNVISAKVFIDKQTNLSKCFGFVSYDNPVSAQAAIQAMNGFQIGMKRLKVQLKRSKNDSKPY

SEQ ID NO: 166183 - DNA, 1566 bp, Artificial Sequence
  derived and/or modified sequence
atgaccagcgccttcaagctggacttcctgcccgacatgatggtggagggcagactgctggtgcccgacagaatcaacggcaccgccaacaagatgaacggcgccctggaccacagcgaccagcccgaccccgacgccatcaagatgttcgtgggccagatccccagaagctggagcgagaaggagctgaaggagctgttcgagccctacggcgccgtgtaccagatcaacgtgctgagagacagaagccagaaccccccccagagcaagggctgctgcttcgtgaccttctacaccagaaaggccgccctggaggcccagaacgccctgcacaacatcaagaccctgcccggcatgcaccaccccatccagatgaagcccgccgacagcgagaagagcaacgccgtggaggacagaaagctgttcatcggcatggtgagcaagaagtgcaacgagaacgacatcagagtgatgttcagccccttcggccagatcgaggagtgcagaatcctgagaggccccgacggcctgagcagaggctgcgccttcgtgaccttcagcaccagagccatggcccagaacgccatcaaggccatgcaccagagccagaccatggagggctgcagcagccccatcgtggtgaagttcgccgacacccagaaggacaaggagcagagaagactgcagcagcagctggcccagcagatgcagcagctgaacaccgccacctggggcaacctgaccggcctgggcggcctgaccccccagtacctggccctgctgcagcaggccaccagcagcagcaacctgggcgccttcagcggcatccagcagatggccggcatgaacgccctgcagctgcagaacctggccaccctggccgccgccgccgccgccgcccagaccagcgccaccagcaccaacgccaaccccctgagcaccaccagcagcgccctgggcgccctgaccagccccgtggccgccagcacccccaacagcaccgccggcgccgccatgaacagcctgaccagcctgggcaccctgcagggcctggccggcgccaccgtgggcctgaacaacatcaacgccctggccgtggcccagatgctgagcggcatggccgccctgaacggcggcctgggcgccaccggcctgaccaacggcaccgccggcaccatggacgccctgacccaggcctacagcggcatccagcagtacgccgccgccgccctgcccaccctgtacagccagagcctgctgcagcagcagagcgccgccggcagccagaaggagggccccgagggcgccaacctgttcatctaccacctgccccaggagttcggcgaccaggacatcctgcagatgttcatgcccttcggcaacgtgatcagcgccaaggtgttcatcgacaagcagaccaacctgagcaagtgcttcggcttcgtgagctacgacaaccccgtgagcgcccaggccgccatccaggccatgaacggcttccagatcggcatgaagagactgaaggtgcagctgaagagaagcaagaacgacagcaagccctactag

SEQ ID NO: 166184 - DNA, 1566 bp, Artificial Sequence
  derived and/or modified sequence
atgaccagcgcctttaaactagattttttgcctgacatgatggtcgagggcagactgctggtacccgatcggatcaacggtaccgcaaacaaaatgaatggagcactagatcatagcgatcagcccgatcccgatgcaattaagatgtttgtgggacagattccacgatcttggtccgagaaagaactaaaggagctctttgagccatacggggccgtctatcagatcaacgtcctcagagacaggagccagaaccccccccagtccaaaggctgctgttttgtgacattttacactcggaaagccgccctcgaagcccagaacgcccttcataacatcaaaactctgcctggtatgcatcatcccatccaaatgaagccagccgatagcgagaaaagtaacgctgtcgaggataggaagttgtttatcggaatggtttcaaagaaatgcaatgagaacgatatcagagtaatgttcagccctttcggccagattgaagaatgccgcatcctcagaggacctgatgggctcagcaggggatgtgcattcgtaaccttttctactcgagccatggctcagaatgccatcaaagccatgcatcagagtcaaacaatggagggctgttcctcacctatcgtcgtaaagtttgccgacacacagaaagacaaggagcagagaaggctacaacaacagttggctcagcagatgcagcaactcaacactgctacgtggggcaacctgacagggctcgggggattaacaccccagtatttagccctgctgcagcaggccacgtctagtagcaatcttggcgccttctccgggatccagcagatggccggaatgaatgctcttcagctccagaacctggctaccctggcagcagctgccgccgccgctcagacaagtgccacatccactaacgcaaaccccttgtctaccacctcctccgctttaggtgccctcacttctccagtcgccgcatctacaccgaattcaacagcgggagccgccatgaactccctgacatctctcggcacgctgcaagggctggcaggggcaactgttggattgaacaacataaatgcgttggccgtggctcagatgcttagcggtatggccgccctcaacgggggcctgggagctactggtctgaccaacgggaccgccggcaccatggacgccctcacccaggcgtactctggaattcaacagtacgcagccgcagcactgccaactttgtacagccaatcactcctgcagcagcaatccgctgcaggctcccagaaggaaggcccagagggagccaacttatttatctaccacttgccccaagaattcggggatcaggacatcctgcaaatgtttatgccctttgggaacgtgatatcagccaaagtctttatagataagcagactaacctcagcaaatgcttcggatttgtgtcatacgacaatcctgtgagcgcccaagcagctatccaggccatgaacggatttcagattggaatgaagcgactgaaggttcagctgaaaaggagtaagaacgacagtaagccttactag

SEQ ID NO: 166185 - DNA, 1566 bp, Artificial Sequence
  derived and/or modified sequence
atgacgagtgccttcaagcttgactttctgccagatatgatggttgaaggaagactgctggtgccagaccgaatcaatggcaccgcaaataagatgaacggcgcactggaccattccgatcagccggaccctgacgcaataaagatgtttgttggacaaatccctcgatcttggtcggagaaagaactgaaagagctgtttgaaccgtatggagcggtgtaccagatcaacgtgctccgagatcgatcacagaatcccccacagtccaaaggctgctgttttgtcactttttatacccggaaagcagctctagaggcccaaaatgccctccataatattaaaacccttccagggatgcaccaccctattcaaatgaagcccgcagactctgagaaatctaatgccgtagaggatcgtaagctgttcatcggaatggtgagtaagaagtgtaatgaaaatgatattcgtgtaatgttttccccatttgggcagatcgaggagtgcaggattctgcgcggtcccgatgggttgagcaggggatgcgccttcgtgacgttctctaccagagccatggctcagaatgccatcaaagcgatgcaccaatcacagactatggaggggtgctcaagccctatcgtggtcaaattcgctgacactcagaaggacaaggagcaacggcgcctgcagcagcaactggcacagcaaatgcaacagcttaatactgccacttgggggaacctgaccggacttggggggctgaccccacaatacctcgctttgctgcagcaggcaacctcctctagcaacctcggcgccttttccggtatccagcagatggcaggaatgaacgcattacagttgcagaatttggctactctcgccgcagccgccgcagccgcccaaacatctgccacaagtacaaacgcaaaccctttgtcaaccaccagctctgccctcggcgctctaacctcccctgttgctgcttctacccctaactcaacagcgggggccgccatgaactcgcttaccagcctgggtactcttcagggattggcgggagcaactgttggcctgaacaacatcaatgcgttggctgtggcacagatgctcagcggcatggctgcactgaacggcggtctgggagctactggactaacaaatggtacagccggcacaatggacgccctgacacaggcatacagcggtatacagcagtacgccgcagcagcacttccaactctctacagccagtcccttcttcagcaacagagcgcggccgggtcccagaaggagggccctgaaggcgctaatctcttcatctatcatctgccacaggaatttggtgatcaggatatcctgcagatgttcatgccatttggtaacgtgatttcagcgaaagtatttattgataaacagactaacctaagtaagtgtttcggatttgtgtcgtatgacaacccagtcagtgcacaggccgctattcaagccatgaacggattccagatcggtatgaaacgtctgaaggttcaactgaagaggagtaaaaacgacagcaaaccttactag

SEQ ID NO: 166186 - DNA, 1566 bp, Artificial Sequence
  derived and/or modified sequence
atgaccagcgccttcaagctggacttcctgcctgacatgatggtggagggccgcctgctggtgcctgaccgcatcaatggaacagccaacaagatgaatggagccctggaccacagcgaccagcctgaccctgatgccatcaagatgtttgtgggccagatccccaggtcctggagcgagaaggagctgaaggagctgtttgagccctacggggctgtgtaccagatcaacgtgctgcgggacaggagccagaaccccccccagagcaagggctgctgctttgtgaccttctacaccaggaaggccgccctggaggcccagaatgccctgcacaacatcaagaccctgcccggcatgcaccaccccatccagatgaagccagctgacagcgagaagagcaatgctgtggaggacaggaagctgttcatcggcatggtgtccaagaagtgcaatgaaaatgacatccgggtgatgttcagccccttcggccagattgaagaatgtcgcatcctgcggggcccagatggcctgagccggggctgtgcctttgtgaccttcagcacccgggccatggcccagaatgccatcaaggccatgcaccagagccagaccatggagggctgcagcagccccatcgtggtgaagtttgctgacacccagaaggacaaggagcagaggcggctgcagcagcagctggcccagcagatgcagcagctgaacacagccacctggggcaacctgaccggcctgggcggcctgaccccccagtacctggccctgctgcagcaggccaccagcagcagcaacctgggcgccttcagcggcatccagcagatggccggcatgaatgccctgcagctgcagaacctggccaccctggccgctgctgctgctgctgcccagaccagcgccaccagcaccaatgccaaccccctgagcaccaccagcagcgccctgggcgccctgaccagccctgtggccgccagcacccccaacagcacagctggagctgccatgaacagcctgaccagcctgggcaccctgcagggcctggccggggccaccgtgggcctgaacaacatcaatgccctggccgtggcccagatgctgagcggcatggccgccctgaatggaggcctgggcgccaccggcctgaccaatggaacagctggcaccatggatgccctgacccaggcctacagcggcatccagcagtatgctgctgctgccctgcccaccctgtacagccagagcctgctgcagcagcagagcgctgctggcagccagaaggagggccctgagggcgccaacctcttcatctaccacctgccccaggagtttggagaccaggacatcctgcagatgttcatgccctttggaaatgtcatcagcgccaaggtgttcatcgacaagcagaccaacctgagcaaatgttttggatttgtgtcctatgacaaccctgtgtctgcccaggccgccatccaggccatgaatggcttccagatcggcatgaagaggctgaaggtgcagctgaagaggagcaagaatgacagcaagccctactag

SEQ ID NO: 166187 - DNA, 2384 bp, Artificial Sequence
  derived and/or modified sequence
cctgctcgttcctgacagaattaacggcacagccaacaagatgaacggagctttggatcactcagaccaaccagacccagatgccattaagatgtttgtcggacagatcccccggtcatggtcggaaaaggagctgaaagaactttttgagccttacggagccgtctaccagatcaacgtcctccgggaccggagtcagaaccctccgcagagtaaaggttgttgtttcgtaacattttatacaagaaaagctgcacttgaggcccagaatgcactgcacaatattaaaactttacctgggatgcatcatcccattcagatgaaacctgcagatagtgaaaagtccaacgctgtggaagacagaaaattgttcataggaatggtatcgaagaaatgtaatgagaacgacatcagggtgatgttctctccatttggccagatagaagaatgccggatcctccggggacctgatgggctgagtcgaggctgtgcgtttgtcacattttctacaagggcaatggcacagaatgcaatcaaagccatgcatcagtctcagaccatggagggctgctcttcacctatcgtggtgaagtttgctgacactcagaaggacaaagagcaaaggcgcctccagcagcagctcgctcagcagatgcagcagctcaacactgccacctgggggaacctgacagggctgggcggactgaccccacagtatctggcgctcctgcagcaggccacctcctccagcaacctgggtgcgttcagcggcattcaacaaatggcaggcatgaatgctttacagttgcagaacctggcgacgctggctgctgctgcagctgcggcccagacctcagccaccagcaccaatgcaaaccctctctctaccacgagcagcgccctgggagccctcacgagtcccgtggctgcttcaacccccaactccactgctggtgcagccatgaactccttgacctctctcgggactctgcaaggactggctggagccactgttggactgaataatattaatgcactagcagttgctcaaatgctctcaggtatggcggctctgaatggaggacttggcgccacaggcttgacgaatggcacggctggcaccatggacgccctcacccaggcctactcaggaattcaacagtacgcagccgccgcgctgcccactctgtacagccagagcctgctgcagcagcagagcgctgcaggcagccagaaggaaggtccagagggggcaaacctctttatttaccaccttccacaggaatttggagaccaggacattctgcagatgttcatgccttttggaaatgttatctctgctaaagtcttcattgacaaacagaccaatctgagcaagtgctttggttttgttagctacgacaatccagtctctgcacaagctgctatccaagctatgaatggctttcagatcggcatgaaacgcttgaaggtgcagctgaagcgttccaaaaacgacagcaaaccttactgatcctaaccccagaggctccctgctctcattttagctttcttaggacatcttcatgcccgttagttcatcgtttgcctagcatgtccctgtggcgtctcaaaaaaaagtttcatcgtcccgtcattgtttctgatgtctttctgacctcacatcatatttggttctcctactgacctttgatctagtttgacctttgaaatttgcatgtgacctcatctagctatgaattctgggaagtcaatgtgaaaaacattgctgcattcatgcaagactgaaatttattattagacaaattcattatagaaaaaacctgtggcaaaaacgtttctttcttattttttttcttttcctaaaacagacttgaaagtattatacagggattggcattcttcccggtcactggtaacaatagcaatatgtgtccagggacacagaatgttggtttctaacagactacttccaaaaacagtttgagaaaaaaactgtctgattttaagtctctagaggtctgtaatagtttttacatttttcaggcagtgtaaagttttttgataaggccattttaggtggctcactttctcattaagatatatatatagaaccactttttgtagattagtataagaaaaatatttaccctgttttggggcaaatgctacctatttgtgtcaccttttgctgaactcacagttagacaatccatggtttaatgcacatgaaattacctatattttatactgtttcaatgtacaggagaaaggttactgtaaactgtgttatgttggtgcttctgtgaattaagttgtggtttcatcatgagtcttaatgttctttgttgataagacaagtttagaattggtttacttaatac

SEQ ID NO: 166188 - DNA, 1566 bp, Artificial Sequence
  derived and/or modified sequence
atgaccagcgccttcaagctggacttcctgcccgacatgatggtggagggcagattgctggtgccagataggatcaatggcactgccaataaaatgaacggggcgttggaccattccgatcagccagaccccgacgccattaagatgttcgtagggcaaatccctcggtcttggtccgagaaggagttgaaagagcttttcgagccttacggcgcagtctaccagatcaacgtgctgcgggaccggagccagaatcctcctcagtccaagggctgttgctttgtgacgttttacactagaaaagctgccctcgaggcacagaatgcattgcataacataaagacactgcccggaatgcaccaccctatccagatgaagcctgctgattctgagaagtctaatgccgtggaggaccgcaagttgttcatcggtatggtgagtaaaaagtgtaacgagaatgacatccgcgtaatgttcagcccatttggccaaattgaagaatgtcgcattctccgaggcccagacggcctaagcagggggtgcgcatttgttaccttctccacccgtgctatggctcagaacgctatcaaagctatgcatcagtcccagaccatggagggctgttcctctcccattgtggtgaagttcgctgacacacagaaggacaaagagcagcggcgcctacagcaacagttggcccagcagatgcagcagctgaacactgccacctggggaaatctaacaggtctcgggggactgacaccccaatatctcgcacttctgcagcaggcaacaagttcttccaatctcggcgcgttcagcggtatccaacagatggctggtatgaatgctttgcagctgcaaaatctggcaacattggcggctgcggcagcagccgcccagacctccgccacgtcgaccaatgccaaccctctcagcacaactagttctgcacttggagcacttacatcccccgtggctgcgagcaccccgaatagtaccgctggcgcagccatgaattcactaacaagcctgggaacactccagggattggccggcgccaccgtggggctgaataatatcaatgctctagcagtggcccagatgctctctggtatggcagcactgaatggggggctaggtgctaccgggctgaccaatgggaccgcaggaacaatggacgctctgacccaggcctatagcggtatccagcagtatgctgcagcggcacttccaactctgtatagccagagcctactccaacaacagtctgctgccgggtctcagaaggaggggcctgaaggcgccaacctttttatttaccacctgccccaggagttcggcgaccaggacattctgcagatgttcatgccgttcggcaatgtgatttcagctaaagtgttcattgacaagcaaactaacctgagcaagtgtttcggctttgtctcatacgataatcctgtgtcagcccaggcggcaattcaggcaatgaatggctttcagattgggatgaaacgcctgaaggtgcagctgaagaggtctaagaatgacagtaagccctactag

SEQ ID NO: 166189 - DNA, 1566 bp, Artificial Sequence
  derived and/or modified sequence
atgaccagcgccttcaagctggacttcctgcccgacatgatggtggagggccggctcttggtgcccgatcgaattaacggaacagccaacaaaatgaacggagccttggatcacagcgaccagccagacccagacgctataaaaatgtttgtgggccagataccaaggagttggtctgaaaaggagctcaaagagctgttcgagccgtatggcgccgtctaccagatcaacgttctgcgcgaccgcagccagaatccgccgcaaagcaaaggatgttgctttgttaccttctatactcgaaaagcagccttggaggcccagaatgccctccataacatcaagacgctccccggcatgcatcatccaattcagatgaaaccggcggatagcgaaaagagcaatgccgtggaggaccgaaaactctttataggcatggtgagcaagaaatgcaacgagaacgatatccgcgtgatgttcagcccattcggccagatcgaagagtgtcggatccttcgagggccagacggcctgagccgcggatgtgcttttgtgacattttcaacccgcgctatggctcaaaatgccatcaaggctatgcaccagagccagaccatggagggctgcagtagcccgatcgtggtgaagtttgctgacacccagaaggataaagagcagcgcagactgcagcagcagctggcacagcaaatgcagcagctgaacaccgccacctggggtaatctgactggcctgggaggactgactcctcaataccttgcactcctgcaacaagctacaagctcatcgaacctgggcgccttttccgggattcagcagatggctggaatgaacgccctgcaattacaaaacctggccactcttgcagctgccgccgctgccgcacaaacaagtgcaacttccacaaacgctaatccccttagtaccacctctagcgccctgggagcattgacctctcctgttgcggcctcaaccccaaattccaccgcaggagctgctatgaatagcttgacttcattgggcaccctccagggtctagccggggctactgtcggactgaataacattaatgcccttgccgtcgcacagatgctgagtgggatggcggcattgaatggtgggttgggcgccacaggacttactaatggcaccgcagggactatggacgcattaacccaggcctatagcggaattcaacagtatgctgctgcagccctgccaaccctgtattcccagagcctgttacagcaacagtctgcagctggctcacagaaggagggtccagagggcgcgaatctctttatctaccatttacctcaagagttcggcgatcaagacatcctgcagatgtttatgccttttggaaacgtaatctctgctaaggtgttcattgataagcaaaccaacctgagcaagtgcttcggatttgtgtcatatgacaatcccgtgtctgctcaagccgctattcaggctatgaatggttttcagatcggcatgaagcgactcaaggttcagctcaagcgatctaagaacgactctaaaccatattag

SEQ ID NO: 166190 - DNA, 1566 bp, Artificial Sequence
  derived and/or modified sequence
atgacaagtgcttttaaactggactttctacctgatatgatggtggaggggaggctgctggtgcctgaccgaatcaacggtacggccaacaaaatgaacggggctctcgatcattcggaccaacccgatccagatgccattaagatgtttgtaggtcagattccacgtagttggtccgagaaggaacttaaggagctctttgaaccttatggcgctgtgtaccaaataaacgtgctgagagatagaagccaaaaccctccgcagagcaaggggtgctgttttgtgacgttttacacacgaaaagctgcactcgaggcccagaacgcgctacacaacataaagactctgcctgggatgcaccaccctattcagatgaaacccgctgacagcgagaaatccaacgctgtggaggaccgcaagctgttcatcgggatggtgagcaaaaaatgcaacgaaaatgatatacgagtcatgttttcgcctttcggccaaattgaggagtgtcgcatcctgcgcggacctgacggccttagtcggggttgtgccttcgtcacattcagcactcgcgctatggcccagaatgctataaaggccatgcatcagtcacagaccatggagggttgttcgagtcctattgtagttaagtttgctgatacccagaaggacaaggagcaacggcgactgcagcaacaactggctcagcagatgcaacagctgaacacagctacctggggcaatttgactgggctggggggactgactccgcagtatctggcccttttacagcaggccacaagctcttccaatctgggagccttttccggcattcaacagatggccggaatgaatgctctacagctgcagaatctcgcaacactggctgcagccgctgctgctgcccagaccagcgccacatcaacgaatgccaaccctctgtccaccacaagctcagccctcggagctctcacctccccagtggctgccagcactccaaattcaactgccggtgctgcaatgaactccctaacaagtcttggcactctccaaggactggccggagcaaccgtgggcctgaataacataaatgcccttgctgttgcacagatgctctccggcatggcagctctaaatggaggcctcggagctacgggcctcactaatggcactgccggtaccatggatgctcttacgcaggcgtactccggcatacagcagtacgcagccgctgctctgcctacattgtactctcagagtttgctgcagcaacagtctgccgcaggcagccagaaggagggcccagaaggggcaaacctgttcatctaccatctaccacaagaatttggcgaccaggatatccttcagatgttcatgcctttcggaaacgttatctccgctaaggtattcatcgacaagcaaacaaacctttcgaaatgttttgggtttgtgtcttatgacaacccagtctccgcccaggcagcaatacaggccatgaacggtttccagattgggatgaagcgtcttaaagtccaactcaagcggtccaagaatgattctaagccgtattag

SEQ ID NO: 166191 - DNA, 1566 bp, Artificial Sequence
  derived and/or modified sequence
atgacctcagcttttaaactggattttctgccagacatgatggtggaaggtcgcttgttggtgccggatcgcattaacgggactgcaaataagatgaacggggcattggatcattctgaccagccagaccctgacgcgataaaaatgttcgtcggacagatacctcgttcctggagcgagaaagaactgaaggaactgttcgaaccctacggggcagtctaccagattaacgtattgagagatagatcccagaatccccctcagagcaaaggttgttgttttgtaaccttttacacccgcaaagccgctcttgaagctcagaatgctctccataatatcaaaaccttgcccggaatgcaccaccccattcagatgaagccagccgatagtgaaaagtctaatgccgtggaggatcgcaaacttttcatcgggatggtgtccaaaaaatgcaacgagaacgacatcagggtcatgttcagtcccttcggtcaaatcgaagaatgcagaatcttgcggggtccagacggtttgagccgcggatgtgccttcgttaccttctcaacaagggccatggcacaaaacgccatcaaggctatgcaccagagccagactatggaaggatgcagcagccccattgtagttaagtttgctgacacccagaaagataaggagcagcggagactccagcagcagttggcccagcagatgcagcaactcaataccgctacctgggggaatctgacagggctcggaggtctgactccacagtacttggccctgctgcaacaggccacctcctccagcaatctgggagctttttctggaatacagcagatggctggaatgaacgcacttcagctgcagaatctggcaacgctcgctgccgcagctgcagctgcgcaaacttctgccacatccaccaatgccaatccattgtccactacaagttccgctctaggggctttaacgtcacctgtcgcagcgagcactcctaactctacagcgggagctgcaatgaactccctgactagcctgggcaccctgcaaggtctagccggagctacagtcggacttaataatattaatgctctcgccgtcgcgcagatgctctcaggaatggctgcactgaacggagggctgggcgctacggggctgactaatggaacggcgggtaccatggatgccttgacacaggcttatagcggcattcagcaatacgccgcagccgcacttcctacactttactcacagtctcttctccagcagcagtcggccgcaggaagccagaaggagggccctgagggtgcaaatttgttcatataccatctgccacaggagttcggtgaccaagatattctgcagatgttcatgcccttcggcaacgtaatcagtgcaaaggtcttcatcgacaaacaaacaaatcttagcaagtgtttcggcttcgtgtcttacgacaatcccgtcagtgcccaggccgcaatccaagccatgaatggattccaaattggcatgaagagactgaaggttcaactcaaaagatccaagaatgattccaaaccatactag

SEQ ID NO: 166192 - DNA, 7982 bp, Artificial Sequence
  derived and/or modified sequence
ggggattggcggagcgcgaggagagaatgtgacaagtgccggctcggcggccgccgggggaggccgcgcgcacctgtccctgcccgtctcgcgccgcccgcggccgctcggacgcgcgcagagccgccccccgccgctgccgccgcgtgcgcccgcgaacatgacttctgccttcaagctggatttcctcccggacatgatggtcgagggccgcctgctcgttcctgacagaattaacggcacagccaacaagatgaacggagctttggatcactcagaccaaccagacccagatgccattaagatgtttgtcggacagatcccccggtcatggtcggaaaaggagctgaaagaactttttgagccttacggagccgtctaccagatcaacgtcctccgggaccggagtcagaaccctccgcagagtaaaggttgttgtttcgtaacattttatacaagaaaagctgcacttgaggcccagaatgcactgcacaatattaaaactttacctgggatgcatcatcccattcagatgaaacctgcagatagtgaaaagtccaacgctgtggaagacagaaaattgttcataggaatggtatcgaagaaatgtaatgagaacgacatcagggtgatgttctctccatttggccagatagaagaatgccggatcctccggggacctgatgggctgagtcgaggctgtgcgtttgtcacattttctacaagggcaatggcacagaatgcaatcaaagccatgcatcagtctcagaccatggagggctgctcttcacctatcgtggtgaagtttgctgacactcagaaggacaaagagcaaaggcgcctccagcagcagctcgctcagcagatgcagcagctcaacactgccacctgggggaacctgacagggctgggcggactgaccccacagtatctggcgctcctgcagcaggccacctcctccagcaacctgggtgcgttcagcggcattcaacaaatggcaggcatgaatgctttacagttgcagaacctggcgacgctggctgctgctgcagctgcggcccagacctcagccaccagcaccaatgcaaaccctctctctaccacgagcagcgccctgggagccctcacgagtcccgtggctgcttcaacccccaactccactgctggtgcagccatgaactccttgacctctctcgggactctgcaaggactggctggagccactgttggactgaataatattaatgcactagcagttgctcaaatgctctcaggtatggcggctctgaatggaggacttggcgccacaggcttgacgaatggcacggctggcaccatggacgccctcacccaggcctactcaggaattcaacagtacgcagccgccgcgctgcccactctgtacagccagagcctgctgcagcagcagagcgctgcaggcagccagaaggaaggtccagagggggcaaacctctttatttaccaccttccacaggaatttggagaccaggacattctgcagatgttcatgccttttggaaatgttatctctgctaaagtcttcattgacaaacagaccaatctgagcaagtgctttggttttgttagctacgacaatccagtctctgcacaagctgctatccaagctatgaatggctttcagatcggcatgaaacgcttgaaggtgcagctgaagcgttccaaaaacgacagcaaaccttactgatcctaaccccagaggctccctgctctcattttagctttcttaggacatcttcatgcccgttagttcatcgtttgcctagcatgtccctgtggcgtctcaaaaaaaagtttcatcgtcccgtcattgtttctgatgtctttctgacctcacatcatatttggttctcctactgacctttgatctagtttgacctttgaaatttgcatgtgacctcatctagctatgaattctgggaagtcaatgtgaaaaacattgctgcattcatgcaagactgaaatttattattagacaaattcattatagaaaaaacctgtggcaaaaacgtttctttcttattttttttcttttcctaaaacagacttgaaagtattatacagggattggcattcttcccggtcactggtaacaatagcaatatgtgtccagggacacagaatgttggtttctaacagactacttccaaaaacagtttgagaaaaaaactgtctgattttaagtctctagaggtctgtaatagtttttacatttttcaggcagtgtaaagttttttgataaggccattttaggtggctcactttctcattaagatatatatatagaaccactttttgtagattagtataagaaaaatatttaccctgttttggggcaaatgctacctatttgtgtcaccttttgctgaactcacagttagacaatccatggtttaatgcacatgaaattacctatattttatactgtttcaatgtacaggagaaaggttactgtaaactgtgttatgttggtgcttctgtgaattaagttgtggtttcatcatgagtcttaatgttctttgttgataagacaagtttagaattggtttacttaatacaaaaaaaaaaaaaagaatttcaaaaaaaaaagttgtttgcttaaaaaaaatttcatgtgagggaaaaaaaaaaaacctattccagaataagttttgtgttggcttgtgaagcattgatgtcattttttttaattgtggactatttagatgtgtttgtgttcagcaaaatgtgatgtttttttcttttaaagaaaaaaagtgaaaatatatagtgccaaattccaaaggtacttccttcctagagcttcagtgtgtttcttgtgagaagtaatttgataacatgggtattttattatgtgttttgtataaatccctaatatttaaaaaaaaaaacaaaacaaaaaaaggttacaaagtttgttaacttgctatcctgtggtcttgttgcctgaaattgttattgtttgttatttctctctgatgttttttgtaagacattgtataagtgcccatgtcccacttttttaaccactccgcacatcagtgctgtgaaggcaacctcaccatgtattttcttcataatctatggaaacctctaaggtgagaaagttttgaacttttaaccctttctacccagagctatctggaatgttgatgactttttatactgtcatgatttgagtttgttttggggtgtttccaatttggatttttttccctgcatctatcctctaagttgtttcggtttgactactttgttctttggttaagatccaaaagaaaacagaaaacaattccacgaggccaatctaaagggaaaaaatcctacactacttttactacttttgattatttctcatttttgggaaaagaattcctaatgtgctactagaattccttcttcagttttaacgagtaattggataaaccctgagggaaaacggaggtagattcagcacctaacaatcctgtatgcttttgagatcacgtttagtgctatgtcctagtctagaatattttcatataccttgcagtaaaacgactttgtggcaggacagtctcttgaggggttttgtttctgtttcctaaatactcctaaataatatttctaatcagccattatgctggggcatctctgatcccagtaggtacctctgaatataccaggtgtctggagttagaagcccatagccctttcccagcctttttggtttttttaattgaacacatttcatctaagtaaagctcagttctttatcacaatttactgaccaaatacctagcaccagttcctgctgccactttttaaagtgccatatgactttctacgaacaggtaccttgctgtcttgacaaatcctaatgtcacgcctacagccccaacacaagctccagtcttcctcttcggcatgccctggaagcttcttggcctcagctccccttccccgctcagcaccctgttaggatcagtgtgtgtggatgggatagccctgggatggaaaggactagcctctactgatgcaaaaaaacaaaaagcaacacaaacgtttccttcttatagcacatgcacttccttacaatgacatgatttgtattatcctcacatgtgtttactactgctggggccttccttcatcctctgagggctattttgtactttctgcagcaatcagcttaataacaacacttattgcacctgtctctctctgagaacacggtgtgtctcgacacgtaccacgtacgtggaaacacaagagcccaccacttgaatttctaagaccatttcattctgaaacttcttatcaattacctaaatctcaacgaaaaacaatttactgaagccgactcccctccccatctccctctcaacctcaacccacctgcatgcatctcccccagaggaaacactgagggtaggggacaggaggctcaggacgcgccctctgaatcgagtgtttcttcttcacaagtcaccaagagaggacatgagggggaaagtcctttttgcccttctccaaaaaataaccttccacagagacaaactgtccttctatccacttttatcttttaataaatatcaaaaggaaaaagctgcaagggtgcaaagggcctgtgccagaagaaaacacacacagggaaaccgctttttttaatcaattgtagagaatagtcatttttaatctaaattagagaattgtgatacaatggcagtcctcaaaggcgtaacgagttcatctttctttcaccataggggttatagttggcttgtgctactctggaatcattttactgtttgtttttattatcttaagtgctaattaaaaaaaaaataaaattttaaaaaaacctgtagtttcattacctttttgaataatgtcatacaaaaaatgtatttgtttttttgtgctgtgagaattgatgtttgtagattaataatcattttgtttagaattacaaaatagtttttaaatattgtctgagaaaagccaaagttaatgcaacctagtggaaactgtaagaccatttgagtattgtttgttttattgatgcatttggattttgttgtttgatggaatttgagccaaaaaaaaaatacgcaggctttcctatttctacaactgattgtacttatgcattttgtaccagtggaactttttatactggagattaaaaaaaaaatggaaatttttgtggcttgctctggtgggcccctgacaatgactgatttcaagtttgatttcgggttgattgattgattgattgatagaaagaaagttgcttttcttttgagaattaaaaactttggcttgatttcttttttccctttgcttatatctagcattagaattttgtcttaaaataacagcggtaagtttcactttttattctgtattgtgcagttacacaataaggtaattagatttagaagtactcagtcactttaagtggataaatgtattagttaaaactttagggtttgcttttttgctgtttagatcaaagttttttctgattcttctgtcctcattgtgaacataaccgtgtagttgaaacagtcaaacttatttttgtaatgtatgttattgtgtgatgcagttttttgcttctgtctccaatattaaaccattttcctaatacttgtttctctctctgcgtgttgtattgttggtagtcattatatgttggtgatacatctgcacacctcactgtttcacgtatctgtttttttctctatgttgtgtaaaaagatacagtcgattccacttaagtgaatatctgatttggggaagaggaaactgcacagcagccacctttgatttatgtacaaccgcccacttgaactcctgcttccaagatttatacacttttttcctacagttcacctcagtaactgcctttggggttggatttgccaaggtgttttacggtcttttgaccacacaggttaatttccccttctctcccctccctcatgagtctatccacgcagttcttaacatacattccaaactgctgcggggtttcctctccacacccacgaggccaaacccgcatcattacagtccaactcttcttagacactaatcactttctaaaagaagtgagttctccagggaagaaaaatcaacttagccagtgaaaagggttaaacttaagtctattatttgttgccctcaatcaaaagatatgtatagaaaagtcatttaaattatttatttctacaagctaattgaatccaggagcagctttaattattaacactaacggaagagaaaagaagtatttccaagggctcaaatggaagctgtactcagtccggtggaggcagggggaggtaaagtttctcacactcaagtcgtcttcatagtttactgtccttttccaaacaaaagctaataacgccatacgcatccacacactccctcctggatgaacctaagtctcgtccccactgtcaccccaaggccagttatcaaaaactgttccttctctgccctcaaagactgaagccgcaggccctgttctgcctctgctcaggaatctgattgctcttaaagtgctcttacaagattccgtcgatgtttgctccctctgtcttatctctccttccagtattttcagacgcacaagctctgactcaggccacccagcacctggcagccttcctctgcgtgccagtgaaatctctcccagtaggtgctcaggctcttcaccctctcgttgcagcagcccctctggcccgagattgtattttctagtctgctcaagaacagaggggcctggcgaggtggaggaagggaggctccctccccggggctggccgcctcagtgatggtgatgccaccagctccagcctgcacggatggagctcacttcctaccatcacttctgctttcagtctcctcatagccttcggcagtctcctctgaaaacacactgcctacgttagtgggaaaggatggctaagggtgtgatttctttttattagggaggtgggagggggatgttgggaggcatggggggtgattaaattatcatttccaaggtgcaagtgtttatttttcaaatctataagtacatagttccaccattttggcacaagacaaaatactcatgctaagcaaaggaagagaaagacaaagccagtttttgttgcttttctaaagcaacaaataattctccaaagaaggggatgaaaatgctagttcctttaagcacttactgactgtaaagttggtccctgcttaaattcatacccatagttttgagtcggtatgacaccactgcagtgtgagcaaggtgaatccgtgtgccatgcatggaccaccttgggataccgcagcaccatcaacatccgccttgctgatggaagccacacacgctgcccagcccacagcagtcgcacgcagccgatgggctcggactcttagctggcaggctaggacacacagtgaacattaatgtactgtgaatcgttcctgataagtgaataaaacattgtgaccaaacaatcagcttattcacttatcaggaatcgactgttctgctaatttgctgttgttgtttttcatctctgttgtagttcactatttttgctgtgttctgttttctcctctcatgcttgggcaaatcactgggaatattatcttcatgtgaccatgaaacgtttctattgagtgaaaatgatatcttaacaaaatctatgcacttgctatcaggaacacaatactggatgtgtcttatatatattgaactatatagtactcgatttcttaaataaagcttaagaaaggactctgttgtgtgtaaagttaatgtgattatttttcaaagcagtgtttctaaggggtatttttgttcttttaagtcttgagtgatacaggatatttttcattaaaattatatcactggctttatgacttaatattcaataaattgactttgg

SEQ ID NO: 166193 - DNA, 2437 bp, Artificial Sequence
  derived and/or modified sequence
atgacttctgccttcaagctggatttcctcccggacatgatggtcgagggccgcctgctcgttcctgacagaattaacggcacagccaacaagatgaacggagctttggatcactcagaccaaccagacccagatgccattaagatgtttgtcggacagatcccccggtcatggtcggaaaaggagctgaaagaactttttgagccttacggagccgtctaccagatcaacgtcctccgggaccggagtcagaaccctccgcagagtaaaggttgttgtttcgtaacattttatacaagaaaagctgcacttgaggcccagaatgcactgcacaatattaaaactttacctgggatgcatcatcccattcagatgaaacctgcagatagtgaaaagtccaacgctgtggaagacagaaaattgttcataggaatggtatcgaagaaatgtaatgagaacgacatcagggtgatgttctctccatttggccagatagaagaatgccggatcctccggggacctgatgggctgagtcgaggctgtgcgtttgtcacattttctacaagggcaatggcacagaatgcaatcaaagccatgcatcagtctcagaccatggagggctgctcttcacctatcgtggtgaagtttgctgacactcagaaggacaaagagcaaaggcgcctccagcagcagctcgctcagcagatgcagcagctcaacactgccacctgggggaacctgacagggctgggcggactgaccccacagtatctggcgctcctgcagcaggccacctcctccagcaacctgggtgcgttcagcggcattcaacaaatggcaggcatgaatgctttacagttgcagaacctggcgacgctggctgctgctgcagctgcggcccagacctcagccaccagcaccaatgcaaaccctctctctaccacgagcagcgccctgggagccctcacgagtcccgtggctgcttcaacccccaactccactgctggtgcagccatgaactccttgacctctctcgggactctgcaaggactggctggagccactgttggactgaataatattaatgcactagcagttgctcaaatgctctcaggtatggcggctctgaatggaggacttggcgccacaggcttgacgaatggcacggctggcaccatggacgccctcacccaggcctactcaggaattcaacagtacgcagccgccgcgctgcccactctgtacagccagagcctgctgcagcagcagagcgctgcaggcagccagaaggaaggtccagagggggcaaacctctttatttaccaccttccacaggaatttggagaccaggacattctgcagatgttcatgccttttggaaatgttatctctgctaaagtcttcattgacaaacagaccaatctgagcaagtgctttggttttgttagctacgacaatccagtctctgcacaagctgctatccaagctatgaatggctttcagatcggcatgaaacgcttgaaggtgcagctgaagcgttccaaaaacgacagcaaaccttactgatcctaaccccagaggctccctgctctcattttagctttcttaggacatcttcatgcccgttagttcatcgtttgcctagcatgtccctgtggcgtctcaaaaaaaagtttcatcgtcccgtcattgtttctgatgtctttctgacctcacatcatatttggttctcctactgacctttgatctagtttgacctttgaaatttgcatgtgacctcatctagctatgaattctgggaagtcaatgtgaaaaacattgctgcattcatgcaagactgaaatttattattagacaaattcattatagaaaaaacctgtggcaaaaacgtttctttcttattttttttcttttcctaaaacagacttgaaagtattatacagggattggcattcttcccggtcactggtaacaatagcaatatgtgtccagggacacagaatgttggtttctaacagactacttccaaaaacagtttgagaaaaaaactgtctgattttaagtctctagaggtctgtaatagtttttacatttttcaggcagtgtaaagttttttgataaggccattttaggtggctcactttctcattaagatatatatatagaaccactttttgtagattagtataagaaaaatatttaccctgttttggggcaaatgctacctatttgtgtcaccttttgctgaactcacagttagacaatccatggtttaatgcacatgaaattacctatattttatactgtttcaatgtacaggagaaaggttactgtaaactgtgttatgttggtgcttctgtgaattaagttgtggtttcatcatgagtcttaatgttctttgttgataagacaagtttagaattggtttacttaatac

SEQ ID NO: 166194 - protein, 362 aa, Artificial Sequence
  derived and/or modified sequence
MATAETALPSISTLTALGPFPDTQDDFLKWWRSEEAQDMGPGPPDPTEPPLHVKSEDQPGEEEDDERGADATWDLDLLLTNFSGPEPGGAPQTCALAPSEASGAQYPPPPETLGAYAGGPGLVAGLLGSEDHSGWVRPALRARAPDAFVGPALAPAPAPEPKALALQPVYPGPGAGSSGGYFPRTGLSVPAASGAPYGLLSGYPAMYPAPQYQGHFQLFRGLQGPAPGPATSPSFLSCLGPGTVGTGLGGTAEDPGVIAETAPSKRGRRSWARKRQAAHTCAHPGCGKSYTKSSHLKAHLRTHTGEKPYACTWEGCGWRFARSDELTRHYRKHTGQRPFRCQLCPRAFSRSDHLALHMKRHL

SEQ ID NO: 166195 - DNA, 1615 bp, Artificial Sequence
  derived and/or modified sequence
tcagagttcacgaggcagccgaggaagaggaggcttgaggcccagggtgggcaccagccagccatggccacagccgagaccgccttgccctccatcagcacactgaccgccctgggccccttcccggacacacaggatgacttcctcaagtggtggcgctccgaagaggcgcaggacatgggcccgggtcctcctgaccccacggagccgcccctccacgtgaagtctgaggaccagcccggggaggaagaggacgatgagaggggcgcggacgccacctgggacctggatctcctcctcaccaacttctcgggcccggagcccggtggcgcgccccagacctgcgctctggcgcccagcgaggcctccggggcgcaatatccgccgccgcccgagactctgggcgcatatgctggcggcccggggctggtggctgggcttttgggttcggaggatcactcgggttgggtgcgccctgccctgcgagcccgggctcccgacgccttcgtgggcccagccctggctccagccccggcccccgagcccaaggcgctggcgctgcaaccggtgtacccggggcccggcgccggctcctcgggtggctacttcccgcggaccgggctttcagtgcctgcggcgtcgggcgccccctacgggctactgtccgggtaccccgcgatgtacccggcgcctcagtaccaagggcacttccagctcttccgcgggctccagggacccgcgcccggtcccgccacgtccccctccttcctgagttgtttgggacccgggacggtgggcactggactcggggggactgcagaggatccaggtgtgatagccgagaccgcgccatccaagcgaggccgacgttcgtgggcgcgcaagaggcaggcagcgcacacgtgcgcgcacccgggttgcggcaagagctacaccaagagctcccacctgaaggcgcatctgcgcacgcacacaggggagaagccatacgcctgcacgtgggaaggctgcggctggagattcgcgcgctcggacgagctgacccgccactaccggaaacacacggggcagcgccccttccgctgccagctctgcccacgtgctttttcgcgctctgaccacctggccttgcacatgaagcgccacctttgagccctgccctggcacttggactctcctagtgactggggatgggacaagaagcctgtttggtggtctcttcacacggacgcgcgtgacacaatgctgggtggttttcccacgaatggaccctctcctggactcgcgttcccaaagatccacccaaatatcaaacacggacccatagacagccctgggggagcctcttacggaaaatccgacaagccttcagccacagggagccacacagagatgtccaaactgtcgtgcaaacccagtgagacagaccgccaaataaacggactcagtggacactcagaccagctcccagatggccctggacagcaggagagggtgtgggatgaggcttcccagagaccctgggtctagaaagcggctcctgaaggtcccttattgtggctgatattaactgtcaatggttatgggtcctataaaaatgcccctcccagataaa

SEQ ID NO: 166196 - DNA, 1089 bp, Artificial Sequence
  derived and/or modified sequence
atggccaccgccgagaccgccctgcccagcatcagcaccctgaccgccctgggccccttccccgacacccaggacgacttcctgaagtggtggagaagcgaggaggcccaggacatgggccccggcccccccgaccccaccgagccccccctgcacgtgaagagcgaggaccagcccggcgaggaggaggacgacgagagaggcgccgacgccacctgggacctggacctgctgctgaccaacttcagcggccccgagcccggcggcgccccccagacctgcgccctggcccccagcgaggccagcggcgcccagtacccccccccccccgagaccctgggcgcctacgccggcggccccggcctggtggccggcctgctgggcagcgaggaccacagcggctgggtgagacccgccctgagagccagagcccccgacgccttcgtgggccccgccctggcccccgcccccgcccccgagcccaaggccctggccctgcagcccgtgtaccccggccccggcgccggcagcagcggcggctacttccccagaaccggcctgagcgtgcccgccgccagcggcgccccctacggcctgctgagcggctaccccgccatgtaccccgccccccagtaccagggccacttccagctgttcagaggcctgcagggccccgcccccggccccgccaccagccccagcttcctgagctgcctgggccccggcaccgtgggcaccggcctgggcggcaccgccgaggaccccggcgtgatcgccgagaccgcccccagcaagagaggcagaagaagctgggccagaaagagacaggccgcccacacctgcgcccaccccggctgcggcaagagctacaccaagagcagccacctgaaggcccacctgagaacccacaccggcgagaagccctacgcctgcacctgggagggctgcggctggagattcgccagaagcgacgagctgaccagacactacagaaagcacaccggccagagacccttcagatgccagctgtgccccagagccttcagcagaagcgaccacctggccctgcacatgaagagacacctgtag

SEQ ID NO: 166197 - DNA, 1089 bp, Artificial Sequence
  derived and/or modified sequence
atggccacagccgaaacagcgctgcctagtatctcaaccctgactgctctgggccctttccctgatactcaagacgattttcttaaatggtggagatcggaggaggcacaggacatgggtccagggcctcccgatccaaccgaaccccctctgcacgtgaagtccgaagatcaacccggcgaagaggaagacgatgaacgtggggccgatgccacgtgggaccttgatctgcttttaaccaacttttccggccccgaaccgggtggagcaccacaaacttgcgccctcgcccctagtgaggccagcggagctcagtatccaccccctcccgaaacactgggagcctacgcaggaggaccaggcctggttgctggcctgctgggcagtgaagatcatagtggctgggtacgtccagccctccgtgccagagcgccagacgcttttgtaggacctgccttagccccagcacctgcccccgaacccaaagccctggcccttcaaccagtttatccgggcccaggtgcaggctccagcgggggttacttcccccgcactggtctgagtgtgcctgctgcctccggagccccctacggcctgctttccgggtatcccgccatgtatccggctccgcaataccagggacacttccagctcttccgcggcctgcagggcccggcgcccgggcctgctacatctccctcttttctctcctgcctggggcccgggaccgtgggaactggtttgggtgggacggctgaagatcccggtgtgattgccgagacagcccctagtaagcggggaagacgatcatgggcccgaaaacggcaggctgcccacacctgcgcccatccgggatgcggaaagtcatatacaaagtctagccatctgaaggcgcatctgagaacacatacgggagaaaagccctacgcctgtacctgggaggggtgtggctggaggttcgcccgttccgatgagcttacgaggcattaccggaagcatactggccagaggcccttccgctgccaactgtgccctcgcgctttctcccggtccgaccacttagcacttcacatgaagcgccacctttag

SEQ ID NO: 166198 - DNA, 1089 bp, Artificial Sequence
  derived and/or modified sequence
atggccacagctgagacagccctgcccagcatcagcaccctgacagccctgggccccttcccagacacccaggatgacttcctgaagtggtggaggtctgaggaggcccaggacatgggccctggccccccagaccccacagagccccccctgcacgtgaagtctgaggaccagcctggagaggaggaggatgatgaaagaggagcagatgccacctgggacctggacctgctgctgaccaacttcagcggccctgagcctggaggagccccccagacctgtgccctggcccccagcgaggccagcggggcccagtacccacctcctcctgagaccctgggcgcctatgccggcggccctggcctggtggccggcctgctgggcagcgaggaccacagcggctgggtgcggcctgccctgcgggcccgggccccagatgcctttgtgggccctgccctggccccagccccagcccctgagcccaaggccctggccctgcagcctgtgtacccaggccctggagctggcagcagcggcggctacttccccaggacaggcctgtctgtgcctgctgccagcggggccccctacggcctgctgagcggctacccagccatgtacccagccccccagtaccagggccacttccagctgttccggggcctgcagggccctgcccctggccctgccaccagccccagcttcctgagctgcctgggccctggcaccgtgggcaccggcctgggcggcacagcagaagatcctggggtgattgctgagacagcccccagcaagaggggccgccgctcctgggccaggaagaggcaggccgcccacacctgtgcccaccctggctgtgggaagagctacaccaagagcagccacctgaaggcccacctgcggacccacactggagagaagccctatgcctgcacctgggagggctgcggctggaggtttgcccggagtgatgagctgaccaggcactacaggaagcacacaggccagaggcccttccgctgccagctgtgcccccgggccttcagcagaagtgaccacctggccctgcacatgaagaggcacctgtag

SEQ ID NO: 166199 - DNA, 1089 bp, Artificial Sequence
  derived and/or modified sequence
atggccaccgccgagaccgccctgcccagcatcagcaccctgaccgcccttgggcctttcccagatacacaggatgacttcctcaagtggtggaggagcgaagaggcacaggatatggggcccgggccaccagacccaacagagccgccacttcatgtaaaaagcgaggaccagccaggggaagaagaagacgacgagcgcggggctgacgctacatgggacttggacctcctcctaacaaatttcagtggaccagaaccaggcggcgctccacaaacctgcgccctggcaccgagcgaagcatcaggagcgcagtacccacctccacccgagaccctgggtgcgtacgccggtggcccgggactcgtcgccggcttgctgggcagcgaagaccacagtggctgggttcggcccgcattgcgcgcccgggcgccagacgccttcgtcggacctgcactagcgcctgccccagccccggagcccaaggcactcgctctgcaaccggtctaccccggacccggtgcagggtcttcaggaggatattttcctaggacggggctctcagttcctgcagccagcggagctccctacggtttgttgagcggataccctgctatgtacccggctccccagtatcagggacacttccagctatttagagggctgcaggggcccgccccaggtccagccacctccccaagttttctcagctgcctgggtcctgggacagtcgggactggcctgggcggaactgctgaggatccaggtgtgatagccgagacggcaccgagcaaacggggcaggaggtcctgggcccgaaagcggcaagcagctcacacttgcgcccaccccggctgtggcaaatcctacactaagagtagtcacctaaaagcccaccttcggacacacacgggagaaaaaccttacgcgtgcacatgggaaggctgcggttggagatttgcccgcagcgatgaacttacacggcattaccggaagcacaccggacagaggccatttcgctgtcaattatgtcctagggccttttccagatcagaccacctcgctcttcatatgaagagacatctgtag

SEQ ID NO: 166200 - DNA, 1089 bp, Artificial Sequence
  derived and/or modified sequence
atggcaacggctgagaccgctcttccaagcatttctacgctgacggcactgggcccattcccggatacccaggacgatttcttaaaatggtggaggtcggaagaggcccaggacatggggcctggaccccctgaccctaccgaaccccctctacatgtcaagtccgaagatcagcccggagaggaagaggatgacgagaggggtgccgatgccacctgggacctagatctcctcctgactaacttctctgggcctgagcctgggggagctccgcagacctgtgcactcgccccttcggaagcttcaggagcccagtatccccctccccctgagacacttggagcctatgcaggcggaccaggactcgtggcaggcctgctgggcagtgaggaccactcaggttgggtgagacccgcattgagggcgagagcccctgatgccttcgtggggcctgctctcgcccctgcccctgctcccgagccaaaagctctcgctctgcaacccgtgtatccgggaccgggagcaggctcttctggcggatactttccccgaacgggactctctgtaccggctgcctcaggtgccccttacggcttattgtcagggtaccctgccatgtaccccgctccccagtatcagggccatttccagctgtttcgcggactccaaggcccagcaccaggcccagccacttctccctcattcctgagttgcctcggtccgggtaccgtcggcaccgggctaggtggaacagccgaggaccccggagtgatagcggagacagctccctccaagcgcggtcgcagaagctgggcgcgtaagagacaggcggcacatacctgtgcccaccctggttgcggcaagagctacactaagtccagccatctgaaagcccacctgcgaacacacacgggcgaaaagccgtatgcttgtacttgggaaggttgcggatggcgctttgctcgatctgatgagctgacacgccattacaggaagcatacaggtcagcggcctttccgatgccagctgtgtccgagagccttttctagatccgaccacctggcgctgcacatgaaaaggcatctctag

SEQ ID NO: 166201 - protein, 342 aa, Artificial Sequence
  derived and/or modified sequence
MAEHDYHEDYGFSSFNDSSQEEHQDFLQFSKVFLPCMYLVVFVCGLVGNSLVLVISIFYHKLQSLTDVFLVNLPLADLVFVCTLPFWAYAGIHEWVFGQVMCKSLLGIYTINFYTSMLILTCITVDRFIVVVKATKAYNQQAKRMTWGKVTSLLIWVISLLVSLPQIIYGNVFNLDKLICGYHDEAISTVVLATQMTLGFFLPLLTMIVCYSVIIKTLLHAGGFQKHRSLKIIFLVMAVFLLTQMPFNLMKFIRSTHWEYYAMTSFHYTIMVTEAIAYLRACLNPVLYAFVSLKFRKNFWKLVKDIGCLPYLGVSHQWKSSEDNSKTFSASHNVEATSMFQL

SEQ ID NO: 166202 - DNA, 1029 bp, Artificial Sequence
  derived and/or modified sequence
atggccgagcacgattaccacgaggactacggattcagtagcttcaacgacagttctcaggaggagcaccaggattttctgcaattctcaaaggttttcctgccgtgcatgtaccttgtggtgtttgtctgcggtcttgtgggtaatagcctggtcctggtcatctccatcttttaccataaactccagtccctgacagatgtatttttggtgaacctgcctctggccgatctggtatttgtgtgcaccctcccattttgggcgtacgccggcatccacgaatgggtctttgggcaagtcatgtgtaagtccctgttggggatctacaccataaatttctatacctccatgctgattctgacctgtatcacagttgatagatttatcgtcgtggtgaaagccaccaaagcatataatcagcaagccaagcggatgacctgggggaaggtaacatcacttctgatttgggttatatcattgctggtaagccttcctcagattatctacggtaacgtcttcaacctcgacaagctcatctgcgggtatcacgacgaagctatcagcactgtggtcctcgcaacgcagatgaccctgggattttttctcccattacttaccatgatcgtgtgttattccgtcataatcaagacactgttgcatgctggcggcttccaaaaacaccgaagtctgaagattatcttcctggttatggccgtgtttctattaacacagatgccatttaatctcatgaagttcattcgcagcacccactgggaatattacgcaatgacctccttccattacactatcatggtcaccgaagcgatagcatacctgcgagcttgcctgaatcccgtattgtatgcctttgtgagtctcaagttccgcaagaacttctggaagctggttaaggatattggctgtctaccttacctaggcgtgtcacatcaatggaagtcctccgaggacaacagcaaaactttctccgcctcccataatgtagaagctacaagcatgttccagctgtag

SEQ ID NO: 166203 - DNA, 1029 bp, Artificial Sequence
  derived and/or modified sequence
atggcagaacacgactaccatgaagattatggcttcagtagcttcaacgattcaagccaggaagaacatcaagattttctgcagtttagcaaagtctttctgccgtgcatgtacctggttgtcttcgtctgtggactagtcggcaactcgctagtgctggttatcagcattttctatcataaactgcagagtctcactgacgtctttttggtgaatctgccactcgctgacttggtgtttgtgtgtacacttcctttctgggcttatgccggcattcatgagtgggtgttcgggcaggtgatgtgcaagtcactcctgggaatctatacaataaatttctatacatctatgctgatacttacttgcattaccgtggataggtttatcgtggtggtaaaagccaccaaggcctataaccaacaggccaagagaatgacctggggcaaggtgacttctctgttgatttgggtgatcagcctgctcgtgtcattaccacagatcatctacggcaacgtgttcaaccttgacaaactcatctgcgggtaccacgatgaggccatcagtaccgtggttttagctacgcagatgaccctcgggtttttcctgcctctgctgactatgattgtgtgttacagtgtgatcataaagacactccttcacgctggcggtttccaaaagcacagatctctgaagattatcttcctagttatggccgtgtttttgctgacccaaatgcctttcaaccttatgaaatttatccggagtactcactgggaatattatgccatgacgagcttccactacacaatcatggtcacagaggcgatcgcctatttgcgcgcttgcctgaatcccgtcctatatgcgtttgtctccttgaagttccgcaagaatttctggaagctcgtgaaagatatcggttgcctgccgtatctgggcgtttcgcaccagtggaagagttccgaggacaattcgaagacctttagcgcgtcacacaatgtggaagctacctcgatgtttcaactgtag

SEQ ID NO: 166204 - DNA, 1029 bp, Artificial Sequence
  derived and/or modified sequence
atggccgaacacgactatcacgaggactacgggtttagctcatttaatgacagctctcaggaggaacaccaagatttcctgcaattctcaaaggtctttcttccctgtatgtacctagtcgtcttcgtctgcgggctggtagggaactctttagtcctagttatttcaatcttctatcacaaactgcagagcctcaccgacgttttccttgtgaacttacctctggccgacctcgtttttgtgtgtaccctgccattctgggcttatgctgggatccacgaatgggtgttcgggcaagtgatgtgcaaaagcctattgggcatttatacaatcaatttctacaccagcatgctcattctgacttgcattacggtcgaccgcttcatcgtggtggtgaaagccactaaagcctacaatcaacaagccaagagaatgacttggggcaaagtgacaagtttactaatctgggtcatctctctgctggtttctcttcctcagattatctatggcaacgtttttaatctggataaattaatctgcggctaccacgatgaagcaatctctacagttgtgctggccacccagatgactcttggcttttttttgccattactgactatgatcgtgtgctactccgttataatcaagaccctacttcacgcaggtggattccaaaagcatcgatcattaaaaatcatctttttggtgatggccgtcttcttgctgacccaaatgcccttcaacttaatgaagtttataaggtctacacactgggaatattatgctatgactagcttccattacaccataatggtcaccgaggcgattgcctacttacgagcttgcctgaatcctgtcctgtacgccttcgtcagcttgaagttccgcaaaaacttctggaagctggtcaaggatatcggttgtctgccctatctgggcgttagccaccagtggaagtcgtctgaagataatagcaagaccttctccgcatctcataatgttgaggctacttcaatgtttcagttatag

SEQ ID NO: 166205 - DNA, 1029 bp, Artificial Sequence
  derived and/or modified sequence
atggccgagcatgattaccatgaagattatggcttcagttcatttaatgatagttcccaagaggagcatcaagattttctgcaattcagcaaagtgtttttgccttgtatgtatctggttgtcttcgtatgtggtctggtcggaaatagcctcgttttagtcatctccattttttaccataaactgcagtctctgactgatgtgttcctggtaaatctgcccttagctgacctggtgtttgtttgcaccctcccgttttgggcatatgccggaatccatgagtgggtatttggacaggtaatgtgtaaatcgttgctggggatctatactattaatttttacactagcatgcttattttgacttgcattaccgttgatcgattcatcgtagtcgttaaggctacgaaggcctataatcagcaggccaaaaggatgacatggggaaaagtgacttcgctgctgatctgggttatctcactgttggtgtcccttccccagataatctacgggaacgtgttcaaccttgataaactgatctgtggttaccacgatgaggcgatcagcacagtcgtcttggctacccagatgaccttgggtttcttcttgccgttgctgaccatgattgtgtgctacagcgtgattatcaaaactctgctccacgcagggggtttccagaaacatagatcacttaagatcatttttctagtgatggccgtgttcttattgacccagatgccgtttaatctcatgaaatttatccggtccacacactgggaatattacgccatgaccagctttcactatactatcatggtcacagaggcgatcgcttacctaagagcctgtctgaatcccgtgctctatgcgtttgttagcctcaagttcaggaagaacttttggaaactggtgaaggacatcggttgtctgccatacctgggggttagccatcaatggaagagttccgaggataattctaaaaccttttctgcatcccataatgtggaggccacctccatgtttcagctctag

SEQ ID NO: 166206 - DNA, 1029 bp, Artificial Sequence
  derived and/or modified sequence
atggccgagcatgactaccacgaggactatggcttcagcagcttcaatgacagcagccaggaggagcaccaggacttcctgcagttcagcaaggtgttcctgccctgcatgtacctggtggtgtttgtgtgtggcctggtgggcaacagcctggtgctggtgatcagcatcttctaccacaagctgcagagcctgacagatgtgttcctggtgaacctgcccctggccgacctggtgtttgtgtgcaccctgcccttctgggcctatgccggcatccacgagtgggtgtttggccaggtgatgtgcaagagcctgctgggcatctacaccatcaacttctacacctccatgctgatcctgacctgcatcaccgtggaccgcttcatcgtggtggtgaaggccaccaaggcctacaaccagcaggccaagaggatgacctggggcaaggtgaccagcctgctgatctgggtgatcagcctgctggtgtccctgccccagatcatctatggaaatgtgttcaacctggacaagctgatctgtggctaccatgatgaggccatcagcacagtggtgctggccacccagatgaccctgggcttcttcctgcccctgctgaccatgattgtgtgctacagcgtcatcatcaagaccctgctgcatgctgggggcttccagaagcacaggagcctgaagatcatcttcctggtgatggctgtgttcctgctgacccagatgcccttcaacctgatgaagttcatccgcagcacccactgggagtactatgccatgaccagcttccactacaccatcatggtgacagaggccatcgcctacctgcgggcctgcctgaaccctgtgctgtatgcctttgtgtccctgaagttcaggaagaacttctggaagctggtgaaggacatcggctgcctgccctacctgggcgtgagccaccagtggaagagcagcgaggacaacagcaagaccttcagcgccagccacaacgtggaggccacctccatgttccagctgtag

SEQ ID NO: 166207 - DNA, 1029 bp, Artificial Sequence
  derived and/or modified sequence
atggccgagcacgactaccacgaggactacggcttcagcagcttcaacgactccagccaggaggagcaccaagattttctgcagttttccaaagtcttcctcccttgcatgtatctcgtggtgtttgtttgcggcctggtgggaaactccctggtacttgtcattagcattttttaccataaacttcagtcactcacagacgtgttcctggtgaacctgcccctcgccgatctggtatttgtgtgtactctgcccttttgggcctacgcgggtatccacgagtgggtgtttggacaggtaatgtgtaagtccctgctgggcatttatactatcaatttttacaccagtatgctaatcctcacttgtatcacggtggaccgcttcattgtggttgtgaaagccacgaaagcttacaaccagcaggccaaacggatgacatgggggaaagtcaccagtctgctgatttgggtgatttctctcctggtgagtctgccccagattatttatggcaacgtgtttaacttagataaactgatatgcggataccatgacgaggccataagtactgtggtattagctactcagatgacactgggatttttcctcccactgctcacaatgattgtgtgttactctgtgattataaagacactgctccatgcaggcggctttcagaaacacagatctttgaagattatcttcctggtcatggccgtctttctgctgacgcagatgccctttaacctgatgaaattcatcagaagcactcactgggagtactatgccatgacctcgtttcactatacaattatggtaactgaggccatcgcctatctgagagcgtgcctgaacccagtgctgtatgccttcgtgtcactgaagtttcgaaaaaatttctggaaacttgtcaaagacataggatgcctgccctacctgggggtgagccatcagtggaaaagttcggaagataattcaaagacattctccgcctcacataacgtggaggctacgagtatgtttcagctttag

SEQ ID NO: 166208 - DNA, 1029 bp, Artificial Sequence
  derived and/or modified sequence
atggccgagcacgactaccacgaggactacggcttcagcagcttcaacgattcctcacaggaagaacaccaggacttccttcaattttctaaagttttcttgccatgcatgtatctggtggttttcgtgtgcgggctggtgggcaactctttagtgctagtgatttcaattttctatcacaagcttcagtccctgactgacgttttcctcgtgaacttgcctcttgccgacctggttttcgtctgcacgctccccttctgggcctatgcaggcatacacgagtgggtattcggacaagtaatgtgcaagtccctccttggcatctataccatcaatttctatacaagcatgctgatcctgacgtgcatcaccgtcgataggttcatcgtggtggttaaggccacaaaggcatataaccagcaagccaaacgcatgacatggggcaaagtgacaagcctactgatctgggtgatttcacttcttgtctctctaccacaaatcatttatggtaatgtttttaacctggacaaactgatttgcggatatcacgatgaagccatctcaacggttgtcttggcaacacaaatgactctgggattcttcctgcccttactgactatgattgtctgctattctgttattattaagaccctgctgcacgctggtgggtttcagaagcacagatctctcaaaatcatcttcttggtgatggcagtatttctcctgacacaaatgccatttaacctgatgaagttcataagatctactcattgggagtattacgcaatgacctccttccattatacgattatggtcacggaggcaatcgcctacttgagggcatgtcttaaccctgtgttatatgcatttgtttctcttaaattcaggaaaaacttttggaagctggtgaaagacattggatgccttccatatttgggggtgtctcatcagtggaagagtagcgaagacaatagtaagactttctctgcgagccacaatgtggaagctacatccatgttccagctgtag

SEQ ID NO: 166209 - DNA, 1029 bp, Artificial Sequence
  derived and/or modified sequence
atggccgagcacgactaccacgaggactacggcttcagcagcttcaatgatagtagtcaggaggaacatcaggacttcctgcagtttagcaaggtgttcctgccgtgtatgtatttagtggtgttcgtgtgcggactggttggtaactctctagttttggttatctctatattttaccacaagttgcagtctctaactgacgtgtttttggtgaatctgcccttggctgacctagtgttcgtctgtacgttacccttttgggcatatgctggtattcatgaatgggtcttcggccaggtaatgtgtaaatcacttctcgggatctacacaatcaatttctatacatctatgcttatcctcacctgtataacggtggatcgcttcattgttgtcgtgaaggccactaaagcgtataatcagcaggccaaaaggatgacttggggtaaggtgactagtctcctcatctgggtgatcagcctgcttgttagcctccctcagatcatctacggaaatgtgttcaaccttgacaagctcatatgcggctatcatgatgaagctatctccaccgttgtcctggcaactcaaatgacattaggattctttctgccactgctgacgatgattgtctgctattccgtgattatcaaaactcttctgcatgctggcggctttcaaaaacaccgcagcctgaagatcatcttcctcgtgatggccgtgttcctgctaacacagatgccatttaatcttatgaaattcattagaagcactcattgggaatattatgccatgacaagtttccattatacgatcatggtgactgaagctatcgcttacctcagggcatgtctaaatccagtcctgtatgcttttgtatctttgaaattcaggaagaacttttggaagctggtaaaggatatcgggtgcttgccctatctcggggtgagccatcagtggaaatcctccgaggacaattcaaagacgttctctgcctcccacaacgtagaagctacttctatgtttcagctgtag

SEQ ID NO: 166210 - DNA, 1029 bp, Artificial Sequence
  derived and/or modified sequence
atggccgagcacgactaccacgaggactacggcttcagcagcttcaacgattcctctcaggaggagcaccaggactttctacagttttccaaagtctttcttccgtgtatgtacttggtcgtgttcgtgtgcgggcttgttggcaatagtctggtgttagttatctcaattttctatcacaagctccagtccctgacggacgtgtttctagtaaatctgccgctggctgatctcgtgtttgtgtgcaccctgcccttctgggcttatgctgggatccacgagtgggtgttcggtcaggtcatgtgcaagagtttgctgggcatttacacaatcaatttttacacttcaatgctgattctcacctgcatcaccgtggaccgatttatcgtggtggtgaaggcaacaaaagcctacaatcagcaggctaaacgcatgacatggggcaaagttacgagtctgcttatatgggtgatttccttactggtgagtttgccccaaattatttacggcaatgtgtttaatttagataagttgatctgtggctaccacgacgaggccatttcaactgtggtgcttgcaacgcaaatgacacttggattttttctaccgctgctcactatgattgtctgttactctgtcattataaaaactctgcttcacgcaggtggattccagaagcaccggagtctgaaaattatattcctcgtgatggcggttttccttttgactcagatgcctttcaatctgatgaagttcatccgatccacacactgggagtactatgcaatgacatcatttcactataccatcatggtgactgaagcaatcgcatacttgagagcctgtctgaaccccgttttgtacgccttcgtgtcattgaagtttcggaagaatttttggaagctggtgaaagatattggctgtctgccgtatctgggagtatcgcatcagtggaaaagctccgaagataacagcaagactttttcggccagtcacaacgtcgaagcaacatccatgtttcagctctag

SEQ ID NO: 166211 - DNA, 1029 bp, Artificial Sequence
  derived and/or modified sequence
atggcagaacacgattatcacgaggattatgggttctccagcttcaacgactcgtcacaggaggagcatcaagattttctgcaattctccaaagttttcctgccttgcatgtacctcgttgtatttgtgtgcggtctcgtgggaaactcattagtgctagtcatttctatcttttaccataagctgcaaagcctcacggacgtgttcctcgtcaatctccccctggcagatttagtttttgtgtgcacgttgcctttctgggcctatgccggaatccacgagtgggtcttcgggcaagtcatgtgcaagtctttgttaggcatctacactattaatttctacacttctatgctgattctcacttgcattaccgtcgatcggttcatcgtggtggtgaaagccactaaggcttacaaccaacaggccaagcgcatgacttgggggaaggtgacttccctgttgatctgggttataagtctgcttgttagtctgccccagataatctatgggaatgtgttcaatctggacaaactgatctgcgggtatcatgacgaagcaatctcgacagtcgtattggccacccaaatgacactgggattcttcctcccgctgctcaccatgatcgtgtgctacagcgtcatcattaagacactgttacacgccggaggattccagaaacacagatcactcaagattattttcctcgtcatggccgtgtttctgttgacccagatgccgtttaacttgatgaagtttataagatctactcactgggaatattatgcaatgacatccttccactataccattatggtcaccgaagctatcgcttatctgcgggcatgtcttaatcccgtattgtacgccttcgtgtccctcaagtttcggaagaatttttggaagttggtgaaggatatagggtgccttccataccttggcgtgagccatcagtggaaatcgtccgaagacaacagtaagactttttcagcaagccacaacgtagaagctacttcaatgtttcaactgtag

SEQ ID NO: 166212 - DNA, 1029 bp, Artificial Sequence
  derived and/or modified sequence
atggctgaacatgattaccacgaggattacggctttagctctttcaatgattctagccaagaagaacaccaagatttcctgcagttctcaaaggtgttcctcccttgcatgtacttagtggtgttcgtgtgtgggttagtgggcaatagtctggttctagtgatatctattttttatcacaagctccaatccctgacagacgtgttcctggttaacttgccactggctgacttagttttcgtatgcacattaccgttttgggcatacgccggtattcatgagtgggtcttcggccaagttatgtgcaagtcattgctgggcatctacactattaacttctatacctctatgttaatccttacctgcattaccgtcgataggttcattgtggtggtgaaagctacaaaagcctacaaccagcaagccaagcgcatgacttggggtaaggtgacaagcctactgatttgggtaattagcctgctggtgtcgctcccacagatcatatatggtaatgtgttcaatctcgataaactgatctgtggataccacgatgaggcgatatctaccgtcgtgctcgcaacccaaatgaccctggggttttttctgcccttgttaactatgattgtctgttattcggtcatcattaagaccttgttacatgcgggaggatttcagaagcatagatcgctgaagattattttcctggttatggccgtatttctgctaactcagatgccttttaatctcatgaagtttatccgatctacccactgggagtactacgccatgacctcctttcactacactattatggtcactgaggccattgcatatcttcgtgcttgcctgaaccccgtgctttatgcctttgtcagcctcaaattcagaaaaaatttctggaagttggtcaaagatatcggctgcttaccctacctgggcgtgtcacaccagtggaagtcctccgaagacaatagcaaaacattttccgcctcccacaatgtggaggccacatctatgtttcagctgtag

SEQ ID NO: 166213 - DNA, 1029 bp, Artificial Sequence
  derived and/or modified sequence
atggctgagcacgactaccacgaggactatggcttcagcagtttcaatgactcaagccaggaagagcaccaggacttcttgcaatttagtaaagtcttcctgccttgtatgtacctggtcgtgtttgtgtgcgggctcgtaggtaacagcttggtgctggtgatatccattttctaccacaaattgcagagtctgacagatgtgtttcttgtgaaccttccactggccgacctggttttcgtgtgcaccctccctttctgggcttatgccggaattcatgagtgggtgtttggacaggtgatgtgcaaaagtttactgggaatttataccataaatttctacacctccatgcttatactaacttgcatcactgtggatagattcattgtggtggtcaaagccacaaaggcctataaccagcaggcaaagcgcatgacctggggaaaagtcacttccctgctcatctgggtgatctcacttctagtgagtctgccgcaaatcatctacggtaacgtgttcaacttagataagctcatttgtggataccacgatgaagctatttccaccgtggtgctggctacgcagatgaccttaggattcttcctcccactgctgacaatgatagtttgctatagtgtcatcattaagactttactccacgccggaggctttcagaaacacagaagccttaagataatcttcttggtaatggcggtgtttctcctgacgcagatgccgttcaatctgatgaagttcatacgcagcacccattgggagtattacgccatgacctccttccattacaccattatggtgactgaggcgatcgcatatctgagggcctgtctgaaccctgtactgtacgcttttgtgtccctgaaattccgaaaaaacttttggaaattggtgaaggacattggctgtctgccttatctcggggtatcccaccagtggaagagcagcgaagacaactctaaaactttcagcgcttcacacaatgtcgaggcaacctctatgtttcagctctag

SEQ ID NO: 166214 - DNA, 1029 bp, Artificial Sequence
  derived and/or modified sequence
atggccgagcacgactaccatgaagattatggcttttcttcctttaatgactccagccaggaggaacaccaggacttccttcagttcagcaaggtgtttctgccttgcatgtaccttgtggtgtttgtgtgcggcctagtaggcaattccttggtactggtgatttcaatattttaccataagctacagagcctgacagatgtgtttctggttaatctacccctggccgacctggtcttcgtgtgtacactgcccttttgggcctatgctggaatccatgaatgggtctttggacaagtgatgtgtaaaagcctgttgggcatttacaccatcaatttctatacctctatgctcattctgacttgcatcacagtagatagattcatcgtggtggtgaaggctaccaaggcctataatcagcaggccaaaagaatgacttgggggaaggtgacctccctgctgatctgggtgatttccttgctggtgtcgttaccgcaaatcatctatggaaatgtgtttaaccttgacaaattaatatgcggctatcatgacgaggcaatctcgacagtggtgcttgccacccagatgactctgggcttcttcctgcccctgctcaccatgatcgtttgctacagcgtcatcataaagaccctgcttcatgcgggtgggtttcagaaacacaggtccctgaagatcattttcctagtgatggccgtgttcttacttacccagatgccattcaacttgatgaagttcattcggtccacccactgggagtattacgctatgacaagctttcattatacaatcatggtgaccgaggcaatcgcttaccttcgcgcttgtcttaaccctgtcctgtacgcgtttgtcagcttgaaattccggaagaacttctggaaactggtgaaggacataggctgccttccctatctcggggtcagtcaccaatggaagtcgtccgaagacaactccaagactttcagcgcatctcataacgttgaggctacatccatgtttcagctgtag

SEQ ID NO: 166215 - DNA, 1962 bp, Artificial Sequence
  derived and/or modified sequence
gaagtagaggcagaccttgcttcatgagcaagctcatctctggaacaaactggcaaagcatctctgctggtgttcatcagaacagacaccatggcagagcatgattaccatgaagactatgggttcagcagtttcaatgacagcagccaggaggagcatcaagacttcctgcagttcagcaaggtctttctgccctgcatgtacctggtggtgtttgtctgtggtctggtggggaactctctggtgctggtcatatccatcttctaccataagttgcagagcctgacggatgtgttcctggtgaacctacccctggctgacctggtgtttgtctgcactctgcccttctgggcctatgcaggcatccatgaatgggtgtttggccaggtcatgtgcaagagcctactgggcatctacactattaacttctacacgtccatgctcatcctcacctgcatcactgtggatcgtttcattgtagtggttaaggccaccaaggcctacaaccagcaagccaagaggatgacctggggcaaggtcaccagcttgctcatctgggtgatatccctgctggtttccttgccccaaattatctatggcaatgtctttaatctcgacaagctcatatgtggttaccatgacgaggcaatttccactgtggttcttgccacccagatgacactggggttcttcttgccactgctcaccatgattgtctgctattcagtcataatcaaaacactgcttcatgctggaggcttccagaagcacagatctctaaagatcatcttcctggtgatggctgtgttcctgctgacccagatgcccttcaacctcatgaagttcatccgcagcacacactgggaatactatgccatgaccagctttcactacaccatcatggtgacagaggccatcgcatacctgagggcctgccttaaccctgtgctctatgcctttgtcagcctgaagtttcgaaagaacttctggaaacttgtgaaggacattggttgcctcccttaccttggggtctcacatcaatggaaatcttctgaggacaattccaagactttttctgcctcccacaatgtggaggccaccagcatgttccagttataggccttgccagggtttcgagaagctgctctggaatttgcaagtcatggctgtgccctcttgatgtggtgaggcaggctttgtttatagcttgcgcattctcatggagaagttatcagacactctggctggtttggaatgcttcttctcaggcatgaacatgtactgttctcttcttgaacactcatgctgaaagcccaagtagggggtctaaaatttttaaggactttccttcctccatctccaagaatgctgaaaccaagggggatgacatgtgactcctatgatctcaggttctccttgattgggactggggctgaaggttgaagaggtgagcacggccaacaaagctgttgatggtaggtggcacactgggtgcccaagctcagaaggctcttctgactactgggcaaagagtgtagatcagagcagcagtgaaaacaagtgctggcaccaccaggcacctcacagaaatgagatcaggctctgcctcaccttggggcttgacttttgtataggtagatgttcagattgctttgattaatccagaataactagcaccagggactatgaatgggcaaaactgaattataagaggctgataattccagtggtccatggaatgcttgaaaaatgtgcaaaacagcgtttaagactgtaatgaatctaagcagcatttctgaagtggactctttggtggctttgcattttaaaaatgaaattttccaatgtctgccacacaaacgtatgtaaatgtatatacccacacacatacacacatatgtcatatattactagcatatgagtttcatagctaagaaataaaactgttaaagtctccaaact

SEQ ID NO: 166216 - DNA, 2242 bp, Artificial Sequence
  derived and/or modified sequence
gtcaacccctgtacgcggtttccttctcctgctctcctgcttatagaacaattgttcctccagaacaattcctctcagccatagtggctctgctcccaccagatgatctctcagctcatcctggtgacttgcaggggtacaggtctgccggctatgttgcccaggctggcctcaaactcctggcttcaatgatcctctcatcttagcctcttgagtactgggactataagtgcccactgccacgcctggctggttaggctacttttctgtggatcacagcccatcatccaccaatgccttgccaacaactgtaaatgtctcatccctgaatcctggaactgataacagctctgccaggtcttcaggtgttcatcagaacagacaccatggcagagcatgattaccatgaagactatgggttcagcagtttcaatgacagcagccaggaggagcatcaagacttcctgcagttcagcaaggtctttctgccctgcatgtacctggtggtgtttgtctgtggtctggtggggaactctctggtgctggtcatatccatcttctaccataagttgcagagcctgacggatgtgttcctggtgaacctacccctggctgacctggtgtttgtctgcactctgcccttctgggcctatgcaggcatccatgaatgggtgtttggccaggtcatgtgcaagagcctactgggcatctacactattaacttctacacgtccatgctcatcctcacctgcatcactgtggatcgtttcattgtagtggttaaggccaccaaggcctacaaccagcaagccaagaggatgacctggggcaaggtcaccagcttgctcatctgggtgatatccctgctggtttccttgccccaaattatctatggcaatgtctttaatctcgacaagctcatatgtggttaccatgacgaggcaatttccactgtggttcttgccacccagatgacactggggttcttcttgccactgctcaccatgattgtctgctattcagtcataatcaaaacactgcttcatgctggaggcttccagaagcacagatctctaaagatcatcttcctggtgatggctgtgttcctgctgacccagatgcccttcaacctcatgaagttcatccgcagcacacactgggaatactatgccatgaccagctttcactacaccatcatggtgacagaggccatcgcatacctgagggcctgccttaaccctgtgctctatgcctttgtcagcctgaagtttcgaaagaacttctggaaacttgtgaaggacattggttgcctcccttaccttggggtctcacatcaatggaaatcttctgaggacaattccaagactttttctgcctcccacaatgtggaggccaccagcatgttccagttataggccttgccagggtttcgagaagctgctctggaatttgcaagtcatggctgtgccctcttgatgtggtgaggcaggctttgtttatagcttgcgcattctcatggagaagttatcagacactctggctggtttggaatgcttcttctcaggcatgaacatgtactgttctcttcttgaacactcatgctgaaagcccaagtagggggtctaaaatttttaaggactttccttcctccatctccaagaatgctgaaaccaagggggatgacatgtgactcctatgatctcaggttctccttgattgggactggggctgaaggttgaagaggtgagcacggccaacaaagctgttgatggtaggtggcacactgggtgcccaagctcagaaggctcttctgactactgggcaaagagtgtagatcagagcagcagtgaaaacaagtgctggcaccaccaggcacctcacagaaatgagatcaggctctgcctcaccttggggcttgacttttgtataggtagatgttcagattgctttgattaatccagaataactagcaccagggactatgaatgggcaaaactgaattataagaggctgataattccagtggtccatggaatgcttgaaaaatgtgcaaaacagcgtttaagactgtaatgaatctaagcagcatttctgaagtggactctttggtggctttgcattttaaaaatgaaattttccaatgtctgccacacaaacgtatgtaaatgtatatacccacacacatacacacatatgtcatatattactagcatatgagtttcatagctaagaaataaaactg

SEQ ID NO: 166217 - DNA, 1184 bp, Artificial Sequence
  derived and/or modified sequence
agcatccttccttgctagagagaaagggcactttggtccctggaaagacagaggcaagcagcagcatcggagacactgctcccagtcaggactcaaagtcagcgacagaagtgtttctgagtggattaggaaaggtgttcatcagaacagacaccatggcagagcatgattaccatgaagactatgggttcagcagtttcaatgacagcagccaggaggagcatcaagacttcctgcagttcagcaaggtctttctgccctgcatgtacctggtggtgtttgtctgtggtctggtggggaactctctggtgctggtcatatccatcttctaccataagttgcagagcctgacggatgtgttcctggtgaacctacccctggctgacctggtgtttgtctgcactctgcccttctgggcctatgcaggcatccatgaatgggtgtttggccaggtcatgtgcaagagcctactgggcatctacactattaacttctacacgtccatgctcatcctcacctgcatcactgtggatcgtttcattgtagtggttaaggccaccaaggcctacaaccagcaagccaagaggatgacctggggcaaggtcaccagcttgctcatctgggtgatatccctgctggtttccttgccccaaattatctatggcaatgtctttaatctcgacaagctcatatgtggttaccatgacgaggcaatttccactgtggttcttgccacccagatgacactggggttcttcttgccactgctcaccatgattgtctgctattcagtcataatcaaaacactgcttcatgctggaggcttccagaagcacagatctctaaagatcatcttcctggtgatggctgtgttcctgctgacccagatgcccttcaacctcatgaagttcatccgcagcacacactgggaatactatgccatgaccagctttcactacaccatcatggtgacagaggccatcgcatacctgagggcctgccttaaccctgtgctctatgcctttgtcagcctgaagtttcgaaagaacttctggaaacttgtgaaggacattggttgcctcccttaccttggggtctcacatcaatggaaatcttctgaggacaattccaagactttttctgcctcccacaatgtggaggccaccagcatgttccagttatag

SEQ ID NO: 166218 - DNA, 2805 bp, Artificial Sequence
  derived and/or modified sequence
atttttattaagcagtcttagcccaaaggcagcatccttccttgctagagagaaagggcactttggtccctggaaagacagaggcaagcagcagcatcggagacactgctcccagtcaggactcaaagtcagcgacagaagtgtttctgagtggattaggaaaggtaacctcatcgtttatatgcacttgtctggtcaggcaatattttgactttgctggcagagattctgtccaaacacctgctcttcttcatacatcttctagaggtgctggccagacatggctccaggtcactggaaatgagctgctgcatgttgagtatctgcagtcctgtagcaagggcagacttggcactcatgggctgatgttgccgcagctgcccctgctcccacaccacaggttacatgatcccttgtcctgtccatggtctttggcagggtcacagggcagagggaagggtcagagagaagtgacatcttgaagggctggtgccctgggtaagaaaggttgcccatctggcatcccatttcaattgggttttctgcttgttaaatgaggcccctaagtcctaacctgccaatcacaggagctaaggcaaggttccgctttggggaaatctaccttttaagagacttcttgttcagaagtcttcaggaaatgaggctctgatggtagaatgccataaactgtgttaactgatgaaggggaaagtttagttgggaagtgaggagaaccacccaatgctttaaccatgaagccagctcagccaaagtgctgggcagtcgtgggcttttctatgctttgtttccccattagtagcctttgaaaatctatgcaattgaggggaagtaaaggcaggaaggactacctacccaggcagagcagtcttgccatccccaaacacctgtggtctccaggagtctccttgataggagagccccctggtaggggcacttgctttagctttcacaatttattaggaaatggggctcaggatgggtgggcaactgtggtgaggcagggggagatgaaaacaggcatgttccattgatgagctcatattatcagtgggctcaaccatccatcatcagtgttgctcttccaaacagcactgtgcccacctggcagcaaagcgacttttggtttcaaaataattgagcacaggattttatggaatgtgcttaggggtcagttatgagttgtctcccagatgggtgagatcctgagaattttcaggctaatggagagtcctcatcctgtctgagcaatttcccctcagaattggttatcttcaatatactggactgtgctgtttctacacatcccagtgggtgggtttagaagatgactatttgccccctaaatgtggtcaatgggatagcaggaagacaaagaatgccatcctcagccccaaatataattcctgggttctgactcacaggtgttcatcagaacagacaccatggcagagcatgattaccatgaagactatgggttcagcagtttcaatgacagcagccaggaggagcatcaagacttcctgcagttcagcaaggtctttctgccctgcatgtacctggtggtgtttgtctgtggtctggtggggaactctctggtgctggtcatatccatcttctaccataagttgcagagcctgacggatgtgttcctggtgaacctacccctggctgacctggtgtttgtctgcactctgcccttctgggcctatgcaggcatccatgaatgggtgtttggccaggtcatgtgcaagagcctactgggcatctacactattaacttctacacgtccatgctcatcctcacctgcatcactgtggatcgtttcattgtagtggttaaggccaccaaggcctacaaccagcaagccaagaggatgacctggggcaaggtcaccagcttgctcatctgggtgatatccctgctggtttccttgccccaaattatctatggcaatgtctttaatctcgacaagctcatatgtggttaccatgacgaggcaatttccactgtggttcttgccacccagatgacactggggttcttcttgccactgctcaccatgattgtctgctattcagtcataatcaaaacactgcttcatgctggaggcttccagaagcacagatctctaaagatcatcttcctggtgatggctgtgttcctgctgacccagatgcccttcaacctcatgaagttcatccgcagcacacactgggaatactatgccatgaccagctttcactacaccatcatggtgacagaggccatcgcatacctgagggcctgccttaaccctgtgctctatgcctttgtcagcctgaagtttcgaaagaacttctggaaacttgtgaaggacattggttgcctcccttaccttggggtctcacatcaatggaaatcttctgaggacaattccaagactttttctgcctcccacaatgtggaggccaccagcatgttccagttataggccttgccagggtttcgagaagctgctctggaatttgcaagtcatggctgtgccctcttgatgtggtgaggcaggctttgtttatagcttgcgcattctcatggagaagttatcagacactctggctggtttggaatgcttcttctcaggcatgaacatgtactgttctcttcttgaacactcatgctgaaagcccaagtagggggtctaaaatttttaaggactttccttcctccatctccaagaatgctgaaaccaagggggatgacatgtgactcctatgatctcaggttctccttgattgggactgggg

SEQ ID NO: 166219 - DNA, 1029 bp, Artificial Sequence
  derived and/or modified sequence
atggccgagcacgactaccacgaggactacggcttcagcagcttcaacgacagcagccaggaggagcaccaggacttcctgcagttcagcaaggtgttcctgccctgcatgtacctggtggtgttcgtgtgcggcctggtgggcaacagcctggtgctggtgatcagcatcttctaccacaagctgcagagcctgaccgacgtgttcctggtgaacctgcccctggccgacctggtgttcgtgtgcaccctgcccttctgggcctacgccggcatccacgagtgggtgttcggccaggtgatgtgcaagagcctgctgggcatctacaccatcaacttctacaccagcatgctgatcctgacctgcatcaccgtggacagattcatcgtggtggtgaaggccaccaaggcctacaaccagcaggccaagagaatgacctggggcaaggtgaccagcctgctgatctgggtgatcagcctgctggtgagcctgccccagatcatctacggcaacgtgttcaacctggacaagctgatctgcggctaccacgacgaggccatcagcaccgtggtgctggccacccagatgaccctgggcttcttcctgcccctgctgaccatgatcgtgtgctacagcgtgatcatcaagaccctgctgcacgccggcggcttccagaagcacagaagcctgaagatcatcttcctggtgatggccgtgttcctgctgacccagatgcccttcaacctgatgaagttcatcagaagcacccactgggagtactacgccatgaccagcttccactacaccatcatggtgaccgaggccatcgcctacctgagagcctgcctgaaccccgtgctgtacgccttcgtgagcctgaagttcagaaagaacttctggaagctggtgaaggacatcggctgcctgccctacctgggcgtgagccaccagtggaagagcagcgaggacaacagcaagaccttcagcgccagccacaacgtggaggccaccagcatgttccagctgtag

SEQ ID NO: 166220 - protein, 727 aa, Artificial Sequence
  derived and/or modified sequence
MEGDAVEAIVEESETFIKGKERKTYQRRREGGQEEDACHLPQNQTDGGEVVQDVNSSVQMVMMEQLDPTLLQMKTEVMEGTVAPEAEAAVDDTQIITLQVVNMEEQPINIGELQLVQVPVPVTVPVATTSVEELQGAYENEVSKEGLAESEPMICHTLPLPEGFQVVKVGANGEVETLEQGELPPQEDPSWQKDPDYQPPAKKTKKTKKSKLRYTEEGKDVDVSVYDFEEEQQEGLLSEVNAEKVVGNMKPPKPTKIKKKGVKKTFQCELCSYTCPRRSNLDRHMKSHTDERPHKCHLCGRAFRTVTLLRNHLNTHTGTRPHKCPDCDMAFVTSGELVRHRRYKHTHEKPFKCSMCDYASVEVSKLKRHIRSHTGERPFQCSLCSYASRDTYKLKRHMRTHSGEKPYECYICHARFTQSGTMKMHILQKHTENVAKFHCPHCDTVIARKSDLGVHLRKQHSYIEQGKKCRYCDAVFHERYALIQHQKSHKNEKRFKCDQCDYACRQERHMIMHKRTHTGEKPYACSHCDKTFRQKQLLDMHFKRYHDPNFVPAAFVCSKCGKTFTRRNTMARHADNCAGPDGVEGENGGETKKSKRGRKRKMRSKKEDSSDSENAEPDLDDNEDEEEPAVEIEPEPEPQPVTPAPPPAKKRRGRPPGRTNQPKQNQPTAIIQVEDQNTGAIENIIVEVKKEPDAEPAEGEEEEAQPAATDAPNGDLTPEMILSMMDR

SEQ ID NO: 166221 - DNA, 3797 bp, Artificial Sequence
  derived and/or modified sequence
gtgtctgagcctgtggagcgattaaaccgtgcgcggagctgcttctttggcggcagcggcggcggcggtggccggtgcggacgcgcggagctcgccggagacgccgggtggccggagccgtggagcggcggcggagcgggcgccgcggggggtgtggcgcggagaatgattacggacctgaagccaaagaacaagatgcgctagtggacagattgctgaccaggggcttgagagctgggttctattttccctcctcaaactgactttgcagccacggagaggcaggggaaatggaaggtgatgcagtcgaagccattgtggaggagtccgaaacttttattaaaggaaaggagagaaagacttaccagagacgccgggaagggggccaggaagaagatgcctgccacttaccccagaaccagacggatgggggtgaggtggtccaggatgtcaacagcagtgtacagatggtgatgatggaacagctggaccccacccttcttcagatgaagactgaagtaatggagggcacagtggctccagaagcagaggctgctgtggacgatacccagattataactttacaggttgtaaatatggaggaacagcccataaacataggagaacttcagcttgttcaagtacctgttcctgtgactgtacctgttgctaccacttcagtagaagaacttcagggggcttatgaaaatgaagtgtctaaagagggccttgcggaaagtgaacccatgatatgccacaccctacctttgcctgaagggtttcaggtggttaaagtgggggccaatggagaggtggagacactagaacaaggggaacttccaccccaggaagatcctagttggcaaaaagacccagactatcagccaccagccaaaaaaacaaagaaaaccaaaaagagcaaactgcgttatacagaggagggcaaagatgtagatgtgtctgtctacgattttgaggaagaacagcaggagggtctgctatcagaggttaatgcagagaaagtggttggtaatatgaagcctccaaagccaacaaaaattaaaaagaaaggtgtaaagaagacattccagtgtgagctttgcagttacacgtgtccacggcgttcaaatttggatcgtcacatgaaaagccacactgatgagagaccacacaagtgccatctctgtggcagggcattcagaacagtcaccctcctgaggaatcaccttaacacacacacaggtactcgtcctcacaagtgcccagactgcgacatggcctttgtgaccagtggagaattggttcggcatcgtcgttacaaacacacccacgagaagccattcaagtgttccatgtgcgattacgccagtgtagaagtcagcaaattaaaacgtcacattcgctctcatactggagagcgtccgtttcagtgcagtttgtgcagttatgccagcagggacacatacaagctgaaaaggcacatgagaacccattcaggggaaaagccttatgaatgttatatttgtcatgctcggtttacccaaagtggtaccatgaagatgcacattttacagaagcacacagaaaatgtggccaaatttcactgtccccactgtgacacagtcatagcccgaaaaagtgatttgggtgtccacttgcgaaagcagcattcctatattgagcaaggcaagaaatgccgttactgtgatgctgtgtttcatgagcgctatgccctcatccagcatcagaagtcacacaagaatgagaagcgctttaagtgtgaccagtgtgattacgcttgtagacaggagaggcacatgatcatgcacaagcgcacccacaccggggagaagccttacgcctgcagccactgcgataagaccttccgccagaagcagcttctcgacatgcacttcaagcgctatcacgaccccaacttcgtccctgcggcttttgtctgttctaagtgtgggaaaacatttacacgtcggaataccatggcaagacatgctgataattgtgctggcccagatggcgtagagggggaaaatggaggagaaacgaagaagagtaaacgtggaagaaaaagaaagatgcgctctaagaaagaagattcctctgacagtgaaaatgctgaaccagatctggacgacaatgaggatgaggaggagcctgccgtagaaattgaacctgagccagagcctcagcctgtgaccccagccccaccacccgccaagaagcggagaggacgaccccctggcagaaccaaccagcccaaacagaaccagccaacagctatcattcaggttgaagaccagaatacaggtgcaattgagaacattatagttgaagtaaaaaaagagccagatgctgagcccgcagagggagaggaagaggaggcccagccagctgccacagatgcccccaacggagacctcacgcccgagatgatcctcagcatgatggaccggtgatggcggagccttgtgcgtcgccaggacttctctgggctgtgtttaaacggcccgcatcttaatttttctcccttctttctttttttggctttgggaaaagcatcattttaccaaacataccgagaacgaaaacttcaaggatgatgttagaaaaaaatgtgatttaactagaacttgctgtctgatgttagcaaatcatggaatgttctgagtccctgagggtttactgtgaagtgctgaggacagtgttgacaactaactcgttttcctagatggaaacggagacattgacccctccctccatgtggtaaaccactccagaatggccaccaggcttcccagagttctatggtcttcttcccaagagagtttttaattgtaaatgcatacttgggaaggacttagagttttaaactgttttttgcttttgcttttccctgactccctttgcttggagtcagctgcacaccagtagtatggcatgctacgatcaggttctgtcctgaaagctttgcctctttcttggcaaagtttctggtatggtcaagcttgtaaataactttttttacattttaatcttttccattaattaagaggttgaaaagaagtgcagtgtaagaaaacccagcattttaattacttgcaaattaagttaccacagactctgtagtgtgtaaatgttgacaaggaattggatcacaatcatgtagcagaatggcacccagaccactgcccaccagtgacggacatgcacgtggcagatcatgatttccagcccacggagccagcatttgaaccttgtataattaactttcagttatgatttcccatcgacattttctttgccctgtttgtagctgattgttgtgttttataaatcttctgttaaggcagaagggtgattatgagtggttcacagcagcccttataagctgggccagaaaatttcactaggtcagtaatttaaaccttggatcttcaaaaaataaaataatgtgaagcaaaaccaactaaaaagtgattcttgcacatgaactgtcacatgtttaaaaatgtgttttttagagagcctcagtcttactgatttcaaacacttttttcttctgtgtattgcttttaagagagccatcagttagctatcagactctaggttgatgcattttgtacttagctgtactgtgtgatatttttcattattttaggacgccaacatgagacctgtaataaaatatgtaatggggttgaaagctggggaggaggatctactgctgtacagctaataaatcataacggattaacaagtgctccaaagaaaaaaaaaaa

SEQ ID NO: 166222 - DNA, 2184 bp, Artificial Sequence
  derived and/or modified sequence
atggaaggcgatgcggtagaagcaatagttgaggagagtgaaacgtttataaagggcaaggagaggaagacgtaccagaggcgtcgcgaggggggacaggaggaagatgcttgccacctgccccagaaccagaccgacggtggcgaagttgttcaggatgtcaattctagcgtgcagatggtaatgatggagcaattagatccaaccctgctccagatgaagaccgaagtcatggaaggtacagttgcaccggaagccgaggccgcagtcgacgatacccaaattataacactgcaggtggtgaacatggaagagcagcctattaacatcggagaactgcaactggtccaagtgcctgtgcccgtgacagttcccgtggctaccacttctgtggaagagttacagggggcatatgagaatgaagtctccaaggagggcctggcagaatctgagcctatgatctgccatacactgccgctccctgaggggttccaggtggtgaaagtcggcgccaatggagaggtcgagaccctcgaacagggagagcttcctccgcaggaggacccatcttggcaaaaggacccagactaccagcccccagcgaagaagaccaagaagacaaagaaaagcaagcttagatacaccgaggaaggaaaggatgtggatgtatccgtctatgacttcgaggaggaacagcaggagggcttactgtctgaggtgaatgcggaaaaagttgtggggaatatgaaaccgcctaaacccacaaagattaaaaaaaagggagttaagaaaacatttcagtgcgagctatgctcttacacctgccccagacgatccaacctggataggcatatgaagtcacataccgacgagcggccccacaagtgtcatctgtgcggtcgagcattccggaccgtcaccttactgcgcaatcatcttaacacgcatactgggactcgacctcacaagtgtcccgactgtgacatggccttcgtcacatctggcgagctggttaggcacaggaggtataagcacacgcatgagaagccattcaagtgcagtatgtgcgattacgcctctgtggaagtgagtaagctgaagcgccacatccgttcccacacaggggagaggcccttccagtgctccctgtgtagctatgcaagcagagacacatacaaactcaagcggcatatgcgcacacattcaggagagaagccatacgaatgctatatttgccatgctaggtttacccagtccgggactatgaaaatgcacattctacagaagcataccgagaacgtggctaagttccactgcccacactgtgacacagtcatcgccaggaaatcagaccttggtgtgcatctgcggaagcaacattcttacatcgagcaaggtaagaagtgccgttattgtgatgcagtgttccacgagcgttacgccctcatccaacaccaaaaatcccacaagaatgaaaaacggttcaagtgtgaccagtgcgattacgcatgtaggcaggaaagacatatgatcatgcacaaacggacacacaccggcgaaaagccatatgcttgttctcactgcgacaagacctttcggcagaagcaactgttagatatgcatttcaagcgttatcacgatcctaactttgtgccagccgcatttgtttgtagtaaatgtggcaagacctttacgagacggaacacaatggcacgccacgctgacaactgcgccggacctgatggggtcgaaggtgaaaacggcggggagaccaagaaaagcaagaggggtcggaagagaaagatgaggtcaaagaaggaggatagcagtgactctgagaatgccgagcctgatctcgatgataacgaggatgaggaagagccagccgtggaaatagagcccgaacccgagccacaacccgtcactccagccccgccaccagctaaaaagagaaggggaagaccaccaggtaggactaatcagccaaaacagaaccagcccacggctatcatacaagtggaggaccagaataccggagccatcgagaatatcatagtggaggtcaaaaaggagccagatgccgagcctgcagaaggcgaggaagaagaggcacagcccgctgctacagacgcaccgaacggcgacctcacacccgaaatgatcttaagcatgatggaccgctag

SEQ ID NO: 166223 - DNA, 2184 bp, Artificial Sequence
  derived and/or modified sequence
atggagggagatgctgtggaggccatcgtggaggagagcgagaccttcatcaagggcaaggagaggaagacctaccagaggcggcgggagggcggccaggaggaggatgcctgccacctgccccagaaccagacagatggaggagaggtggtgcaggatgtgaacagctctgtgcagatggtgatgatggagcagctggaccccaccctgctgcagatgaagacagaggtgatggagggcaccgtggcccctgaggccgaggccgctgtggatgacacccagatcatcaccctgcaggtggtgaacatggaggagcagcccatcaacatcggggagctgcagctggtgcaggtgcctgtgcctgtgacagtgcctgtggccaccacctctgtggaggagctgcagggcgcctatgaaaatgaggtgtccaaggagggcctggccgagagcgagcccatgatctgccacaccctgcccctgcctgagggcttccaggtggtgaaggtgggcgccaacggggaggtggagaccctggagcagggcgagctgcccccccaggaggaccccagctggcagaaggaccctgactaccagcccccagccaagaagaccaagaagaccaagaagagcaagctgcgctacacagaggagggcaaggatgtggatgtgtctgtgtatgactttgaggaggagcagcaggagggcctgctgtctgaggtgaatgctgagaaggtggtgggcaacatgaagccacccaagcccaccaagatcaagaagaagggcgtgaagaagaccttccagtgtgagctgtgcagctacacctgccccaggaggagcaacctggacagacacatgaagagccacacagatgagcggccccacaagtgccacctgtgtggccgggccttcagaacagtgaccctgctgaggaaccacctgaacacccacacaggcacccggccccacaagtgcccagactgtgacatggcctttgtgaccagcggggagctggtgcgccaccggcgctacaagcacacccatgagaagcccttcaagtgcagcatgtgtgactatgcctctgtggaggtgtccaagctgaagaggcacatccgcagccacactggagagcggcccttccagtgcagcctgtgcagctatgccagccgggacacctacaagctgaagaggcacatgaggacccacagcggggagaagccctatgagtgctacatctgccacgcccgcttcacccagagcggcaccatgaagatgcacatcctgcagaagcacacagaaaatgtggccaagttccactgcccccactgtgacaccgtcatcgccaggaagagtgacctgggcgtgcacctgaggaagcagcacagctacatcgagcagggcaagaagtgccgctactgtgatgctgtgttccacgagagatatgccctgatccagcaccagaagagccacaagaatgagaagcgcttcaagtgtgaccagtgtgactatgcctgccggcaggagcggcacatgatcatgcacaagaggacccacactggagagaagccctatgcctgcagccactgtgacaagaccttccggcagaagcagctgctggacatgcacttcaagcgctaccatgaccccaactttgtgcctgctgcctttgtgtgcagcaaatgtgggaagaccttcaccaggaggaacaccatggcccggcatgctgacaactgtgccggcccagatggagtggagggggagaatggaggagagaccaagaagagcaagaggggcaggaagaggaagatgaggagcaagaaggaggacagcagtgacagtgaaaatgctgagccagacctggatgacaatgaagatgaggaggagcctgctgtggagattgagcctgagcctgagccccagcctgtgaccccagcccctcctccagccaagaagagaagaggccggcccccaggccgcaccaaccagcccaagcagaaccagcccacagccatcatccaggtggaggaccagaacacaggagccatcgagaacatcatcgtggaggtgaagaaggagccagatgctgagcctgctgagggggaggaggaggaggcccagcctgctgccacagatgccccaaatggagacctgaccccagagatgatcctgtccatgatggacagatag

SEQ ID NO: 166224 - DNA, 2184 bp, Artificial Sequence
  derived and/or modified sequence
atggagggcgacgccgtggaggccatcgtggaggagagcgagaccttcatcaaaggaaaagaacgcaaaacctatcagaggaggcgggaggggggtcaggaagaggacgcttgtcaccttcctcagaatcagacagatggaggtgaggtagtccaggacgtgaattcgtctgtgcaaatggtgatgatggaacagctggaccctacactcttgcagatgaagaccgaagtgatggaaggtactgtagcacctgaagccgaggctgccgtggacgacacacagataatcactctgcaagttgtcaatatggaggaacagcctattaacatcggggagctccagctggtccaggtgcctgtgccagttacggtgccagtggccacaacctccgtggaagagctccagggcgcctacgagaacgaagtcagcaaggaaggcctcgcagagtccgagccaatgatctgccacacactccccctgcctgagggttttcaggtagtgaaggttggagcgaacggggaggtagaaacgttagagcagggagagttacctcctcaggaagatccttcctggcaaaaagacccggactaccagcctcctgctaaaaagacaaaaaagacaaagaaatcgaagctgagatacaccgaggaaggcaaggacgttgacgtttccgtgtacgactttgaggaagagcagcaggagggcctgctgagcgaagtaaacgcagagaaggtcgtcggtaacatgaaacctccgaagcccactaaaatcaaaaagaagggagttaagaagacatttcagtgcgaattgtgcagctatacctgtccgagaaggagcaacctggataggcacatgaaatctcacaccgatgagcggccacataagtgccatctctgcggacgagcctttaggactgtgactttgttacgcaatcacctaaatactcataccggcacccggccgcataagtgcccagactgtgatatggcctttgtaacttctggtgagttggtgcgccacaggagatataaacatactcacgaaaagccgttcaagtgttctatgtgtgattatgcttctgtggaagtatctaagctaaaacgccacattcgcagccacactggggaacgacccttccagtgcagcttgtgcagttatgcctctagggatacttataagctcaagcgccatatgagaacgcactccggcgagaagccctatgaatgctatatatgtcatgctcgattcacccagagtggcactatgaaaatgcacatactccagaaacacaccgagaacgttgcgaagtttcactgcccgcactgcgacactgtcatagcaagaaagagcgacctaggcgtgcatttaaggaaacagcactcttacatcgaacagggtaagaaatgtagatactgcgacgccgtgtttcatgagaggtacgccctgatacagcaccagaaatctcataagaacgaaaagcgatttaagtgcgaccagtgcgattatgcttgtcggcaggagcgccatatgatcatgcacaaaagaacacacactggggaaaagccttacgcttgttcccactgcgacaagacctttcggcaaaagcagctgctggatatgcactttaagcgctatcatgacccaaactttgtgcccgccgccttcgtgtgcagtaagtgcggcaagaccttcactcggcgcaacactatggccagacacgcagacaactgcgctgggccagatggagtggagggcgagaatggcggagaaaccaagaaatccaaaaggggtcgaaagcgcaaaatgcggagcaaaaaggaggattcatccgatagcgaaaacgccgagcctgatctagatgataacgaggacgaagaagagccagctgtcgaaatcgaacccgagcccgagccacagcccgtaactcctgcccctccacctgcaaagaagcgccggggccgtcccccaggccgtacaaaccaacctaagcaaaaccagccaaccgcgattatccaagttgaggaccagaatacaggggctatcgaaaacattatcgtggaggtgaaaaaagagccggacgcagaacccgcagagggtgaggaagaagaggctcagccggccgctacagacgctcccaacggtgatctgacccccgagatgatcttgtccatgatggaccgatag

SEQ ID NO: 166225 - DNA, 2184 bp, Artificial Sequence
  derived and/or modified sequence
atggagggagatgcggtcgaggcaatcgtcgaagagtccgaaaccttcattaaaggaaaagagcgaaaaacttaccagcggaggagagaagggggtcaagaggaagatgcgtgccacctgcctcaaaaccagacagacggaggtgaggtggtgcaggatgttaatagttctgtgcagatggtgatgatggagcaactggaccccacactcctgcaaatgaagactgaagtcatggagggcacggtggcgccagaggctgaggccgcagtagatgatacgcaaattatcacactccaggtcgtgaacatggaggaacaacccatcaatataggcgaactgcagctcgtccaggttcctgtgccagtaacagtaccagtcgcgaccactagcgtcgaagaactgcaaggcgcttacgagaacgaggtaagcaaggagggactggccgagtcagaaccaatgatctgtcatacactgccgcttccagagggctttcaggtcgtcaaagtgggcgctaatggcgaagtcgagactctcgaacaaggtgaactccctccacaggaggacccctcatggcagaaggacccagattatcagcctcctgccaaaaaaactaaaaagacaaaaaagagcaagcttcggtacaccgaggagggcaaagatgtcgatgtgagcgtgtacgactttgaggaggaacagcaagaaggattactctctgaagtcaatgcagagaaggttgtggggaatatgaagccaccaaagccgaccaagatcaaaaagaaaggcgtgaaaaagacttttcagtgcgagctttgctcatatacctgtcctcggcgatcgaatctggacaggcacatgaaatcccataccgatgagcgccctcacaaatgtcatttgtgcggcagagccttcaggacggttaccctgctcagaaaccatcttaatacacacactgggactcggccacacaagtgtccagattgcgacatggcatttgtgacaagcggcgagctggtgcggcatcgacgttataaacacacccacgagaagccgtttaagtgcagcatgtgcgactatgcctccgtggaagttagcaaacttaagcggcatatccgttctcacacgggcgaacgtccatttcaatgttccctgtgttcttacgcctcccgagacacctacaaattaaaacggcacatgaggactcatagcggagaaaagccgtatgagtgctatatatgccacgctcggttcactcagagcgggacaatgaagatgcacattctccagaagcacaccgagaacgtcgccaagttccattgcccgcactgcgacaccgttatcgccagaaagtctgacctgggtgtccacctccgcaagcagcactcgtacattgagcaggggaagaagtgtagatattgtgacgccgtgtttcacgagcgttatgctttgattcagcatcagaagtcccacaaaaatgagaagagatttaagtgcgaccaatgcgattatgcatgcaggcaggaacggcacatgatcatgcacaagagaacccacactggcgagaagccatatgcatgtagtcactgtgataagacctttcggcagaaacagttgctggacatgcacttcaagaggtaccatgatcctaactttgtgcccgctgcattcgtgtgtagcaagtgcgggaagacatttactcgcagaaataccatggcgcgacacgccgacaactgtgctggacccgacggcgtggagggcgaaaatggcggtgaaacaaaaaagagcaagaggggtcgaaagcgtaaaatgcgttctaagaaggaagattcctcagattccgagaacgcggagcccgatttggacgataatgaagatgaagaagaacccgctgtcgaaatcgagcctgagcccgagccgcaacccgtgacgcctgcaccgccacctgctaaaaaaagacgcggaaggccacctgggcgaacgaaccagccaaagcagaatcagccaacagcaattattcaggtcgaagatcaaaatactggcgctatcgagaacatcatcgtggaggtgaaaaaagagccagacgccgaacccgctgaaggagaggaggaagaagcccagcctgcagccaccgatgcacctaacggagatctcacacctgagatgattctcagcatgatggatcgatag

SEQ ID NO: 166226 - DNA, 3939 bp, Artificial Sequence
  derived and/or modified sequence
cccatgctgccctgcgccaacccctcccctcacctttcctcccccgccctctactcgccgcccggccggtccccccacccgtcccttcccttatcagcacccgcggccccggcagcgccgacgcaggcgcactgcaccgcgccgccgccattttgtgtctgagcctgtggagcgattaaaccgtgcgcggagctgcttctttggcggcagcggcggcggcggtggccggtgcggacgcgcggagctcgccggagacgccgggtggccggagccgtggagcggcggcggagcgggcgccgcggggggtgtggcgcggagaatgattacggacctgaagccaaagaacaagatgcgctagtggacagattgctgaccaggggcttgagagctgggttctattttccctcctcaaactgactttgcagccacggagaggcaggggaaatggaaggtgatgcagtcgaagccattgtggaggagtccgaaacttttattaaaggaaaggagagaaagacttaccagagacgccgggaagggggccaggaagaagatgcctgccacttaccccagaaccagacggatgggggtgaggtggtccaggatgtcaacagcagtgtacagatggtgatgatggaacagctggaccccacccttcttcagatgaagactgaagtaatggagggcacagtggctccagaagcagaggctgctgtggacgatacccagattataactttacaggttgtaaatatggaggaacagcccataaacataggagaacttcagcttgttcaagtacctgttcctgtgactgtacctgttgctaccacttcagtagaagaacttcagggggcttatgaaaatgaagtgtctaaagagggccttgcggaaagtgaacccatgatatgccacaccctacctttgcctgaagggtttcaggtggttaaagtgggggccaatggagaggtggagacactagaacaaggggaacttccaccccaggaagatcctagttggcaaaaagacccagactatcagccaccagccaaaaaaacaaagaaaaccaaaaagagcaaactgcgttatacagaggagggcaaagatgtagatgtgtctgtctacgattttgaggaagaacagcaggagggtctgctatcagaggttaatgcagagaaagtggttggtaatatgaagcctccaaagccaacaaaaattaaaaagaaaggtgtaaagaagacattccagtgtgagctttgcagttacacgtgtccacggcgttcaaatttggatcgtcacatgaaaagccacactgatgagagaccacacaagtgccatctctgtggcagggcattcagaacagtcaccctcctgaggaatcaccttaacacacacacaggtactcgtcctcacaagtgcccagactgcgacatggcctttgtgaccagtggagaattggttcggcatcgtcgttacaaacacacccacgagaagccattcaagtgttccatgtgcgattacgccagtgtagaagtcagcaaattaaaacgtcacattcgctctcatactggagagcgtccgtttcagtgcagtttgtgcagttatgccagcagggacacatacaagctgaaaaggcacatgagaacccattcaggggaaaagccttatgaatgttatatttgtcatgctcggtttacccaaagtggtaccatgaagatgcacattttacagaagcacacagaaaatgtggccaaatttcactgtccccactgtgacacagtcatagcccgaaaaagtgatttgggtgtccacttgcgaaagcagcattcctatattgagcaaggcaagaaatgccgttactgtgatgctgtgtttcatgagcgctatgccctcatccagcatcagaagtcacacaagaatgagaagcgctttaagtgtgaccagtgtgattacgcttgtagacaggagaggcacatgatcatgcacaagcgcacccacaccggggagaagccttacgcctgcagccactgcgataagaccttccgccagaagcagcttctcgacatgcacttcaagcgctatcacgaccccaacttcgtccctgcggcttttgtctgttctaagtgtgggaaaacatttacacgtcggaataccatggcaagacatgctgataattgtgctggcccagatggcgtagagggggaaaatggaggagaaacgaagaagagtaaacgtggaagaaaaagaaagatgcgctctaagaaagaagattcctctgacagtgaaaatgctgaaccagatctggacgacaatgaggatgaggaggagcctgccgtagaaattgaacctgagccagagcctcagcctgtgaccccagccccaccacccgccaagaagcggagaggacgaccccctggcagaaccaaccagcccaaacagaaccagccaacagctatcattcaggttgaagaccagaatacaggtgcaattgagaacattatagttgaagtaaaaaaagagccagatgctgagcccgcagagggagaggaagaggaggcccagccagctgccacagatgcccccaacggagacctcacgcccgagatgatcctcagcatgatggaccggtgatggcggagccttgtgcgtcgccaggacttctctgggctgtgtttaaacggcccgcatcttaatttttctcccttctttctttttttggctttgggaaaagcatcattttaccaaacataccgagaacgaaaacttcaaggatgatgttagaaaaaaatgtgatttaactagaacttgctgtctgatgttagcaaatcatggaatgttctgagtccctgagggtttactgtgaagtgctgaggacagtgttgacaactaactcgttttcctagatggaaacggagacattgacccctccctccatgtggtaaaccactccagaatggccaccaggcttcccagagttctatggtcttcttcccaagagagtttttaattgtaaatgcatacttgggaaggacttagagttttaaactgttttttgcttttgcttttccctgactccctttgcttggagtcagctgcacaccagtagtatggcatgctacgatcaggttctgtcctgaaagctttgcctctttcttggcaaagtttctggtatggtcaagcttgtaaataactttttttacattttaatcttttccattaattaagaggttgaaaagaagtgcagtgtaagaaaacccagcattttaattacttgcaaattaagttaccacagactctgtagtgtgtaaatgttgacaaggaattggatcacaatcatgtagcagaatggcacccagaccactgcccaccagtgacggacatgcacgtggcagatcatgatttccagcccacggagccagcatttgaaccttgtataattaactttcagttatgatttcccatcgacattttctttgccctgtttgtagctgattgttgtgttttataaatcttctgttaaggcagaagggtgattatgagtggttcacagcagcccttataagctgggccagaaaatttcactaggtcagtaatttaaaccttggatcttcaaaaaataaaataatgtgaagcaaaaccaactaaaaagtgattcttgcacatgaactgtcacatgtttaaaaatgtgttttttagagagcctcagtcttactgatttcaaacacttttttcttctgtgtattgcttttaagagagccatcagttagctatcagactctaggttgatgcattttgtacttagctgtactgtgtgatatttttcattattttaggacgccaacatgagacctgtaataaaatatgtaatggggttgaaagctggggaggaggatctactgctgtacagctaataaatcataacggattaacaagtgctccaaa

SEQ ID NO: 166227 - DNA, 2978 bp, Artificial Sequence
  derived and/or modified sequence
cccatgctgccctgcgccaacccctcccctcacctttcctcccccgccctctactcgccgcccggccggtccccccacccgtcccttcccttatcagcacccgcggccccggcagcgccgacgcaggcgcactgcaccgcgccgccgccattttgtgtctgagcctgtggagcgattaaaccgtgcgcggagctgcttctttggcggcagcggcggcggcggtggccggtgcggacgcgcggagctcgccggagacgccgggtggccggagccgtggagcggcggcggagcgggcgccgcggggggtgtggcgcggagaatgattacggacctgaagccaaagaacaagatgcgctagtggacagattgctgaccaggggcttgagagctgggttctattttccctcctcaaactgactttgcagccacggagaggtactcgtcctcacaagtgcccagactgcgacatggcctttgtgaccagtggagaattggttcggcatcgtcgttacaaacacacccacgagaagccattcaagtgttccatgtgcgattacgccagtgtagaagtcagcaaattaaaacgtcacattcgctctcatactggagagcgtccgtttcagtgcagtttgtgcagttatgccagcagggacacatacaagctgaaaaggcacatgagaacccattcaggggaaaagccttatgaatgttatatttgtcatgctcggtttacccaaagtggtaccatgaagatgcacattttacagaagcacacagaaaatgtggccaaatttcactgtccccactgtgacacagtcatagcccgaaaaagtgatttgggtgtccacttgcgaaagcagcattcctatattgagcaaggcaagaaatgccgttactgtgatgctgtgtttcatgagcgctatgccctcatccagcatcagaagtcacacaagaatgagaagcgctttaagtgtgaccagtgtgattacgcttgtagacaggagaggcacatgatcatgcacaagcgcacccacaccggggagaagccttacgcctgcagccactgcgataagaccttccgccagaagcagcttctcgacatgcacttcaagcgctatcacgaccccaacttcgtccctgcggcttttgtctgttctaagtgtgggaaaacatttacacgtcggaataccatggcaagacatgctgataattgtgctggcccagatggcgtagagggggaaaatggaggagaaacgaagaagagtaaacgtggaagaaaaagaaagatgcgctctaagaaagaagattcctctgacagtgaaaatgctgaaccagatctggacgacaatgaggatgaggaggagcctgccgtagaaattgaacctgagccagagcctcagcctgtgaccccagccccaccacccgccaagaagcggagaggacgaccccctggcagaaccaaccagcccaaacagaaccagccaacagctatcattcaggttgaagaccagaatacaggtgcaattgagaacattatagttgaagtaaaaaaagagccagatgctgagcccgcagagggagaggaagaggaggcccagccagctgccacagatgcccccaacggagacctcacgcccgagatgatcctcagcatgatggaccggtgatggcggagccttgtgcgtcgccaggacttctctgggctgtgtttaaacggcccgcatcttaatttttctcccttctttctttttttggctttgggaaaagcatcattttaccaaacataccgagaacgaaaacttcaaggatgatgttagaaaaaaatgtgatttaactagaacttgctgtctgatgttagcaaatcatggaatgttctgagtccctgagggtttactgtgaagtgctgaggacagtgttgacaactaactcgttttcctagatggaaacggagacattgacccctccctccatgtggtaaaccactccagaatggccaccaggcttcccagagttctatggtcttcttcccaagagagtttttaattgtaaatgcatacttgggaaggacttagagttttaaactgttttttgcttttgcttttccctgactccctttgcttggagtcagctgcacaccagtagtatggcatgctacgatcaggttctgtcctgaaagctttgcctctttcttggcaaagtttctggtatggtcaagcttgtaaataactttttttacattttaatcttttccattaattaagaggttgaaaagaagtgcagtgtaagaaaacccagcattttaattacttgcaaattaagttaccacagactctgtagtgtgtaaatgttgacaaggaattggatcacaatcatgtagcagaatggcacccagaccactgcccaccagtgacggacatgcacgtggcagatcatgatttccagcccacggagccagcatttgaaccttgtataattaactttcagttatgatttcccatcgacattttctttgccctgtttgtagctgattgttgtgttttataaatcttctgttaaggcagaagggtgattatgagtggttcacagcagcccttataagctgggccagaaaatttcactaggtcagtaatttaaaccttggatcttcaaaaaataaaataatgtgaagcaaaaccaactaaaaagtgattcttgcacatgaactgtcacatgtttaaaaatgtgttttttagagagcctcagtcttactgatttcaaacacttttttcttctgtgtattgcttttaagagagccatcagttagctatcagactctaggttgatgcattttgtacttagctgtactgtgtgatatttttcattattttaggacgccaacatgagacctgtaataaaatatgtaatggggttgaaagctggggaggaggatctactgctgtacagctaataaatcataacggattaacaagtgctccaaa

SEQ ID NO: 166228 - DNA, 2184 bp, Artificial Sequence
  derived and/or modified sequence
atggagggcgacgccgtggaggccatcgtggaggagagcgagaccttcatcaagggcaaggagagaaagacctaccagagaagaagagagggcggccaggaggaggacgcctgccacctgccccagaaccagaccgacggcggcgaggtggtgcaggacgtgaacagcagcgtgcagatggtgatgatggagcagctggaccccaccctgctgcagatgaagaccgaggtgatggagggcaccgtggcccccgaggccgaggccgccgtggacgacacccagatcatcaccctgcaggtggtgaacatggaggagcagcccatcaacatcggcgagctgcagctggtgcaggtgcccgtgcccgtgaccgtgcccgtggccaccaccagcgtggaggagctgcagggcgcctacgagaacgaggtgagcaaggagggcctggccgagagcgagcccatgatctgccacaccctgcccctgcccgagggcttccaggtggtgaaggtgggcgccaacggcgaggtggagaccctggagcagggcgagctgcccccccaggaggaccccagctggcagaaggaccccgactaccagccccccgccaagaagaccaagaagaccaagaagagcaagctgagatacaccgaggagggcaaggacgtggacgtgagcgtgtacgacttcgaggaggagcagcaggagggcctgctgagcgaggtgaacgccgagaaggtggtgggcaacatgaagccccccaagcccaccaagatcaagaagaagggcgtgaagaagaccttccagtgcgagctgtgcagctacacctgccccagaagaagcaacctggacagacacatgaagagccacaccgacgagagaccccacaagtgccacctgtgcggcagagccttcagaaccgtgaccctgctgagaaaccacctgaacacccacaccggcaccagaccccacaagtgccccgactgcgacatggccttcgtgaccagcggcgagctggtgagacacagaagatacaagcacacccacgagaagcccttcaagtgcagcatgtgcgactacgccagcgtggaggtgagcaagctgaagagacacatcagaagccacaccggcgagagacccttccagtgcagcctgtgcagctacgccagcagagacacctacaagctgaagagacacatgagaacccacagcggcgagaagccctacgagtgctacatctgccacgccagattcacccagagcggcaccatgaagatgcacatcctgcagaagcacaccgagaacgtggccaagttccactgcccccactgcgacaccgtgatcgccagaaagagcgacctgggcgtgcacctgagaaagcagcacagctacatcgagcagggcaagaagtgcagatactgcgacgccgtgttccacgagagatacgccctgatccagcaccagaagagccacaagaacgagaagagattcaagtgcgaccagtgcgactacgcctgcagacaggagagacacatgatcatgcacaagagaacccacaccggcgagaagccctacgcctgcagccactgcgacaagaccttcagacagaagcagctgctggacatgcacttcaagagataccacgaccccaacttcgtgcccgccgccttcgtgtgcagcaagtgcggcaagaccttcaccagaagaaacaccatggccagacacgccgacaactgcgccggccccgacggcgtggagggcgagaacggcggcgagaccaagaagagcaagagaggcagaaagagaaagatgagaagcaagaaggaggacagcagcgacagcgagaacgccgagcccgacctggacgacaacgaggacgaggaggagcccgccgtggagatcgagcccgagcccgagccccagcccgtgacccccgcccccccccccgccaagaagagaagaggcagaccccccggcagaaccaaccagcccaagcagaaccagcccaccgccatcatccaggtggaggaccagaacaccggcgccatcgagaacatcatcgtggaggtgaagaaggagcccgacgccgagcccgccgagggcgaggaggaggaggcccagcccgccgccaccgacgcccccaacggcgacctgacccccgagatgatcctgagcatgatggacagatag

SEQ ID NO: 166229 - protein, 332 aa, Artificial Sequence
  derived and/or modified sequence
MAAVFLVTLYEYSPLFYIAVVFTCFIVTTGLVLGWFGWDVPVILRNSEETQFSTRVFKKQMRQVKNPFGLEITNPSSASITTGITLTTDCLEDSLLTCYWGCSVQKLYEALQKHVYCFRISTPQALEDALYSEYLYQEQYFIKKDSKEEIYCQLPRDTKIEDFGTVPRSRYPLVALLTLADEDDREIYDIISMVSVIHIPDRTYKLSCRILYQYLLLAQGQFHDLKQLFMSANNNFTPSNNSSSEEKNTDRSLLEKVGLSESEVEPSEENSKDCVVCQNGTVNWVLLPCRHTCLCDGCVKYFQQCPMCRQFVQESFALCSQKEQDKDKPKTL

SEQ ID NO: 166230 - DNA, 999 bp, Artificial Sequence
  derived and/or modified sequence
atggccgccgtgttcctggtgaccctgtacgagtacagccccctgttctacatcgccgtggtgttcacctgcttcatcgtgaccaccggcctggtgctgggctggttcggctgggacgtgcccgtgatcctgagaaacagcgaggagacccagttcagcaccagagtgttcaagaagcagatgagacaggtgaagaaccccttcggcctggagatcaccaaccccagcagcgccagcatcaccaccggcatcaccctgaccaccgactgcctggaggacagcctgctgacctgctactggggctgcagcgtgcagaagctgtacgaggccctgcagaagcacgtgtactgcttcagaatcagcaccccccaggccctggaggacgccctgtacagcgagtacctgtaccaggagcagtacttcatcaagaaggacagcaaggaggagatctactgccagctgcccagagacaccaagatcgaggacttcggcaccgtgcccagaagcagataccccctggtggccctgctgaccctggccgacgaggacgacagagagatctacgacatcatcagcatggtgagcgtgatccacatccccgacagaacctacaagctgagctgcagaatcctgtaccagtacctgctgctggcccagggccagttccacgacctgaagcagctgttcatgagcgccaacaacaacttcacccccagcaacaacagcagcagcgaggagaagaacaccgacagaagcctgctggagaaggtgggcctgagcgagagcgaggtggagcccagcgaggagaacagcaaggactgcgtggtgtgccagaacggcaccgtgaactgggtgctgctgccctgcagacacacctgcctgtgcgacggctgcgtgaagtacttccagcagtgccccatgtgcagacagttcgtgcaggagagcttcgccctgtgcagccagaaggagcaggacaaggacaagcccaagaccctgtag

SEQ ID NO: 166231 - DNA, 999 bp, Artificial Sequence
  derived and/or modified sequence
atggctgccgtgttcctggttaccctgtacgaatactcaccactgttttacatagccgtggttttcacttgctttattgtgacaacggggctggtcctgggctggttcggatgggatgttcctgttatcctgaggaacagcgaagaaacacagttttctacgcgggtattcaagaaacaaatgcgccaggtgaagaatcccttcggcctagagatcacaaacccgtctagcgcatcgataactaccggcattaccctcaccacagactgcctggaggacagtctcctgacctgttattggggatgcagtgtccagaagctgtatgaggccctacagaaacacgtctactgtttccgtatcagcactccccaggccttggaagacgcgctgtattccgaatacttgtaccaggaacagtactttatcaaaaaagatagcaaagaggaaatatactgtcagctgccccgggacacaaaaatcgaagattttggaactgttccccgttcacgttaccccctggtggccctactgactctggcggacgaggacgaccgagaaatctacgatataatctccatggtctctgtaattcatattccagaccggacctacaagttgagttgcagaatcctgtaccagtacttgctgctggcccagggccaatttcacgatttgaaacagctgttcatgagcgccaataacaacttcactccaagcaataactcatcgagtgaagaaaaaaataccgatagatccctgcttgagaaggtcggcctatccgaatcagaagtggagccaagcgaagagaattccaaggactgcgtggtgtgccagaacgggacagtgaactgggtcctcctgccatgtagacatacatgcttgtgtgatgggtgcgttaagtacttccaacagtgcccaatgtgtcgacaattcgtgcaggagtccttcgccctgtgcagtcagaaggagcaggacaaggacaaacctaaaacgttgtag

SEQ ID NO: 166232 - DNA, 999 bp, Artificial Sequence
  derived and/or modified sequence
atggctgctgtgttcctggtgaccctgtatgagtacagccccctcttctacatcgctgtggtgttcacctgcttcatcgtgaccaccggcctggtgctgggctggtttggctgggatgtgcctgtgatcctgagaaattctgaggagacccagttcagcaccagggtcttcaagaagcagatgaggcaggtgaagaaccccttcggcctggagatcaccaaccccagcagcgccagcatcaccaccggcatcaccctgaccacagactgcctggaggacagcctgctgacctgctactggggctgcagcgtgcagaagctgtatgaggccctgcagaagcacgtgtactgcttccgcatcagcaccccccaggccctggaggatgccctgtacagcgagtacctgtaccaggagcagtacttcatcaagaaggacagcaaggaggagatctactgccagctgccccgggacaccaagattgaagattttggaacagtgcccaggagccgctaccccctggtggccctgctgaccctggctgatgaagatgaccgggagatctatgacatcatctccatggtgtctgtcatccacatcccagacaggacctacaagctgagctgccgcatcctgtaccagtacctgctgctggcccagggccagttccatgacctgaagcagctgttcatgtctgccaacaacaacttcacccccagcaacaacagcagcagcgaggagaagaacacagacaggagcctgctggagaaggtgggcctgtctgagagcgaggtggagcccagcgaggagaacagcaaggactgtgtggtgtgccagaatggaacagtgaactgggtgctgctgccctgccgccacacctgcctgtgtgatggctgtgtgaagtacttccagcagtgccccatgtgccggcagtttgtgcaggagagctttgccctgtgcagccagaaggagcaggacaaggacaagcccaagaccctgtag

SEQ ID NO: 166233 - DNA, 999 bp, Artificial Sequence
  derived and/or modified sequence
atggccgccgtgttcctggtgaccctgtacgagtacagccccctgttttatattgctgtcgtctttacgtgctttatcgtcaccacaggcctggtgctgggctggtttggatgggatgttcccgtgattctcagaaattctgaagaaactcagttttcaaccagggtgtttaaaaagcaaatgcgccaggtcaagaaccccttcgggcttgagatcacgaacccttcatctgcctcaattaccacggggatcacactaaccaccgactgtttagaagacagtctcctcacctgctactggggctgttctgttcagaagttgtacgaggctttgcagaagcacgtgtattgcttcagaatctccaccccccaggccctagaagacgctctttattcagaatatttgtatcaggaacaatacttcattaagaaggattccaaggaagaaatttattgtcaactgcccagagatactaagattgaggacttcggaaccgtgcctcgttctcgttacccactggtggctctgctcacgttggcggatgaagatgaccgcgagatctatgacatcatatccatggtgtctgttatccatattcctgaccgaacctataaactgagctgccggattctgtatcaatacctgctgctggctcagggccaatttcatgatctgaaacagctcttcatgtccgctaataataacttcaccccatccaacaatagtagctccgaagaaaaaaataccgacagatcactactggaaaaggtggggctgagtgagagtgaagtagaacccagcgaagaaaacagtaaggactgtgtggtgtgtcaaaatggtacagtaaactgggttttgttgccttgccggcatacttgtttgtgcgacggatgcgtgaagtattttcaacagtgccctatgtgtcggcagtttgtgcaagaatcattcgccttgtgttcacaaaaggagcaggacaaggataagccgaagaccttgtag

SEQ ID NO: 166234 - DNA, 999 bp, Artificial Sequence
  derived and/or modified sequence
atggccgctgtctttctcgttaccctttacgagtactcccctctcttttacatcgccgttgtcttcacttgttttatcgtgaccaccggacttgtcctcggatggtttggttgggatgtcccagttattcttcgtaactccgaggagacgcaattttccacgcgcgtattcaaaaagcagatgcgacaggtgaaaaacccatttggactggagattactaaccccagctctgcgtcaatcacgaccgggattacactcacaacagactgtctcgaggacagcctgcttacctgttattggggatgctctgtgcaaaagctatacgaggcattgcagaaacatgtgtactgcttccgtatcagcaccccacaagctctggaggatgccctgtattctgaatacctgtaccaagagcagtattttattaaaaaggacagcaaagaggaaatctattgccagctcccgcgtgacacaaaaatcgaggacttcggaaccgttccccgaagtcggtatcctctggttgcattgctgaccttggcagatgaggatgaccgggagatctatgatattatctcgatggttagcgtgatacatatcccagatagaacatacaaattgtcatgtaggattctctaccagtaccttctattggctcagggccagttccacgacctgaaacagttgttcatgtcagccaataacaattttactccatctaacaactcttcctccgaggaaaaaaacacagaccgtagcctgctggaaaaagtgggtctgtctgagtctgaggtggaacccagtgaagagaatagtaaggactgcgtggtctgtcagaatgggactgttaattgggtgcttttgccatgccgccatacatgcctgtgtgacggttgcgtgaaatactttcagcaatgccccatgtgccgccagtttgttcaggagagtttcgccctgtgttcgcagaaagagcaggataaggacaaacccaaaactctctag

SEQ ID NO: 166235 - DNA, 1597 bp, Artificial Sequence
  derived and/or modified sequence
aagtgcggacctacaaagtttgtccgctccggggcactgtagtggcttttaccctggccgggcgggcggggctcagccgggctgggctgggctccgcggctggagccgggctctacccagagcaagaccctgatggctgcggtgtttctggtaacgctttatgaatactcgccgcttttctacatcgcggtggtctttacctgcttcatcgtgaccaccggcctggtattgggatggtttggttgggatgttccagtaattctgagaaattcagaagagacccagttcagcacaagagttttcaaaaagcaaatgagacaagtcaagaatccttttggcttagagatcactaatccatcttcagcttcaattacaactggcataaccttgacaacagattgccttgaagatagcctccttacatgctactgggggtgcagtgttcaaaaattatatgaagctctgcagaagcatgtttattgcttcagaataagcactccccaagcattagaagatgctctgtatagtgaatatctctatcaggaacagtattttattaaaaaggatagcaaagaagaaatatattgccagttaccaagagatactaaaattgaagactttggtacagtacccagatctcgctatccattggtagcgctattgaccttagctgatgaggatgaccgggaaatttatgatattatttccatggtgtcagtgattcatattcctgataggacttataaactatcctgcagaatattgtatcaatatttactcttggctcaaggtcaatttcatgatcttaagcaacttttcatgtctgcaaataataatttcactccctccaacaattcctcttcagaagaaaaaaacacagacagaagtttgttggaaaaggtgggactctctgaaagtgaagttgagccatcggaagagaacagcaaggactgtgttgtttgccagaatgggactgtgaactgggtactcttaccatgcagacacacatgcctgtgtgatggctgtgtgaagtattttcagcagtgcccaatgtgcaggcagtttgttcaggaatcttttgcactttgcagtcaaaaagagcaagataaagacaaaccgaagactctttgaagacatcgtaacactgaaaagtacactttctactaaagatgcagaaattgatgatcttggaattcatcataacatggaatctacagtactgaccatcaatgaaaattatattttaacttcatatttgtatggtacttggatgataaaaattaattattcctttctgcttagtgaatgaatactggaatccatctgtgttgatacataaaaattcattcaactcttgaaaagaatctaagagtttggccttttattagctagatttcctctcatgttaattagaaaaatcattctgaaaggcaatccattgaaaatttgaggaggttaaattcttaagatcactaaatgttttacctttgatgtaatcggagtgcaattaagaaaaaacttaattctacttaaagtaattgtgtgttccctagtttatacaaaggagttggaatgagcttctttagatcttttcctg

SEQ ID NO: 166236 - protein, 313 aa, Artificial Sequence
  derived and/or modified sequence
MPNTAMKKKVLLMGKSGSGKTSMRSIIFANYIARDTRRLGATIDVEHSHVRFLGNLVLNLWDCGGQDTFMENYFTSQRDNIFRNVEVLIYVFDVESRELEKDMHYYQSCLEAILQNSPDAKIFCLVHKMDLVQEDQRDLIFKEREEDLRRLSRPLECACFRTSIWDETLYKAWSSIVYQLIPNVQQLEMNLRNFAQIIEADEVLLFERATFLVISHYQCKEQRDVHRFEKISNIIKQFKLSCSKLAASFQSMEVRNSNFAAFIDIFTSNTYVMVVMSDPSIPSAATLINIRNARKHFEKLERVDGPKHSLLMR

SEQ ID NO: 166237 - DNA, 942 bp, Artificial Sequence
  derived and/or modified sequence
atgcctaacactgctatgaagaagaaagtgttattaatgggcaagtcagggagcgggaagactagcatgagaagcataatttttgcgaactacatagccagggacacacggaggcttggagccactatcgacgttgagcactcccatgtgcgctttctggggaacctcgtacttaatctctgggattgcggtggacaagatacctttatggagaattattttacctcgcagcgcgataatattttccggaacgtggaagttctgatctacgtgtttgacgtagaaagtcgggagctggagaaggacatgcactattatcagagctgcctggaggcaattctccagaactccccagatgctaagatcttttgtctcgtgcacaaaatggatttggtgcaagaagaccagagggatttgattttcaaggagcgcgaagaggacctgaggcgcttaagcagacccctggagtgcgcgtgttttcggacctccatttgggacgagactctttacaaagcctggagctccattgtgtatcagttgattcccaacgtgcagcagctggaaatgaatctccgaaacttcgctcagattatcgaagccgatgaggttcttctgttcgaaagggccaccttcctggtgatctcccactaccagtgtaaggaacagcgagacgtgcaccgcttcgaaaagatctcaaatatcatcaaacagtttaagctgtcctgcagtaaactcgcagccagtttccaatctatggaggtccggaattcaaacttcgctgcgttcatcgacatctttacgtccaatacttacgtcatggtagttatgtccgatccctcaatcccctccgcggcaacccttatcaacattcgcaatgccaggaaacactttgagaagctagaaagagtggatggacccaagcacagcctgttaatgagatag

SEQ ID NO: 166238 - DNA, 942 bp, Artificial Sequence
  derived and/or modified sequence
atgcccaacacagccatgaagaagaaggtgctgctgatgggcaagagcggcagcggcaagacctccatgaggagcatcatctttgccaactacatcgcccgggacacccggcggctgggcgccaccattgatgtggagcacagccacgtgcgcttcctgggcaacctggtgctgaacctgtgggactgtggcggccaggacaccttcatggagaactacttcaccagccagagggacaacatcttcagaaatgtggaggtgctgatctacgtgtttgatgtggagagccgggagctggagaaggacatgcactactaccagagctgcctggaggccatcctgcagaacagcccagatgccaagatcttctgcctggtgcacaagatggacctggtgcaggaggaccagagggacctgatcttcaaggagcgggaggaggacctgcggcggctgagccggcccctggagtgtgcctgcttccgcaccagcatctgggatgagaccctgtacaaggcctggagcagcatcgtgtaccagctgatccccaacgtgcagcagctggagatgaacctgaggaactttgcccagatcatcgaggctgatgaggtgctgctgtttgagcgggccaccttcctggtgatcagccactaccagtgcaaggagcagagagatgtgcacagatttgagaagatcagcaacatcatcaagcagttcaagctgagctgcagcaagctggccgccagcttccagagcatggaggtgaggaacagcaactttgctgccttcatcgacatcttcaccagcaacacctacgtgatggtggtgatgtctgaccccagcatccccagcgctgccaccctcatcaacatcagaaatgccaggaagcactttgagaagctggagcgggtggatggccccaagcacagcctgctgatgaggtag

SEQ ID NO: 166239 - DNA, 942 bp, Artificial Sequence
  derived and/or modified sequence
atgcccaacaccgccatgaagaagaaggtgctgctgatgggcaagtctgggtcaggaaagacaagcatgagatcaattatctttgcgaactacattgcccgcgacactcggagactaggcgccaccatcgatgtcgaacactcccacgtccgcttcctggggaacctcgtgctcaatctgtgggattgtgggggccaggacaccttcatggagaactatttcacaagccaacgcgacaacattttccgcaatgtagaggtccttatttacgttttcgacgtcgaaagccgggaactggagaaggatatgcactactatcaatcttgcctggaagcaatcttgcagaatagcccagatgctaaaatcttttgcctagtgcacaagatggatctcgttcaggaagaccagcgggacctcattttcaaggagcgagaagaagacctccgccggctgtcgaggcctcttgaatgtgcatgtttccgaacctccatatgggacgagactctgtataaggcatggagctccatcgtgtatcagctcatcccaaatgtccagcagctggagatgaacttaagaaattttgcacagatcatagaagctgatgaggtgttgctgttcgagcgtgccacgtttctcgttatctctcactaccagtgcaaggagcaaagggatgtgcacagattcgagaagatctccaacatcatcaaacaattcaaactctcgtgttccaagctcgcagctagctttcagagcatggaggtgcgcaattccaattttgctgcttttatagacattttcactagcaatacatatgtaatggtggttatgtccgatccttctatcccctcagccgctacactgataaacatacggaacgcccggaagcacttcgagaagttggagagagtcgacggtccaaaacattcactactgatgagatag

SEQ ID NO: 166240 - DNA, 942 bp, Artificial Sequence
  derived and/or modified sequence
atgcctaacactgctatgaaaaagaaggtgcttctcatggggaagagcggctctggaaagacttccatgagatctatcattttcgccaactacatcgcaagggacacccgacggttaggcgctacaattgacgtcgaacatagtcatgtcaggttcctaggaaacctggtcttaaatctatgggactgtggcggtcaggacacctttatggagaactacttcaccagccagagggataatatctttcggaatgtggaggtgctaatttacgtctttgacgtcgaatcacgcgagctcgagaaggacatgcactactaccaatcctgtctagaagcgatattacagaactctccggatgctaagatattctgtctcgtgcacaagatggatttggtgcaggaggatcagcgcgaccttatcttcaaggagcgggaggaggatctgagaagacttagtcgcccactggagtgcgcctgctttcggacctcgatctgggatgaaacgctttacaaggcctggagcagcatcgtgtaccagttgattcccaatgttcagcagctcgagatgaacctgcgcaacttcgctcagatcatagaggccgacgaagtgttactttttgagcgcgctacattccttgttatcagccactatcaatgcaaggagcagcgtgacgtccaccggttcgagaagatctcgaatataattaagcaatttaagctctcttgtagtaaactggccgcatcatttcagtccatggaggtgcggaacagcaattttgccgcatttatcgatatttttacttcaaatacttatgtaatggttgttatgagcgacccctctatacccagcgctgctacactaattaacattcgtaatgcaaggaaacactttgagaagttggaacgagtggacggccctaagcatagccttttgatgcggtag

SEQ ID NO: 166241 - DNA, 1648 bp, Artificial Sequence
  derived and/or modified sequence
cgccggaagtgggtggtggcggggacgcagcggctccctcccggaaagcgagcgtatctcccgagccgttgccactgacagccgcgggcgctcccatctgagtaagagccagcccgtccgcggcctctccagccccgggttcgcgctctcgactctcctgcctgcccagctgcgcggcggagcggagcgaggcgcggcctgcgagtccccggcagcccccgacccctccctcggcgctgcgtgtaggccgcgccctcaggcccagtccgcggtgccccggcgggtgatgccaaatacagccatgaagaaaaaggtgctgctgatggggaagagcgggtcggggaagaccagcatgaggtcgataatcttcgccaattacattgctcgcgacacccggcgcctgggggccaccattgacgtggaacactcccacgtccgattcctagggaacctggtgctgaacctgtgggactgtggcggtcaggacaccttcatggaaaattacttcaccagccagcgagacaatatcttccgtaacgtggaagttttgatttacgtgtttgacgtggagagccgcgaactggaaaaggacatgcattattaccagtcgtgtctggaggccatcctccagaactctcctgacgccaaaatcttctgcctggtgcacaaaatggatctggttcaggaggatcagcgtgacctgatttttaaagagcgagaggaagacctgaggcgtctgtctcgcccgctggagtgtgcttgttttcgaacgtccatctgggatgagacgctctacaaagcctggtccagcatcgtctaccagctgattcccaacgttcagcagctggagatgaacctcaggaattttgcccaaatcattgaggccgatgaagttctgctgttcgaaagagctacattcttggttatttcccactaccagtgcaaagagcagcgcgacgtccaccggtttgagaagatcagcaacatcatcaaacagttcaagctgagctgcagtaaattggccgcttccttccagagcatggaagttaggaattccaacttcgctgctttcatcgacatcttcacctcaaatacgtacgtgatggtggtcatgtcagatccgtcgatcccttctgcggccactctgatcaacattcgcaatgcccggaaacactttgagaagctggagagagtggatggccccaagcacagtctccttatgcgttgaatattgccaaatgctctttctgaaaatgctgaattgccttttttgtttgcatcctttatttttaatattcataatgtcgtgtgcttaaaagtgggctttgaagtgtgtgctgcttactcctttcatctttctccccgcttccccagtctttaaacattggacgctatttactcagctacccagtagagcttgaagctgacctttctgagaagttggtatggtgtaacactaaagtaggtggttcgtgtgtgttctcattacctggttatgatagatatgcacatcaaagcctttaccagtatcttcctgtattccgtatcagattgcaaagacggaatgttactattttatcagcaaggtattaaaatgcatttataaattcttcttggcttcattcatgaataaacgtgttagcaattt

SEQ ID NO: 166242 - DNA, 942 bp, Artificial Sequence
  derived and/or modified sequence
atgcccaacaccgccatgaagaagaaggtgctgctgatgggcaagagcggcagcggcaagaccagcatgagaagcatcatcttcgccaactacatcgccagagacaccagaagactgggcgccaccatcgacgtggagcacagccacgtgagattcctgggcaacctggtgctgaacctgtgggactgcggcggccaggacaccttcatggagaactacttcaccagccagagagacaacatcttcagaaacgtggaggtgctgatctacgtgttcgacgtggagagcagagagctggagaaggacatgcactactaccagagctgcctggaggccatcctgcagaacagccccgacgccaagatcttctgcctggtgcacaagatggacctggtgcaggaggaccagagagacctgatcttcaaggagagagaggaggacctgagaagactgagcagacccctggagtgcgcctgcttcagaaccagcatctgggacgagaccctgtacaaggcctggagcagcatcgtgtaccagctgatccccaacgtgcagcagctggagatgaacctgagaaacttcgcccagatcatcgaggccgacgaggtgctgctgttcgagagagccaccttcctggtgatcagccactaccagtgcaaggagcagagagacgtgcacagattcgagaagatcagcaacatcatcaagcagttcaagctgagctgcagcaagctggccgccagcttccagagcatggaggtgagaaacagcaacttcgccgccttcatcgacatcttcaccagcaacacctacgtgatggtggtgatgagcgaccccagcatccccagcgccgccaccctgatcaacatcagaaacgccagaaagcacttcgagaagctggagagagtggacggccccaagcacagcctgctgatgagatag

SEQ ID NO: 166243 - protein, 190 aa, Artificial Sequence
  derived and/or modified sequence
MAEKTQKSVKIAPGAVVCVESEIRGDVTIGPRTVIHPKARIIAEAGPIVIGEGNLIEEQALIINAYPDNITPDTEDPEPKPMIIGTNNVFEVGCYSQAMKMGDNNVIESKAYVGRNVILTSGCIIGACCNLNTFEVIPENTVIYGADCLRRVQTERPQPQTLQLDFLMKILPNYHHLKKTMKGSSTPVKN

SEQ ID NO: 166244 - DNA, 573 bp, Artificial Sequence
  derived and/or modified sequence
atggctgagaagacccagaaatctgtaaagattgccccgggcgcagtggtgtgcgttgaatcggaaatcaggggtgacgtaaccatagggccacgcacggtcatccaccccaaggctaggataatcgccgaagcggggcctatcgtcatcggagagggtaatttgattgaggagcaagccctgattattaatgcctatccggacaacatcactcccgatacagaagatccggagcctaagcccatgattattggcacaaataacgtgtttgaggttggatgctattcgcaggccatgaaaatgggagataataacgtcatcgaaagcaaggcttatgtgggccgtaatgttatactaacttccggatgcatcattggggcctgctgcaatctgaatacgttcgaagtcattcctgagaacacagtcatttacggggccgattgcctccggagggtccagacagagagaccccagccacaaactctgcaactggacttcctgatgaagatcctccctaattaccatcatctaaaaaaaaccatgaaggggtcatccacgccagttaaaaattag

SEQ ID NO: 166245 - DNA, 573 bp, Artificial Sequence
  derived and/or modified sequence
atggccgagaagacccagaagtctgtgaagatcgcccctggagctgtggtgtgtgtggagagcgagatcagaggagatgtgaccatcggccccaggacagtcatccaccccaaggcccgcatcatcgccgaggccggccccatcgtcatcggggagggcaacctgattgaggagcaggccctgatcatcaatgcctacccagacaacatcaccccagacacagaagatcctgagcccaagcccatgatcatcggcaccaacaacgtgtttgaggtgggctgctacagccaggccatgaagatgggagacaacaacgtgattgagagcaaggcctacgtgggcagaaatgtcatcctgaccagcggctgcatcattggagcctgctgcaacctgaacacctttgaggtgatcccagaaaatacagtcatctacggggctgactgcctgcggcgggtgcagacagagcggccccagccccagaccctgcagctggacttcctgatgaagatcctgcccaactaccaccacctgaagaagaccatgaagggcagcagcacccctgtgaagaactag

SEQ ID NO: 166246 - DNA, 573 bp, Artificial Sequence
  derived and/or modified sequence
atggccgagaagacccagaagagcgtgaagatcgcccccggcgccgtagtttgcgtggaaagcgagattaggggagacgtgaccatcgggccccgcacagtgattcacccaaaagcgcgcatcatagctgaagccggcccgatcgtgatcggcgaaggaaacctgatagaagagcaggcactcatcataaacgcctacccagacaatataacccccgacactgaggatccagaacctaagcccatgatcattgggacaaacaatgtattcgaagtgggctgctactcccaggcaatgaagatgggagacaataacgtgatcgagtccaaagcttacgtgggcagaaatgtgattttgacctccgggtgtattatcggtgcttgttgtaatttaaataccttcgaagttatccccgaaaacacagtcatctacggggcagactgcctgcgccgtgtacagacggagaggccccagccccagactctgcagcttgacttcttgatgaaaattcttcctaactaccatcatctgaagaagactatgaaggggagtagcactccggtgaagaattag

SEQ ID NO: 166247 - DNA, 573 bp, Artificial Sequence
  derived and/or modified sequence
atggcagaaaagacacaaaaatctgtcaagatcgcccctggagccgtggtgtgcgtggagagtgagatacgcggtgatgtcactattggcccacggaccgtgatacaccccaaagcacggatcatcgccgaagccggacctattgtgattggtgaggggaatctgattgaggagcaggccttgattatcaatgcctatcccgacaacatcaccccggacaccgaggatcctgagccaaagccaatgattattggcacaaacaacgtgtttgaggtcggctgttatagtcaggccatgaagatgggggacaacaacgtgatagaaagtaaagcctatgtgggcagaaatgttattctgacatccggatgcattattggtgcctgttgtaacctgaataccttcgaagtgatcccagagaatactgtgatttacggagctgactgcctacgaagagttcagaccgagcggcctcagccacagaccttgcagttggactttctcatgaagatcctcccaaactaccatcaccttaagaaaaccatgaagggaagctctacgcccgtcaaaaactag

SEQ ID NO: 166248 - DNA, 573 bp, Artificial Sequence
  derived and/or modified sequence
atggccgagaagacccagaagagcgtgaagatcgcccccggcgccgtggtgtgcgtggagagcgagatcagaggcgacgtgaccatcggccccagaaccgtgatccaccccaaggccagaatcatcgccgaggccggccccatcgtgatcggcgagggcaacctgatcgaggagcaggccctgatcatcaacgcctaccccgacaacatcacccccgacaccgaggaccccgagcccaagcccatgatcatcggcaccaacaacgtgttcgaggtgggctgctacagccaggccatgaagatgggcgacaacaacgtgatcgagagcaaggcctacgtgggcagaaacgtgatcctgaccagcggctgcatcatcggcgcctgctgcaacctgaacaccttcgaggtgatccccgagaacaccgtgatctacggcgccgactgcctgagaagagtgcagaccgagagaccccagccccagaccctgcagctggacttcctgatgaagatcctgcccaactaccaccacctgaagaagaccatgaagggcagcagcacccccgtgaagaactag

SEQ ID NO: 166249 - DNA, 1127 bp, Artificial Sequence
  derived and/or modified sequence
caaccctgccaggctctccaatcgcatgtggaattatcgctctacccaggcggtggtgtcgatctacgttccaattggggccgtaccatggcggagaagactcaaaagagtgtgaagattgctcctggagcagttgtatgtgtagaaagtgaaatcagaggagatgtaactatcggacctcggacagtgatccaccctaaagcaagaattattgcggaagccgggccaatagtgattggcgaagggaacctaatagaagaacaggcccttatcataaatgcttacccagataatatcactcctgacactgaagatccagaaccaaaacctatgatcattggcaccaataatgtgtttgaagttggctgttattcccaagccatgaagatgggagataataatgtcattgaatcaaaagcatatgtaggcagaaatgtaatattgacaagtggctgcatcattggggcttgttgcaacctaaatacatttgaagtcatccctgagaatacggtgatctatggtgcagactgccttcgtcgggtgcagactgagcgaccgcagccccagacactacagctggatttcttgatgaaaatcttgccaaattaccaccacctaaagaagactatgaaaggaagctcaactccagtaaagaactaagaacagtgtataacatgaagataacattttgtctttgaccactgtcttttgaatgggcccacagtgtttatgtactcttaacaactcacagaataatacatgttcactttattttgtaaaattgggttgagaggaaactaatggagtttcattgtaactgtcctttgtaatttatataaatgtattattttcctatatccttggttcttttctgataatttacagatttagcttttcttttgttatataaactgctagccacaaattttagttatgtaaaaggctacccttgacaagaaaagacatactgtcatgtatttatattctagcatagactaaactgaataaaaatgctgataacaggacctttagtaagcatactttaatcagtttttctccttgaattaatcttttctcttaatttttattatgtactagttgtattaaagctaatgtgtttacttttt

SEQ ID NO: 166250 - protein, 352 aa, Artificial Sequence
  derived and/or modified sequence
MADFLPSRSVLSVCFPGCLLTSGEAEQQRKSKEIDKCLSREKTYVKRLVKILLLGAGESGKSTYSNVIKGMRVLVDAREKLHIPWGDNSNQQHGDKMMSFDTRAPMAAQGMVETRVFLQYLPAIRALWADSGIQNAYDRRREFQLGESVKYFLDNLDKLGEPDYIPSQQDILLARRPTKGIHEYDFEIKNVPFKMVDVGGQRSERKRWFECFDSVTSILFLVSSSEFDQVLMEDRLTNRLTESLNIFETIVNNRVFSNVSIILFLNKTDLLEEKVQIVSIKDYFLEFEGDPHCLRDVQKFLVECFRNKRRDQQQKPLYHHFTTAINTENIRLVFRDVKDTILHDNLKQLMLQ

SEQ ID NO: 166251 - protein, 377 aa, Artificial Sequence
  derived and/or modified sequence
MADFLPSRSVLSVCFPGCLLTSGEAEQQRKSKEIDKCLSREKTYVKRLVKILLLGAGESGKSTFLKQMRIIHGQDFDQRAREEFRPTIYSNVIKGMRVLVDAREKLHIPWGDNSNQQHGDKMMSFDTRAPMAAQGMVETRVFLQYLPAIRALWADSGIQNAYDRRREFQLGESVKYFLDNLDKLGEPDYIPSQQDILLARRPTKGIHEYDFEIKNVPFKMVDVGGQRSERKRWFECFDSVTSILFLVSSSEFDQVLMEDRLTNRLTESLNIFETIVNNRVFSNVSIILFLNKTDLLEEKVQIVSIKDYFLEFEGDPHCLRDVQKFLVECFRNKRRDQQQKPLYHHFTTAINTENIRLVFRDVKDTILHDNLKQLMLQ

SEQ ID NO: 166252 - protein, 282 aa, Artificial Sequence
  derived and/or modified sequence
MRVLVDAREKLHIPWGDNSNQQHGDKMMSFDTRAPMAAQGMVETRVFLQYLPAIRALWADSGIQNAYDRRREFQLGESVKYFLDNLDKLGEPDYIPSQQDILLARRPTKGIHEYDFEIKNVPFKMVDVGGQRSERKRWFECFDSVTSILFLVSSSEFDQVLMEDRLTNRLTESLNIFETIVNNRVFSNVSIILFLNKTDLLEEKVQIVSIKDYFLEFEGDPHCLRDVQKFLVECFRNKRRDQQQKPLYHHFTTAINTENIRLVFRDVKDTILHDNLKQLMLQ

SEQ ID NO: 166253 - DNA, 1059 bp, Artificial Sequence
  derived and/or modified sequence
atggcagacttccttccaagccgctctgtgctgagcgtgtgttttccaggatgcctgttgacctccggcgaggcagagcagcagagaaagtctaaagaaattgacaagtgtctttccagggaaaaaacctacgtcaagagactggtgaagattctgctgctcggagctggtgagtccggaaaatcaacctattctaatgtcattaaaggcatgcgagttctcgtcgacgccagagaaaagttgcacattccctggggcgacaattcaaaccaacagcatggtgacaagatgatgtcttttgacacaagggccccaatggccgctcaggggatggtggagacacgcgtttttctgcagtacctgcctgctatccgcgccctttgggccgattcagggattcagaatgcctatgacagacggagagaattccagctaggggaatccgttaagtacttcctcgataacctggacaaactcggggagcctgattacattccctcccagcaggatatcttgctggcccggcggccaaccaaaggcatccacgagtacgatttcgaaatcaaaaatgttccttttaagatggtcgacgtggggggccagcgtagtgaaaggaagagatggttcgaatgcttcgacagcgtgacatcaattttatttctggtgagcagctccgaattcgaccaggttctgatggaggacagactaacgaatcgccttactgagagtctcaatatttttgagacgatcgtgaacaaccgcgtattttccaacgtcagtatcatcctgttcctgaacaagaccgatcttctggaagagaaggttcagatagtctccatcaaagattattttctggagttcgagggcgacccacattgtttaagagatgttcagaaatttctggtcgagtgcttccgcaacaagagaagagaccaacagcagaaaccactgtaccatcacttcactacggccattaataccgaaaatatcagactagtgttccgggacgttaaagatactatcctccatgataatctgaagcagctaatgttgcaatag

SEQ ID NO: 166254 - DNA, 1134 bp, Artificial Sequence
  derived and/or modified sequence
atggcggacttcttgccaagcagaagtgtcctttcggtgtgcttccccgggtgcctactcacatccggtgaggcggagcagcagcggaaaagtaaagagatcgataagtgcctatcgagggaaaagacctacgtgaagcggctcgtgaaaatactcctgctgggggcgggcgaaagcggaaagagtaccttcctcaagcaaatgagaataattcatggtcaggatttcgaccagcgggcccgcgaggaatttcgtcccacaatatatagcaacgtcattaagggtatgagggtgttagtagacgcaagagagaagctccacataccatggggcgataattctaatcagcagcacggggataaaatgatgagcttcgacacaagagcccccatggccgcccagggaatggtggaaacacgagtctttctgcaatacctgcctgctatccgtgcgctctgggccgattctggtattcagaacgcctatgacaggcggcgagaatttcagcttggggagtctgtaaaatacttcctggacaacctagacaagcttggagagccagattacatcccaagccagcaggacatcttactagcccgccgaccaacaaaaggcatccacgagtacgattttgaaatcaagaacgtgccgttcaagatggttgacgtgggtggccagcgctccgagaggaagagatggtttgaatgcttcgactccgtcacttctattttatttttagtttcaagctcggagttcgatcaggtgctgatggaggaccggttgaccaaccggttgacagagtctctgaatattttcgaaacaatcgtgaacaacagggtcttttccaacgtgtcaatcatcctgtttcttaacaaaacagaccttctggaagagaaagtgcagattgtctctattaaagactacttcctggagtttgagggcgacccgcactgcctgcgggatgtgcagaagttcttggtggagtgtttccgcaacaaaaggcgcgatcagcagcagaaacccttatatcatcacttcaccacagccattaacacggagaacatccggctagtatttcgggatgtcaaagatactatactgcatgacaatcttaagcagcttatgctccagtag

SEQ ID NO: 166255 - DNA, 1416 bp, Artificial Sequence
  derived and/or modified sequence
ctccttccctccctccctcccccgctgtcctggcccgccctgcccggcccgccctgcgagtcagttcgctggttccctccctccctgggcgcgctcgggccgccgccgcgctccccgccctcgagcctcggtgccggagccgcccgccgccggaggaggaggtggagggagccggaggggcccgccgaggcggcggcggcggcggcaagatggcggacttcctgccgtcgcggtccgtgctgtccgtgtgcttccccggctgcctgctgacgagtggcgaggccgagcagcaacgcaagtccaaggagatcgacaaatgcctgtctcgggaaaagacctatgtgaagcggctggtgaagatcctgctgctgggcgcgggcgagagcggcaagtccacctacagcaacgtgatcaaaggtatgagggtgctggttgatgctcgagagaagcttcatattccctggggagacaactcaaaccaacaacatggagataagatgatgtcgtttgatacccgggcccccatggcagcccaaggaatggtggaaacaagggttttcttacaatatcttcctgctataagagcattatgggcagacagcggcatacagaatgcctatgaccggcgtcgagaatttcaactgggtgaatctgtaaaatatttcctggataacttggataaacttggagaaccagattatattccatcacaacaagatattctgcttgccagaagacccaccaaaggcatccatgaatacgactttgaaataaaaaatgttcctttcaaaatggttgatgtaggtggtcagagatcagaaaggaaacgttggtttgaatgtttcgacagtgtgacatcaatacttttccttgtttcctcaagtgaatttgaccaggtgcttatggaagatcgactgaccaatcgccttacagagtctctgaacatttttgaaacaatcgtcaataaccgggttttcagcaatgtctccataattctgttcttaaacaagacagacttgcttgaggagaaggtgcaaattgtgagcatcaaagactatttcctagaatttgaaggggatccccactgcttaagagacgtccaaaaattcctggtggaatgtttccggaacaaacgccgggaccagcaacagaagcccttataccaccacttcaccactgctatcaacacggagaacatccgccttgttttccgtgacgtgaaggatactattctgcatgacaacctcaagcagcttatgctacagtgatgtacaaaagacttgctgttttaatatctttttgtgtttttgatgttttctgtttgttttgttttttaaaatagcagtttacaaccagaattagaacaatcttaattctacgtttaacttcttgaaaatcttagtactttttctgcgg

SEQ ID NO: 166256 - DNA, 6311 bp, Artificial Sequence
  derived and/or modified sequence
ctccttccctccctccctcccccgctgtcctggcccgccctgcccggcccgccctgcgagtcagttcgctggttccctccctccctgggcgcgctcgggccgccgccgcgctccccgccctcgagcctcggtgccggagccgcccgccgccggaggaggaggtggagggagccggaggggcccgccgaggcggcggcggcggcggcaagatggcggacttcctgccgtcgcggtccgtgctgtccgtgtgcttccccggctgcctgctgacgagtggcgaggccgagcagcaacgcaagtccaaggagatcgacaaatgcctgtctcgggaaaagacctatgtgaagcggctggtgaagatcctgctgctgggcgcgggcgagagcggcaagtccaccttcctgaagcagatgcggatcatccacgggcaggacttcgaccagcgcgcgcgcgaggagttccgccccaccatctacagcaacgtgatcaaaggtatgagggtgctggttgatgctcgagagaagcttcatattccctggggagacaactcaaaccaacaacatggagataagatgatgtcgtttgatacccgggcccccatggcagcccaaggaatggtggaaacaagggttttcttacaatatcttcctgctataagagcattatgggcagacagcggcatacagaatgcctatgaccggcgtcgagaatttcaactgggtgaatctgtaaaatatttcctggataacttggataaacttggagaaccagattatattccatcacaacaagatattctgcttgccagaagacccaccaaaggcatccatgaatacgactttgaaataaaaaatgttcctttcaaaatggttgatgtaggtggtcagagatcagaaaggaaacgttggtttgaatgtttcgacagtgtgacatcaatacttttccttgtttcctcaagtgaatttgaccaggtgcttatggaagatcgactgaccaatcgccttacagagtctctgaacatttttgaaacaatcgtcaataaccgggttttcagcaatgtctccataattctgttcttaaacaagacagacttgcttgaggagaaggtgcaaattgtgagcatcaaagactatttcctagaatttgaaggggatccccactgcttaagagacgtccaaaaattcctggtggaatgtttccggaacaaacgccgggaccagcaacagaagcccttataccaccacttcaccactgctatcaacacggagaacatccgccttgttttccgtgacgtgaaggatactattctgcatgacaacctcaagcagcttatgctacagtgatgtacaaaagacttgctgttttaatatctttttgtgtttttgatgttttctgtttgttttgttttttaaaatagcagtttacaaccagaattagaacaatcttaattctacgtttaacttcttgaaaatcttagtactttttctgcggcctttggtttgtggctgaaagctgttgagtgactcatcgccaagatttgctgtaatgcaggctttgatctgtttcaccatggcttctattcaagtccagttaaaacctcccagctgacctcagactaggcatatttcaggctttaaattattctactttccaaactgaattctcctgcagtgccaagtatcaaaggtgtccttaaatacttgtagggatgaggttaggaatattcagttccaaaacaagatatcttctgtccgccttacatatagcagtgacacttgttgcctaactttatggtgacctcctattttgtaagggctgttagaagttctatctaagaaatggcattctgtaggtttatagaaggtttagccttcatattttaattgcttgtatacacaacagctgttttgcttttagatttctgtgtttctgaaggtaatgttcttcctgttttcaagtttacataaggatctttggtctgatgctgatgaagagttcacaggtggtatgggagagcaaaaggcaagctaatgctgtttaccgtgttttggtcaaacgtaacgagtgaaatagaatttgcctttctcatatttaattatcatgtagtttaatgtaccatatgtgaaacattctggccatagcagcaactaaaaactgcaagcaacttggtaacagaactttctaaataaacttaacctgttccagaatgtcatgtatttgacttttaagccctatctcagttggtcagtaaagaccaatccttactgtaggaaatcattgttgtatcatcacaaacatctatcttttgctgtcctgtccagtcccatcaactccacactgtgccatttgtggcatcgttttgtttatttggagtttgctaagggcagtatttttctgtcaagactattcaagaaggcattatttgagattcctgttcattcttggtgtgtctctaacagatacagtatgtatacatttgtataattgttgttgttgaaagtccagcttttttgaggtatattttaaatgttttaaggatgcttctaaggatcagtagtaatttttttagttcgcacctaaagatgattacattgacctcccccgactgcttaccaaattaaaatgtgtccacgaagtagctttgtgatcgcagatacattcatagtgaactcatcagaatggctggtttgcagtactgaaatactatcttctaggctgtatgtagtgctacaattagagaaacagaagtccaaggctggcgacagcttgaaaagtctgacagcttttctacttttcctgaaaattttaagactgtgatatctgtcattttactgtatagctgactgtgtactcaggtattttattggtccttgaaagattggtcgttatggatcacccagcctttccaagtcagtggctgttgttctgtcttgctgtctgatacgagagtggggcttttcagtgaactaaccagggattgttcttgacatacctgacttttctcacatttgaacttccactatcattgtatccatataacttctagcattttcatgccatggtaatccatgagctacacatacgtagcccggcaccgtgatgcaagttcatggtatcgtgcatgttcgtggtatcatggtatcattcatgcgtgtttgaatagttctacatctagtgcttcttgccaaaaagaatacattgtttaaattcacaaaattagcataattgcagtgctaatgaatatcggaatatgtgcacagtaacatttggactattcattggagagtttacccatacatttagcaaattgaatggccaaaacatttgactccagtgagggctcaagttagatccctatagaaagaggacacttcatcttacttaagtcatagttaagatctgtgatacgaaccatagatattgcctgacaaagcagaaatcaccaagtttcccccttttgaattaccaccaagaagtgttgaaacaccaaatagatatcatgttattttgggcatttgcagttttcttccctgctgcatgtaatgtctcagaatcaacattcttttaaaatctagactatattttgaggcaatgaattacttatattcaacttaggcttgttttgacattcagtagaactttaagttcaatctaaaggcttcagtccacatttttttatacgttgtattttaaaaacgtttgaaaggagtcttacacctgtatcatgaaaactgaatccttttgaaataccactatatgaagagagagatgaaatttagtgaacagaattgaaaaggtgctcataatttcactatgcaaacttaccccagtctctaaaaaagtaatttagatttaaagttctttgatgtatttgattttctaaatctttatggttatgatttggaataaaatgtgcctaatcctgtgttacattctgttcttaaatctgaatgccttctcatttaattctgaggaaatatcacacaagtgtcttcattgaccttgaagaaatgtatatacagttgccttataaaacaacataaatttagaccataacttttatagagaaagggttttgtcaaatgttttctgaaaatctgagtaattcaaagcatgcctctgcccctttaatatttttaataacctgcattgttgctgtctgccaaatattaaattgaaatcttcatttcaattttattatctggaaagggcactggattgctctgcaaccaaagaaagcaatatggaatgaaaaaactcattcacttttgtcttattttcttttaaggtgtattggcatgtaatttgcatagagaaggtcctctggttagtctctcaaattgaggctgtttagggaaatccttattcagttggtggcagtggttggtttaaagtagaaggaaataagatcgccttaataccagaaatgattagaagtgctgatttagattcaacaaataccatatgtccttatcattttttgtaagaagaaattggttaagtcctaactttcaatgtgtacccaaatacttgtatttatgcttttgataaaatgtattttcagcattaatacacatccgattatgccttatttatatatgaagaataaagttaccatgttacactgttatgtcctaaaattcaaatcactatttgagaaaccctcaaattggtgctttcattatataatgatacatttagacaaaaccccaaactaagccatttgaaacaagattctctccattgcagtttgtagcaatgttatttctgtgtatgtcatgagaaggctaaatatcagtgttaatttcttgtttgaatccgtgaaatcatgcctgtaaagcccaaacatttgtaacaaactccctaataaatttagagaaagtcactctgttaccatttcatttattttagttttatttgagaaattaagaccagaagttttgctcatgtctttttcacttggaaatctgacttagtacctagttaatttgtctctctcccatcattttaaggcgttcgcttctgttaatcacagatgatctgtccttgtgttgtgctgcttgactaaaagcactgttttgttttgttttgttttgttttttaatgataggatacagggtggcttttcagtctagtaaacatgaggaggggagagattgtgggtgggtgtgggtgtgtccgcatgtcccaaatacagcacatgcccatttttttatggtacgaggttagggcttattaataaatgtatactagatcttgaagtgtaagtctaagtctgaacattttaaacaagttggactttatggctttttcaagttccatcaagtagatactagtcttaggctggtaggtgattaacaacatcatttggagtacagtgtttgtaccactagcattcttatgtctgtacttgaacgtgtagttagcatttaagttatgttcactcttgtagcattcaggtcttaccatctggtttcaaatgcgagagcttatatgaacattgttttgaaagcatgaatgatatggcaatattttatgtcttgataaggagagttttgtgacatatacaaatctgctgttgatgatgaaagtttacaggtggatcagagtatgctggaactcagtgtgcataaaatttcagtcagtgaatatcactgaacgtcatatactacttggtatgtgactttggtttgtgttaagaaagcttgtatataatattttttgccatagtaagtgagaaattgtccttaatcatgcctgtttgatggtactaggaaagaaaggggtagagattaattcttgcacagtataagcaacagtgcaacaaactatgccatttaccttttacctcttacttgaaggcagaatcgcaaaacgtttgaaatggcttttctaaactactctactctggtgagagctcatttaccacaagaagccttataaaaaagtatattttgtaataaccccgtagatactgtacctaacaaaacatgactcgtattagctctataaaatatttgtggcttaggattttttttttacatatatctttttataactttccaggaactaagcacattatctgataattgttgtaaatttttttgtcagtgctttagttcaggatgggcaataaattatttctaaaggaggtctaaaagtggaaagaatggtttgattttataaaatgagttgctagttcattacagctttttacttttgtacatattttgcaaaacatttgcctcttgctattaatatttgctttgtaaaaattactgacatttaataaacatttgtaaacaattcaa

SEQ ID NO: 166257 - DNA, 1059 bp, Artificial Sequence
  derived and/or modified sequence
atggctgacttcctgcccagccgctctgtgctgtctgtgtgcttccctggctgcctgctgaccagcggggaggccgagcagcagaggaagagcaaggagattgacaagtgcctgagccgggagaagacctacgtgaagaggctggtgaagatcctgctgctgggcgctggggagagcggcaagagcacctacagcaatgtcatcaagggcatgagggtgctggtggatgcccgggagaagctgcacatcccctggggagacaacagcaaccagcagcacggggacaagatgatgagctttgacacccgggcccccatggccgcccagggcatggtggagaccagggtcttcctgcagtacctgcctgccatccgggccctgtgggccgacagcggcatccagaatgcctatgacagaagaagagagttccagctgggggagagcgtgaagtacttcctggacaacctggacaagctgggggagccagactacatccccagccagcaggacatcctgctggcccggcggcccaccaagggcatccacgagtatgactttgagatcaagaatgtgcccttcaagatggtggatgtgggcggccagaggtctgagaggaagcgctggtttgagtgctttgacagcgtgaccagcatcctcttcctggtgagcagcagcgagtttgaccaggtgctgatggaggaccggctgaccaaccggctgacagagagcctgaacatctttgagaccatcgtgaacaacagagtcttcagcaatgtgtccatcatcctcttcctgaacaagacagacctgctggaggagaaggtgcagatcgtgtccatcaaggactacttcctggagtttgaaggagacccccactgcctgagagatgtgcagaagttcctggtggagtgcttcaggaacaagagaagagaccagcagcagaagcccctgtaccaccacttcaccacagccatcaacacagagaacatccggctggtgttcagagatgtgaaggacaccatcctgcatgacaacctgaagcagctgatgctgcagtag

SEQ ID NO: 166258 - DNA, 1134 bp, Artificial Sequence
  derived and/or modified sequence
atggctgacttcctgcccagccgctctgtgctgtctgtgtgcttccctggctgcctgctgaccagcggggaggccgagcagcagaggaagagcaaggagattgacaagtgcctgagccgggagaagacctacgtgaagaggctggtgaagatcctgctgctgggcgctggggagagcggcaagagcaccttcctgaagcagatgaggatcatccacggccaggactttgaccagagggcccgggaggagttccggcccaccatctacagcaatgtcatcaagggcatgagggtgctggtggatgcccgggagaagctgcacatcccctggggagacaacagcaaccagcagcacggggacaagatgatgagctttgacacccgggcccccatggccgcccagggcatggtggagaccagggtcttcctgcagtacctgcctgccatccgggccctgtgggccgacagcggcatccagaatgcctatgacagaagaagagagttccagctgggggagagcgtgaagtacttcctggacaacctggacaagctgggggagccagactacatccccagccagcaggacatcctgctggcccggcggcccaccaagggcatccatgaatatgactttgagatcaagaatgtgcccttcaagatggtggatgtgggcggccagaggtctgagaggaagcgctggtttgaatgttttgattctgtgaccagcatcctcttcctggtgagcagcagcgagtttgaccaggtgctgatggaggaccggctgaccaaccggctgacagagagcctgaacatctttgagaccatcgtgaacaacagagtcttcagcaatgtgtccatcatcctcttcctgaacaagacagacctgctggaggagaaggtgcagatcgtgtccatcaaggactacttcctggagtttgaaggagacccccactgcctgagagatgtgcagaagttcctggtggagtgcttcaggaacaagaggcgggaccagcagcagaagcccctgtaccaccacttcaccacagccatcaacacagagaacatccggctggtgttcagagatgtgaaggacaccatcctgcatgacaacctgaagcagctgatgctgcagtag

SEQ ID NO: 166259 - DNA, 1059 bp, Artificial Sequence
  derived and/or modified sequence
atggccgacttcctgcccagccggagcgtgctgagcgtgtgcttcccggggtgtctcctgacgtctggcgaagccgaacagcagaggaagtcaaaagaaattgataagtgtctgtcaagagaaaagacctacgtgaaacgactggtgaagattcttctcctgggcgcaggcgaatccgggaaatcgacgtactccaacgtcattaaagggatgagagtactcgtcgatgcaagggagaaactgcatatcccttggggggataacagtaatcagcagcatggggacaagatgatgtccttcgacacgagagctcctatggccgcgcagggaatggtggaaacacgggtatttttgcagtatctgcccgcgataagggccttatgggctgacagcggaattcaaaatgcgtatgatcgccgtcgcgaattccaattaggcgaatcagtgaaatattttttggacaatctggacaagctgggcgagcccgattatattccttcgcagcaggatatcctcttagcacgccgacctacgaaagggattcatgaatacgactttgaaattaaaaacgttcccttcaaaatggttgacgtgggcggacagcggagcgagcgaaagcgatggttcgaatgtttcgattcggtcacaagtatcttgtttctggtgtccagttccgagttcgatcaggttcttatggaagatagactgacaaataggctgacagaatccctaaacatctttgagactatagtcaacaatcgagttttcagcaatgtgagcatcatcctatttctcaacaaaactgacttgctggaggagaaggtacaaatagtatccataaaggattatttccttgagtttgagggtgaccctcactgcttgagggatgtccagaaattcctggttgaatgcttccggaataagaggcgagaccaacagcagaagcctctgtaccaccactttaccacagcaataaatactgagaatatacgactagtgtttcgggacgtgaaggataccatactgcatgataatctgaaacagttgatgctccagtag

SEQ ID NO: 166260 - DNA, 1134 bp, Artificial Sequence
  derived and/or modified sequence
atggccgacttcctgcccagccggagcgtgctgagcgtgtgcttccccggttgcctgctgacctccggagaggctgaacaacaacggaaatcgaaagaaatcgataagtgtctttcacgagaaaagacctatgtgaaacgcctggtaaagatactgttgctcggggccggagagtctggtaaatctacgtttctcaaacagatgcgaatcattcacgggcaagactttgatcagagagctagggaggaattccgccccaccatttattccaatgtcattaagggcatgagagtgctggttgacgcgcgcgagaagttgcacatcccttggggggacaactctaaccagcagcacggtgacaaaatgatgtcttttgataccagagcaccgatggcggcccagggaatggtcgagacgcgtgtatttctccagtacttaccagccattcgggcactgtgggccgattccgggattcaaaacgcctacgaccgaaggcgggaattccagctaggggagagcgtgaaatactttctggacaacctcgataagctgggagagccggattacattccatcacaacaggatatactcttggcaaggagaccaacaaaaggtatacatgagtacgactttgaaatcaagaatgtgccattcaaaatggtagatgttggcgggcagagaagcgaacggaagcggtggttcgaatgttttgattctgttacctccatactattcctcgtctccagttccgaattcgaccaggtgctgatggaggatcgcctgactaatcggctcacagaatctctgaacatcttcgagactatagtaaacaatagagtgtttagcaatgtaagtattatcttgtttctgaacaagaccgacctgctcgaagagaaagtccagattgtcagtatcaaagattatttcctggagttcgagggcgacccacactgtctgcgtgacgtccaaaaatttctggtcgagtgtttcaggaataagcggagggaccagcagcagaagcccctgtaccaccatttcactactgcgataaacacagaaaatatccgacttgtgtttagggatgtcaaagacacaatccttcacgacaatttgaagcagctgatgctccaatag

SEQ ID NO: 166261 - DNA, 1059 bp, Artificial Sequence
  derived and/or modified sequence
atggccgacttcctcccttcaaggtctgttctgagcgtctgcttcccgggatgcttgttgacatctggcgaagcagaacagcaaaggaagtccaaggagatcgacaagtgcttgagccgagaaaagacatatgtaaagcgccttgtcaaaattttattacttggtgctggcgaatctggcaaaagcacttattcaaatgtcatcaagggcatgcgggtgctggtcgacgcacgggagaagctgcacattccctggggagataactcaaatcaacagcacggagacaagatgatgtcttttgacacacgagcacctatggctgctcagggcatggtcgaaacacgagtattcttgcaatatctgcccgctattcgcgcactatgggcagattcagggatccaaaacgcctacgacaggcgtagggagttccagctgggagagtctgtcaagtattttctagacaaccttgacaaattaggtgaacccgattacattcctagccaacaggacattttgttggccaggcgtcctacaaaaggcatccatgaatatgacttcgagataaaaaacgtccctttcaagatggtggatgttggcggacaacgaagtgaaaggaaacgctggttcgagtgttttgattccgtgacgagtatcctgtttctggtttcaagctccgagttcgatcaggtcctcatggaggacagactgacgaatcgccttacagaatccctcaacatttttgagactatagtaaacaaccgggttttttccaacgtgagtatcatcctgtttctgaacaaaactgacctcctggaggagaaagtacagatagtctccatcaaagattatttccttgagtttgagggcgacccccattgtttgagggatgtgcagaaatttctcgtggaatgtttcaggaataaacggagggaccagcagcagaagcctttataccaccatttcacaacagcaattaacacagagaatatcagactggtgttccgagacgtcaaggacaccatactccacgacaacctgaagcaactgatgcttcagtag

SEQ ID NO: 166262 - DNA, 1134 bp, Artificial Sequence
  derived and/or modified sequence
atggccgatttcttaccatcgcgctccgtgctgagcgtctgttttcccggttgcctgctgacatcgggcgaagccgaacaacagcggaagagcaaggaaatagataagtgcctgtcccgggaaaagacgtacgtaaaacgccttgtcaagatccttttgcttggggctggtgagagcggaaagtccacatttttgaaacaaatgagaatcattcacggccaggattttgaccagagagctcgggaagagtttcgtcccacaatttactccaatgtaatcaaaggaatgcgggtgctggtagacgcacgagagaagctgcatatcccttggggtgacaattctaatcaacaacacggtgataagatgatgagtttcgacactagggcccctatggccgcacaggggatggtggaaaccagagttttcctgcaatatctgcctgcgattcgggcactgtgggcggatagcggcattcagaatgcttatgatcggagacgagaatttcaactgggggagtctgtgaagtattttctggacaacctggacaaactgggagaacccgactatatcccctctcagcaagatattctcttggcaaggagaccaaccaaaggaatacacgagtacgattttgagataaaaaacgtgcccttcaagatggtagatgtgggtggacaaagatccgagcgaaagagatggttcgagtgctttgacagtgttactagtatactgttcctggtgtcatccagcgaattcgatcaggtgctgatggaagacagactgaccaataggttgactgaaagtctgaatatcttcgagaccatcgtaaacaatcgcgtgttttcaaatgttagcattatcctgtttctgaataaaaccgacctgcttgaggagaaggtgcaaatagtgtcaattaaggattatttcctagaattcgaaggggaccctcattgtttgcgcgacgtgcaaaagtttctggtagaatgctttcgcaacaaacgccgagaccagcaacagaagccactataccatcattttacaacagcaatcaacactgaaaacattaggttggtgtttcgcgacgttaaggatactatccttcacgacaatttgaagcagctcatgctgcagtag

SEQ ID NO: 166263 - DNA, 1059 bp, Artificial Sequence
  derived and/or modified sequence
atggccgacttcctgcccagcagaagcgtgctgagcgtgtgcttccccggctgcctgctgaccagcggcgaggccgagcagcagagaaagagcaaggagatcgacaagtgcctgagcagagagaagacctacgtgaagagactggtgaagatcctgctgctgggcgccggcgagagcggcaagagcacctacagcaacgtgatcaagggcatgagagtgctggtggacgccagagagaagctgcacatcccctggggcgacaacagcaaccagcagcacggcgacaagatgatgagcttcgacaccagagcccccatggccgcccagggcatggtggagaccagagtgttcctgcagtacctgcccgccatcagagccctgtgggccgacagcggcatccagaacgcctacgacagaagaagagagttccagctgggcgagagcgtgaagtacttcctggacaacctggacaagctgggcgagcccgactacatccccagccagcaggacatcctgctggccagaagacccaccaagggcatccacgagtacgacttcgagatcaagaacgtgcccttcaagatggtggacgtgggcggccagagaagcgagagaaagagatggttcgagtgcttcgacagcgtgaccagcatcctgttcctggtgagcagcagcgagttcgaccaggtgctgatggaggacagactgaccaacagactgaccgagagcctgaacatcttcgagaccatcgtgaacaacagagtgttcagcaacgtgagcatcatcctgttcctgaacaagaccgacctgctggaggagaaggtgcagatcgtgagcatcaaggactacttcctggagttcgagggcgacccccactgcctgagagacgtgcagaagttcctggtggagtgcttcagaaacaagagaagagaccagcagcagaagcccctgtaccaccacttcaccaccgccatcaacaccgagaacatcagactggtgttcagagacgtgaaggacaccatcctgcacgacaacctgaagcagctgatgctgcagtag

SEQ ID NO: 166264 - DNA, 1134 bp, Artificial Sequence
  derived and/or modified sequence
atggccgacttcctgcccagcagaagcgtgctgagcgtgtgcttccccggctgcctgctgaccagcggcgaggccgagcagcagagaaagagcaaggagatcgacaagtgcctgagcagagagaagacctacgtgaagagactggtgaagatcctgctgctgggcgccggcgagagcggcaagagcaccttcctgaagcagatgagaatcatccacggccaggacttcgaccagagagccagagaggagttcagacccaccatctacagcaacgtgatcaagggcatgagagtgctggtggacgccagagagaagctgcacatcccctggggcgacaacagcaaccagcagcacggcgacaagatgatgagcttcgacaccagagcccccatggccgcccagggcatggtggagaccagagtgttcctgcagtacctgcccgccatcagagccctgtgggccgacagcggcatccagaacgcctacgacagaagaagagagttccagctgggcgagagcgtgaagtacttcctggacaacctggacaagctgggcgagcccgactacatccccagccagcaggacatcctgctggccagaagacccaccaagggcatccacgagtacgacttcgagatcaagaacgtgcccttcaagatggtggacgtgggcggccagagaagcgagagaaagagatggttcgagtgcttcgacagcgtgaccagcatcctgttcctggtgagcagcagcgagttcgaccaggtgctgatggaggacagactgaccaacagactgaccgagagcctgaacatcttcgagaccatcgtgaacaacagagtgttcagcaacgtgagcatcatcctgttcctgaacaagaccgacctgctggaggagaaggtgcagatcgtgagcatcaaggactacttcctggagttcgagggcgacccccactgcctgagagacgtgcagaagttcctggtggagtgcttcagaaacaagagaagagaccagcagcagaagcccctgtaccaccacttcaccaccgccatcaacaccgagaacatcagactggtgttcagagacgtgaaggacaccatcctgcacgacaacctgaagcagctgatgctgcagtag

SEQ ID NO: 166265 - protein, 285 aa, Artificial Sequence
  derived and/or modified sequence
MDDSTEREQSRLTSCLKKREEMKLKECVSILPRKESPSVRSSKDGKLLAATLLLALLSCCLTVVSFYQVAALQGDLASLRAELQGHHAEKLPAGAGAPKAGLEEAPAVTAGLKIFEPPAPGEGNSSQNSRNKRAVQGPEETVTQDCLQLIADSETPTIQKGSYTFVPWLLSFKRGSALEEKENKILVKETGYFFIYGQVLYTDKTYAMGHLIQRKKVHVFGDELSLVTLFRCIQNMPETLPNNSCYSAGIAKLEEGDELQLAIPRENAQISLDGDVTFFGALKLL

SEQ ID NO: 166266 - protein, 164 aa, Artificial Sequence
  derived and/or modified sequence
MDDSTEREQSRLTSCLKKREEMKLKECVSILPRKESPSVRSSKDGKLLAATLLLALLSCCLTVVSFYQVAALQGDLASLRAELQGHHAEKLPAGAGAPKAGLEEAPAVTAGLKIFEPPAPGEGNSSQNSRNKRAVQGPEETVTQDCLQLIADSETPTIQKGFIY

SEQ ID NO: 166267 - DNA, 858 bp, Artificial Sequence
  derived and/or modified sequence
atggacgacagcaccgagagagagcagagcagactgaccagctgcctgaagaagagagaggagatgaagctgaaggagtgcgtgagcatcctgcccagaaaggagagccccagcgtgagaagcagcaaggacggcaagctgctggccgccaccctgctgctggccctgctgagctgctgcctgaccgtggtgagcttctaccaggtggccgccctgcagggcgacctggccagcctgagagccgagctgcagggccaccacgccgagaagctgcccgccggcgccggcgcccccaaggccggcctggaggaggcccccgccgtgaccgccggcctgaagatcttcgagccccccgcccccggcgagggcaacagcagccagaacagcagaaacaagagagccgtgcagggccccgaggagaccgtgacccaggactgcctgcagctgatcgccgacagcgagacccccaccatccagaagggcagctacaccttcgtgccctggctgctgagcttcaagagaggcagcgccctggaggagaaggagaacaagatcctggtgaaggagaccggctacttcttcatctacggccaggtgctgtacaccgacaagacctacgccatgggccacctgatccagagaaagaaggtgcacgtgttcggcgacgagctgagcctggtgaccctgttcagatgcatccagaacatgcccgagaccctgcccaacaacagctgctacagcgccggcatcgccaagctggaggagggcgacgagctgcagctggccatccccagagagaacgcccagatcagcctggacggcgacgtgaccttcttcggcgccctgaagctgctgtag

SEQ ID NO: 166268 - DNA, 858 bp, Artificial Sequence
  derived and/or modified sequence
atggatgatagtactgaaagagagcagtcccggctgacctcctgtttgaaaaagagagaagaaatgaaactgaaagaatgcgtctccatcttaccaagaaaagaatccccatccgtcaggtctagcaaggatggcaaattgctggctgcaacactcctgctggccctgctctcatgttgcctgactgtggtgtcgttttaccaggtggcagcactacaaggcgaccttgcatcactgcgcgcagaactccaggggcaccatgctgaaaaattgcccgcaggcgccggcgcccctaaagcaggcctcgaggaggcccctgccgtgactgccggattaaaaatcttcgaaccgccggctcccggcgagggcaattcaagccagaactctagaaacaagcgggccgtccagggcccagaagagacagtgacacaggattgtctgcagctaatcgcagactctgagacacctacaattcagaaggggagttacacattcgtgccctggttgctgtctttcaaaagaggcagcgccctcgaggagaaagagaacaaaatcttggtgaaggagactggttacttcttcatttatggacaggtactatacacagacaagacctacgccatgggtcatctcatccagaggaagaaggtgcatgttttcggagacgagcttagccttgtgacccttttccgatgtatccaaaatatgccagagacactgcctaacaactcttgttactcagctggcatcgccaaactcgaagaaggggatgagttacagctggccattccgcgagaaaacgctcagatttccttagacggcgacgtgacattttttggggcacttaaactgctgtag

SEQ ID NO: 166269 - DNA, 858 bp, Artificial Sequence
  derived and/or modified sequence
atggatgacagcacagagcgggagcagagccggctgaccagctgcctgaagaagcgggaggagatgaagctgaaggaatgtgtgtccatcctgcccaggaaggagagccccagcgtgcgcagcagcaaggatggcaagctgctggccgccaccctgctgctggccctgctgagctgctgcctgactgtggtgtccttctaccaggtggccgccctgcagggcgacctggccagcctgcgggcagagctgcagggccaccacgccgagaagctgcctgctggagctggggcccccaaggccggcctggaggaggccccagctgtgacagctggcctgaagatctttgagcccccagcccctggagagggcaacagcagccagaacagcaggaacaagagagctgtgcagggccctgaggagaccgtgacccaggactgcctgcagctgattgctgacagcgagacccccaccatccagaagggcagctacacctttgtgccctggctgctgtccttcaagaggggcagcgccctggaggagaaggagaacaagatcctggtgaaggagaccggctacttcttcatctacggccaggtgctgtacacagacaagacctacgccatgggccacctgatccagaggaagaaggtgcacgtgtttggagatgagctgagcctggtgaccctcttccgctgcatccagaacatgcctgagaccctgcccaacaacagctgctacagcgctggcatcgccaagctggaggagggagatgagctgcagctggccatcccccgggagaatgcccagatcagcctggatggagatgtgaccttctttggagccctgaagctgctgtag

SEQ ID NO: 166270 - DNA, 858 bp, Artificial Sequence
  derived and/or modified sequence
atggacgacagcaccgagcgggagcagagccggctgaccagctgcctgaagaaacgagaggagatgaagctgaaagaatgcgtatcaattctccccagaaaggagagcccaagtgtgcgttcctccaaagacgggaaacttctagctgcaacccttctgcttgctcttctgagctgctgcctgacagtcgtctccttttaccaagtggccgctttgcagggtgacctggcctccttaagagctgaactgcagggccatcatgcagaaaaactgcccgctggtgctggagcacctaaggccgggctggaggaagcaccagccgtgacggccggccttaaaattttcgagccacctgctccgggagagggtaatagctcacagaactcccggaacaagcgagcagtgcagggccccgaggagactgttacccaggactgcttgcagctcatcgcggactctgagaccccaaccatccagaagggttcctatacattcgtcccgtggctactctcattcaagaggggatccgcactggaggagaaggagaataagatcctcgttaaggaaaccggatacttttttatttacggacaagttctgtatacggacaaaacctacgctatgggccatctgatccagagaaagaaggtgcacgtattcggcgacgaacttagcctagtcacactgttcaggtgcattcaaaatatgccagagactctgcctaataacagctgttatagcgcgggcattgccaagttggaggagggggatgagctgcagctggctatcccccgcgagaacgctcagatcagtttagatggcgacgtgactttctttggagctctgaaattactgtag

SEQ ID NO: 166271 - DNA, 858 bp, Artificial Sequence
  derived and/or modified sequence
atggatgatagcactgaaagagagcagtctcggttgacatcttgcctgaagaagagagaagaaatgaagcttaaagagtgtgtgagtattctgccccgtaaggaatcaccatctgtcaggtctagtaaagatggcaaactccttgcagctactctgctgctcgctctgctgtcatgctgcctgaccgtcgtgagtttctatcaggtcgcagcactgcaaggcgatctggcatcattacgagccgaactgcaggggcatcacgcagaaaagcttccggcaggagccggagctccgaaagccggattggaagaagcccctgcagtcactgccggtctcaagatctttgagcctccggcaccgggtgaggggaatagctcccaaaactccaggaacaaacgtgccgtacagggtccggaagagaccgtaacccaagattgtttacagctaatcgcggactccgagacccccactattcagaaaggctcttatacgtttgtaccgtggctcctcagctttaagcgcggttctgcattagaagagaaagaaaacaagattctcgttaaagagacaggctatttctttatatacggtcaggtactgtatacagacaaaacctacgcaatggggcacctaatacagagaaagaaagtgcacgtcttcggggatgaactaagcctcgtgaccttattcaggtgtattcaaaacatgccagagacactacctaataacagctgctactccgctggcatcgccaagcttgaagaaggggacgaactccagcttgccataccgcgtgaaaatgcacaaatttccctggacggcgacgtcacatttttcggagcgctgaaactgctatag

SEQ ID NO: 166272 - DNA, 1135 bp, Artificial Sequence
  derived and/or modified sequence
aggggtagagatgcagaaaggcagaaaggagaaaattcaggataactctcctgaggggtgagccaagccctgccatgtagtgcacgcaggacatcaacaaacacagataacaggaaatgatccattccctgtggtcacttattctaaaggccccaaccttcaaagttcaagtagtgatatggatgactccacagaaagggagcagtcacgccttacttcttgccttaagaaaagagaagaaatgaaactgaaggagtgtgtttccatcctcccacggaaggaaagcccctctgtccgatcctccaaagacggaaagctgctggctgcaaccttgctgctggcactgctgtcttgctgcctcacggtggtgtctttctaccaggtggccgccctgcaaggggacctggccagcctccgggcagagctgcagggccaccacgcggagaagctgccagcaggagcaggagcccccaaggccggcctggaggaagctccagctgtcaccgcgggactgaaaatctttgaaccaccagctccaggagaaggcaactccagtcagaacagcagaaataagcgtgccgttcagggtccagaagaaacagtcactcaagactgcttgcaactgattgcagacagtgaaacaccaactatacaaaaaggatcttacacatttgttccatggcttctcagctttaaaaggggaagtgccctagaagaaaaagagaataaaatattggtcaaagaaactggttacttttttatatatggtcaggttttatatactgataagacctacgccatgggacatctaattcagaggaagaaggtccatgtctttggggatgaattgagtctggtgactttgtttcgatgtattcaaaatatgcctgaaacactacccaataattcctgctattcagctggcattgcaaaactggaagaaggagatgaactccaacttgcaataccaagagaaaatgcacaaatatcactggatggagatgtcacattttttggtgcattgaaactgctgtgacctacttacaccatgtctgtagctattttcctccctttctctgtacctctaagaagaaagaatctaactgaaaataccaaaaaaaaaaaaaaaaaaaaa

SEQ ID NO: 166273 - protein, 539 aa, Artificial Sequence
  derived and/or modified sequence
MGRAGGGGPGRGPPPLLLFLGAALVLASGAVPAREAGSAVEAEELVKGSPAWEPPANDTREEAGPPAAGEDEASWTAPGGELAGPEEVLQESAAVTGTAWLEADSPGLGGVTAEAGSGDAQALPATLQAPHEVLGQSIMPPAIPEATEASGPPSPTPGDKLSPASELPKESPLEVWLNLGGSTPDPQGPELTYPFQGTLEPQPASDIIDIDYFEGLDGEGRGADLGSFPGSPGTSENHPDTEGETPSWSLLDLYDDFTPFDESDFYPTTSFYDDLDEEEEEEEDDKDAVGGGDLEDENELLVPTGKPGLGPGTGQPTSRWHAVPPQHTLGSVPGSSIALRPRPGEPGRDLASSENGTECRSGFVRHNGSCRSVCDLFPSYCHNGGQCYLVENIGAFCRCNTQDYIWHKGMRCESIITDFQVMCVAVGSAALVLLLLFMMTVFFAKKLYLLKTENTKLRRTNKFRTPSELHNDNFSLSTIAEGSHPNDDPSAPHKIQEVLKSCLKEEESFNIQNSMSPKLEGGKGDQADLDVNCLQNNLT

SEQ ID NO: 166274 - protein, 401 aa, Artificial Sequence
  derived and/or modified sequence
MPPAIPEATEASGPPSPTPGDKLSPASELPKESPLEVWLNLGGSTPDPQGPELTYPFQGTLEPQPASDIIDIDYFEGLDGEGRGADLGSFPGSPGTSENHPDTEGETPSWSLLDLYDDFTPFDESDFYPTTSFYDDLDEEEEEEEDDKDAVGGGDLEDENELLVPTGKPGLGPGTGQPTSRWHAVPPQHTLGSVPGSSIALRPRPGEPGRDLASSENGTECRSGFVRHNGSCRSVCDLFPSYCHNGGQCYLVENIGAFCRCNTQDYIWHKGMRCESIITDFQVMCVAVGSAALVLLLLFMMTVFFAKKLYLLKTENTKLRRTNKFRTPSELHNDNFSLSTIAEGSHPNDDPSAPHKIQEVLKSCLKEEESFNIQNSMSPKLEGGKGDQADLDVNCLQNNLT

SEQ ID NO: 166275 - DNA, 4080 bp, Artificial Sequence
  derived and/or modified sequence
agatacttaaataattaacaaaatatatttaaaatgagtgggagaacttcctccattaaaccctgttgaaaatgtgtgagtggttgtcatgccccagacatcaaggaacccatccatgaggtcttcccacacagactggcctcaggaagggaaggaggaggtaggccgctctgacagccacaacccgagttgaggaaacaagcaaaggaacacagagagtctacatacagtaaaaggtgacaggagttaagctgcacacaagggaagcagagatgggttggaggcagttaagggtgcgttgctgcctctgtggctgaggtgagtgcaaagccctacatggtcccctgtttagagaaggctattgtttcaaacatattttacttggtccccggaggcagcatgaaactatgaaagaaagagccttaccccttttttcaaggctctccagaccacagttctgggatgggtgtgggtggttgccattcgttcatttatgcctgtctgatatggagcctccctctgttaccagccctgtgcactcaagtgccttgcagtccagtgaggaataactgtagataagatgagatgatgggcattaagtgtaactgctgagaagccttcatagagggaaaggtgataagaactgagtttttctggcatgaggagtttaccaggcaggagaggtggagacgctaggctaggcaaataggctgcagccatagttctgctgagaaacaggttttgaaccaaggcaactccatctggagatatgtatcagaaagattaggagatagaatctccatcttggtcacttatttggtcttctaagacagcaatgggaccgtctcttaaatactggagttgtcctatctccttgggctgataccctgaactgtcatttgggtgagtaacacattaaggggtagacggtcggtttgggggaataaactaagtaactaggttgcggttcctcctgccgactaagcagacctcctggtgcgtggtcttgggttgccctgtgagccctgaagctgtgaatgggccccacagatcactctaaagccaagcatccatgtgtgcccggctggggatctagacccccctggtctacccaggaacctgagttttggtggtctgagacacctgggggacgacgtatcccggagaagggaccaggattaaaggccgctccccaggctgcccggagactagaaggaaggcgaggtagccgcagtcccagggagggtcttaccccttgctcccgggatgcgttatggcgggcctggctgtgcgagatctaggctagtggctttggctgcgaacggattagatctgatccgattagagcctgggcggtcggcttcgcccccttgccaggctctgccaacgcccgcccctccctcgtggagacccggagacctccctgagagccttcccgcccggaacacgggattggtgcagaatccgagaggctccatgcgccccgggcctggcttgtttccacagtgggggctcgtgcttccgccccctgcggctcttctggaccccgccccgaccctgcgggtaactgggcccgcgacgtccccgcctccgtgcttgccgcgtggcgggtgggttcctccgggtcggggccccgtgccgcctgttcacctggggcgggaccgtggccccatcccacaggtctcccgcccgtgcacctgccgcctaacgccgcgcgccgcgccgtgcgcctgcctcgcgctccccgtccgcctgccccgcactccccgtccgtgtgtctcctagtccccagcgaggggtctgtctgttcccctggcaggctgaccaaggggccggcgtcaccgctacgtgcggcggggccggcgcggcgggcggggtgagggcggcgctgagcgcagcggcggcagcggcggcgcgggaggcggggaggcgcggcgcgccggggacagcggcggacggcggcggcggcggcatgcggctcctcgcgctgcccatcgtgggctgaggcggccgcagaaccggcgggaggcgcggcggccgggcgagccgagggcgcagccagccgggcggaccgcggacagcggtcggggcgccgcgccatggggcgagccgggggcgggggcccgggccgggggccgccgccactgctgctgtttctgggggccgcgctggtcctggcctctggggccgtgccggcgcgtgaggcgggcagcgcggttgaggccgaagagctggtgaagggcagcccggcgtgggagccgcctgccaacgacacgcgggaagaagccggcccaccagcggctggggaagatgaggcgtcgtggacggcgcccggtggcgagctggccgggccagaagaggtgctgcaggagtcggctgcggtgaccggcaccgcctggctggaagctgacagcccaggcctgggaggagtgaccgcagaggcgggcagcggcgatgcccaggcccttccagctacgctccaggctccccacgaggtcctcgggcagtcaatcatgccccctgccattcctgaggctacagaggccagcgggccaccctcccccacccccggcgacaagctgagcccagcttctgaactccccaaggagagccccttggaggtttggctgaacctggggggcagcacacccgaccctcaagggccagagctgacttacccatttcagggcaccctggagccccaaccggcatcagatatcattgacatcgactacttcgaaggactggatggtgagggtcgtggcgcagatctggggagcttcccagggtcaccaggaacctcagagaaccaccctgatactgagggagagaccccttcctggagcctgcttgacttatacgatgatttcacccccttcgatgaatctgatttctaccccaccacatccttttatgatgacttggatgaagaggaggaggaagaggaggatgacaaagatgcagtaggaggtggagacctagaagatgaaaatgagcttctagtgcccactgggaagcctggtctggggcccgggacaggccagcccaccagtcggtggcatgctgtccctccacagcacactctggggtcggtccccggcagcagcatcgccctcaggccccgcccaggagagccaggcagggacttggcctccagtgaaaatggcactgagtgccgcagtggctttgtgcggcataacggctcctgccggtcagtgtgcgacctcttcccaagttactgtcacaatggcggccagtgctacctggtggagaacataggggccttctgcaggtgcaacacgcaggactacatctggcacaaggggatgcgctgcgagtccatcatcaccgacttccaggtgatgtgcgtggccgtgggctcggctgccctcgtcctgctcctgctcttcatgatgacggtgttctttgccaagaagctctacctgctcaagacggagaataccaagctgcgtaggaccaacaaattccggaccccatctgagctccacaatgataacttctccctctccaccattgccgagggctctcacccaaatgatgatcctagtgctccccacaaaatccaggaggttctcaagtcctgcctgaaagaggaggagtcatttaacatccagaactccatgtcgcccaaacttgagggtggcaaaggtgaccaggctgacttggatgtgaactgtcttcagaataatttaacctaaagcagagcaagaagagaggaagcgggggtagtgggtggggggtaggggaagaaacattatctcctcttgtacagagtctatttcttgtaaccatttgttaaactcttttctttttctgatctcatggcatgcttttatgtattttgtacaggaggcaaaaaaatacttaaaataagcaaagaaactgaacagaattgcatacattgggttgttttttctgtgctgtctgtacattgcttctgctgctgtgatttctaaacctgtgctgttattcaactgacttttttttgtactttgacccacgtttttttgaaataccagtaaaaaacaaagttcttgaaataaaactttttaaaaagtt

SEQ ID NO: 166276 - DNA, 2089 bp, Artificial Sequence
  derived and/or modified sequence
gtgtgatcctcgtcttgggggcagactccgggacggggcttagaggtaccgggtggctggggtcacactggggcggtggggtctgagggtggcgaggtctgggttgaccaggtctaggcgagcgggcctgaccggggcgggccggggctccagggctcctcagcgcgccgccctgacgtcccgccccttgccctcccgcccgcagcgcgtgaggcgggcagcgcggttgaggccgaagagctggtgaagggcagcccggcgtgggagccgcctgccaacgacacgcgggaagaagccggcccaccagcggctggggaagatgaggcgtcgtggacggcgcccggtggcgagctggccgggccagaagaggtgctgcaggagtcggctgcggtgaccggcaccgcctggctggaagctgacagcccaggcctgggaggagtgaccgcagaggcgggcagcggcgatgcccaggcccttccagctacgctccaggctccccacgaggtcctcgggcagtcaatcatgccccctgccattcctgaggctacagaggccagcgggccaccctcccccacccccggcgacaagctgagcccagcttctgaactccccaaggagagccccttggaggtttggctgaacctggggggcagcacacccgaccctcaagggccagagctgacttacccatttcagggcaccctggagccccaaccggcatcagatatcattgacatcgactacttcgaaggactggatggtgagggtcgtggcgcagatctggggagcttcccagggtcaccaggaacctcagagaaccaccctgatactgagggagagaccccttcctggagcctgcttgacttatacgatgatttcacccccttcgatgaatctgatttctaccccaccacatccttttatgatgacttggatgaagaggaggaggaagaggaggatgacaaagatgcagtaggaggtggagacctagaagatgaaaatgagcttctagtgcccactgggaagcctggtctggggcccgggacaggccagcccaccagtcggtggcatgctgtccctccacagcacactctggggtcggtccccggcagcagcatcgccctcaggccccgcccaggagagccaggcagggacttggcctccagtgaaaatggcactgagtgccgcagtggctttgtgcggcataacggctcctgccggtcagtgtgcgacctcttcccaagttactgtcacaatggcggccagtgctacctggtggagaacataggggccttctgcaggtgcaacacgcaggactacatctggcacaaggggatgcgctgcgagtccatcatcaccgacttccaggtgatgtgcgtggccgtgggctcggctgccctcgtcctgctcctgctcttcatgatgacggtgttctttgccaagaagctctacctgctcaagacggagaataccaagctgcgtaggaccaacaaattccggaccccatctgagctccacaatgataacttctccctctccaccattgccgagggctctcacccaaatgatgatcctagtgctccccacaaaatccaggaggttctcaagtcctgcctgaaagaggaggagtcatttaacatccagaactccatgtcgcccaaacttgagggtggcaaaggtgaccaggctgacttggatgtgaactgtcttcagaataatttaacctaaagcagagcaagaagagaggaagcgggggtagtgggtggggggtaggggaagaaacattatctcctcttgtacagagtctatttcttgtaaccatttgttaaactcttttctttttctgatctcatggcatgcttttatgtattttgtacaggaggcaaaaaaatacttaaaataagcaaagaaactgaacagaattgcatacattgggttgttttttctgtgctgtctgtacattgcttctgctgctgtgatttctaaacctgtgctgttattcaactgacttttttttgtactttgacccacgtttttttgaaataccagtaaaaaacaaagttcttgaaataaaactttttaaaaagtt

SEQ ID NO: 166277 - DNA, 1620 bp, Artificial Sequence
  derived and/or modified sequence
atgggcagagccggcggcggcggccccggcagaggccccccccccctgctgctgttcctgggcgccgccctggtgctggccagcggcgccgtgcccgccagagaggccggcagcgccgtggaggccgaggagctggtgaagggcagccccgcctgggagccccccgccaacgacaccagagaggaggccggcccccccgccgccggcgaggacgaggccagctggaccgcccccggcggcgagctggccggccccgaggaggtgctgcaggagagcgccgccgtgaccggcaccgcctggctggaggccgacagccccggcctgggcggcgtgaccgccgaggccggcagcggcgacgcccaggccctgcccgccaccctgcaggccccccacgaggtgctgggccagagcatcatgccccccgccatccccgaggccaccgaggccagcggcccccccagccccacccccggcgacaagctgagccccgccagcgagctgcccaaggagagccccctggaggtgtggctgaacctgggcggcagcacccccgacccccagggccccgagctgacctaccccttccagggcaccctggagccccagcccgccagcgacatcatcgacatcgactacttcgagggcctggacggcgagggcagaggcgccgacctgggcagcttccccggcagccccggcaccagcgagaaccaccccgacaccgagggcgagacccccagctggagcctgctggacctgtacgacgacttcacccccttcgacgagagcgacttctaccccaccaccagcttctacgacgacctggacgaggaggaggaggaggaggaggacgacaaggacgccgtgggcggcggcgacctggaggacgagaacgagctgctggtgcccaccggcaagcccggcctgggccccggcaccggccagcccaccagcagatggcacgccgtgcccccccagcacaccctgggcagcgtgcccggcagcagcatcgccctgagacccagacccggcgagcccggcagagacctggccagcagcgagaacggcaccgagtgcagaagcggcttcgtgagacacaacggcagctgcagaagcgtgtgcgacctgttccccagctactgccacaacggcggccagtgctacctggtggagaacatcggcgccttctgcagatgcaacacccaggactacatctggcacaagggcatgagatgcgagagcatcatcaccgacttccaggtgatgtgcgtggccgtgggcagcgccgccctggtgctgctgctgctgttcatgatgaccgtgttcttcgccaagaagctgtacctgctgaagaccgagaacaccaagctgagaagaaccaacaagttcagaacccccagcgagctgcacaacgacaacttcagcctgagcaccatcgccgagggcagccaccccaacgacgaccccagcgccccccacaagatccaggaggtgctgaagagctgcctgaaggaggaggagagcttcaacatccagaacagcatgagccccaagctggagggcggcaagggcgaccaggccgacctggacgtgaactgcctgcagaacaacctgacctag

SEQ ID NO: 166278 - DNA, 1620 bp, Artificial Sequence
  derived and/or modified sequence
atgggaagggcgggcggcgggggccctggaagggggccacctccacttctactgtttctgggagcagctttggtgttggcaagcggggccgttccggctagagaggctgggtctgccgtagaggccgaagagctggtgaaaggatcacctgcctgggagccaccagcaaatgatacgcgagaggaagcaggcccacccgcggccggggaggatgaagcaagttggaccgcccctggcggagaactggccggcccagaggaggtgctgcaagaaagcgctgcagtaaccggaacagcctggttggaggccgattcccccggcctgggtggcgtgaccgctgaggctggctctggggacgctcaggcccttccagcaactttacaggctcctcacgaggttttaggacaaagtataatgccgccggccatcccggaagcaaccgaggcctccggcccaccctcacccaccccaggcgacaagctctcacctgcctccgagcttccaaaagagtctcccctcgaggtgtggctgaacttaggaggtagcactccagacccccagggcccggaactgacttacccttttcagggcacgctggagcctcagccagcaagcgacataatcgacatcgactactttgagggactggacggagagggcaggggagctgacctcgggtccttccccgggtctccaggcacatccgagaatcaccctgataccgagggtgagacaccctcttggtcactgctggacctgtacgatgactttacaccattcgacgaatccgatttctacccaaccacctctttctacgatgatctggacgaggaggaagaagaggaagaagatgataaggatgcagtaggagggggggatctcgaggacgaaaacgaattgttggtgccaaccggaaaacctgggctcggtccaggaaccggccagcccacaagccgttggcacgccgtgccaccgcaacacactctgggctctgtgccaggttcctctattgcccttcgtccccgcccaggggaaccggggcgcgacttggcatcttctgaaaatggcactgaatgccgaagcggattcgttcggcacaatggatcatgcagaagcgtgtgtgatctgttcccaagctactgccacaatggcggccaatgttacctggtcgagaatatcggggcattctgcagatgcaatacacaggattacatttggcacaaaggcatgagatgtgagagcatcataactgactttcaggtaatgtgtgtggctgtggggagtgctgctttagtgttgttattgctgtttatgatgacagttttctttgcaaagaagctctacctgctgaagacagagaataccaagctgagacggacaaataagttcaggactccatctgagctgcacaatgataacttctcattaagtacaattgcggagggttcccaccccaacgatgacccttcggcaccacacaagattcaagaggttctgaagagttgcctgaaagaggaggaatcattcaacatccaaaacagcatgagtcctaagttagaggggggcaaaggcgatcaggcggacttggatgtcaattgcctccagaacaacctgacatag

SEQ ID NO: 166279 - DNA, 1620 bp, Artificial Sequence
  derived and/or modified sequence
atgggccgggccggcggcggcggccctggccggggccccccacccctgctgctcttcctgggcgccgccctggtgctggccagcggggctgtgcctgcccgggaggccggcagcgctgtggaggccgaggagctggtgaagggcagccctgcctgggagcccccagccaatgacacccgggaggaggccggccccccagctgctggggaggatgaggcctcctggacagcccctggaggagagctggccggccctgaggaggtgctgcaggagagcgctgctgtgactggaacagcctggctggaggccgacagccctggcctgggcggcgtgacagctgaggccggcagcggagatgcccaggccctgcctgccaccctgcaggcccctcatgaggtgctgggccagagcatcatgcccccagccatccctgaggccacagaggccagcggcccccccagccccacccctggggacaagctgagccctgccagcgagctgcccaaggagagccccctggaggtgtggctgaacctgggcggcagcaccccagacccccagggccctgagctgacctaccccttccagggcaccctggagccccagcctgccagtgacatcatcgacatcgactactttgagggcctggatggagagggcagaggagctgacctgggcagcttccctggcagccctggcaccagcgagaaccacccagacacagaaggagagacccccagctggagcctgctggacctgtatgatgacttcaccccatttgatgaaagtgacttctaccccaccaccagcttctatgatgacctggatgaggaggaggaggaggaggaggatgacaaggatgctgtgggcggcggggacctggaggatgaaaatgagctgctggtgcccaccgggaagccaggcctgggccctggcaccggccagcccaccagccgctggcatgctgtgcccccccagcacaccctgggctctgtgcccggcagcagcatcgccctgcggcccaggcctggagagcccggccgggacctggccagcagtgaaaatggaacagagtgccgcagcggctttgtgcgccacaacggcagctgccgctctgtgtgtgacctcttccccagctactgccacaatggaggccagtgctacctggtggagaacattggagccttctgccgctgcaacacccaggactacatctggcacaagggcatgagatgtgagagcatcatcacagacttccaggtgatgtgtgtggccgtgggcagcgctgccctggtgctgctgctgctcttcatgatgaccgtcttctttgccaagaagctgtacctgctgaagacagagaacaccaagctgcggaggaccaacaagttccgcaccccatctgagctgcacaatgacaacttcagcctgagcaccatcgccgagggcagccaccccaatgatgaccccagcgccccccacaagatccaggaggtgctgaagagctgcctgaaggaggaggagagcttcaacatccagaacagcatgagccccaagctggagggcggcaaaggagaccaggccgacctggatgtgaactgcctgcagaacaacctgacctag

SEQ ID NO: 166280 - DNA, 1620 bp, Artificial Sequence
  derived and/or modified sequence
atgggccgggccggcggcggcggccccggccggggccccccccccctcctgctattcctgggggcagccctcgttctagcctccggagccgtacccgctcgggaggcaggatctgctgtagaagccgaggagctcgtgaaagggtcgccagcgtgggaacctccagccaacgacacccgggaagaagctggccctcctgctgccggggaggacgaggcctcatggaccgctccaggaggcgaactcgcgggcccagaagaagtcctccaggaaagcgctgctgtcactggcacagcatggctcgaggcagacagtccagggctaggtggcgtaacggctgaggccggctccggagacgcacaggccttgcctgcgacattacaggcgcctcatgaagtgctgggccagagcatcatgccaccggccatcccagaagccacagaagctagtgggccaccgtctccaacacctggggataagctgtctcctgccagcgagctccccaaagaatccccactcgaggtttggctgaatctagggggcagtacaccggaccctcagggtccagagcttacctatccattccagggcactctggagccccagcctgctagcgatatcattgacattgactactttgaaggtttggacggggaaggcaggggggccgatctcggcagcttccctggcagcccaggtactagcgaaaatcatcccgataccgagggagagacaccttcctggtccctactcgatctatacgatgatttcacacccttcgatgagtcagatttctacccaacaacatccttctatgatgacctggacgaagaagaggaggaagaggaggacgataaagatgctgttggaggcggagacctggaggacgaaaatgagcttctggtgcccacagggaagcctggactgggcccaggcaccggacagcctacatctcgatggcacgccgtgcctccgcagcacactctcggttccgtcccagggagctccattgccttgcggccaaggccaggcgaaccaggccgcgatcttgcttcatcagaaaacggtaccgagtgccggtccggctttgtgaggcacaatgggtcctgcaggagcgtatgcgacctgttcccaagctactgccataacggcggtcagtgttatctggtggagaatattggcgccttctgtaggtgcaatacccaggactacatctggcacaaaggcatgcgatgcgagagcataatcaccgacttccaggtcatgtgcgtagccgttggcagcgccgccttggttctgcttctccttttcatgatgacagtattcttcgctaaaaaattatacctacttaagaccgaaaacaccaaactcaggcggactaacaagttccgtactccaagcgagctgcacaacgataatttctcactctctactattgcagagggcagccaccccaatgacgacccttctgcgccacacaaaatccaggaagtgcttaagtcctgtctgaaagaagaagagtccttcaacattcagaacagcatgagtcctaagctggaggggggcaaaggcgatcaagctgacctcgatgtcaactgcctgcagaataacctaacttag

SEQ ID NO: 166281 - DNA, 1620 bp, Artificial Sequence
  derived and/or modified sequence
atggggcgagcgggaggaggtggccctggacggggaccccctccactcctgttgtttctgggggctgccctagtgctagcctcaggtgccgtgccggctagggaggcaggttctgccgtcgaagcagaagagcttgtgaaggggtcccccgcttgggagcccccagctaatgatacacgggaagaagcgggtcccccagctgctggagaggacgaggcatcctggactgccccaggtggagagttggctgggccagaagaagtgctgcaagagtctgccgctgtaacggggactgcctggttggaagctgactcccccggtcttggaggcgttacagcggaagccggttccggggatgctcaggctcttcctgctacgctgcaggctcctcacgaagtattgggccaaagcataatgcctcccgctattcccgaagcgactgaagccagcgggcctccttcccctacccctggtgacaagctaagtcccgcttctgaactccccaaagagtccccattggaggtatggctgaacctgggcggatctactccagacccacagggtcccgaactcacctatcccttccagggcaccctggagccacagcctgctagcgatataatcgatattgattattttgagggattggatggggaaggacgcggagcagacttaggatcattcccaggatcgcctgggacgagcgagaaccaccccgacactgaaggcgaaactcccagctggtcactgctagacttatacgatgatttcacccccttcgacgagagtgatttttatccgaccacctccttctatgacgatctggatgaggaggaggaggaggaggaagatgataaagatgcagtcggaggcggtgatcttgaggacgagaatgaactgctggtgcctacgggaaaacccggattgggcccaggaaccggccagccgacttcacgatggcatgctgttcccccacaacacacgttgggctcagtgcccggatcgagcattgctcttcggcctaggcccggtgaacctggacgtgatctggcctcctcagagaatgggaccgaatgtaggtctggttttgtccggcacaatggctcttgtcgctcagtgtgcgacttgttcccaagttactgtcacaatggaggacagtgctatcttgtggaaaacataggagctttttgtcgatgcaacacacaggactacatctggcacaagggtatgcgctgtgaaagcatcatcaccgattttcaggtgatgtgtgtcgcagtagggtcagcagccctggtcctgctgctcctcttcatgatgacagtgttttttgctaagaagttgtacttgctgaaaactgaaaacacaaaactgcgaaggacaaacaagtttagaaccccttcagagctccacaacgacaatttctccctgtccaccatcgccgagggcagccacccaaatgatgacccatctgccccacataagattcaggaagtcttaaaaagttgtctcaaagaagaagagagcttcaatattcagaattctatgagtcctaagttggaaggaggcaagggggaccaggcagatctggatgtgaattgtctacagaataacctgacttag

SEQ ID NO: 166282 - DNA, 1062 bp, Artificial Sequence
  derived and/or modified sequence
atggctacagagggcctccatgagaacgagaccctggctagtctgaagtccgaagctgaatcgctgaagggaaaactcgaagaagaaagggcgaaactgcatgatgtggagctgcatcaagtggccgaaagagtggaagcattaggtcagttcgtcatgaaaactagaagaaccctgaagggtcacggtaacaaggtactgtgtatggattggtgcaaggataagcgaaggatagtttcctcttcacaggacggcaaggtaattgtctgggacagctttaccactaacaaggagcatgcggtgaccatgccatgcacttgggtgatggcctgtgcctacgcaccatccggctgtgccatcgcctgcggaggattggataacaagtgtagcgtgtatccgctgacattcgacaaaaatgagaatatggcagctaagaaaaagtctgtggccatgcatacaaattacctgagtgcctgctcatttaccaacagtgacatgcagatattaaccgcttcgggcgatgggacttgtgcgctgtgggacgtcgagagtgggcagctcctgcagtcgtttcacggacacggtgccgatgtcctctgtctggacctggctccctccgaaacgggaaatacatttgtatcagggggatgtgataaaaaggctatggtttgggacatgaggtctggccagtgtgtgcaggctttcgaaacccatgaatctgacattaacagcgtgcggtattacccttctggggacgcatttgctagtggctccgatgacgcaacctgtagactgtacgacctgcgagcagatcgggaagtggctatatattcgaaggaatctatcattttcggagccagttctgtggacttcagcttaagcggcagactcttattcgccggctacaacgactacactattaatgtctgggacgtactgaagggcagccgggtgagcattttattcggccatgaaaacagggtgtctacactgcgggtgtcacccgatgggaccgctttctgctcaggcagctgggaccatactctccgggtctgggcatag

SEQ ID NO: 166283 - DNA, 852 bp, Artificial Sequence
  derived and/or modified sequence
atggcgaccgagggacttcatgagaatgaaacactggcttcattgaagtccgaggccgaaagcctgaaaggtaaactagaagaagaaagagctaagttgcatgatgtcgagttgcatcaggtggccgaacgggttgaggccttaggccagttcgtcatgaagacccgtagaacattaaaaggacacgggaataaagttctgtgtatggactggtgtaaagataaaaggaggattgtgagctcctcccaggatggaaaagtgatcgtttgggattcttttacaactaacaagatcctgactgcaagcggggacgggacttgcgcactgtgggatgtggagtccgggcaactactgcaatcattccatggccatggggccgacgttctgtgcctggatctcgccccctctgaaaccggaaatacattcgtgagcgggggctgtgataaaaaggcaatggtctgggacatgcggtcaggacagtgcgttcaggctttcgaaacccacgaatctgacattaactccgtgagatattatccatctggagacgcgttcgcctcaggctctgatgatgccacctgtcgactgtacgatctcagagcagatcgagaggttgcgatctactcaaaagaaagtataatttttggtgccagctccgttgattttagcctgagcggacgattgctgtttgccgggtacaatgattacaccattaacgtgtgggatgtcctgaaggggagcagagtttctatcctattcgggcatgaaaacagggtgagcactttacgggtctcccccgacggaaccgccttttgttcagggagctgggatcacaccctgcgagtttgggcatag

SEQ ID NO: 166284 - DNA, 1735 bp, Artificial Sequence
  derived and/or modified sequence
atcgcggagggcggggccgcggggcggtgctcggggccggggacggctgctggagcggcgcccgccgcggctcagcgcattcccgctctccgcttccctctccgctgcgtccccgcgcgaagatggcaaccgaggggctgcacgagaacgagacgctggcgtcgctgaagagcgaggccgagagcctcaagggcaagctggaggaggagcgagccaagctgcacgatgtggagctgcaccaggtggcggagcgggtggaggccctggggcagtttgtcatgaagaccagaaggaccctcaaaggccacgggaacaaagtcctgtgcatggactggtgcaaagataagaggaggatcgtgagctcgtcacaggatgggaaggtgatcgtgtgggattccttcaccacaaacaaggagcacgcggtcaccatgccctgcacgtgggtgatggcatgtgcttatgccccatcgggatgtgccattgcttgtggtggtttggataataagtgttctgtgtaccccttgacgtttgacaaaaatgaaaacatggctgccaaaaagaagtctgttgctatgcacaccaactacctgtcggcctgcagcttcaccaactctgacatgcagatcctgacagcgagcggcgatggcacatgtgccctgtgggacgtggagagcgggcagctgctgcagagcttccacggacatggggctgacgtcctctgcttggacctggccccctcagaaactggaaacaccttcgtgtctgggggatgtgacaagaaagccatggtgtgggacatgcgctccggccagtgcgtgcaggcctttgaaacacatgaatctgacatcaacagtgtccggtactaccccagtggagatgcctttgcttcagggtcagatgacgctacgtgtcgcctctatgacctgcgggcagatagggaggttgccatctattccaaagaaagcatcatatttggagcatccagcgtggacttctccctcagtggtcgcctgctgtttgctggatacaatgattacactatcaacgtctgggatgttctcaaagggtcccgggtctccatcctgtttggacatgaaaaccgcgttagcactctacgagtttcccccgatgggactgctttctgctctggatcatgggatcataccctcagagtctgggcctaatcatcttctgacagtgcactcatgtatacctgagaatttgaaatcttcacatgtaaatagatattacttctagaggagcttagagtttattgcagtgtagcttaggggagcaacccatggctcacaggtcactaagcgtctccaatatgactattaaaactgtcacctctggaaatacactagtgtgagccttcagcactgcgagaataccttcaagtacagtatttttcttttggaacactttttaaaatgtatctgtttttaaggttattctaaattatagtagcctcaactcattctgtcaccagtagaattcagcagttaatatattccatattatttctttgaatcaattcattttcagagcactttaaagtctgatatttctcgatgtgcactgtgatgcctggaaccttcctctggaagtgctgattttatggactgaggactggtgactggtctgtgatagaagcaaattccaattccaaatgtaattagacaaaaatcatttttttagaatgtgtttttattgtaaaagtatctttttcagc

SEQ ID NO: 166285 - DNA, 2678 bp, Artificial Sequence
  derived and/or modified sequence
gcgcgaagatggcaaccgaggggctgcacgagaacgagacgctggcgtcgctgaagagcgaggccgagagcctcaagggcaagctggaggaggagcgagccaagctgcacgatgtggagctgcaccaggtggcggagcgggtggaggccctggggcagtttgtcatgaagaccagaaggaccctcaaaggccacgggaacaaagtcctgtgcatggactggtgcaaagataagaggaggatcgtgagctcgtcacaggatgggaaggtgatcgtgtgggattccttcaccacaaacaagatcctgacagcgagcggcgatggcacatgtgccctgtgggacgtggagagcgggcagctgctgcagagcttccacggacatggggctgacgtcctctgcttggacctggccccctcagaaactggaaacaccttcgtgtctgggggatgtgacaagaaagccatggtgtgggacatgcgctccggccagtgcgtgcaggcctttgaaacacatgaatctgacatcaacagtgtccggtactaccccagtggagatgcctttgcttcagggtcagatgacgctacgtgtcgcctctatgacctgcgggcagatagggaggttgccatctattccaaagaaagcatcatatttggagcatccagcgtggacttctccctcagtggtcgcctgctgtttgctggatacaatgattacactatcaacgtctgggatgttctcaaagggtcccgggtctccatcctgtttggacatgaaaaccgcgttagcactctacgagtttcccccgatgggactgctttctgctctggatcatgggatcataccctcagagtctgggcctaatcatcttctgacagtgcactcatgtatacctgagaatttgaaatcttcacatgtaaatagatattacttctagaggagcttagagtttattgcagtgtagcttaggggagcaacccatggctcacaggtcactaagcgtctccaatatgactattaaaactgtcacctctggaaatacactagtgtgagccttcagcactgcgagaataccttcaagtacagtatttttcttttggaacactttttaaaatgtatctgtttttaaggttattctaaattatagtagcctcaactcattctgtcaccagtagaattcagcagttaatatattccatattatttctttgaatcaattcattttcagagcactttaaagtctgatatttctcgatgtgcactgtgatgcctggaaccttcctctggaagtgctgattttatggactgaggactggtgactggtctgtgatagaagcaaattccaattccaaatgtaattagacaaaaatcatttttttagaatgtgtttttattgtaaaagtatctttttcagcttcctgttctattgtcttttttcagatacaacatttttgtctatggtgaactgctgtaaatgacgcagagaaatgcctaaaaaggacaggtggtttgactcatggatgatgatgatgtcactgtgccacttggacagggcgttttctctgaattgaagggaaagccaatggtgtttgtaaacaaatgcttctgagagcaaagaaaagtcttctgtgtgggaacacaagatagtaaacttatttaaaaacctattagtagaattagtggaaacacttaggttaaagtgaatcttgtccatataaattatattcatggccgggcgcggtggctcacgcttgtaatcccagcactttgggaggccgaggcgggcggatcacgaggtcaggagttcgagaccacggtgaaaccctgtctctactaaaaaatacaaaaaattagccgggcgtggtggcgggcgcctgtagtcccagctactcggagaggctgaggcaggagaatggcgtgaacccgggaggtggagcttgcagtgagccgaggtcgagccactgcagcctgggtgacaaagcgagactccgtctcaaaaaaaaaaaaaaattatattcatatgtattgcattgcaattataattacatatgcagattgattgatagtcatgaataataacgtctgctcctcttacatagaaaaacgatattaaaagaagatcttctctttatttgagactcagaattccttctagaagaaggaagtgctttttgttataggatcccttcttttcctttttttgtttttttgtaagatgtagatgcttattctttgctttagaaaacttctcacttaaaaagatggcatgcacctaggggaataaaaggtcacctcagacaccaggtgtcattcctggtgaggcctgcctcgtcggtggcctggggtctgccggcaggttctggctgcacctgaaggctgcgtgcaccttgtcccctggacaggtctcctttcctggccctgctccagcccagcccttcttctagtggtagctctggctttgcaggcccagctccaggccctgctcctcagagagactcttccagagctggagctgggcacagccataagacaggactggaccagatgctcctgtaaacatccaggggtgtgccaggcccaccctcacaactgcttgttcaggtatcgtgatgggccactcggtccaaaatcagccaggccatcttttccatcatctcacttcaaataaacataataattata

SEQ ID NO: 166286 - DNA, 1062 bp, Artificial Sequence
  derived and/or modified sequence
atggccacagagggcctgcatgaaaatgagaccctggccagcctgaagtctgaggccgagagcctgaagggcaagctggaggaggagcgggccaagctgcatgatgtggagctgcaccaggtggccgagcgggtggaggccctgggccagtttgtgatgaagaccaggaggaccctgaagggccacggcaacaaggtgctgtgcatggactggtgcaaggacaagaggcgcatcgtgagcagcagccaggacggcaaggtgattgtgtgggacagcttcaccaccaacaaggagcacgctgtgaccatgccctgcacctgggtgatggcctgtgcctatgcccccagcggctgtgccatcgcctgtggcggcctggacaacaagtgcagcgtgtaccccctgacctttgacaagaatgaaaacatggccgccaagaagaagtctgtggccatgcacaccaactacctgagcgcctgcagcttcaccaacagcgacatgcagatcctgacagccagcggagatggcacctgtgccctgtgggatgtggagagcggccagctgctgcagagcttccacggccacggggctgatgtgctgtgcctggacctggcccccagcgagaccggcaacacctttgtgtctgggggctgtgacaagaaggccatggtgtgggacatgaggagcggccagtgtgtgcaggcctttgagacccatgaaagtgacatcaacagcgtgcgctactaccccagcggagatgcctttgccagcggcagtgatgatgccacctgccgcctgtatgacctgcgggctgaccgggaggtggccatctacagcaaggagagcatcatctttggagccagctctgtggacttcagcctgagcggccgcctgctgtttgctggctacaatgactacaccatcaacgtgtgggatgtgctgaagggcagccgggtgtccatcctgtttggacatgaaaatagagtgtccaccctgcgggtgtccccagatggaacagccttctgcagcggctcctgggaccacaccctgcgggtgtgggcctag

SEQ ID NO: 166287 - DNA, 852 bp, Artificial Sequence
  derived and/or modified sequence
atggccacagagggcctgcatgaaaatgagaccctggccagcctgaagtctgaggccgagagcctgaagggcaagctggaggaggagcgggccaagctgcatgatgtggagctgcaccaggtggccgagcgggtggaggccctgggccagtttgtgatgaagaccaggaggaccctgaagggccacggcaacaaggtgctgtgcatggactggtgcaaggacaagaggcgcatcgtgagcagcagccaggacggcaaggtgattgtgtgggacagcttcaccaccaacaagatcctgacagccagcggagatggcacctgtgccctgtgggatgtggagagcggccagctgctgcagagcttccacggccacggggctgatgtgctgtgcctggacctggcccccagcgagaccggcaacacctttgtgtctgggggctgtgacaagaaggccatggtgtgggacatgaggagcggccagtgtgtgcaggcctttgagacccatgaaagtgacatcaacagcgtgcgctactaccccagcggagatgcctttgccagcggcagtgatgatgccacctgccgcctgtatgacctgcgggctgaccgggaggtggccatctacagcaaggagagcatcatctttggagccagctctgtggacttcagcctgagcggccgcctgctgtttgctggctacaatgactacaccatcaacgtgtgggatgtgctgaagggcagccgggtgtccatcctgtttggacatgaaaatagagtgtccaccctgcgggtgtccccagatggaacagccttctgcagcggctcctgggaccacaccctgcgggtgtgggcctag

SEQ ID NO: 166288 - DNA, 1062 bp, Artificial Sequence
  derived and/or modified sequence
atggccaccgagggcctgcacgagaacgagaccctggccagcctgaaaagcgaagcagaaagcctgaaggggaagctggaggaggagcgggcaaaactgcatgacgtagaacttcaccaggtggctgagcgggtcgaggccttaggtcagttcgtgatgaagacaaggagaacactgaaaggacacgggaacaaggtgttgtgcatggattggtgcaaggacaaacggagaattgtcagcagctcccaggacggtaaggtaatcgtgtgggattcttttacaacaaataaggagcacgctgttacaatgccttgcacctgggtgatggcctgcgcctacgcgccatcaggttgtgccattgcctgtggggggctggacaacaagtgctcagtctaccccttgactttcgacaagaacgaaaacatggccgccaagaagaagagtgtggccatgcacacaaattacctctccgcctgcagtttcacaaattctgacatgcaaattctgacagcctccggcgatgggacctgcgcgctctgggacgtcgagtcgggccagcttcttcaatctttccacggccacggggctgatgtgctttgtctggacctggctccttcagagacgggcaacaccttcgtctctggggggtgcgataaaaaggcaatggtgtgggatatgaggtcaggccagtgcgtgcaggccttcgagacacacgaatctgacatcaatagcgtccggtattatcccagcggagatgcctttgcctcagggagcgacgacgctacttgtcgcttgtacgacctccgcgctgatcgtgaggtagccatttattcgaaagagtcaatcatttttggcgcaagtagcgtagactttagcctgtcgggacggttactgtttgccgggtataatgactatactattaatgtctgggacgtcctaaaaggttcccgagtttcaatactcttcggccacgaaaaccgcgtgtccacgctgcgggttagccccgacggcacggctttctgtagcgggagctgggaccatacactgagggtgtgggcctag

SEQ ID NO: 166289 - DNA, 852 bp, Artificial Sequence
  derived and/or modified sequence
atggccaccgagggcctgcacgagaacgagaccctggccagcctgaagagtgaggctgaatccttgaaggggaagcttgaagaggaacgcgccaagctccacgacgtcgaactgcatcaggtggccgaacgtgtagaagcgctgggacaattcgtgatgaaaaccagacgtacacttaaggggcatggcaacaaagtgttatgcatggattggtgtaaagataagcgcaggatcgtgagctcgagtcaagacggaaaggttattgtctgggattcttttaccactaataagatcttgaccgcgtctggggacggaacctgtgccttgtgggatgtcgaaagcggccaactgctacagtcattccacggtcacggggccgacgtcctgtgcctggatttagccccctccgaaacaggcaacacgtttgttagcggtggttgtgataagaaagccatggtctgggatatgcgatccgggcagtgcgtccaggcttttgagacacatgaatccgacatcaactccgtccgttattatccgagcggtgatgcctttgcttcgggatcagacgatgcaacctgcagactctatgatttaagagctgaccgcgaggtggcgatttacagcaaagaatcaattatctttggtgctagctccgtggacttcagtttgtctggccgcttgctcttcgccgggtataacgactatacgatcaatgtctgggacgttctcaaggggagccgcgtgtctatcctgtttggccacgagaacagagtgtctaccctccgcgtgagtcctgacgggaccgcattttgctccgggtcctgggatcacacactgcgggtgtgggcctag

SEQ ID NO: 166290 - DNA, 1062 bp, Artificial Sequence
  derived and/or modified sequence
atggccacagaggggctgcacgagaatgagactttggcttctttgaaatctgaagctgagtctttgaagggtaagctcgaggaagagcgcgctaaactgcacgatgtcgaattgcaccaggtcgccgagcgcgtcgaagcactagggcagtttgttatgaagactcggcgaactttgaagggacacggcaacaaggtgttgtgcatggattggtgcaaagacaaaaggcgaatcgtctcgagctctcaagatgggaaggttattgtgtgggacagctttacaaccaacaaggagcatgccgtgaccatgccttgcacttgggtgatggcctgtgcctatgcccctagcggatgtgccatcgcatgtggagggcttgataacaagtgctcagtgtatccactgacgttcgataaaaacgaaaatatggcagcaaagaagaagagcgtcgccatgcacaccaactatctgagtgcctgtagtttcaccaatagcgacatgcaaattcttaccgctagcggcgatgggacgtgcgccctgtgggacgtggagtccggccaacttttgcaatctttccatggtcacggtgccgatgttctgtgtcttgacctggccccaagcgaaacagggaacactttcgtgtcaggagggtgcgacaagaaggctatggtgtgggacatgagatcaggccagtgcgtccaggcctttgagacccacgaatctgacatcaactccgttcggtattacccttccggggatgcgttcgcatctggtagtgacgatgctacatgcagactctacgaccttagggccgaccgagaagttgccatttattcaaaagaatccatcatttttggagcttcgagcgtcgacttctccctgagcgggcgtctgctctttgctggctacaacgactacaccatcaatgtgtgggatgtgcttaaggggtctcgcgtctcaatactgtttgggcatgagaatagagtctctacgctcagagttagcccggacggcacagccttttgctctggctcgtgggatcacactctccgagtttgggcatag

SEQ ID NO: 166291 - DNA, 852 bp, Artificial Sequence
  derived and/or modified sequence
atggctacggaggggctgcatgagaacgagacattggcttcattgaagagcgaggcagagagcctcaaagggaaactggaagaggaaagagccaaattgcatgatgtggagctgcatcaggtcgccgagagggtagaagccctcggacaatttgttatgaaaacccgcagaacattaaagggccacgggaacaaggtgctctgtatggactggtgcaaagacaagaggaggatcgtttcttcctcccaggacggaaaagtgattgtgtgggacagctttacaactaacaaaatcttgacagctagcggcgacggcacatgcgccctgtgggacgtggagtctggacagctgcttcagagtttccacggccatggcgctgacgtgctgtgtctggatctagccccatccgagacgggcaataccttcgtcagtgggggttgtgacaaaaaagctatggtttgggacatgagatcggggcagtgcgtacaggcatttgaaactcatgagagcgatattaactcggtcaggtactacccgtcaggagatgccttcgcctcaggttccgatgatgccacctgtagactctacgacctccgggctgatcgggaggtcgcgatctatagtaaggagagcatcatctttggagcctccagcgtggatttctctcttagcggacgactgctcttcgctggatacaacgactatactattaatgtgtgggatgtcttaaagggctcaagggtctccatcttgttcggacacgaaaatcgagtgtccaccttgcgcgttagccctgacggcactgcgttctgtagtggcagttgggatcatactctgagggtttgggcgtag

SEQ ID NO: 166292 - DNA, 1062 bp, Artificial Sequence
  derived and/or modified sequence
atggccaccgagggcctgcacgagaacgagaccctggccagcctgaagagcgaggccgagagcctgaagggcaagctggaggaggagagagccaagctgcacgacgtggagctgcaccaggtggccgagagagtggaggccctgggccagttcgtgatgaagaccagaagaaccctgaagggccacggcaacaaggtgctgtgcatggactggtgcaaggacaagagaagaatcgtgagcagcagccaggacggcaaggtgatcgtgtgggacagcttcaccaccaacaaggagcacgccgtgaccatgccctgcacctgggtgatggcctgcgcctacgcccccagcggctgcgccatcgcctgcggcggcctggacaacaagtgcagcgtgtaccccctgaccttcgacaagaacgagaacatggccgccaagaagaagagcgtggccatgcacaccaactacctgagcgcctgcagcttcaccaacagcgacatgcagatcctgaccgccagcggcgacggcacctgcgccctgtgggacgtggagagcggccagctgctgcagagcttccacggccacggcgccgacgtgctgtgcctggacctggcccccagcgagaccggcaacaccttcgtgagcggcggctgcgacaagaaggccatggtgtgggacatgagaagcggccagtgcgtgcaggccttcgagacccacgagagcgacatcaacagcgtgagatactaccccagcggcgacgccttcgccagcggcagcgacgacgccacctgcagactgtacgacctgagagccgacagagaggtggccatctacagcaaggagagcatcatcttcggcgccagcagcgtggacttcagcctgagcggcagactgctgttcgccggctacaacgactacaccatcaacgtgtgggacgtgctgaagggcagcagagtgagcatcctgttcggccacgagaacagagtgagcaccctgagagtgagccccgacggcaccgccttctgcagcggcagctgggaccacaccctgagagtgtgggcctag

SEQ ID NO: 166293 - DNA, 852 bp, Artificial Sequence
  derived and/or modified sequence
atggccaccgagggcctgcacgagaacgagaccctggccagcctgaagagcgaggccgagagcctgaagggcaagctggaggaggagagagccaagctgcacgacgtggagctgcaccaggtggccgagagagtggaggccctgggccagttcgtgatgaagaccagaagaaccctgaagggccacggcaacaaggtgctgtgcatggactggtgcaaggacaagagaagaatcgtgagcagcagccaggacggcaaggtgatcgtgtgggacagcttcaccaccaacaagatcctgaccgccagcggcgacggcacctgcgccctgtgggacgtggagagcggccagctgctgcagagcttccacggccacggcgccgacgtgctgtgcctggacctggcccccagcgagaccggcaacaccttcgtgagcggcggctgcgacaagaaggccatggtgtgggacatgagaagcggccagtgcgtgcaggccttcgagacccacgagagcgacatcaacagcgtgagatactaccccagcggcgacgccttcgccagcggcagcgacgacgccacctgcagactgtacgacctgagagccgacagagaggtggccatctacagcaaggagagcatcatcttcggcgccagcagcgtggacttcagcctgagcggcagactgctgttcgccggctacaacgactacaccatcaacgtgtgggacgtgctgaagggcagcagagtgagcatcctgttcggccacgagaacagagtgagcaccctgagagtgagccccgacggcaccgccttctgcagcggcagctgggaccacaccctgagagtgtgggcctag

SEQ ID NO: 166294 - protein, 146 aa, Artificial Sequence
  derived and/or modified sequence
MTTNAGPLHPYWPQHLRLDNFVPNDRPTWHILAGLFSVTGVLVVTTWLLSGRAAVVPLGTWRRLSLCWFAVCGFIHLVIEGWFVLYYEDLLGDQAFLSQLWKEYAKGDSRYILGDNFTVCMETITACLWGPLSLWVVIAFLRQHPL

SEQ ID NO: 166295 - protein, 160 aa, Artificial Sequence
  derived and/or modified sequence
MTTNAGPLHPYWPQHLRLDNFVPNDRPTWHILAGLFSVTGVLVVTTWLLSGRAAVVPLGTWRRLSLCWFAVCGFIHLVIEGWFVLYYEDLLGDQAFLSQLWKEYAKGDSRYILGDNFTVCMETITACLWGPLSLWVVIAFLRQHPLRFILQLVVSVGQIY

SEQ ID NO: 166296 - protein, 230 aa, Artificial Sequence [sequence omitted]

SEQ ID NO: 166297 - DNA, 441 bp, Artificial Sequence
  derived and/or modified sequence
atgactacaaacgctggccctctacacccatattggcctcagcatctgcggctggacaatttcgtgcccaacgacaggcccacatggcatattctggcaggactgttttctgttaccggggtgctggtcgttacgacctggctgctcagtggccgcgctgccgttgtcccgctgggcacctggcggaggctctccctttgctggttcgccgtgtgcggctttatccacctcgtgatcgagggatggttcgtgctgtactacgaggacctgttgggcgatcaggcttttctgtcacagctttggaaggaatacgccaaaggtgactctcggtacatcctgggcgataatttcaccgtgtgtatggaaacaatcactgcatgtctttggggtcccctgtcattatgggtcgttattgccttcctgcgacagcatccgctgtag

SEQ ID NO: 166298 - DNA, 483 bp, Artificial Sequence
  derived and/or modified sequence
atgacaactaatgccggcccacttcatccatattggcctcaacacctccgcttggataacttcgtgcccaacgatcgccccacttggcatatcctggcaggtctattttccgtcactggcgtgctggttgtgacaacatggttgttgagcggcagagcggctgtcgttcccctggggacatggagaaggctgtccttatgttggttcgccgtctgtggcttcatccatctcgtgatcgagggatggttcgtgctttactacgaggatctgttaggcgaccaggccttcctctctcaactgtggaaagagtacgccaagggtgactctaggtacattttgggcgacaactttactgtctgcatggaaaccatcactgcatgcctttggggccctctgtcactatgggtggttatcgcttttttgcggcagcatccactccggttcattctgcagttggtagtctctgtcggacagatatactag

SEQ ID NO: 166299 - DNA, 693 bp, Artificial Sequence
  derived and/or modified sequence
atgactaccaacgcaggcccactgcatccctattggccacagcatctgcgactggacaacttcgtgcccaacgacaggcccacttggcacattctggccggccttttctccgttaccggcgttctggtggttaccacctggctgctttccggtcgggccgctgttgtccccttaggaacctggcggaggctgtcattgtgttggtttgccgtctgcgggttcatacacttggttattgaaggctggtttgtgctttactacgaggatctccttggggatcaagcgtttctgagccagctgtggaaagagtatgctaagggggactcaagatacatcctgggagacaattttaccgtgtgtatggagacaataacagcctgtctgtggggccctctttcactctgggtagtgatcgccttcctgcgtcagcacccccttaggtttatcctccagctggtcgtctctgttgggcagatctacggggacgttctctattttctgaccgagcacagggacggctttcagcacggtgagctcggacatccgctatatttttggttctatttcgtctttatgaacgccctgtggctcgtgctgcccggcgttctcgttctggatgctgtaaaacatctaactcacgctcagtccactctcgacgcgaaggcaactaaagccaagagtaaaaagaactag

SEQ ID NO: 166300 - DNA, 441 bp, Artificial Sequence
  derived and/or modified sequence
atgaccaccaatgccggccccctgcacccctactggccccagcacctgcggctggacaactttgtgcccaatgaccggcccacctggcacatcctggccggcctcttctctgtgactggagtgctggtggtgaccacctggctgctgagcggccgggctgctgtggtgcccctgggcacctggaggcggctgagcctgtgctggtttgctgtgtgtggcttcatccacctggtgattgagggctggtttgtgctgtactatgaggacctgctgggggaccaggccttcctgagccagctgtggaaggagtatgccaagggggacagccgctacatcctgggggacaacttcaccgtgtgcatggagaccatcacagcctgcctgtggggccccctgagcctgtgggtggtgattgccttcctgcggcagcaccccctgtag

SEQ ID NO: 166301 - DNA, 483 bp, Artificial Sequence
  derived and/or modified sequence
atgaccaccaatgccggccccctgcacccctactggccccagcacctgcggctggacaactttgtgcccaatgaccggcccacctggcacatcctggccggcctcttctctgtgactggagtgctggtggtgaccacctggctgctgagcggccgggctgctgtggtgcccctgggcacctggaggcggctgagcctgtgctggtttgctgtgtgtggcttcatccacctggtgattgagggctggtttgtgctgtactatgaggacctgctgggggaccaggccttcctgagccagctgtggaaggagtatgccaagggggacagccgctacatcctgggggacaacttcaccgtgtgcatggagaccatcacagcctgcctgtggggccccctgagcctgtgggtggtgattgccttcctgcggcagcaccccctgcgcttcatcctgcagctggtggtgtctgtgggccagatctactag

SEQ ID NO: 166302 - DNA, 693 bp, Artificial Sequence
  derived and/or modified sequence
atgaccaccaatgccggccccctgcacccctactggccccagcacctgcggctggacaactttgtgcccaatgaccggcccacctggcacatcctggccggcctcttctctgtgactggagtgctggtggtgaccacctggctgctgagcggccgggctgctgtggtgcccctgggcacctggaggcggctgagcctgtgctggtttgctgtgtgtggcttcatccacctggtgattgagggctggtttgtgctgtactatgaggacctgctgggggaccaggccttcctgagccagctgtggaaggagtatgccaagggggacagccgctacatcctgggggacaacttcaccgtgtgcatggagaccatcacagcctgcctgtggggccccctgagcctgtgggtggtgattgccttcctgcggcagcaccccctgcgcttcatcctgcagctggtggtgtctgtgggccagatctatggagatgtgctgtacttcctgacagagcacagagatggcttccagcacggggagctgggccaccccctgtacttctggttctactttgtgttcatgaatgccctgtggctggtgctgcccggggtgctggtgctggatgctgtgaagcacctgacccacgcccagagcaccctggatgccaaggccaccaaggccaagagcaagaagaactag

SEQ ID NO: 166303 - DNA, 441 bp, Artificial Sequence
  derived and/or modified sequence
atgaccaccaacgccggccccctgcacccctactggccccagcacctgagactcgacaatttcgttcccaacgatcgcccaacatggcatatactcgcagggctttttagcgtgaccggcgtgctggtcgtaaccacctggctgctatccggcagggctgcagttgtgccactgggtacttggcgtaggctgagcctgtgttggttcgctgtatgcgggttcattcacctggtaattgagggttggtttgtgctttattacgaagatttgctaggggatcaggccttcttgtcccagctgtggaaagaatatgcgaagggtgacagtcgctatatactcggagataatttcactgtatgcatggaaaccattacggcctgcctgtggggccccttgagcctgtgggtggtgatcgctttcctgcggcaacaccctctgtag

SEQ ID NO: 166304 - DNA, 483 bp, Artificial Sequence
  derived and/or modified sequence
atgaccaccaacgccggccccctgcacccctactggccccagcacttgcgcctagacaattttgttcctaacgatcgccccacgtggcatatcctggctggcctgttcagtgttaccggcgtcctggtggttacgacctggttactctctggccgagcagccgtggtgcccctcggaacctggcgtagactttcgctgtgctggttcgcagtatgtggattcatacatctcgtgattgaaggctggttcgtactgtactacgaagacctactgggggatcaagccttcctcagccaattgtggaaggagtacgcaaagggtgattcgcgatacatactgggtgacaatttcaccgtctgtatggagactataacagcatgtctctggggccccctatctctatgggtggtgattgcttttctgcgacagcaccccctacgtttcattcttcagttggtggtttcagtcggccagatttactag

SEQ ID NO: 166305 - DNA, 693 bp, Artificial Sequence
  derived and/or modified sequence
atgaccaccaacgccggccccctgcacccctactggccccagcacttaaggctggacaattttgtgcccaacgaccggcctacctggcacatcctggccggtctcttcagcgtaacaggcgtgttggtggtcacaacctggttgctatccggaagagccgccgttgtccccttaggtacatggagacgcctgtcactatgttggtttgcagtctgtggctttatccatctcgtcatagaagggtggttcgtgctctactatgaagacttgcttggcgatcaggctttcctgagccagctgtggaaagaatacgctaaaggggattcccgctatatcctgggcgacaattttacagtctgcatggaaacaattaccgcctgcctgtgggggcctctgtccctgtgggtggtgatcgccttcctacggcagcaccctctgcgctttatactacagcttgtggttagtgttggtcaaatctacggcgatgtcctgtactttctgacggaacatagggatgggttccagcacggagaactgggtcaccccctgtatttctggttttactttgtcttcatgaatgcactctggttagtgctccccggcgtgctggtgctggatgctgtcaagcacctaactcacgctcagagtacactggacgccaaggctaccaaagcaaagagcaaaaagaattag

SEQ ID NO: 166306 - DNA, 441 bp, Artificial Sequence
  derived and/or modified sequence
atgacgaccaacgccggacctctgcacccatattggccccagcacctgcgtctcgataattttgttccaaatgacagacccacgtggcacatcctggccggactgtttagcgtgactggcgtgctggtagtcacgacctggctcctcagcggccgagcagccgtcgttccattgggaacctggcggagactgtcactatgttggttcgcggtttgtggcttcattcaccttgtgatcgagggatggtttgtgctgtactacgaggacttgctgggagaccaagcttttctgagccagttgtggaaggagtacgctaagggggactcaagatatatccttggagacaatttcactgtatgtatggagacgataacggcttgcctctgggggccattaagtctctgggttgttattgcatttctgagacagcatccactgtag

SEQ ID NO: 166307 - DNA, 483 bp, Artificial Sequence
  derived and/or modified sequence
atgaccacgaacgccggaccattgcatccctattggccacagcatttgcggttagataactttgtccctaacgatcgcccaacgtggcacatcctggccggactgttctctgtgacaggagttctagtggtgaccacttggctcctttccgggagagccgctgtcgtcccgctgggaacatggcgtcggctctctctgtgttggttcgcagtgtgtggcttcatccacctcgtaattgagggttggttcgtgctgtactatgaagaccttctcggcgatcaggccttcctcagccagctttggaaggaatatgctaagggcgattccaggtacatccttggggacaacttcaccgtttgcatggagacaattaccgcctgcctgtggggtccactgtcactctgggttgtaatcgcatttctgaggcagcaccctctccgtttcatcttgcaactcgttgttagcgttggacagatctactag

SEQ ID NO: 166308 - DNA, 693 bp, Artificial Sequence
  derived and/or modified sequence
atgacaacaaatgcagggccattacatccctactggccccaacacttgagattggacaacttcgttcccaacgataggccaacttggcatattcttgccggtttgttctcagtgaccggtgtgctggtagtaacgacatggctactgagcgggcgtgctgccgtggtgcccctaggcacttggcgaaggttgtcactgtgctggttcgcagtatgcggttttatccatctggtgattgaaggatggtttgtgttatactacgaagatcttctcggagatcaggcttttctctcccaactgtggaaggaatacgctaaaggcgatagcagatacatactgggcgacaactttaccgtgtgcatggagaccataaccgcctgcctatggggacccctcagtctgtgggtagtaattgcctttctgagacaacatccactgcgttttattctgcaactagtggtgagtgttggccaaatctacggagatgttctgtacttcctgacagagcaccgcgacgggttccagcatggggagctcggacacccactatacttctggttctatttcgtgtttatgaatgccctctggctggttctgcccggagtgcttgtgttagatgccgtgaagcatcttacccacgcccagagcactcttgatgcaaaagctactaaagcaaaatctaagaaaaattag

SEQ ID NO: 166309 - DNA, 441 bp, Artificial Sequence
  derived and/or modified sequence
atgaccaccaacgccggccccctgcacccctactggccccagcacctgagactggacaacttcgtgcccaacgacagacccacctggcacatcctggccggcctgttcagcgtgaccggcgtgctggtggtgaccacctggctgctgagcggcagagccgccgtggtgcccctgggcacctggagaagactgagcctgtgctggttcgccgtgtgcggcttcatccacctggtgatcgagggctggttcgtgctgtactacgaggacctgctgggcgaccaggccttcctgagccagctgtggaaggagtacgccaagggcgacagcagatacatcctgggcgacaacttcaccgtgtgcatggagaccatcaccgcctgcctgtggggccccctgagcctgtgggtggtgatcgccttcctgagacagcaccccctgtag

SEQ ID NO: 166310 - DNA, 483 bp, Artificial Sequence
  derived and/or modified sequence
atgaccaccaacgccggccccctgcacccctactggccccagcacctgagactggacaacttcgtgcccaacgacagacccacctggcacatcctggccggcctgttcagcgtgaccggcgtgctggtggtgaccacctggctgctgagcggcagagccgccgtggtgcccctgggcacctggagaagactgagcctgtgctggttcgccgtgtgcggcttcatccacctggtgatcgagggctggttcgtgctgtactacgaggacctgctgggcgaccaggccttcctgagccagctgtggaaggagtacgccaagggcgacagcagatacatcctgggcgacaacttcaccgtgtgcatggagaccatcaccgcctgcctgtggggccccctgagcctgtgggtggtgatcgccttcctgagacagcaccccctgagattcatcctgcagctggtggtgagcgtgggccagatctactag

SEQ ID NO: 166311 - DNA, 693 bp, Artificial Sequence
  derived and/or modified sequence
atgaccaccaacgccggccccctgcacccctactggccccagcacctgagactggacaacttcgtgcccaacgacagacccacctggcacatcctggccggcctgttcagcgtgaccggcgtgctggtggtgaccacctggctgctgagcggcagagccgccgtggtgcccctgggcacctggagaagactgagcctgtgctggttcgccgtgtgcggcttcatccacctggtgatcgagggctggttcgtgctgtactacgaggacctgctgggcgaccaggccttcctgagccagctgtggaaggagtacgccaagggcgacagcagatacatcctgggcgacaacttcaccgtgtgcatggagaccatcaccgcctgcctgtggggccccctgagcctgtgggtggtgatcgccttcctgagacagcaccccctgagattcatcctgcagctggtggtgagcgtgggccagatctacggcgacgtgctgtacttcctgaccgagcacagagacggcttccagcacggcgagctgggccaccccctgtacttctggttctacttcgtgttcatgaacgccctgtggctggtgctgcccggcgtgctggtgctggacgccgtgaagcacctgacccacgcccagagcaccctggacgccaaggccaccaaggccaagagcaagaagaactag

SEQ ID NO: 166312 - DNA, 609 bp, Artificial Sequence
  derived and/or modified sequence
cggagccagcgtgggaggccgctgccgtcgcgcgccttggttgacggcgttgcacgctctcgcggggaggctctggctttccaaacgctggcaccgagggtttttctgttccttttttttttttttttttaacttcctgcctatacacacgcagccatcagcccacaaagacatgactaccaacgcgggccccttgcacccatactggcctcagcacctaagactggacaactttgtacctaatgaccgccccacctggcatatactggctggcctcttctctgtcacaggggtcttagtcgtgaccacatggctgttgtcaggtcgtgctgcggttgtcccattggggacttggcggcgactgtccctgtgctggtttgcagtgtgtgggttcattcacctggtgatcgagggctggttcgttctctactacgaagacctgcttggagaccaagccttcttatctcaactctggaaagagtatgccaagggagacagccgatacatcctgggtgacaacttcacagtgtgcatggaaaccatcacagcttgcctgtggggaccactcagcctgtgggtggtgatcgcctttctccgccagcatcccct

SEQ ID NO: 166313 - DNA, 714 bp, Artificial Sequence
  derived and/or modified sequence
cctaaagagagcccggagccagcgtgggaggccgctgccgtcgcgcgccttgcgctgcacgccagacaccggcctttcaatatccgtctcttccctgcaggttgacggcgttgcacgctctcgcggggaggctctggctttccaaacgctggcaccgagggtttttctgttccttttttttttttttttttaacttcctgcctatacacacgcagccatcagcccacaaagacatgactaccaacgcgggccccttgcacccatactggcctcagcacctaagactggacaactttgtacctaatgaccgccccacctggcatatactggctggcctcttctctgtcacaggggtcttagtcgtgaccacatggctgttgtcaggtcgtgctgcggttgtcccattggggacttggcggcgactgtccctgtgctggtttgcagtgtgtgggttcattcacctggtgatcgagggctggttcgttctctactacgaagacctgcttggagaccaagccttcttatctcaactctggaaagagtatgccaagggagacagccgatacatcctgggtgacaacttcacagtgtgcatggaaaccatcacagcttgcctgtggggaccactcagcctgtgggtggtgatcgcctttctccgccagcatcccctccgcttcattctacagcttgtggtctctgtgggccagatctatg

SEQ ID NO: 166314 - DNA, 1775 bp, Artificial Sequence
  derived and/or modified sequence
tctaattggatgggaggtctgggatgggtctggattctgattgattgctccatctgggggcccactggtggttaggcgtttgattggctttttagaactggcatatggagattgagggtcttcatgccaattggtcagtaggactgagaggcctgggttctaactagttcttctgacttgaggtcgggagaagagagaatgaccgctgctattaggactgaggagttctgagcactgaagagctggggagggggtggttgcagtgtatagcgtgtgatctgcttgtaacagtttcgttgcattatactaagggttactctacctagaaaagggcggaggtgaaaggatgcaacgcaacgctaatttcaccagcggaagaagcgggtacagaccttaatgagtccccgttttgatcgactgataagggaatggggaaattgaagccaggactcgatgcagattggctacggatccaaaacgcccactaaccttggcgcgtcccagtctccaccccaaacctaactcaggtgaaaatggcgccacgcgcgggggcggggctagaggtacaaagagagtgtctattggttgggagcggcacgggccgccttcttcgcttcaccattggctcgctccgtaaggcaagagaacccactaggggatgagcccgaactagggatgtgacagagcgcgagacccagcctaaagagagcccggagccagcgtgggaggccgctgccgtcgcgcgccttggtttttctgttccttttttttttttttttttaacttcctgcctatacacacgcagccatcagcccacaaagacatgactaccaacgcgggccccttgcacccatactggcctcagcacctaagactggacaactttgtacctaatgaccgccccacctggcatatactggctggcctcttctctgtcacaggggtcttagtcgtgaccacatggctgttgtcaggtcgtgctgcggttgtcccattggggacttggcggcgactgtccctgtgctggtttgcagtgtgtgggttcattcacctggtgatcgagggctggttcgttctctactacgaagacctgcttggagaccaagccttcttatctcaactctggaaagagtatgccaagggagacagccgatacatcctgggtgacaacttcacagtgtgcatggaaaccatcacagcttgcctgtggggaccactcagcctgtgggtggtgatcgcctttctccgccagcatcccctccgcttcattctacagcttgtggtctctgtgggccagatctatggggatgtgctctacttcctgacagagcaccgcgacggattccagcacggagagctgggccaccctctctacttctggttttactttgtcttcatgaatgccctgtggctggtgctgcctggagtccttgtgcttgatgctgtgaagcacctcactcatgcccagagcacgctggatgccaaggccacaaaagccaagagcaagaagaactgaggagtggtggaccaggctcgaacactggccgaggaggagctctctgcctgccagaagagtctagtcctgctcccacagtttggagggacaaagctaattgatctgtcacactcaggctcatgggcaggcacaagaaggggaataaaggggctgtgtgaaggcactgctgggagccattagaacacagatacaagagaagccaggaggtctatgatggtgacgatttttaaaatcaggaaataaaagatcttgactctaa

SEQ ID NO: 166315 - protein, 305 aa, Artificial Sequence
  derived and/or modified sequence
MTSRTPLLVTACLYYSYCNSRHLQQGVRKSKRPVFSHCQVPETQKTDTRHLSGARAGVCPCCHPDGLLATMRDLLQYIACFFAFFSAGFLIVATWTDCWMVNADDSLEVSTKCRGLWWECVTNAFDGIRTCDEYDSILAEHPLKLVVTRALMITADILAGFGFLTLLLGLDCVKFLPDEPYIKVRICFVAGATLLIAGTPGIIGSVWYAVDVYVERSTLVLHNIFLGIQYKFGWSCWLGMAGSLGCFLAGAVLTCCLYLFKDVGPERNYPYSLRKAYSAAGVSMAKSYSAPRTETAKMYAVDTRV

SEQ ID NO: 166316 - protein, 119 aa, Artificial Sequence
  derived and/or modified sequence
MTSRTPLLVTACLYYSYCNSRHLQQGVRKSKRPVFSHCQVPETQKTDTRHLSGARAGVCPCCHPDGLLATMRDLLQYIACFFAFFSAGFLIVATWTDCWMVNADDSLEMLDLRETILIP

SEQ ID NO: 166317 - DNA, 918 bp, Artificial Sequence
  derived and/or modified sequence
atgacttcccgcaccccacttttggtgactgcctgtctttactacagctactgtaatagccgccacctgcagcagggcgttcgaaaatctaagcggccagttttctcccattgccaggtgccagagactcagaaaacggatacgcggcacctgtcgggagcgagggccggcgtgtgcccatgctgccaccctgacggcttacttgctactatgagggatctgttgcagtacattgcctgtttctttgcattcttctccgcagggtttctgattgtggcaacctggactgactgttggatggtcaatgccgacgattctcttgaggtctccacaaagtgccgagggctgtggtgggagtgcgtcaccaacgccttcgatgggatcagaacatgcgacgagtacgacagcatcctcgccgaacacccactgaagctggtggtcactcgcgctttgatgatcacggcagatatactcgccggctttggatttttgaccttactgttagggctcgactgtgtaaagttcctccccgacgaaccgtacattaaagtgcggatttgctttgtagcaggggcaacattgctcatcgctggcactcctggcattatcgggagcgtttggtacgcagttgatgtgtatgtcgaacgaagtactttggttctgcacaatatattcctcggtatacaatataaattcggatggtcatgctggctgggaatggccggctcactcggatgtttcctggccggagccgtactgacctgctgcttgtatctttttaaggacgttggccctgaaaggaactacccatattcccttcgaaaggcgtactcagccgccggcgtaagtatggcaaaatcatattctgcgccgcgtaccgagacggccaaaatgtacgccgtggatacaagggtttag

SEQ ID NO: 166318 - DNA, 360 bp, Artificial Sequence
  derived and/or modified sequence
atgacctcccggacacccctcctcgtgaccgcctgtctatattactcgtactgcaattcacgtcatcttcagcagggtgtaaggaagtcaaagcgccccgtcttctcccattgtcaagttccagaaacacagaaaaccgacactaggcatttgtcaggcgctagggcgggcgtctgcccctgttgtcatccggacggcttactcgccactatgcgtgatctgcttcagtatatagcatgtttctttgccttcttttccgccggctttctcatcgtggctacttggaccgattgctggatggtgaatgcagacgatagcttggaaatgctggacttgagagagaccattctgattccctag

SEQ ID NO: 166319 - DNA, 918 bp, Artificial Sequence
  derived and/or modified sequence
atgaccagcaggacccccctgctggtgacagcctgcctgtactacagctactgcaacagccgccacctgcagcagggcgtgaggaagagcaagaggcctgtgttcagccactgccaggtgcctgagacccagaagacagacaccaggcacctgagcggggcccgggccggcgtgtgcccctgctgccacccagatggcctgctggccaccatgagggacctgctgcagtacatcgcctgcttctttgccttcttctctgctggcttcctgattgtggccacctggacagactgctggatggtgaatgctgatgacagcctggaggtgtccaccaagtgccggggcctgtggtgggagtgtgtgaccaatgcctttgatggcatccgcacctgtgatgaatatgacagcatcctggccgagcaccccctgaagctggtggtgacccgggccctgatgatcacagctgacatcctggccggcttcggcttcctgaccctgctgctgggcctggactgtgtgaagttcctgcctgatgagccctacatcaaggtgcgcatctgctttgtggccggggccaccctgctgattgctggcaccccaggcatcatcggctctgtgtggtatgctgtggatgtgtatgtggagaggagcaccctggtgctgcacaacatcttcctgggcatccagtacaagtttggctggagctgctggctgggcatggccggcagcctgggctgcttcctggccggggctgtgctgacctgctgcctgtacctgttcaaggatgtgggccctgagaggaactacccctacagcctgaggaaggcctacagcgctgctggggtgtccatggccaagagctacagcgcccccaggacagaaacagccaagatgtatgctgtggacaccagggtgtag

SEQ ID NO: 166320 - DNA, 360 bp, Artificial Sequence
  derived and/or modified sequence
atgaccagcaggacccccctgctggtgacagcctgcctgtactacagctactgcaacagccgccacctgcagcagggcgtgaggaagagcaagaggcctgtgttcagccactgccaggtgcctgagacccagaagacagacaccaggcacctgagcggggcccgggccggcgtgtgcccctgctgccacccagatggcctgctggccaccatgagggacctgctgcagtacatcgcctgcttctttgccttcttctctgctggcttcctgattgtggccacctggacagactgctggatggtgaatgctgatgacagcctggagatgctggacctgcgggagaccatcctgatcccctag

SEQ ID NO: 166321 - DNA, 918 bp, Artificial Sequence
  derived and/or modified sequence
atgaccagccggacccccctgctggtgaccgcctgcctgtactactcatattgcaattctcgacatctacaacagggagtgcggaaatccaagaggccggtcttttctcactgccaggtgcctgaaacgcaaaagactgatactcgacatctcagcggcgctcgcgccggtgtttgcccctgctgccacccagatggtctgctggctaccatgcgggatttgttacagtacatcgcctgtttttttgctttcttttcagccgggtttctcattgttgccacctggaccgactgctggatggttaacgccgacgacagtctagaggtgtcgactaagtgtaggggcctttggtgggagtgtgttaccaacgcttttgacggaatccggacatgcgacgaatacgattcaatcctagctgaacatccactgaagctcgtggtgacccgcgcactcatgatcacggccgatattttggcagggtttgggttcttgacacttctgctgggcctcgactgtgtgaaatttctccctgacgaaccgtacattaaagttcggatctgcttcgtcgccggcgccacacttctgattgccgggaccccaggtattatagggagcgtctggtacgcggtggatgtatacgtggaacgctcaacgcttgtgcttcataacatcttcctgggcattcaatacaaattcgggtggagctgctggctgggcatggctgggagcctgggctgtttccttgcaggggccgtgctcacttgttgcttgtatctgttcaaggacgtgggacctgaaagaaactacccttatagtctcagaaaagcgtactccgctgctggggtttcaatggccaaaagttactcggctccacggaccgagaccgccaagatgtacgccgtcgacactcgagtatag

SEQ ID NO: 166322 - DNA, 360 bp, Artificial Sequence
  derived and/or modified sequence
atgaccagccggacccccctgctggtgaccgcctgcctgtactactcttactgcaatagtcggcatctgcaacagggtgtgagaaaatcaaaacggccagtgttcagtcattgccaagtgcctgaaacccaaaagacagacacaaggcatctgagcggcgcccgcgcaggcgtatgtccttgttgtcatccagatgggttgctcgccaccatgcgcgaccttctccaatacatcgcgtgcttttttgctttctttagcgctgggttcctgattgtagccacttggacagattgttggatggtcaatgccgatgactccctggagatgctcgacctgagagaaacaatcttaatcccctag

SEQ ID NO: 166323 - DNA, 918 bp, Artificial Sequence
  derived and/or modified sequence
atgacgtcccgcacaccccttctggtgactgcctgtctgtactattcctattgcaactccagacatctgcagcagggcgtaaggaaatctaaacgtcccgtgtttagccattgtcaagtcccagaaacgcagaagactgacacccgacacttaagcggcgctagagcaggagtctgtccatgttgccatcccgacggcttgctggctactatgcgcgacctgctacagtatatcgcctgcttctttgccttcttctcagcgggttttcttatcgtggccacatggaccgactgttggatggtcaatgcggatgattccctggaagtgtcaaccaaatgcaggggcctttggtgggaatgtgtgactaacgcattcgacggtataagaacctgcgatgagtatgatagcatcctggcggaacaccctttaaaactggtggtgacgagggccctcatgatcaccgcagatatactggcgggatttgggtttctcacactgctcctaggtctagactgcgtgaagttcctgcccgatgagccatatatcaaggtgcgcatctgttttgtggccggagcgacgcttctgatcgccggaacaccaggcattataggcagcgtgtggtacgcggtcgatgtctatgtggaaagaagcacattggtactgcacaatatcttcctgggcatccagtataagttcggctggagctgttggttggggatggctggctctctgggatgtttcctcgctggggctgtcctcacctgttgtctctatttgttcaaggatgtcggtcccgaacggaactacccgtactctctccgcaaggcttattccgcagccggagtctccatggccaaatcctactccgccccacgtacagaaactgcaaagatgtatgccgtggatacacgtgtgtag

SEQ ID NO: 166324 - DNA, 360 bp, Artificial Sequence
  derived and/or modified sequence
atgacctctcgtactcctttgctggtgacagcttgtctctactatagttattgcaatagcagacacctccagcagggagtgcgtaaatccaaacgtcccgtgttctcccactgccaggttcctgagacgcagaaaaccgacacccgacacctctccggggctcgtgccggtgtttgcccatgctgccacccagatgggctcttagctacgatgcgcgatctgcttcagtacattgcctgtttttttgctttcttttcagccggattcctgatcgttgcgacttggaccgactgctggatggtgaatgcagacgattcccttgagatgctcgacctcagggagaccatcctgatcccatag

SEQ ID NO: 166325 - DNA, 3273 bp, Artificial Sequence
  derived and/or modified sequence
cttcttccgagtggggaggagaatagctcactctccctagagggcctaagaaagatcagtttacaggttccagcatggggtgggacccttcctccttcccccgtcttggcactggcacttggtctggtgaccaccactagcccacagttgggtcagaaaacgttacagaactcctctctcccccacccgaaacacactcagcccttgcactgacctgccttctgattggaggctggttgcttcggataatgacctccaggaccccactgttggttacagcctgtttgtattattcttactgcaactcaagacacctgcagcagggcgtgagaaaaagtaaaagaccagtattttcacattgccaggtaccagaaacacagaagactgacacccgccacttaagtggggccagggctggtgtctgcccatgttgccatcctgatgggctgcttgccacaatgagggatcttcttcaatacatcgcttgcttctttgcctttttctctgctgggtttttgattgtggccacctggactgactgttggatggtgaatgctgatgactctctggaggtgagcacaaaatgccgaggcctctggtgggaatgcgtcacaaatgcttttgatgggattcgcacctgtgatgagtacgattccatacttgcggagcatcccttgaagctggtggtaactcgagcgttgatgattactgcagatattctagctgggtttggatttctcaccctgctccttggtcttgactgcgtgaaattcctccctgatgagccgtacattaaagtccgcatctgctttgttgctggagccacgttactaatagcaggtaccccaggaatcattggctctgtgtggtatgctgttgatgtgtatgtggaacgttctactttggttttgcacaatatatttcttggtatccaatataaatttggttggtcctgttggctcggaatggctgggtctctgggttgctttttggctggagctgttctcacctgctgcttatatctttttaaagatgttggacctgagagaaactatccttattccttgaggaaagcctattcagccgcgggtgtttccatggccaagtcatactcagcccctcgcacagagacggccaaaatgtatgctgtagacacaagggtgtaaaatgcacgtttcagggtgtgtttgcatatgatttaatcaatcagtatggttacattgataaaatagtaagtcaatccaggaacagttatttagaattcatattgaattaaattaattgctagcttaatcaaaatgtttgattctcctatactttttctttctattactcttatattttcccgtcattctctctgctaaccttccaccttatgcacacactttccctatattttaagataagtctgctaggatgtagaaatatttgtttgtgatttctatatagctattagagattatgacatagtaatattaaaatgaaatgatacttaaacagaaagcaatttccaaagaggccagggaccctaatctttgaagagatgaagaaacttacttttctccctggcttttggttcactttttgtacttttaacaagtgggtgaattatttgataattttgaggaagattattcttttaaattcaaactagtatgtcaatgcctaccattactctgattatattaaaacagaaaaaggaaataacaacttcgtataccagccactggtgagagttaaagacaagagctgcccccccacccccaaatgtcaaaggcaaatgctaaattgatactggagctcgtggtgactttctacctcactaacaacataagggatctccatattatttcaccactattctagctttgctgatatattgccaaatgattagactacagaatagttcaaccagagaatttactcatttattgattaaacatccaaatactattgtaatatactatgttaaaattcatcaattcaagtgcccacacaccactgaatcatcagcaccaagcaatatattagacatatggcaaaattcaacaaatatattttgatataaataaataaacgttcacgactttacttaaaaaatcaatgttgcggctgggcacggtagctcgcgtctgtaatccccgcactttgggaggccaaggcgggtggatcacgaggtcaagagacggagaccatcctggctaacatggtgaaaccctgtctctactaaaaatacaaaaattagccgggcgtggtggcggtgcctgtagtcccagctactcgggaggctgaggcaggagaatcgtttgaacccaggaggtggaggttgcagtgagcggagatcgcaccattgcactccagtctggcaacagagcgagactccatctcaaaaaacaaaaataaataaataaataaatattcttcataaaatgtgggttttggggaaaatatagaattacatatacatttaacgaagtcgctaatgacatttcattcatattcataatgtaaccatcttgaatttttttaattgtagcgattttaaaaatgtttgtaaaatttaatttccagttttctaattacttgtcagtcacattaataacattagtacctttatggtacccttgcagtacctgaaaagaatatcaacctgaaaagaatatcaactcacccagaaattagttctttgaaaaaaaagaaattaagttgtgaatttctaaagaccttgaaataagtgtttcaaatttaaagaacaaagaatgatgtgaaaatgagattatgattcctactacatgaattaacgtttcgagattgctgtttattacttcccagagtatctttaacagtattctctgaagcagttccaatctagttggagaattaacagcaattgatttaactatctcatttttattaactgtaatttactttaaaaatatttgcaaatcatactcattagttatttgatcattgttctatgcattttaaaattaattttgtgttgttcctctcaatatttgtttttaacatttattcccatttttattttatactattgtctgtcatgctttatgtattccaataagtgtcttgaaatccttgtggggaaaggcaggacaaaaataattagttaattagatttgaaaaatgtaatttttccattttaaatatttcatttgtataagaaaatatttcagagaaccatgatgataatggatatgtgtgactgttttgaatttttttctcaattaaaacattttgtatgtaatggga

SEQ ID NO: 166326 - DNA, 430 bp, Artificial Sequence
  derived and/or modified sequence
atgacctccaggaccccactgttggttacagcctgtttgtattattcttactgcaactcaagacacctgcagcagggcgtgagaaaaagtaaaagaccagtattttcacattgccaggtaccagaaacacagaagactgacacccgccacttaagtggggccagggctggtgtctgcccatgttgccatcctgatgggctgcttgccacaatgagggatcttcttcaatacatcgcttgcttctttgcctttttctctgctgggtttttgattgtggccacctggactgactgttggatggtgaatgctgatgactctctggagatgttggacctgagagaaactatccttattccttgaggaaagcctattcagccgcgggtgtttccatggccaagtcatactcagcccctcgcacagagacggccaa

SEQ ID NO: 166327 - DNA, 918 bp, Artificial Sequence
  derived and/or modified sequence
atgaccagcagaacccccctgctggtgaccgcctgcctgtactacagctactgcaacagcagacacctgcagcagggcgtgagaaagagcaagagacccgtgttcagccactgccaggtgcccgagacccagaagaccgacaccagacacctgagcggcgccagagccggcgtgtgcccctgctgccaccccgacggcctgctggccaccatgagagacctgctgcagtacatcgcctgcttcttcgccttcttcagcgccggcttcctgatcgtggccacctggaccgactgctggatggtgaacgccgacgacagcctggaggtgagcaccaagtgcagaggcctgtggtgggagtgcgtgaccaacgccttcgacggcatcagaacctgcgacgagtacgacagcatcctggccgagcaccccctgaagctggtggtgaccagagccctgatgatcaccgccgacatcctggccggcttcggcttcctgaccctgctgctgggcctggactgcgtgaagttcctgcccgacgagccctacatcaaggtgagaatctgcttcgtggccggcgccaccctgctgatcgccggcacccccggcatcatcggcagcgtgtggtacgccgtggacgtgtacgtggagagaagcaccctggtgctgcacaacatcttcctgggcatccagtacaagttcggctggagctgctggctgggcatggccggcagcctgggctgcttcctggccggcgccgtgctgacctgctgcctgtacctgttcaaggacgtgggccccgagagaaactacccctacagcctgagaaaggcctacagcgccgccggcgtgagcatggccaagagctacagcgcccccagaaccgagaccgccaagatgtacgccgtggacaccagagtgtag

SEQ ID NO: 166328 - DNA, 360 bp, Artificial Sequence
  derived and/or modified sequence
atgaccagcagaacccccctgctggtgaccgcctgcctgtactacagctactgcaacagcagacacctgcagcagggcgtgagaaagagcaagagacccgtgttcagccactgccaggtgcccgagacccagaagaccgacaccagacacctgagcggcgccagagccggcgtgtgcccctgctgccaccccgacggcctgctggccaccatgagagacctgctgcagtacatcgcctgcttcttcgccttcttcagcgccggcttcctgatcgtggccacctggaccgactgctggatggtgaacgccgacgacagcctggagatgctggacctgagagagaccatcctgatcccctag

SEQ ID NO: 166329 - protein, 337 aa, Artificial Sequence
  derived and/or modified sequence
MLRNNLGNSSDSKNEDGSVFSQTEHNIVATYLIMAGMISIISNIIVLGIFIKYKELRTPTNAIIINLAVTDIGVSSIGYPMSAASDLYGSWKFGYAGCQVYAGLNIFFGMASIGLLTVVAVDRYLTICLPDVGRRMTTNTYIGLILGAWINGLFWALMPIIGWASYAPDPTGATCTINWRKNDRSFVSYTMTVIAINFIVPLTVMFYCYYHVTLSIKHHTTSDCTESLNRDWSDQIDVTKMSVIMICMFLVAWSPYSIVCLWASFGDPKKIPPPMAIIAPLFAKSSTFYNPCIYVVANKKFRRAMLAMFKCQTHQTMPVTSILPMDVSQNPLASGRI

SEQ ID NO: 166330 - DNA, 1014 bp, Artificial Sequence
  derived and/or modified sequence
atgctgagaaacaacctgggcaacagcagcgacagcaagaacgaggacggcagcgtgttcagccagaccgagcacaacatcgtggccacctacctgatcatggccggcatgatcagcatcatcagcaacatcatcgtgctgggcatcttcatcaagtacaaggagctgagaacccccaccaacgccatcatcatcaacctggccgtgaccgacatcggcgtgagcagcatcggctaccccatgagcgccgccagcgacctgtacggcagctggaagttcggctacgccggctgccaggtgtacgccggcctgaacatcttcttcggcatggccagcatcggcctgctgaccgtggtggccgtggacagatacctgaccatctgcctgcccgacgtgggcagaagaatgaccaccaacacctacatcggcctgatcctgggcgcctggatcaacggcctgttctgggccctgatgcccatcatcggctgggccagctacgcccccgaccccaccggcgccacctgcaccatcaactggagaaagaacgacagaagcttcgtgagctacaccatgaccgtgatcgccatcaacttcatcgtgcccctgaccgtgatgttctactgctactaccacgtgaccctgagcatcaagcaccacaccaccagcgactgcaccgagagcctgaacagagactggagcgaccagatcgacgtgaccaagatgagcgtgatcatgatctgcatgttcctggtggcctggagcccctacagcatcgtgtgcctgtgggccagcttcggcgaccccaagaagatccccccccccatggccatcatcgcccccctgttcgccaagagcagcaccttctacaacccctgcatctacgtggtggccaacaagaagttcagaagagccatgctggccatgttcaagtgccagacccaccagaccatgcccgtgaccagcatcctgcccatggacgtgagccagaaccccctggccagcggcagaatctag

SEQ ID NO: 166331 - DNA, 1014 bp, Artificial Sequence
  derived and/or modified sequence
atgctcagaaacaatttggggaattcctcggactctaagaatgaggacggttccgttttcagccagaccgagcacaacatcgttgcaacctacttgattatggctggcatgatttctataatcagcaatattattgtccttggcatatttatcaagtacaaggaactccgtactcctaccaatgcaattattatcaatctggctgtgaccgacattggcgttagcagcattgggtaccccatgtcagccgcttctgacctgtatggctcttggaaattcggatacgccgggtgccaagtctacgctggtctgaatatctttttcggcatggcgtctatcggcctgcttaccgtggtggctgtggaccgatatctcaccatctgtctgcccgatgtgggcagacgtatgaccacaaatacttacatcgggctcattctgggagcatggatcaacgggctgttttgggcccttatgcccatcatcggctgggcttcctacgcgcctgaccctacaggggcaacatgtaccattaactggcgtaagaacgatagatctttcgtatcatataccatgaccgtcatcgcgatcaatttcatcgtaccactcaccgtgatgttttactgctactaccacgtgacattgtcgataaagcaccacacaactagcgattgtaccgagtccctgaatagagattggtcagaccagatagacgtcactaagatgtcagtgataatgatctgcatgtttctggtagcctggagcccatattcaatcgtatgcctttgggcctcctttggagatccaaagaaaatccccccgccaatggctatcattgcccccctgttcgccaagagcagtactttctataacccatgtatctacgtggtggccaacaagaagtttcggagggcaatgctagcaatgtttaagtgccagacccaccaaaccatgcccgttacatcaattctgccaatggatgtgtcccagaacccactagccagcggtaggatctag

SEQ ID NO: 166332 - DNA, 1014 bp, Artificial Sequence
  derived and/or modified sequence
atgctgaggaacaacctgggcaacagcagtgacagcaagaatgaagatggcagcgtcttcagccagacagagcacaacatcgtggccacctacctgatcatggccggcatgatcagcatcatcagcaacatcatcgtgctgggcatcttcatcaagtacaaggagctgcggacccccaccaatgccatcatcatcaacctggccgtgacagacatcggcgtgagcagcatcggctaccccatgtctgctgccagtgacctgtatggctcctggaagtttggctacgccggctgccaggtgtatgccggcctgaacatcttcttcggcatggccagcatcggcctgctgactgtggtggccgtggaccgctacctgaccatctgcctgcctgatgtgggccgcaggatgaccaccaacacctacatcggcctcatcctgggcgcctggatcaatggcctcttctgggccctgatgcccatcatcggctgggccagctatgccccagaccccactggagccacctgcaccatcaactggaggaagaatgacaggagctttgtgtcctacaccatgaccgtcatcgccatcaacttcatcgtgcccctgactgtgatgttctactgctactaccacgtgaccctgagcatcaagcaccacaccaccagtgactgcacagagagcctgaacagagactggagcgaccagattgatgtgaccaagatgtctgtcatcatgatctgcatgttcctggtggcctggagcccctacagcatcgtgtgcctgtgggccagctttggagaccccaagaagatccccccacccatggccatcatcgcccccctgtttgccaagagcagcaccttctacaacccctgcatctacgtggtggccaacaagaagttccggcgggccatgctggccatgttcaagtgccagacccaccagaccatgcctgtgaccagcatcctgcccatggatgtgtcccagaaccccctggccagcggccgcatctag

SEQ ID NO: 166333 - DNA, 1014 bp, Artificial Sequence
  derived and/or modified sequence
atgctgcggaacaacctgggcaacagcagcgacagcaagaacgaggatggctccgttttttctcaaaccgaacacaacattgtcgcaacatatctaatcatggcgggtatgatttccatcataagtaatatcattgtgctagggattttcatcaagtacaaggaactgcgcacccctacgaacgcgattatcattaatctcgctgtgacagacatcggcgtttcctctataggctacccgatgtctgctgcctccgatctgtacgggtcttggaagttcggttacgcaggttgccaggtgtacgctggactgaatatatttttcggcatggctagcatcggactccttactgtagtggctgtggataggtacttgaccatctgtcttcccgatgttgggcggcgcatgacaaccaatacctatataggactgatcctgggggcgtggattaacggcctcttttgggcgctaatgcctattattggttgggcttcttacgcaccagatcctactggtgcgacgtgtactatcaactggcggaaaaatgacaggtcctttgtgagttacacaatgactgttatcgcgataaacttcatagtgccgcttaccgttatgttttattgctactaccacgtaactttaagcataaaacaccacaccacttctgattgtaccgaaagcttgaatagggactggtccgaccagatagacgtgacaaagatgtccgtaataatgatttgtatgttcctcgttgcctggagcccttactccattgtttgcctctgggcatccttcggagacccaaagaaaattcctccgcctatggccattatagctcctctctttgccaagagcagtactttttacaatccttgcatatacgttgtggccaacaagaaatttaggcgcgcaatgttggccatgtttaaatgtcagacacatcagaccatgcccgtaacgagcatcttgcctatggatgtatcccagaatccactagctagtgggcgtatttag

SEQ ID NO: 166334 - DNA, 1014 bp, Artificial Sequence
  derived and/or modified sequence
atgcttcgtaacaatctgggtaactcgtccgactcaaaaaacgaggatggtagcgtgttctcgcagaccgagcacaacatcgtcgccacatatctgatcatggccggaatgatctcaatcatttcaaatataattgtgctcggcatatttattaaatacaaggagctgcgcacccctacaaacgctatcatcataaatcttgccgtcactgatattggagtatccagcattggttacccaatgagtgccgcttctgatctgtatgggtcctggaagttcggttacgctggttgtcaagtgtacgctggtctgaatatcttctttggtatggcctctataggcctcctgacagtcgtggctgtagatcgctatctcactatctgtctgccagacgtcggtcgaaggatgaccaccaatacgtacatcggcctgatcctgggggcatggataaacggcctgttttgggccctgatgcctatcatagggtgggctagctacgcccctgaccctacgggcgcaacatgcacaattaattggcgcaagaacgatcggtctttcgtgtcatataccatgaccgttatcgctatcaactttattgtgcctcttacagtcatgttttactgctactaccatgtcaccctgtccatcaagcaccatacgacatcagattgtactgagagcctgaaccgggactggtctgaccagatagacgtcaccaagatgagcgtcatcatgatatgcatgtttcttgtggcgtggagcccgtactcaattgtatgcttatgggcttcctttggggatcccaagaaaatccctcctccaatggctatcatcgcccctcttttcgcaaagagctccactttttacaacccatgtatctacgtagtcgcaaataagaagtttcgccgtgctatgcttgctatgttcaaatgccaaactcaccagactatgccagtgacatccatcttacctatggacgtaagccagaacccactggcttccggtagaatctag

SEQ ID NO: 166335 - DNA, 1455 bp, Artificial Sequence
  derived and/or modified sequence
attatgaagggtgtttcggtatcttccctccaaaatgctaagaaataatttaggcaacagttcagactctaaaaatgaagatggctcggtcttttcacagactgaacacaatattgttgcaacttacttgattatggcaggtatgataagtattatcagcaacataatagttctgggcatcttcattaagtacaaggaacttcggacacccacaaatgcaattattattaacctggctgttactgatataggggtcagtagcattggctatcccatgtctgctgcctcagatctgtatggaagttggaaatttggatacgcaggctgtcaggtttatgctggattgaatattttttttggaatggcaagcattggattactcacggtcgtggctgtggaccgatacctgaccatctgccttcctgacgtagggagaagaatgaccaccaacacttacatcggcttgattctgggagcctggatcaatggcctgttttgggctttgatgcctatcatagggtgggctagttatgccccagatcctactggtgctacgtgtaccataaactggaggaaaaatgatagatcttttgtgtcttacaccatgacagttattgcgataaattttattgtgcccttgacagtgatgttttactgctattaccatgtcacgctatccattaaacatcacactaccagtgactgcactgagtccctcaacagagactggtcagatcagatagatgtaacaaagatgtctgtgatcatgatctgcatgtttctggtggcatggtccccttattccatcgtgtgcttatgggcttcttttggtgacccaaagaagattcctccccccatggccatcatagctccactgtttgcaaaatcttctacattctataacccctgcatttatgtggttgctaataaaaagtttcggagggcaatgcttgccatgttcaaatgtcagactcaccaaacaatgcctgtgacaagtattttacccatggatgtatctcaaaacccattggcttctggaagaatctgaaataagataaaaggacacactatcaaaacactttagttttttgacaatgcttttcttttaaatatgagcccatttagatcaagtgcagacatggatcattgtcctatgagagtgtaagctcctcaagcacagctcgtgcttctgtttgtgcactctggctgctgtagtgtatgcttctctgtgtcctgatatatcaacttattgctcatctcctttgatgaattaggcatcagaggttaaggtcccctttctttctccctattatggcatgcattacactgtactgatgacctttaacttgcctggctcctccattagaataaaagcagtcactaatttaatgttagaataaatgaataattctagataattactgaaatgagttgttggatgttcccagttagaat

SEQ ID NO: 166336 - protein, 530 aa, Artificial Sequence
  derived and/or modified sequence
MAAIKAVNSKAEVARARAALAVNICAARGLQDVLRTNLGPKGTMKMLVSGAGDIKLTKDGNVLLDEMQIQHPTASLIAKVATAQDDVTGDGTTSNVLIIGELLKQADLYISEGLHPRIIAEGFEAAKIKALEVLEEVKVTKEMKRKILLDVARTSLQTKVHAELADVLTEVVVDSVLAVRRPGYPIDLFMVEIMEMKHKLGTDTKLIQGLVLDHGARHPDMKKRVEDAFILICNVSLEYEKTEVNSGFFYKTAEEKEKLVKAERKFIEDRVQKIIDLKDKVCAQSNKGFVVINQKGIDPFSLDSLAKHGIVALRRAKRRNMERLSLACGGMAVNSFEDLTVDCLGHAGLVYEYTLGEEKFTFIEECVNPCSVTLLVKGPNKHTLTQVKDAIRDGLRAIKNAIEDGCMVPGAGAIEVAMAEALVTYKNSIKGRARLGVQAFADALLIIPKVLAQNAGYDPQETLVKVQAEHVESKQLVGVDLNTGEPMVAADAGVWDNYCVKKQLLHSCTVIATNILLVDEIMRAGMSSLK

SEQ ID NO: 166337 - DNA, 1593 bp, Artificial Sequence
  derived and/or modified sequence
atggccgctatcaaagctgtgaactcgaaggctgaggtggcgcgtgctcgagctgctttggccgtgaacatttgtgctgcccgggggctgcaggatgttcttcgaacgaatttaggccccaagggcaccatgaagatgcttgtctcaggagcgggcgacatcaaactgactaaggacgggaatgttctgctggacgagatgcagattcagcacccaacagcatcattgatcgccaaggttgctacggcgcaagatgacgtgacgggggacgggactacctctaacgtactgattatcggagaactgcttaaacaggccgacctatacatctccgaaggccttcacccccgcatcatcgccgaaggcttcgaagccgcgaagataaaggctctggaggtcttggaagaagtaaaggttaccaaggagatgaagcgtaagatcctgctggatgtagcccgcacatcactccagactaaggtgcatgcagaattagctgacgttctgactgaggtcgtggtcgatagcgtcctcgccgtgagacgccccggttatccgatcgaccttttcatggtggagattatggagatgaagcacaagctcggcacagatactaaactgatccagggtctagtccttgatcacggtgcccgacaccctgatatgaagaaacgggtggaggatgcattcatacttatttgtaacgtatctttggaatatgagaagactgaggtgaactcggggtttttttataaaacggcagaagagaaggagaagttagtcaaagccgaaaggaagtttattgaggatcgtgtccaaaagattatcgatctcaaagacaaagtttgtgcacagtccaacaaggggttcgtggtgattaatcagaaaggaatagatcccttctccttagattctttggcaaaacacggcatagttgcactgcggcgggcaaagcgcagaaatatggagagactgtcattagcctgtggcggcatggccgtcaactcattcgaagacctgaccgtggattgtctgggtcacgcaggactggtttacgagtacaccctgggcgaggaaaagtttacctttatcgaggagtgtgtgaacccatgcagtgtcactcttctggtgaaagggcccaataagcatacactgacccaggtgaaggatgccatcagggacggtctgagagcgattaagaacgccattgaggatggctgtatggttcccggcgctggggcaatcgaagtagcaatggctgaggcccttgtgacctacaagaattccatcaaaggaagggcgagactgggcgttcaggcgtttgccgacgccctgttaattataccaaaagtattggcacaaaacgcgggctatgacccacaggagaccctcgtaaaggtgcaggctgaacatgtggaaagcaagcagctagtcggtgtcgacctgaataccggcgaaccaatggtggcagcagacgcaggcgtgtgggacaattattgcgtgaaaaagcaacttttacacagctgcaccgtaatcgccaccaacatcttactcgtggatgagattatgagggccggcatgagctccctgaagtag

SEQ ID NO: 166338 - DNA, 1593 bp, Artificial Sequence
  derived and/or modified sequence
atggccgccatcaaggctgtgaacagcaaggccgaggtggcccgggcccgggccgccctggccgtgaacatctgtgccgcccggggcctgcaggatgtgctgcggaccaacctgggccccaagggcaccatgaagatgctggtgtctggagctggggacatcaagctgaccaaggatggaaatgtgctgctggatgagatgcagatccagcaccccacagccagcctgattgccaaggtggccacagcccaggatgatgtgactggagatggcaccaccagcaatgtgctgatcattggagagctgctgaagcaggccgacctgtacatcagcgagggcctgcacccccgcatcatcgccgagggctttgaagctgccaagatcaaggccctggaggtgctggaggaggtgaaggtgaccaaggagatgaagaggaagatcctgctggatgtggcccggaccagcctgcagaccaaggtgcacgccgagctggctgatgtgctgacagaggtggtggtggacagcgtgctggccgtgcggcggcccggctaccccatcgacctcttcatggtggagatcatggagatgaagcacaagctgggcacagacaccaagctgatccagggcctggtgctggaccacggggcccggcacccagacatgaagaagagggtggaggatgccttcatcctgatctgcaatgtgtccctggagtatgagaagacagaggtgaacagcggcttcttctacaagacagctgaggagaaggagaagctggtgaaggccgagaggaagttcatcgaggacagagtgcagaagatcatcgacctgaaggacaaggtgtgtgcccagagcaacaagggctttgtggtgatcaaccagaagggcatcgaccccttcagcctggacagcctggccaagcacggcatcgtggccctgcggcgggccaagagaagaaacatggagcggctgagcctggcctgtggcggcatggctgtgaacagctttgaggacctgactgtggactgcctgggccatgctggcctggtgtatgagtacaccctgggggaggagaagttcaccttcattgaagaatgtgtgaacccctgcagcgtgaccctgctggtgaagggccccaacaagcacaccctgacccaggtgaaggatgccatcagagatggcctgcgggccatcaagaatgccattgaagatggctgcatggtgcctggagctggggccatcgaggtggccatggccgaggccctggtgacctacaagaacagcatcaagggccgggcccggctgggcgtgcaggcctttgctgatgccctgctgatcatccccaaggtgctggcccagaatgccggctatgacccccaggagaccctggtgaaggtgcaggccgagcacgtggagagcaagcagctggtgggcgtggacctgaacacaggagagcccatggtggccgcagatgctggggtgtgggacaactactgtgtgaagaagcagctgctgcacagctgcaccgtgattgccaccaacatcctgctggtggatgagatcatgagagctggcatgagcagcctgaagtag

SEQ ID NO: 166339 - DNA, 1593 bp, Artificial Sequence
  derived and/or modified sequence
atggccgccatcaaggccgtgaacagcaaggccgaggtggcccgggcacgggctgctctggcggtgaacatctgcgccgcgcggggactgcaggatgttctgagaaccaatctaggtccaaaaggaaccatgaagatgctggtcagcggcgctggagacatcaagctcacaaaagacggcaacgttctgctggatgagatgcagattcaacatccgacggcatcccttattgccaaagtggcaactgcccaagatgacgtcaccggcgacgggacgaccagtaatgtgctgattataggagaattactgaagcaggccgacctgtatatttcagaaggcctacaccctagaattatcgcagagggcttcgaggccgccaagataaaggcccttgaggtccttgaggaagttaaagtgacaaaggagatgaaaagaaagatccttctcgacgtagcaaggacctccctgcagaccaaagtgcatgctgagttggctgatgtcctgaccgaggtcgtggtggatagcgttctcgccgtgagacgccctgggtaccctattgacttattcatggttgaaattatggaaatgaaacacaagctcggtaccgataccaagctgatccaagggcttgtactggatcatggcgcccggcacccagacatgaagaaaagggtggaagacgcatttatactgatttgtaacgtctctctggaatacgagaagaccgaggtgaattcaggcttcttctacaagactgccgaagaaaaggaaaaacttgtgaaggccgaacggaagtttatcgaggacagagtccagaaaattatcgatctgaaggacaaggtatgcgcgcagagtaataagggtttcgttgtgatcaatcagaaaggcatcgacccctttagcctggactctcttgcaaaacacggcatcgtcgcactcagacgagccaagcgacgtaacatggagcggttatccctggcatgcggcgggatggccgtaaacagctttgaagatcttaccgtcgactgcctgggccacgctgggctggtctacgaatacaccctcggcgaggagaagttcaccttcatcgaagagtgcgtgaacccttgctccgtgactctgcttgtgaagggacccaacaagcacacgctcacgcaggtgaaagacgccatccgggacggtctgcgagcaataaaaaatgcaatcgaggacggctgcatggtacccggcgccggtgctattgaagtggcaatggccgaggcactggtcacatataagaattcaataaagggacgcgcacggctcggcgtgcaggccttcgctgacgccctgctgataattcccaaggttctggcccaaaacgcagggtatgacccacaggaaaccttggtgaaggtacaagcagagcacgtcgaatcaaagcagctagtgggagtggacctgaatacaggagagcctatggtggcggctgacgctggcgtgtgggacaactattgcgtgaaaaaacagttactccactcctgtacagtgatagcgaccaatattctgctggtggacgaaatcatgagggctggaatgtcctccctgaagtag

SEQ ID NO: 166340 - DNA, 1593 bp, Artificial Sequence
  derived and/or modified sequence
atggccgctatcaaggccgtcaatagcaaggccgaggttgctagagcgcgtgccgcactcgctgttaatatatgcgctgctcggggactgcaggatgtactccggaccaaccttggcccaaagggtaccatgaagatgctggtgtctggggctggagatattaaacttaccaaggacggtaacgtgttgttggacgaaatgcaaattcagcaccccacagcttctcttatcgccaaagttgccaccgcccaggatgatgttacgggagacggcacgaccagcaacgttttgattatcggggagttactaaagcaggctgatttatatatatctgagggcctccacccacgcattatagcggaaggctttgaagcggcaaagattaaggccctggaggtcctggaggaggtgaaggtgaccaaggaaatgaagcggaaaatcctcctggacgtcgcgaggacttctttgcaaactaaagtccacgccgagttggccgacgtgctgaccgaagtcgtggtcgatagcgttcttgctgtgcggaggcctggctatccgattgatctcttcatggtggaaattatggagatgaagcataagctcggcacagacacaaagttgatccagggtctcgttttggatcacggagcgcgacacccagacatgaaaaagagagtcgaggatgcatttatcctaatctgtaatgtgtccctggaatatgaaaagacagaagtgaactcaggctttttctacaagactgccgaggaaaaagaaaagctggtaaaggccgaacgcaaatttatcgaggaccgcgtgcagaagattattgaccttaaagacaaagtgtgcgcccagtccaacaaaggctttgtcgttatcaaccaaaaaggaatagatcccttttccctagactcgctggcaaagcacgggatcgttgctcttaggcgtgccaagcggagaaacatggaaaggctatcattggcctgtggcggaatggccgtcaattccttcgaggatctcactgttgattgccttggccacgcaggcctcgtgtacgaatacaccctgggcgaggagaagttcacattcatcgaagagtgcgtcaacccctgcagcgtgaccctgctggtcaaaggccctaataaacacaccctgacgcaggtgaaggacgctattcgggatggattgcgcgctataaagaacgccattgaggacggttgtatggttcctggggctggggctatcgaggtagctatggccgaggcactagtgacctataagaacagcatcaagggacgggcacgcctgggagtccaggcgtttgccgacgccctgctgatcatcccaaaagtgctggcccaaaacgctgggtatgatccgcaggagacactggtgaaggtgcaagcggagcatgtggagtctaagcaactggtgggagtggatttgaacacgggcgagccaatggtcgccgctgacgccggtgtgtgggataattattgcgtaaagaagcagctcctacactcctgcactgtgatagccaccaatatcctcttagtcgatgaaataatgagggcagggatgtcctccttgaagtag

SEQ ID NO: 166341 - DNA, 1814 bp, Artificial Sequence
  derived and/or modified sequence
ggccgaggctcaagagagcgtggcgtcgcattgccgtttttgctcagaatcgcgactaaggctttttttttttctccctctgaacggttaggctatggctgcgataaaggccgtcaactccaaggctgaggtggcgcgggcccgggcagctttggctgtcaatatatgcgccgcccgagggctgcaggatgtgctgcggaccaacttgggtcctaaaggcaccatgaaaatgcttgtttctggtgcaggtgacatcaaactcaccaaagatggcaatgtgctgctcgatgagatgcaaattcaacatccaacagcttccttgatagcaaaagtagcaacagctcaggatgacgtcacaggagatggtactacttcaaatgttctaattattggagagttattaaaacaagctgacctgtacatttctgagggcctgcaccctagaataatagctgaaggatttgaagctgcaaagataaaagcacttgaagttttggaggaagttaaagtgacaaaggagatgaaaagaaaaatcctcttagatgtagctagaacatcattacaaactaaagttcatgctgaactggctgatgtcttaacagaggttgtggtggattctgttttggctgttagaagaccaggttaccctattgatctcttcatggtagaaataatggagatgaagcataaattaggaacagatacaaagttgatccaaggattagttttggatcatggtgcccgtcatccagatatgaagaagcgagtagaagatgcatttatccttatttgcaacgtttcactggaatatgaaaaaacagaggtgaactctggtttcttttataagactgcagaagagaaagagaaattggtaaaagctgaaagaaaatttattgaagatagagtacaaaaaataatagacctgaaggacaaagtctgtgctcagtcaaataaaggatttgtcgtcattaatcaaaagggaattgatccattttccttagattctcttgcaaaacatggaatagtagctcttcgcagagcaaaaagaagaaatatggaaagactctctcttgcttgtggtggaatggccgtgaattcttttgaagatctcactgtagattgcttgggacatgctggtcttgtgtatgagtatacattaggtgaagaaaagttcacttttattgaggagtgtgttaacccttgctctgttaccttgttggttaaaggaccaaataagcatactctcacacaagtcaaggatgccataagagatggacttcgtgctatcaaaaatgccattgaagatggttgtatggttcctggagctggtgcaattgaagtggcaatggctgaagctcttgttacatataagaacagtataaaaggaagagctcgtcttggagtccaagcttttgctgatgccttactcattattcccaaggttcttgctcagaatgctggttatgacccacaggaaacattagtaaaagttcaggctgagcatgtcgagtcaaaacaacttgtgggcgtagatttgaatacaggtgagccaatggtagcagcagatgcaggagtttgggataattattgtgtaaaaaaacaacttcttcactcttgcacagtgattgccaccaacattctcctggttgatgaaattatgcgagctgggatgtcttctctcaaatgatgattgaattcaaaatcaacccttctagaagatgaaatttagtacactttacatctgactactattgtgtagcctgagccattctgaatttctacacaataaatgcagtttatgtcttttgggtctt

SEQ ID NO: 166342 - DNA, 1593 bp, Artificial Sequence
  derived and/or modified sequence
atggccgccatcaaggccgtgaacagcaaggccgaggtggccagagccagagccgccctggccgtgaacatctgcgccgccagaggcctgcaggacgtgctgagaaccaacctgggccccaagggcaccatgaagatgctggtgagcggcgccggcgacatcaagctgaccaaggacggcaacgtgctgctggacgagatgcagatccagcaccccaccgccagcctgatcgccaaggtggccaccgcccaggacgacgtgaccggcgacggcaccaccagcaacgtgctgatcatcggcgagctgctgaagcaggccgacctgtacatcagcgagggcctgcaccccagaatcatcgccgagggcttcgaggccgccaagatcaaggccctggaggtgctggaggaggtgaaggtgaccaaggagatgaagagaaagatcctgctggacgtggccagaaccagcctgcagaccaaggtgcacgccgagctggccgacgtgctgaccgaggtggtggtggacagcgtgctggccgtgagaagacccggctaccccatcgacctgttcatggtggagatcatggagatgaagcacaagctgggcaccgacaccaagctgatccagggcctggtgctggaccacggcgccagacaccccgacatgaagaagagagtggaggacgccttcatcctgatctgcaacgtgagcctggagtacgagaagaccgaggtgaacagcggcttcttctacaagaccgccgaggagaaggagaagctggtgaaggccgagagaaagttcatcgaggacagagtgcagaagatcatcgacctgaaggacaaggtgtgcgcccagagcaacaagggcttcgtggtgatcaaccagaagggcatcgaccccttcagcctggacagcctggccaagcacggcatcgtggccctgagaagagccaagagaagaaacatggagagactgagcctggcctgcggcggcatggccgtgaacagcttcgaggacctgaccgtggactgcctgggccacgccggcctggtgtacgagtacaccctgggcgaggagaagttcaccttcatcgaggagtgcgtgaacccctgcagcgtgaccctgctggtgaagggccccaacaagcacaccctgacccaggtgaaggacgccatcagagacggcctgagagccatcaagaacgccatcgaggacggctgcatggtgcccggcgccggcgccatcgaggtggccatggccgaggccctggtgacctacaagaacagcatcaagggcagagccagactgggcgtgcaggccttcgccgacgccctgctgatcatccccaaggtgctggcccagaacgccggctacgacccccaggagaccctggtgaaggtgcaggccgagcacgtggagagcaagcagctggtgggcgtggacctgaacaccggcgagcccatggtggccgccgacgccggcgtgtgggacaactactgcgtgaagaagcagctgctgcacagctgcaccgtgatcgccaccaacatcctgctggtggacgagatcatgagagccggcatgagcagcctgaagtag

SEQ ID NO: 166343 - protein, 278 aa, Artificial Sequence [sequence omitted]

SEQ ID NO: 166344 - protein, 54 aa, Artificial Sequence
  derived and/or modified sequence
MDSMPEPASRCLLLLPLLLLLLLLLPAPELGPSQAGAEENDWVRLPSKCEGTCG

SEQ ID NO: 166345 - DNA, 837 bp, Artificial Sequence
  derived and/or modified sequence
atggatagcatgcctgagccggccagtcggtgccttctcttactgccactgctgctactcttactcctcctgctgcctgccccagaactcggtccaagccaggccggcgctgaggaaaatgactgggtgcgtctcccaagtaagtgtgaagtctgcaagtacgtggcggtggagctgaagagcgccttcgaagaaactgggaagacaaaggaggtgatcggcacaggctacggcattctggatcagaaggctagtggtgtgaagtacaccaaaagcgaccttcgattgatcgaggttacagagacgatatgtaagagactgctagactactcgctgcacaaagagcggaccggttcgaacagatttgctaaaggcatgtcagagacgttcgagacgctacacaatttggtgcacaaaggcgtgaaagttgtgatggacattccatacgagctgtggaacgagacatctgctgaggttgcagaccttaagaagcaatgcgatgttctcgtagaggaattcgaggaggtcatcgaggactggtaccgaaatcatcaagaggaggacctcactgaattcctgtgcgccaaccacgtcctcaaagggaaggacactagctgcttagctgagcagtggagcgggaagaagggggataccgccgccctgggagggaagaaatccaaaaaaaaatcctctagggccaaggccgctggggggagatcttcttcatccaaacagagaaaggaactcggaggcctggaaggagacccctccccagaagaggatgaaggcattcagaaagcaagccctctgacccattcacctcctgacgaattgtag

SEQ ID NO: 166346 - DNA, 165 bp, Artificial Sequence
  derived and/or modified sequence
atggactccatgccagagccagcctctcgctgtctactgcttcttccactgctcctgttgttactgctgctgttacccgcccccgagctgggcccatcccaggccggagctgaggagaacgactgggtacggctaccctcgaagtgcgaaggcacttgtggctag

SEQ ID NO: 166347 - DNA, 837 bp, Artificial Sequence
  derived and/or modified sequence
atggacagcatgcctgagcccgccagccgctgcctgctgctgctgcccctgctgctgctgctgctgctgctgctgcctgcccctgagctgggccccagccaggccggggctgaagaaaatgactgggtgcggctgcccagcaaatgtgaggtgtgcaagtatgtggccgtggagctgaagagcgcctttgaggagaccgggaagaccaaggaggtgattggaacaggctacggcatcctggaccagaaggccagcggcgtgaagtacaccaagagtgacctgcggctgattgaggtgacagagaccatctgcaagaggctgctggactacagcctgcacaaggagaggacaggcagcaacagatttgccaagggcatgtctgagacctttgagaccctgcacaacctggtgcacaagggcgtgaaggtggtgatggacatcccctatgagctgtggaatgagaccagcgctgaggtggccgacctgaagaagcagtgtgatgtgctggtggaggagtttgaggaggtgattgaggactggtacagaaaccaccaggaggaggacctgacagagttcctgtgtgccaaccacgtgctgaagggcaaggacaccagctgcctggccgagcagtggagcggcaagaagggggacacagctgccctgggcggcaagaagagcaagaagaagagcagccgggccaaggccgccggcggccgcagcagcagcagcaagcagaggaaggagctgggcggcctggagggggaccccagccctgaggaggatgagggcatccagaaggccagccccctgacccacagccccccagatgagctgtag

SEQ ID NO: 166348 - DNA, 165 bp, Artificial Sequence
  derived and/or modified sequence
atggacagcatgcctgagcccgccagccgctgcctgctgctgctgcccctgctgctgctgctgctgctgctgctgcctgcccctgagctgggccccagccaggccggggctgaagaaaatgactgggtgcggctgcccagcaaatgtgagggcacctgtggctag

SEQ ID NO: 166349 - DNA, 837 bp, Artificial Sequence
  derived and/or modified sequence
atggacagcatgcccgagcccgccagccggtgcctgctgctgctgccactcttgctcttgctcctgctgctgctcccggcccctgagctcggcccaagtcaggctggggccgaggaaaatgactgggtacgcctcccctccaagtgcgaggtgtgcaagtacgtcgccgtggaactgaagtctgccttcgaggaaacaggcaaaactaaagaggtaatcggtactggctacggaatcctcgatcagaaggcatcaggcgtgaagtacacgaaaagcgaccttagactcatcgaagtgaccgagactatatgcaaacgactgctggattattcgctgcataaagagcggacaggttccaaccgttttgcaaaagggatgtcggagacattcgaaacattgcacaatctggtgcacaaaggagtaaaggtggttatggatatcccatatgaactgtggaacgagacgtcagcagaagttgcagacctgaagaaacagtgcgacgtccttgttgaggaatttgaggaggtcatagaggattggtatcggaaccatcaggaagaagacctgactgagtttctgtgcgccaaccacgtgttgaagggcaaagacacaagctgtctggccgaacaatggagcggcaaaaaaggggacaccgcagctctcggaggtaagaagagtaaaaaaaagagcagcagagccaaggccgccggaggcagaagttcatcatctaaacagagaaaagaactcggcggtctggagggagatccctctcccgaagaagatgagggaattcagaaagcatcccctctgacccatagtccaccagatgagctgtag

SEQ ID NO: 166350 - DNA, 165 bp, Artificial Sequence
  derived and/or modified sequence
atggacagcatgcccgagcccgccagccggtgcctgctgctgctgcccctgctgctgttgcttctactgctactaccggccccagaactggggcccagccaggccggtgccgaagaaaacgactgggtgagactgccctctaagtgcgagggaacctgtggatag

SEQ ID NO: 166351 - DNA, 837 bp, Artificial Sequence
  derived and/or modified sequence
atggacagtatgcccgaacccgctagtcggtgcctgcttctgctgccgcttctgctgctgctccttttgctactgcccgcaccagaactcggcccatcccaggccggagccgaagaaaatgattgggttcgcctccccagtaaatgcgaagtatgcaaatacgttgccgttgagctgaagtcggctttcgaggaaaccggaaaaactaaggaggtcatcggtactgggtatggcatcctggaccagaaagcatctggagtcaagtacacaaaatctgacctcaggcttatagaagtgactgagactatttgcaaaaggctcctcgattactcgctgcacaaggaacgcactggttccaaccgctttgctaaaggcatgtcagagacctttgagaccttgcataatctggttcacaagggggtcaaggtggtgatggacatcccctatgagctctggaatgagacctcggcagaggtggccgatctgaaaaagcaatgtgatgttcttgtggaggagttcgaagaggtcattgaagactggtaccgcaaccatcaagaagaggaccttactgagttcctctgtgcgaatcacgtgctcaagggtaaggatacctcatgcctggctgaacagtggagcggcaagaaaggagacaccgccgctctggggggtaaaaagtctaagaaaaagtccagcagagcaaaggcagctggaggtaggagctcctcttcaaagcagcgtaaagagttgggtggcttagaaggagaccccagccctgaggaagatgaagggatccagaaagctagtccactaacacacagtccaccagatgaactttag

SEQ ID NO: 166352 - DNA, 165 bp, Artificial Sequence
  derived and/or modified sequence
atggacagcatgcctgagcccgcaagcaggtgcctgctcctgctcccactgctcttgttgctcctcctcctcctgcccgctccggagctagggccatcccaagccggagccgaggaaaacgattgggtgcgcctcccttccaagtgcgagggaacttgcgggtag

SEQ ID NO: 166353 - DNA, 1704 bp, Artificial Sequence
  derived and/or modified sequence
gcaggcttcttctcgggtcttggtcctgcatcctctctctcccagagcctccgttagggggtgggaaaggactttgccataggtcgctgaggccaccatctgctctcttactggccaagggcgtaaaaagatagtcttcccattagctagagagcaaaccccagaaagcctattggctgcgccgtccgcgggccttggtccgctttgaaggcgggctgcggctgcgagaggagggcgggcgggaggctagctgttgtcgtggttgctcggaggcacgtgtgcagtcccggaagcggcgaggggaaactgctccgcgcgcgccgcgggaggaggaaccgcccggtcctttagggtccgggcccggccgggccatggattcaatgcctgagcccgcgtcccgctgtcttctgcttcttcccttgctgctgctgctgctgctgctgctgccggccccggagctgggcccgagccaggccggagctgaggagaacgactgggttcgcctgcccagcaaatgcgaagtgtgtaaatatgttgctgtggagctgaagtcagcctttgaggaaaccggcaagaccaaggaggtgattggcacgggctatggcatcctggaccagaaggcctctggagtcaaatacaccaagtcggacttgcggttaatcgaagtcactgagaccatttgcaagaggctcctggattatagcctgcacaaggagaggaccggcagcaatcgatttgccaagggcatgtcagagacctttgagacattacacaacctggtacacaaaggggtcaaggtggtgatggacatcccctatgagctgtggaacgagacttctgcagaggtggctgacctcaagaagcagtgtgatgtgctggtggaagagtttgaggaggtgatcgaggactggtacaggaaccaccaggaggaagacctgactgaattcctctgcgccaaccacgtgctgaagggaaaagacaccagttgcctggcagagcagtggtccggcaagaagggagacacagctgccctgggagggaagaagtccaagaagaagagcagcagggccaaggcagcaggcggcaggagtagcagcagcaaacaaaggaaggagctgggtggccttgagggagaccccagccccgaggaggatgagggcatccagaaggcatcccctctcacacacagcccccctgatgagctctgagcccacccagcatcctctgtcctgagacccctgattttgaagctgaggagtcaggggcatggctctggcaggccgggatggccccgcagccttcagcccctccttgccttggctgtgccctcttctgccaaggaaagacacaagccccaggaagaactcagagccgtcatgggtagcccacgccgtcctttcccctccccaagtgtttctctcctgacccagggttcaggcaggccttgtggtttcaggactgcaaggactccagtgtgaactcaggaggggcaggtgtcagaactgggcaccaggactggagccccctccggagaccaaactcaccatccctcagtcctccccaacagggtactaggactgcagccccctgtagctcctctctgcttacccctcctgtggacaccttgcactctgcctggcccttcccagagcccaaagagtaaaaatgttctggttctgatttctgagtcctctgcagccctca

SEQ ID NO: 166354 - DNA, 837 bp, Artificial Sequence
  derived and/or modified sequence
atggacagcatgcccgagcccgccagcagatgcctgctgctgctgcccctgctgctgctgctgctgctgctgctgcccgcccccgagctgggccccagccaggccggcgccgaggagaacgactgggtgagactgcccagcaagtgcgaggtgtgcaagtacgtggccgtggagctgaagagcgccttcgaggagaccggcaagaccaaggaggtgatcggcaccggctacggcatcctggaccagaaggccagcggcgtgaagtacaccaagagcgacctgagactgatcgaggtgaccgagaccatctgcaagagactgctggactacagcctgcacaaggagagaaccggcagcaacagattcgccaagggcatgagcgagaccttcgagaccctgcacaacctggtgcacaagggcgtgaaggtggtgatggacatcccctacgagctgtggaacgagaccagcgccgaggtggccgacctgaagaagcagtgcgacgtgctggtggaggagttcgaggaggtgatcgaggactggtacagaaaccaccaggaggaggacctgaccgagttcctgtgcgccaaccacgtgctgaagggcaaggacaccagctgcctggccgagcagtggagcggcaagaagggcgacaccgccgccctgggcggcaagaagagcaagaagaagagcagcagagccaaggccgccggcggcagaagcagcagcagcaagcagagaaaggagctgggcggcctggagggcgaccccagccccgaggaggacgagggcatccagaaggccagccccctgacccacagcccccccgacgagctgtag

SEQ ID NO: 166355 - DNA, 165 bp, Artificial Sequence
  derived and/or modified sequence
atggacagcatgcccgagcccgccagcagatgcctgctgctgctgcccctgctgctgctgctgctgctgctgctgcccgcccccgagctgggccccagccaggccggcgccgaggagaacgactgggtgagactgcccagcaagtgcgagggcacctgcggctag

SEQ ID NO: 166356 - protein, 1042 aa, Artificial Sequence
  derived and/or modified sequence
MKQSPALAPEERCRRAGSPKPVLRADDNNMGNGCSQKLATANLLRFLLLVLIPCICALVLLLVILLSYVGTLQKVYFKSNGSEPLVTDGEIQGSDVILTNTIYNQSTVVSTAHPDQHVPAWTTDASLPGDQSHRNTSACMNITHSQCQMLPYHATLTPLLSVVRNMEMEKFLKFFTYLHRLSCYQHIMLFGCTLAFPECIIDGDDSHGLLPCRSFCEAAKEGCESVLGMVNYSWPDFLRCSQFRNQTESSNVSRICFSPQQENGKQLLCGRGENFLCASGICIPGKLQCNGYNDCDDWSDEAHCNCSENLFHCHTGKCLNYSLVCDGYDDCGDLSDEQNCDCNPTTEHRCGDGRCIAMEWVCDGDHDCVDKSDEVNCSCHSQGLVECRNGQCIPSTFQCDGDEDCKDGSDEENCSVIQTSCQEGDQRCLYNPCLDSCGGSSLCDPNNSLNNCSQCEPITLELCMNLPYNSTSYPNYFGHRTQKEASISWESSLFPALVQTNCYKYLMFFSCTILVPKCDVNTGEHIPPCRALCEHSKERCESVLGIVGLQWPEDTDCSQFPEENSDNQTCLMPDEYVEECSPSHFKCRSGQCVLASRRCDGQADCDDDSDEENCGCKERDLWECPSNKQCLKHTVICDGFPDCPDYMDEKNCSFCQDDELECANHACVSRDLWCDGEADCSDSSDEWDCVTLSINVNSSSFLMVHRAATEHHVCADGWQEILSQLACKQMGLGEPSVTKLIQEQEKEPRWLTLHSNWESLNGTTLHELLVNGQSCESRSKISLLCTKQDCGRRPAARMNKRILGGRTSRPGRWPWQCSLQSEPSGHICGCVLIAKKWVLTVAHCFEGRENAAVWKVVLGINNLDHPSVFMQTRFVKTIILHPRYSRAVVDYDISIVELSEDISETGYVRPVCLPNPEQWLEPDTYCYITGWGHMGNKMPFKLQEGEVRIISLEHCQSYFDMKTITTRMICAGYESGTVDSCMGDSGGPLVCEKPGGRWTLFGLTSWGSVCFSKVLGPGVYSNVSYFVEWIKRQIYIQTFLLN

SEQ ID NO: 166357 - protein, 975 aa, Artificial Sequence
  derived and/or modified sequence
MKQSPALAPEERCRRAGSPKPVLRADDNNMGNGCSQKLATANLLRFLLLVLIPCICALVLLLVILLSYVGACMNITHSQCQMLPYHATLTPLLSVVRNMEMEKFLKFFTYLHRLSCYQHIMLFGCTLAFPECIIDGDDSHGLLPCRSFCEAAKEGCESVLGMVNYSWPDFLRCSQFRNQTESSNVSRICFSPQQENGKQLLCGRGENFLCASGICIPGKLQCNGYNDCDDWSDEAHCNCSENLFHCHTGKCLNYSLVCDGYDDCGDLSDEQNCDCNPTTEHRCGDGRCIAMEWVCDGDHDCVDKSDEVNCSCHSQGLVECRNGQCIPSTFQCDGDEDCKDGSDEENCSVIQTSCQEGDQRCLYNPCLDSCGGSSLCDPNNSLNNCSQCEPITLELCMNLPYNSTSYPNYFGHRTQKEASISWESSLFPALVQTNCYKYLMFFSCTILVPKCDVNTGEHIPPCRALCEHSKERCESVLGIVGLQWPEDTDCSQFPEENSDNQTCLMPDEYVEECSPSHFKCRSGQCVLASRRCDGQADCDDDSDEENCGCKERDLWECPSNKQCLKHTVICDGFPDCPDYMDEKNCSFCQDDELECANHACVSRDLWCDGEADCSDSSDEWDCVTLSINVNSSSFLMVHRAATEHHVCADGWQEILSQLACKQMGLGEPSVTKLIQEQEKEPRWLTLHSNWESLNGTTLHELLVNGQSCESRSKISLLCTKQDCGRRPAARMNKRILGGRTSRPGRWPWQCSLQSEPSGHICGCVLIAKKWVLTVAHCFEGRENAAVWKVVLGINNLDHPSVFMQTRFVKTIILHPRYSRAVVDYDISIVELSEDISETGYVRPVCLPNPEQWLEPDTYCYITGWGHMGNKMPFKLQEGEVRIISLEHCQSYFDMKTITTRMICAGYESGTVDSCMGDSGGPLVCEKPGGRWTLFGLTSWGSVCFSKVLGPGVYSNVSYFVEWIKRQIYIQTFLLN

SEQ ID NO: 166358 - protein, 1005 aa, Artificial Sequence
  derived and/or modified sequence
MKQSPALAPEERCRRAGSPKPVLRADDNNMGNGCSQKLATANLLRFLLLVLIPCICALVLLLVILLSYVGTLQKVYFKSNGSEPLVTDGEIQGSDVILTNTIYNQSTVVSTAHPDQHVPAWTTDASLPGDQSHRNTSACMNITHSQCQMLPYHATLTPLLSVVRNMEMEKFLKFFTYLHRLSCYQHIMLFGCTLAFPECIIDGDDSHGLLPCRSFCEAAKEGCESVLGMVNYSWPDFLRCSQFRNQTESSNVSRICFSPQQENGKQLLCGRGENFLCASGICIPGKLQCNGYNDCDDWSDEAHCNCSENLFHCHTGKCLNYSLVCDGYDDCGDLSDEQNCACHSQGLVECRNGQCIPSTFQCDGDEDCKDGSDEENCSVIQTSCQEGDQRCLYNPCLDSCGGSSLCDPNNSLNNCSQCEPITLELCMNLPYNSTSYPNYFGHRTQKEASISWESSLFPALVQTNCYKYLMFFSCTILVPKCDVNTGEHIPPCRALCEHSKERCESVLGIVGLQWPEDTDCSQFPEENSDNQTCLMPDEYVEECSPSHFKCRSGQCVLASRRCDGQADCDDDSDEENCGCKERDLWECPSNKQCLKHTVICDGFPDCPDYMDEKNCSFCQDDELECANHACVSRDLWCDGEADCSDSSDEWDCVTLSINVNSSSFLMVHRAATEHHVCADGWQEILSQLACKQMGLGEPSVTKLIQEQEKEPRWLTLHSNWESLNGTTLHELLVNGQSCESRSKISLLCTKQDCGRRPAARMNKRILGGRTSRPGRWPWQCSLQSEPSGHICGCVLIAKKWVLTVAHCFEGRENAAVWKVVLGINNLDHPSVFMQTRFVKTIILHPRYSRAVVDYDISIVELSEDISETGYVRPVCLPNPEQWLEPDTYCYITGWGHMGNKMPFKLQEGEVRIISLEHCQSYFDMKTITTRMICAGYESGTVDSCMGDSGGPLVCEKPGGRWTLFGLTSWGSVCFSKVLGPGVYSNVSYFVEWIKRQIYIQTFLLN

SEQ ID NO: 166359 - DNA, 4852 bp, Artificial Sequence
  derived and/or modified sequence
atgaaacagtctcctgccctcgctccggaagagcgctgccgcagagccgggtccccaaagccggtcttgagagctgatgacaataacatgggcaatggctgctctcagaagctggcgactgctaacctcctccggttcctattgctggtcctgattccatgtatctgtgctctcgttctcttgctggtgatcctgctttcctatgttggaacattacaaaaggtctattttaaatcaaatgggagtgaacctttggtcactgatggtgaaatccaagggtccgatgttattcttacaaatacaatttataaccagagcactgtggtgtctactgcacatcccgaccaacacgttccagcctggactacggatgcttctctcccaggggaccaaagtcacaggaatacaagtgcctgtatgaacatcacccacagccagtgtcagatgctgccctaccacgccacgctgacacctctcctctcagttgtcagaaacatggaaatggaaaagttcctcaagtttttcacatatctccatcgcctcagttgctatcaacatatcatgctgtttggctgtaccctcgccttccctgagtgcatcattgatggcgatgacagtcatggactcctgccctgtaggtccttctgtgaggctgcaaaagaaggctgtgaatcagtcctggggatggtgaattactcctggccggatttcctcagatgctcccagtttagaaaccaaactgaaagcagcaatgtcagcagaatttgcttctcacctcagcaggaaaacggaaagcaattgctctgtggaaggggtgagaactttctgtgtgccagtggaatctgcatccccgggaaactgcaatgtaatggctacaacgactgtgacgactggagtgacgaggctcattgcaactgcagcgagaatctgtttcactgtcacacaggcaagtgccttaattacagccttgtgtgtgatggatatgatgactgtggggatttgagtgatgagcaaaactgtgattgcaatcccacaacagagcatcgctgcggggacgggcgctgcatcgccatggagtgggtgtgtgatggtgaccacgactgtgtggataagtctgacgaggtcaactgctcctgtcacagccagggtctggtggaatgcagaaatggacaatgtatccccagcacgtttcaatgtgatggtgacgaggactgcaaggatgggagtgatgaggagaactgcagcgtcattcagacttcatgtcaagaaggagaccaaagatgcctctacaatccctgccttgattcatgtggtggtagctctctctgtgacccgaacaacagtctgaataactgtagtcaatgtgaaccaattacattggaactctgcatgaatttgccctacaacagtacaagttatccaaattattttggccacaggactcaaaaggaagcatccatcagctgggagtcttctcttttccctgcacttgttcaaaccaactgttataaatacctcatgttcttttcttgcaccattttggtaccaaaatgtgatgtgaatacaggcgagcatatccctccttgcagggcattgtgtgaacactctaaagaacgctgtgagtctgttcttgggattgtgggcctacagtggcctgaagacacagattgcagtcaatttccagaggaaaattcagacaatcaaacctgcctgatgcctgatgaatatgtggaagaatgctcacctagtcatttcaagtgccgctcaggacagtgtgttctggcttccagaagatgtgatggccaggccgactgtgacgatgacagtgatgaggaaaactgtggttgtaaagagagagatctttgggaatgtccatccaataaacaatgtttgaagcacacagtgatctgcgatgggttcccagactgccctgattacatggacgagaaaaactgctcattttgccaagatgatgagctggaatgtgcaaaccatgcgtgtgtgtcacgtgacctgtggtgtgatggtgaagccgactgctcagacagttcagatgaatgggactgtgtgaccctctctataaatgtgaactcctcttcctttctgatggttcacagagctgccacagaacaccatgtgtgtgcagatggctggcaggagatattgagtcagctggcctgcaagcagatgggtttaggagaaccatctgtgaccaaattgatacaggaacaggagaaagagccgcggtggctgacattacactccaactgggagagcctcaatgggaccactttacatgaacttctagtaaatgggcagtcttgtgagagcagaagtaaaatttctcttctgtgtactaaacaagactgtgggcgccgccctgctgcccgaatgaacaaaaggatccttggaggtcggacgagtcgccctggaaggtggccatggcagtgttctctgcagagtgaacccagtggacatatctgtggctgtgtcctcattgccaagaagtgggttctgacagttgcccactgcttcgaggggagagagaatgctgcagtttggaaagtggtgcttggcatcaacaatctagaccatccatcagtgttcatgcagacacgctttgtgaagaccatcatcctgcatccccgctacagtcgagcagtggtggactatgacatcagcatcgttgagctgagtgaagacatcagtgagactggctacgtccggcctgtctgcttgcccaacccggagcagtggctagagcctgacacgtactgctatatcacaggctggggccacatgggcaataaaatgccatttaagctgcaagagggagaggtccgcattatttctctggaacattgtcagtcctactttgacatgaagaccatcaccactcggatgatatgtgctggctatgagtctggcacagttgattcatgcatgggtgacagcggtgggcctcttgtttgtgagaagcctggaggacggtggacattatttggattaacttcatggggctccgtctgcttttccaaagtcctggggcctggcgtttatagtaatgtgtcatatttcgtcgaatggattaaaagacagatttacatccagacctttctcctaaactaattataaggatgatcagagacttttgccagctacactaaaagaaaatggccttcttgactgtgaagagctgcctgcagagagctgtacagaagcacttttcatggacagaaatgctcaatcgtgcactgcaaatttgcatgtttgttttggactaatttttttcaatttattttttcaccttcatttttctcttatttcaagttcaatgaaagactttacaaaagcaaacaaagcagactttgtccttttgccaggcctaaccatgactgcagcacaaaattatcgactctggcgagatttaaaatcaggtgctacagtaacaggttatggaatggtctcttttatcctatcacaaaaaaagacatagatatttaggctgattaattatctctaccagtttttgtttctcaagctcagtgcatagtggtaaatttcagtgttaacattggagacttgcttttctttttctttttttataccccacaattcttttttattacacttcgaattttagggtacacgagcacaacgtgcaggttagttacatatgtatacatgtgccatgttggtgtgctgaacccagtaactcgtcatttgatttattaaaagccaagataatttacatgtttaaagtatttactattacccccttctaatgtttgcataattctgagaactgataaaagacagcaataaaagaccagtgtcatccatttaggtagcaagacatattgaatgcaaagttctttagatatcaatattaacacttgacattattggaccccccattctggatgtatatcaagatcataattttatagaagagtctctatagaactgtcctcatagctgggtttgttcaggatatatgagttggctgattgagactgcaacaactacatctatatttatgggcaatattttgttttacttatgtggcaaagaactggatattaaactttgcaaaagagaatttagatgagagatgcaattttttaaaaagaaaattaatttgcatccctcgtttaattaaatttatttttcagttttcttgcgttcatccataccaacaaagtcataaagagcatattttagagcacagtaagactttgcatggagtaaaacattttgtaattttcctcaaaagatgtttaatatctggtttcttctcattggtaattaaaattttagaaatgatttttagctctaggccactttacgcaactcaatttctgaagcaattagtggtaaaaagtatttttccccactaaaaaactttaaaacacaaatcttcatatatacttaatttaattagtcaggcatccattttgccttttaaacaactaggattccctactaacctccaccagcaacctggactgcctcagcattccaaatagatactacctgcaattttatacatgtatttttgtatcttttctgtgtgtaaacatagttgaaattcaaaaagttgtagcaatttctatactattcatctcctgtccttcagtttgtataaacctaaggagagtgtgaaatccagcaactgaattgtggtcacgattgtatgaaagttcaagaacatatgtcagttttgttacagttgtagctacatactcaatgtatcaacttttagcctgctcaacttaggctcagtgaaatatatatattatacttattttaaataattcttaatacaaataaaatggtaatggtctaatca

SEQ ID NO: 166360 - DNA, 3112 bp, Artificial Sequence
  derived and/or modified sequence
agttcagtttgtctctcttgagcttggagaaaatcatccgtagtgcctccccgggggacacgtagaggagagaaaagcgaccaagataaaagtggacagaagaataagcgagactttttatccatgaaacagtctcctgccctcgctccggaagagcgctgccgcagagccgggtccccaaagccggtcttgagagctgatgacaataacatgggcaatggctgctctcagaagctggcgactgctaacctcctccggttcctattgctggtcctgattccatgtatctgtgctctcgttctcttgctggtgatcctgctttcctatgttggtgcctgtatgaacatcacccacagccagtgtcagatgctgccctaccacgccacgctgacacctctcctctcagttgtcagaaacatggaaatggaaaagttcctcaagtttttcacatatctccatcgcctcagttgctatcaacatatcatgctgtttggctgtaccctcgccttccctgagtgcatcattgatggcgatgacagtcatggactcctgccctgtaggtccttctgtgaggctgcaaaagaaggctgtgaatcagtcctggggatggtgaattactcctggccggatttcctcagatgctcccagtttagaaaccaaactgaaagcagcaatgtcagcagaatttgcttctcacctcagcaggaaaacggaaagcaattgctctgtggaaggggtgagaactttctgtgtgccagtggaatctgcatccccgggaaactgcaatgtaatggctacaacgactgtgacgactggagtgacgaggctcattgcaactgcagcgagaatctgtttcactgtcacacaggcaagtgccttaattacagccttgtgtgtgatggatatgatgactgtggggatttgagtgatgagcaaaactgtgattgcaatcccacaacagagcatcgctgcggggacgggcgctgcatcgccatggagtgggtgtgtgatggtgaccacgactgtgtggataagtctgacgaggtcaactgctcctgtcacagccagggtctggtggaatgcagaaatggacaatgtatccccagcacgtttcaatgtgatggtgacgaggactgcaaggatgggagtgatgaggagaactgcagcgtcattcagacttcatgtcaagaaggagaccaaagatgcctctacaatccctgccttgattcatgtggtggtagctctctctgtgacccgaacaacagtctgaataactgtagtcaatgtgaaccaattacattggaactctgcatgaatttgccctacaacagtacaagttatccaaattattttggccacaggactcaaaaggaagcatccatcagctgggagtcttctcttttccctgcacttgttcaaaccaactgttataaatacctcatgttcttttcttgcaccattttggtaccaaaatgtgatgtgaatacaggcgagcatatccctccttgcagggcattgtgtgaacactctaaagaacgctgtgagtctgttcttgggattgtgggcctacagtggcctgaagacacagattgcagtcaatttccagaggaaaattcagacaatcaaacctgcctgatgcctgatgaatatgtggaagaatgctcacctagtcatttcaagtgccgctcaggacagtgtgttctggcttccagaagatgtgatggccaggccgactgtgacgatgacagtgatgaggaaaactgtggttgtaaagagagagatctttgggaatgtccatccaataaacaatgtttgaagcacacagtgatctgcgatgggttcccagactgccctgattacatggacgagaaaaactgctcattttgccaagatgatgagctggaatgtgcaaaccatgcgtgtgtgtcacgtgacctgtggtgtgatggtgaagccgactgctcagacagttcagatgaatgggactgtgtgaccctctctataaatgtgaactcctcttcctttctgatggttcacagagctgccacagaacaccatgtgtgtgcagatggctggcaggagatattgagtcagctggcctgcaagcagatgggtttaggagaaccatctgtgaccaaattgatacaggaacaggagaaagagccgcggtggctgacattacactccaactgggagagcctcaatgggaccactttacatgaacttctagtaaatgggcagtcttgtgagagcagaagtaaaatttctcttctgtgtactaaacaagactgtgggcgccgccctgctgcccgaatgaacaaaaggatccttggaggtcggacgagtcgccctggaaggtggccatggcagtgttctctgcagagtgaacccagtggacatatctgtggctgtgtcctcattgccaagaagtgggttctgacagttgcccactgcttcgaggggagagagaatgctgcagtttggaaagtggtgcttggcatcaacaatctagaccatccatcagtgttcatgcagacacgctttgtgaagaccatcatcctgcatccccgctacagtcgagcagtggtggactatgacatcagcatcgttgagctgagtgaagacatcagtgagactggctacgtccggcctgtctgcttgcccaacccggagcagtggctagagcctgacacgtactgctatatcacaggctggggccacatgggcaataaaatgccatttaagctgcaagagggagaggtccgcattatttctctggaacattgtcagtcctactttgacatgaagaccatcaccactcggatgatatgtgctggctatgagtctggcacagttgattcatgcatgggtgacagcggtgggcctcttgtttgtgagaagcctggaggacggtggacattatttggattaacttcatggggctccgtctgcttttccaaagtcctggggcctggcgtttatagtaatgtgtcatatttcgtcgaatggattaaaagacagatttacatccagacctttctcctaaactaattataaggatgatcagagacttttgccagctacactaaaagaaaatggccttcttgactgt

SEQ ID NO: 166361 - DNA, 3018 bp, Artificial Sequence
  derived and/or modified sequence
atgaaacagtctcctgccctcgctccggaagagcgctgccgcagagccgggtccccaaagccggtcttgagagctgatgacaataacatgggcaatggctgctctcagaagctggcgactgctaacctcctccggttcctattgctggtcctgattccatgtatctgtgctctcgttctcttgctggtgatcctgctttcctatgttggaacattacaaaaggtctattttaaatcaaatgggagtgaacctttggtcactgatggtgaaatccaagggtccgatgttattcttacaaatacaatttataaccagagcactgtggtgtctactgcacatcccgaccaacacgttccagcctggactacggatgcttctctcccaggggaccaaagtcacaggaatacaagtgcctgtatgaacatcacccacagccagtgtcagatgctgccctaccacgccacgctgacacctctcctctcagttgtcagaaacatggaaatggaaaagttcctcaagtttttcacatatctccatcgcctcagttgctatcaacatatcatgctgtttggctgtaccctcgccttccctgagtgcatcattgatggcgatgacagtcatggactcctgccctgtaggtccttctgtgaggctgcaaaagaaggctgtgaatcagtcctggggatggtgaattactcctggccggatttcctcagatgctcccagtttagaaaccaaactgaaagcagcaatgtcagcagaatttgcttctcacctcagcaggaaaacggaaagcaattgctctgtggaaggggtgagaactttctgtgtgccagtggaatctgcatccccgggaaactgcaatgtaatggctacaacgactgtgacgactggagtgacgaggctcattgcaactgcagcgagaatctgtttcactgtcacacaggcaagtgccttaattacagccttgtgtgtgatggatatgatgactgtggggatttgagtgatgagcaaaactgtgcctgtcacagccagggtctggtggaatgcagaaatggacaatgtatccccagcacgtttcaatgtgatggtgacgaggactgcaaggatgggagtgatgaggagaactgcagcgtcattcagacttcatgtcaagaaggagaccaaagatgcctctacaatccctgccttgattcatgtggtggtagctctctctgtgacccgaacaacagtctgaataactgtagtcaatgtgaaccaattacattggaactctgcatgaatttgccctacaacagtacaagttatccaaattattttggccacaggactcaaaaggaagcatccatcagctgggagtcttctcttttccctgcacttgttcaaaccaactgttataaatacctcatgttcttttcttgcaccattttggtaccaaaatgtgatgtgaatacaggcgagcatatccctccttgcagggcattgtgtgaacactctaaagaacgctgtgagtctgttcttgggattgtgggcctacagtggcctgaagacacagattgcagtcaatttccagaggaaaattcagacaatcaaacctgcctgatgcctgatgaatatgtggaagaatgctcacctagtcatttcaagtgccgctcaggacagtgtgttctggcttccagaagatgtgatggccaggccgactgtgacgatgacagtgatgaggaaaactgtggttgtaaagagagagatctttgggaatgtccatccaataaacaatgtttgaagcacacagtgatctgcgatgggttcccagactgccctgattacatggacgagaaaaactgctcattttgccaagatgatgagctggaatgtgcaaaccatgcgtgtgtgtcacgtgacctgtggtgtgatggtgaagccgactgctcagacagttcagatgaatgggactgtgtgaccctctctataaatgtgaactcctcttcctttctgatggttcacagagctgccacagaacaccatgtgtgtgcagatggctggcaggagatattgagtcagctggcctgcaagcagatgggtttaggagaaccatctgtgaccaaattgatacaggaacaggagaaagagccgcggtggctgacattacactccaactgggagagcctcaatgggaccactttacatgaacttctagtaaatgggcagtcttgtgagagcagaagtaaaatttctcttctgtgtactaaacaagactgtgggcgccgccctgctgcccgaatgaacaaaaggatccttggaggtcggacgagtcgccctggaaggtggccatggcagtgttctctgcagagtgaacccagtggacatatctgtggctgtgtcctcattgccaagaagtgggttctgacagttgcccactgcttcgaggggagagagaatgctgcagtttggaaagtggtgcttggcatcaacaatctagaccatccatcagtgttcatgcagacacgctttgtgaagaccatcatcctgcatccccgctacagtcgagcagtggtggactatgacatcagcatcgttgagctgagtgaagacatcagtgagactggctacgtccggcctgtctgcttgcccaacccggagcagtggctagagcctgacacgtactgctatatcacaggctggggccacatgggcaataaaatgccatttaagctgcaagagggagaggtccgcattatttctctggaacattgtcagtcctactttgacatgaagaccatcaccactcggatgatatgtgctggctatgagtctggcacagttgattcatgcatgggtgacagcggtgggcctcttgtttgtgagaagcctggaggacggtggacattatttggattaacttcatggggctccgtctgcttttccaaagtcctggggcctggcgtttatagtaatgtgtcatatttcgtcgaatggattaaaagacagatttacatccagacctttctcctaaactaa

SEQ ID NO: 166362 - DNA, 3129 bp, Artificial Sequence
  derived and/or modified sequence
atgaagcagagccccgccctggcccccgaggagagatgcagaagagccggcagccccaagcccgtgctgagagccgacgacaacaacatgggcaacggctgcagccagaagctggccaccgccaacctgctgagattcctgctgctggtgctgatcccctgcatctgcgccctggtgctgctgctggtgatcctgctgagctacgtgggcaccctgcagaaggtgtacttcaagagcaacggcagcgagcccctggtgaccgacggcgagatccagggcagcgacgtgatcctgaccaacaccatctacaaccagagcaccgtggtgagcaccgcccaccccgaccagcacgtgcccgcctggaccaccgacgccagcctgcccggcgaccagagccacagaaacaccagcgcctgcatgaacatcacccacagccagtgccagatgctgccctaccacgccaccctgacccccctgctgagcgtggtgagaaacatggagatggagaagttcctgaagttcttcacctacctgcacagactgagctgctaccagcacatcatgctgttcggctgcaccctggccttccccgagtgcatcatcgacggcgacgacagccacggcctgctgccctgcagaagcttctgcgaggccgccaaggagggctgcgagagcgtgctgggcatggtgaactacagctggcccgacttcctgagatgcagccagttcagaaaccagaccgagagcagcaacgtgagcagaatctgcttcagcccccagcaggagaacggcaagcagctgctgtgcggcagaggcgagaacttcctgtgcgccagcggcatctgcatccccggcaagctgcagtgcaacggctacaacgactgcgacgactggagcgacgaggcccactgcaactgcagcgagaacctgttccactgccacaccggcaagtgcctgaactacagcctggtgtgcgacggctacgacgactgcggcgacctgagcgacgagcagaactgcgactgcaaccccaccaccgagcacagatgcggcgacggcagatgcatcgccatggagtgggtgtgcgacggcgaccacgactgcgtggacaagagcgacgaggtgaactgcagctgccacagccagggcctggtggagtgcagaaacggccagtgcatccccagcaccttccagtgcgacggcgacgaggactgcaaggacggcagcgacgaggagaactgcagcgtgatccagaccagctgccaggagggcgaccagagatgcctgtacaacccctgcctggacagctgcggcggcagcagcctgtgcgaccccaacaacagcctgaacaactgcagccagtgcgagcccatcaccctggagctgtgcatgaacctgccctacaacagcaccagctaccccaactacttcggccacagaacccagaaggaggccagcatcagctgggagagcagcctgttccccgccctggtgcagaccaactgctacaagtacctgatgttcttcagctgcaccatcctggtgcccaagtgcgacgtgaacaccggcgagcacatccccccctgcagagccctgtgcgagcacagcaaggagagatgcgagagcgtgctgggcatcgtgggcctgcagtggcccgaggacaccgactgcagccagttccccgaggagaacagcgacaaccagacctgcctgatgcccgacgagtacgtggaggagtgcagccccagccacttcaagtgcagaagcggccagtgcgtgctggccagcagaagatgcgacggccaggccgactgcgacgacgacagcgacgaggagaactgcggctgcaaggagagagacctgtgggagtgccccagcaacaagcagtgcctgaagcacaccgtgatctgcgacggcttccccgactgccccgactacatggacgagaagaactgcagcttctgccaggacgacgagctggagtgcgccaaccacgcctgcgtgagcagagacctgtggtgcgacggcgaggccgactgcagcgacagcagcgacgagtgggactgcgtgaccctgagcatcaacgtgaacagcagcagcttcctgatggtgcacagagccgccaccgagcaccacgtgtgcgccgacggctggcaggagatcctgagccagctggcctgcaagcagatgggcctgggcgagcccagcgtgaccaagctgatccaggagcaggagaaggagcccagatggctgaccctgcacagcaactgggagagcctgaacggcaccaccctgcacgagctgctggtgaacggccagagctgcgagagcagaagcaagatcagcctgctgtgcaccaagcaggactgcggcagaagacccgccgccagaatgaacaagagaatcctgggcggcagaaccagcagacccggcagatggccctggcagtgcagcctgcagagcgagcccagcggccacatctgcggctgcgtgctgatcgccaagaagtgggtgctgaccgtggcccactgcttcgagggcagagagaacgccgccgtgtggaaggtggtgctgggcatcaacaacctggaccaccccagcgtgttcatgcagaccagattcgtgaagaccatcatcctgcaccccagatacagcagagccgtggtggactacgacatcagcatcgtggagctgagcgaggacatcagcgagaccggctacgtgagacccgtgtgcctgcccaaccccgagcagtggctggagcccgacacctactgctacatcaccggctggggccacatgggcaacaagatgcccttcaagctgcaggagggcgaggtgagaatcatcagcctggagcactgccagagctacttcgacatgaagaccatcaccaccagaatgatctgcgccggctacgagagcggcaccgtggacagctgcatgggcgacagcggcggccccctggtgtgcgagaagcccggcggcagatggaccctgttcggcctgaccagctggggcagcgtgtgcttcagcaaggtgctgggccccggcgtgtacagcaacgtgagctacttcgtggagtggatcaagagacagatctacatccagaccttcctgctgaactag

SEQ ID NO: 166363 - DNA, 2928 bp, Artificial Sequence
  derived and/or modified sequence
atgaagcagagccccgccctggcccccgaggagagatgcagaagagccggcagccccaagcccgtgctgagagccgacgacaacaacatgggcaacggctgcagccagaagctggccaccgccaacctgctgagattcctgctgctggtgctgatcccctgcatctgcgccctggtgctgctgctggtgatcctgctgagctacgtgggcgcctgcatgaacatcacccacagccagtgccagatgctgccctaccacgccaccctgacccccctgctgagcgtggtgagaaacatggagatggagaagttcctgaagttcttcacctacctgcacagactgagctgctaccagcacatcatgctgttcggctgcaccctggccttccccgagtgcatcatcgacggcgacgacagccacggcctgctgccctgcagaagcttctgcgaggccgccaaggagggctgcgagagcgtgctgggcatggtgaactacagctggcccgacttcctgagatgcagccagttcagaaaccagaccgagagcagcaacgtgagcagaatctgcttcagcccccagcaggagaacggcaagcagctgctgtgcggcagaggcgagaacttcctgtgcgccagcggcatctgcatccccggcaagctgcagtgcaacggctacaacgactgcgacgactggagcgacgaggcccactgcaactgcagcgagaacctgttccactgccacaccggcaagtgcctgaactacagcctggtgtgcgacggctacgacgactgcggcgacctgagcgacgagcagaactgcgactgcaaccccaccaccgagcacagatgcggcgacggcagatgcatcgccatggagtgggtgtgcgacggcgaccacgactgcgtggacaagagcgacgaggtgaactgcagctgccacagccagggcctggtggagtgcagaaacggccagtgcatccccagcaccttccagtgcgacggcgacgaggactgcaaggacggcagcgacgaggagaactgcagcgtgatccagaccagctgccaggagggcgaccagagatgcctgtacaacccctgcctggacagctgcggcggcagcagcctgtgcgaccccaacaacagcctgaacaactgcagccagtgcgagcccatcaccctggagctgtgcatgaacctgccctacaacagcaccagctaccccaactacttcggccacagaacccagaaggaggccagcatcagctgggagagcagcctgttccccgccctggtgcagaccaactgctacaagtacctgatgttcttcagctgcaccatcctggtgcccaagtgcgacgtgaacaccggcgagcacatccccccctgcagagccctgtgcgagcacagcaaggagagatgcgagagcgtgctgggcatcgtgggcctgcagtggcccgaggacaccgactgcagccagttccccgaggagaacagcgacaaccagacctgcctgatgcccgacgagtacgtggaggagtgcagccccagccacttcaagtgcagaagcggccagtgcgtgctggccagcagaagatgcgacggccaggccgactgcgacgacgacagcgacgaggagaactgcggctgcaaggagagagacctgtgggagtgccccagcaacaagcagtgcctgaagcacaccgtgatctgcgacggcttccccgactgccccgactacatggacgagaagaactgcagcttctgccaggacgacgagctggagtgcgccaaccacgcctgcgtgagcagagacctgtggtgcgacggcgaggccgactgcagcgacagcagcgacgagtgggactgcgtgaccctgagcatcaacgtgaacagcagcagcttcctgatggtgcacagagccgccaccgagcaccacgtgtgcgccgacggctggcaggagatcctgagccagctggcctgcaagcagatgggcctgggcgagcccagcgtgaccaagctgatccaggagcaggagaaggagcccagatggctgaccctgcacagcaactgggagagcctgaacggcaccaccctgcacgagctgctggtgaacggccagagctgcgagagcagaagcaagatcagcctgctgtgcaccaagcaggactgcggcagaagacccgccgccagaatgaacaagagaatcctgggcggcagaaccagcagacccggcagatggccctggcagtgcagcctgcagagcgagcccagcggccacatctgcggctgcgtgctgatcgccaagaagtgggtgctgaccgtggcccactgcttcgagggcagagagaacgccgccgtgtggaaggtggtgctgggcatcaacaacctggaccaccccagcgtgttcatgcagaccagattcgtgaagaccatcatcctgcaccccagatacagcagagccgtggtggactacgacatcagcatcgtggagctgagcgaggacatcagcgagaccggctacgtgagacccgtgtgcctgcccaaccccgagcagtggctggagcccgacacctactgctacatcaccggctggggccacatgggcaacaagatgcccttcaagctgcaggagggcgaggtgagaatcatcagcctggagcactgccagagctacttcgacatgaagaccatcaccaccagaatgatctgcgccggctacgagagcggcaccgtggacagctgcatgggcgacagcggcggccccctggtgtgcgagaagcccggcggcagatggaccctgttcggcctgaccagctggggcagcgtgtgcttcagcaaggtgctgggccccggcgtgtacagcaacgtgagctacttcgtggagtggatcaagagacagatctacatccagaccttcctgctgaactag

SEQ ID NO: 166364 - DNA, 3018 bp, Artificial Sequence
  derived and/or modified sequence
atgaagcagagccccgccctggcccccgaggagagatgcagaagagccggcagccccaagcccgtgctgagagccgacgacaacaacatgggcaacggctgcagccagaagctggccaccgccaacctgctgagattcctgctgctggtgctgatcccctgcatctgcgccctggtgctgctgctggtgatcctgctgagctacgtgggcaccctgcagaaggtgtacttcaagagcaacggcagcgagcccctggtgaccgacggcgagatccagggcagcgacgtgatcctgaccaacaccatctacaaccagagcaccgtggtgagcaccgcccaccccgaccagcacgtgcccgcctggaccaccgacgccagcctgcccggcgaccagagccacagaaacaccagcgcctgcatgaacatcacccacagccagtgccagatgctgccctaccacgccaccctgacccccctgctgagcgtggtgagaaacatggagatggagaagttcctgaagttcttcacctacctgcacagactgagctgctaccagcacatcatgctgttcggctgcaccctggccttccccgagtgcatcatcgacggcgacgacagccacggcctgctgccctgcagaagcttctgcgaggccgccaaggagggctgcgagagcgtgctgggcatggtgaactacagctggcccgacttcctgagatgcagccagttcagaaaccagaccgagagcagcaacgtgagcagaatctgcttcagcccccagcaggagaacggcaagcagctgctgtgcggcagaggcgagaacttcctgtgcgccagcggcatctgcatccccggcaagctgcagtgcaacggctacaacgactgcgacgactggagcgacgaggcccactgcaactgcagcgagaacctgttccactgccacaccggcaagtgcctgaactacagcctggtgtgcgacggctacgacgactgcggcgacctgagcgacgagcagaactgcgcctgccacagccagggcctggtggagtgcagaaacggccagtgcatccccagcaccttccagtgcgacggcgacgaggactgcaaggacggcagcgacgaggagaactgcagcgtgatccagaccagctgccaggagggcgaccagagatgcctgtacaacccctgcctggacagctgcggcggcagcagcctgtgcgaccccaacaacagcctgaacaactgcagccagtgcgagcccatcaccctggagctgtgcatgaacctgccctacaacagcaccagctaccccaactacttcggccacagaacccagaaggaggccagcatcagctgggagagcagcctgttccccgccctggtgcagaccaactgctacaagtacctgatgttcttcagctgcaccatcctggtgcccaagtgcgacgtgaacaccggcgagcacatccccccctgcagagccctgtgcgagcacagcaaggagagatgcgagagcgtgctgggcatcgtgggcctgcagtggcccgaggacaccgactgcagccagttccccgaggagaacagcgacaaccagacctgcctgatgcccgacgagtacgtggaggagtgcagccccagccacttcaagtgcagaagcggccagtgcgtgctggccagcagaagatgcgacggccaggccgactgcgacgacgacagcgacgaggagaactgcggctgcaaggagagagacctgtgggagtgccccagcaacaagcagtgcctgaagcacaccgtgatctgcgacggcttccccgactgccccgactacatggacgagaagaactgcagcttctgccaggacgacgagctggagtgcgccaaccacgcctgcgtgagcagagacctgtggtgcgacggcgaggccgactgcagcgacagcagcgacgagtgggactgcgtgaccctgagcatcaacgtgaacagcagcagcttcctgatggtgcacagagccgccaccgagcaccacgtgtgcgccgacggctggcaggagatcctgagccagctggcctgcaagcagatgggcctgggcgagcccagcgtgaccaagctgatccaggagcaggagaaggagcccagatggctgaccctgcacagcaactgggagagcctgaacggcaccaccctgcacgagctgctggtgaacggccagagctgcgagagcagaagcaagatcagcctgctgtgcaccaagcaggactgcggcagaagacccgccgccagaatgaacaagagaatcctgggcggcagaaccagcagacccggcagatggccctggcagtgcagcctgcagagcgagcccagcggccacatctgcggctgcgtgctgatcgccaagaagtgggtgctgaccgtggcccactgcttcgagggcagagagaacgccgccgtgtggaaggtggtgctgggcatcaacaacctggaccaccccagcgtgttcatgcagaccagattcgtgaagaccatcatcctgcaccccagatacagcagagccgtggtggactacgacatcagcatcgtggagctgagcgaggacatcagcgagaccggctacgtgagacccgtgtgcctgcccaaccccgagcagtggctggagcccgacacctactgctacatcaccggctggggccacatgggcaacaagatgcccttcaagctgcaggagggcgaggtgagaatcatcagcctggagcactgccagagctacttcgacatgaagaccatcaccaccagaatgatctgcgccggctacgagagcggcaccgtggacagctgcatgggcgacagcggcggccccctggtgtgcgagaagcccggcggcagatggaccctgttcggcctgaccagctggggcagcgtgtgcttcagcaaggtgctgggccccggcgtgtacagcaacgtgagctacttcgtggagtggatcaagagacagatctacatccagaccttcctgctgaactag

SEQ ID NO: 166365 - DNA, 3129 bp, Artificial Sequence
  derived and/or modified sequence
atgaagcaatctcccgcactcgcccctgaagagaggtgtaggagagctgggtcaccaaagccagtcctcagagcagatgacaacaacatgggcaatggctgcagccagaagctggccacagctaatctgctcaggtttcttctactcgtgcttataccgtgcatatgtgctttagtcctactattagtcatattactgtcatatgttggaaccctccaaaaagtgtatttcaagtctaatggcagcgagcctttggtgaccgacggcgaaatccagggctctgatgtcattctgaccaacacaatctataatcaaagcaccgttgtgtctaccgctcaccccgaccagcatgtccccgcgtggacaaccgacgcttctcttccgggcgatcagtcccacaggaacacctccgcctgcatgaatattacccactcacaatgtcagatgcttccttaccacgcaacccttactccgctgctgagcgtggtgaggaatatggaaatggagaagtttctgaagttttttacctacctgcatcgcctttcttgctatcagcatattatgttgttcgggtgtaccttagccttcccagagtgcatcatcgacggagatgatagtcacgggttactgccgtgtcggagtttttgcgaggctgctaaggagggttgcgagagcgttctgggcatggtgaactactcctggccagatttccttcgatgtagccagtttcgaaaccaaacagaatctagtaacgtgtcaaggatctgtttctccccccaacaggagaacgggaagcaactactctgtggacgtggcgagaacttcttgtgtgcctctgggatttgtatccccggcaaacttcagtgtaatggttacaacgattgtgatgactggagcgacgaggctcactgtaactgttctgagaatctattccactgtcatactggtaagtgcctgaattactcacttgtgtgcgacggatatgacgattgcggagatctttccgacgaacagaactgtgattgcaaccccacaaccgagcacaggtgtggcgacggcaggtgtattgcaatggagtgggtgtgtgacggcgatcatgattgcgtcgataaatcagatgaagtgaattgttcctgtcatagtcaggggctggtggagtgccgcaacgggcaatgtatccctagcacgttccagtgtgatggggacgaggactgcaaagatggcagcgatgaggagaactgtagtgtgatacagaccagttgccaggagggtgatcagaggtgcctctacaacccctgtctggatagttgtggcggctcctctctatgcgacccaaataattccctcaacaactgtagccagtgcgagccaatcacccttgaactgtgtatgaatctaccttataattctaccagttacccaaattacttcgggcaccgcactcagaaggaggcaagtatcagttgggaaagctctctgtttccagcactggtccagactaattgttataagtacctcatgttctttagctgtacaattttagtaccaaagtgcgacgtcaatactggagagcacattcccccatgccgggcactttgtgagcatagcaaagagcggtgtgaaagcgtgctgggtatagtgggcctgcagtggccagaagacacagactgtagtcagttccccgaagaaaactccgacaatcaaacctgtttaatgcctgatgagtacgtcgaagagtgcagtccctctcactttaaatgcaggtctgggcagtgcgtgcttgcctccagacgttgcgacgggcaagcagattgtgacgatgatagcgacgaagaaaactgcggatgtaaggagagagatctctgggagtgccccagtaacaagcagtgccttaagcacacagttatatgcgacggcttccctgattgccccgactacatggacgaaaaaaattgttccttctgtcaggacgatgagctcgagtgtgcaaatcatgcctgtgtgtcgcgcgacctgtggtgtgacggggaggcagactgctctgactcctctgatgaatgggactgtgtcactctatccatcaatgtaaatagtagctctttcctgatggtccatagggcagctacggaacatcacgtatgtgctgacggatggcaggaaatactttctcagcttgcttgtaaacagatgggactcggggaaccatccgttaccaaactcattcaggagcaagagaaagaaccccgctggctaacgcttcattctaactgggagtctctgaacggaacaaccctgcatgaattgctggtgaatggtcagagttgtgagtctagatctaagatttcacttctctgcacaaaacaagactgtggtcgcagacctgctgcgaggatgaataaaagaatactcggtggcagaacatctagacccggacggtggccctggcagtgcagcctgcagagtgagccatccggacatatctgtgggtgcgtcttgatcgctaagaagtgggtacttactgtggcacactgcttcgagggtcgagagaacgctgcggtctggaaggtcgtcctcggtataaacaatttggaccacccctccgtgtttatgcagacccgcttcgttaagactattattttgcacccacgatatagcagagcagtagtggattatgacatctccatagtggaactgtcagaagacatttcagaaacgggttatgtgcggcccgtctgtcttcccaatcctgagcagtggctggaacctgatacctattgctacattaccgggtggggtcacatgggcaataagatgccgttcaagttacaggaaggtgaagtccggatcatatccttagagcactgccaaagttacttcgacatgaagaccatcaccactcggatgatctgcgcgggttacgaaagtgggacagtcgactcttgcatgggagattctggcggtccacttgtgtgcgagaaacctggaggtcggtggacccttttcggcctcactagctgggggtctgtgtgtttctctaaagtgctcggacctggcgtttatagtaatgtcagttacttcgttgagtggattaagcgccagatctatattcagaccttcctgctaaactag

SEQ ID NO: 166366 - DNA, 2928 bp, Artificial Sequence
  derived and/or modified sequence
atgaaacagtctcctgcattggcacccgaggagcggtgtagacgagccggatcaccaaaacccgtcttacgagctgacgataacaatatggggaacggatgcagtcagaaactggccaccgctaatttgctgaggtttctcctactcgtactgatcccctgcatctgtgcccttgtgcttctactcgtgatcttgctgtcgtacgtgggagcctgtatgaacatcacccactcccaatgtcagatgcttccttatcacgctacactgacccccctgcttagcgtcgtacgtaatatggaaatggaaaaattccttaaattctttacttacctgcacaggctatcttgttatcaacacatcatgttattcggttgcacactggcctttccagagtgcattattgacggcgatgatagccacggtcttctgccctgtcgatctttttgcgaggccgcgaaagaaggttgtgagagcgtgctaggcatggtgaactactcatggccagactttttgcggtgcagtcagtttcggaaccagaccgagtcatctaacgtctcccgcatctgctttagcccacagcaggagaacggaaagcagcttctgtgtggcaggggagaaaactttctgtgtgcaagcggcatttgtattcccggcaagctgcagtgtaatgggtataatgactgtgacgactggtctgacgaagcccattgtaactgcagcgagaatttatttcattgccacacaggcaagtgtctaaactattccctggtttgcgacggttacgacgactgcggggatttgtcagacgagcagaactgcgactgcaaccccaccaccgagcatcggtgtggtgatgggcgctgtatcgcaatggagtgggtttgcgatggcgaccatgactgtgttgacaagagcgacgaggttaactgctcttgtcactcccagggcctggtggaatgtagaaacgggcagtgcattccaagtacattccaatgtgatggagacgaagactgtaaagacggcagtgacgaggaaaattgctcagtgatacagacctcgtgtcaagagggtgaccagcgatgcctgtataacccttgcttggatagttgtggcggttcatccttgtgcgacccaaacaattctttgaataattgcagtcagtgcgaacccattaccctggagttatgcatgaacttaccatataactctacctcctacccaaactatttcggacaccgaacacagaaagaggcctccattagctgggaatctagcctgttcccggccctggtccagacaaactgctacaaatacctcatgttttttagctgcaccattctggtgcctaaatgcgacgttaacaccggagagcacatcccaccttgcagggcactttgtgagcactcgaaagaaaggtgcgagtctgtgctgggcattgtcggactccagtggcccgaggatactgactgttcacagtttcccgaggagaattctgacaaccagacctgcctcatgcctgacgagtacgtggaagagtgctcgccatcccacttcaagtgcaggtccgggcagtgtgtattagcttcaagaaggtgcgacggccaggcggactgtgatgatgattccgatgaagagaactgcggttgcaaggaacgtgacctctgggagtgcccatctaataagcaatgtcttaagcacacagtcatctgcgatggatttccagactgccccgattatatggacgaaaaaaactgcagcttctgtcaggacgacgagctggagtgcgccaaccacgcttgtgttagtagagatctgtggtgcgacggggaggccgactgctctgacagcagcgacgaatgggactgcgttaccttgagcatcaatgtgaatagttcctcttttctgatggtgcatcgagctgccactgaacaccatgtatgcgccgacgggtggcaagagatcctgtctcagctggcttgtaagcagatgggcttgggggagccatcggtaacgaaactaatccaggaacaagaaaaagagcctcggtggctcactctgcactccaactgggaatccctgaacggcacaaccctgcatgagctactcgtcaatggccagagctgcgagtccaggtctaagatcagtctcctttgtactaaacaggattgtggacggagacccgctgccagaatgaacaaacgcatcctcggaggacgaacctcacggcccggcagatggccatggcagtgctccctgcagtccgagccatcaggtcacatctgcgggtgcgtgttgattgctaaaaaatgggtgctgaccgttgctcactgtttcgagggccgggaaaatgcagccgtgtggaaagtcgtgcttggcatcaacaacctcgatcatcctagcgtcttcatgcaaacccgcttcgtgaagactataatcctgcacccaagatactccagagctgtggtggattacgacattagcattgtggagcttagtgaggatatctcggaaaccggctacgtgcggcccgtgtgcctccctaaccctgagcagtggctcgagcccgacacttactgttacattactgggtggggacatatgggtaataagatgcctttcaagctgcaggagggagaagtgcgtataatttctctggagcactgccagagttatttcgacatgaagaccatcaccaccaggatgatttgtgctggatatgagagcggcaccgtagatagttgtatgggggacagcggtggccccctcgtgtgcgagaagccgggaggccggtggactctctttgggctgacctcttggggttccgtgtgtttcagtaaggtgctgggtcccggagtttactctaacgtcagttatttcgtcgaatggataaagcgccaaatttatatccagaccttcttgctcaattag

SEQ ID NO: 166367 - DNA, 3018 bp, Artificial Sequence
  derived and/or modified sequence
atgaagcagagccccgcactggccccagaggaacgttgtagaagagccgggagcccaaaaccggtccttcgggcagacgacaataacatggggaacggttgcagccagaagctcgcgactgctaatcttctaaggtttctccttctcgtgttaataccatgtatctgcgcactggtgttgctcttagtgattctactgtcttatgttggaacactccaaaaggtgtactttaaatcgaatgggagcgagcccctggtgaccgacggcgaaattcagggttctgacgtgatcctgacaaatactatctacaatcagtcaaccgtggtgagtactgcccatccagatcagcatgttccagcatggactaccgacgcgagtcttcccggagaccaatctcaccgtaatacctctgcttgcatgaatattacccacagccagtgccagatgttgccttaccacgctaccctgacacccttactcagcgtcgtgcggaacatggagatggagaagtttctcaagttctttacctacctgcaccgcctatcctgctatcagcatattatgttattcggctgtaccctggcatttcccgaatgtatcattgacggcgacgacagtcacggactactcccctgtcgctccttctgcgaagccgccaaggaaggctgtgaaagcgtgctgggtatggtgaactactcctggccagatttccttcgatgtagccagtttaggaatcaaacagaatcctcgaacgtcagccggatttgtttttccccacagcaggagaatggtaaacagttactatgtgggaggggagagaacttcctgtgtgcttctggcatctgcattcccgggaaactgcagtgcaacggttacaatgattgtgatgactggagcgacgaggctcactgcaattgttccgagaacctattccattgccataccgggaaatgtttaaattatagcctcgtgtgtgatggatacgatgattgcggcgatctcagtgacgaacagaactgcgcttgtcactctcagggtctggtggagtgcagaaatggtcagtgtattccctctaccttccagtgtgatggagacgaagactgcaaggatggctctgacgaggaaaattgttccgtcatacagacttcctgtcaggaaggcgaccaacgatgtctgtacaacccttgcttagactcctgtgggggctccagcttatgtgatcccaacaattcactgaacaactgttcccagtgcgagcccatcaccctggagctgtgtatgaatttaccttataacagcaccagttaccctaactatttcggccatcgaacccagaaagaagctagcatctcttgggagtcctccttatttccagcgttagtgcaaactaactgttacaaatacctcatgttcttctcgtgcactatcctcgttcctaagtgtgacgttaacaccggagaacacatccctccttgccgggccctttgcgagcattcaaaagaacgctgtgagtcagttttgggaatagtcggactccaatggcccgaagatacagattgttcacagttccctgaggagaactctgacaatcagacctgcttaatgcccgacgagtatgtcgaagaatgtagtcccagtcattttaagtgccggtcagggcagtgcgtgcttgcctcccgccgatgtgacggtcaggcagactgtgatgacgactctgatgaggagaattgcggatgtaaagaaagggacctgtgggagtgcccgtctaacaaacaatgcctaaaacatactgttatctgcgacggttttcccgattgtcctgactacatggatgaaaagaactgttcgttctgccaggatgacgagctcgagtgtgccaaccacgcctgtgtttcgagggatctgtggtgtgacggagaggcagattgctcggatagttccgatgagtgggactgtgttaccctcagcataaacgtgaacagcagctccttcttgatggttcaccgtgcggctaccgagcatcacgtgtgcgcagatggctggcaggagatactcagccagctggcgtgcaagcagatggggctcggcgagccctccgtaaccaaactcatacaggaacaagagaaggagccacgctggcttacattgcacagcaactgggagtctctcaatggcaccacgctacacgaactgctggtcaatgggcagtcttgtgaatcaagaagcaagatttccctcctgtgtaccaagcaagactgtggaaggcgacccgctgctcggatgaataagaggatactcggaggccgcacttcccggcctgggcgctggccctggcagtgtagcctccagtcggaaccaagtggccacatctgcgggtgcgtgctaatcgcaaagaagtgggtgcttaccgttgcccactgtttcgaaggtcgggaaaacgccgcggtatggaaagtggtgctcggcatcaacaatctagatcaccccagtgtgtttatgcagaccagatttgttaagacaatcatcctgcaccctagatacagtcgtgccgtggtggattacgacatctctatcgttgagctgtcagaggatatcagcgagacaggctacgtgaggcccgtttgtctccctaaccctgaacagtggctggagcctgatacttattgttatattaccggttgggggcatatggggaacaaaatgccctttaaactgcaggagggcgaggtgcgaattatctctctggagcattgccaatcgtacttcgatatgaaaaccataactacccggatgatctgcgccggctacgagtccggtaccgtcgactcgtgtatgggtgattctgggggcccacttgtgtgtgagaagccagggggacgctggacactgttcggcctgactagctgggggtctgtgtgcttctcaaaggtactgggtccgggggtgtatagcaatgtctcttacttcgttgaatggattaagcgacagatttatatccaaacattcctgctcaattag

SEQ ID NO: 166368 - DNA, 3129 bp, Artificial Sequence
  derived and/or modified sequence
atgaagcagagccctgccctggcccctgaggagcgctgccggcgggccggcagccccaagcctgtgctgcgggcagatgacaacaacatgggaaatggctgcagccagaagctggccacagccaacctgctgcgcttcctgctgctggtgctgatcccctgcatctgtgccctggtgctgctgctggtgatcctgctgtcctatgtgggcaccctgcagaaggtgtacttcaagagcaatggcagcgagcccctggtgacagatggagagatccagggcagtgatgtgatcctgaccaacaccatctacaaccagagcacagtggtgtccacagcccacccagaccagcacgtgcctgcctggaccacagatgccagcctgcccggggaccagagccacaggaacaccagcgcctgcatgaacatcacccacagccagtgccagatgctgccctaccacgccaccctgacccccctgctgtctgtggtgaggaacatggagatggagaagttcctgaagttcttcacctacctgcaccggctgagctgctaccagcacatcatgctgtttggctgcaccctggccttccctgagtgcatcattgatggagatgacagccacggcctgctgccctgccgctccttctgtgaggccgccaaggagggctgtgagagcgtgctgggcatggtgaactacagctggccagacttcctgcgctgcagccagttcaggaaccagacagagagcagcaatgtgagccgcatctgcttcagcccccagcaggagaatggcaagcagctgctgtgtggcagaggagagaacttcctgtgtgccagcggcatctgcatccctgggaagctgcagtgcaatggctacaatgactgtgatgactggagcgatgaggcccactgcaactgcagcgagaacctcttccactgccacacaggcaagtgcctgaactacagcctggtgtgtgatggctatgatgactgtggggacctgagtgatgagcagaactgtgactgcaaccccaccacagagcaccgctgtggagatggccgctgcatcgccatggagtgggtgtgtgatggagaccatgactgtgtggacaagagtgatgaggtgaactgcagctgccacagccagggcctggtggagtgcagaaatggccagtgcatccccagcaccttccagtgtgatggagatgaggactgcaaggatggcagtgatgaggagaactgcagcgtcatccagaccagctgccaggagggggaccagcgctgcctgtacaacccctgcctggacagctgtggcggcagcagcctgtgtgaccccaacaacagcctgaacaactgcagccagtgtgagcccatcaccctggagctgtgcatgaacctgccctacaacagcaccagctaccccaactacttcggccacaggacccagaaggaggccagcatctcctgggagagcagcctcttccctgccctggtgcagaccaactgctacaagtacctgatgttcttcagctgcaccatcctggtgcccaagtgtgatgtgaacacaggagagcacatccccccctgccgggccctgtgtgagcacagcaaggagcgctgtgagagcgtgctgggcatcgtgggcctgcagtggccagaggacacagactgcagccagtttcctgaagaaaattctgacaaccagacctgcctgatgccagatgaatatgtggaggagtgcagccccagccacttcaagtgccgcagcggccagtgtgtgctggccagcagaagatgtgatggccaggccgactgtgatgatgacagtgatgaggagaactgtggctgcaaggagcgggacctgtgggagtgccccagcaacaagcagtgcctgaagcacacagtcatctgtgatggcttcccagactgcccagactacatggatgagaagaactgcagcttctgccaggatgatgagctggagtgtgccaaccacgcctgtgtgtcccgggacctgtggtgtgatggagaggccgactgcagcgacagcagtgatgagtgggactgtgtgaccctgagcatcaacgtgaacagcagcagcttcctgatggtgcacagagctgccacagagcaccacgtgtgtgctgatggctggcaggagatcctgagccagctggcctgcaagcagatgggcctgggggagcccagcgtgaccaagctgatccaggagcaggagaaggagccccgctggctgaccctgcacagcaactgggagagcctgaatggcaccaccctgcacgagctgctggtgaatggccagagctgtgagagccgcagcaagatcagcctgctgtgcaccaagcaggactgtggccggcggcctgctgccaggatgaacaagaggatcctgggcggccgcaccagccggcccggccgctggccctggcagtgcagcctgcagagcgagcccagcggccacatctgtggctgtgtgctgattgccaagaagtgggtgctgactgtggcccactgctttgagggcagagaaaatgctgctgtgtggaaggtggtgctgggcatcaacaacctggaccaccccagcgtcttcatgcagaccaggtttgtgaagaccatcatcctgcacccccgctacagcagagctgtggtggactatgacatcagcatcgtggagctgtctgaggacatcagcgagaccggctacgtgcggcctgtgtgcctgcccaaccctgagcagtggctggagccagacacctactgctacatcaccggctggggccacatgggcaacaagatgcccttcaagctgcaggagggggaggtgcgcatcatcagcctggagcactgccagagctactttgacatgaagaccatcaccaccaggatgatctgtgccggctatgaaagtggcaccgtggacagctgcatgggagacagcggcggccccctggtgtgtgagaagccaggcggccgctggaccctgtttggcctgacctcctggggctctgtgtgcttcagcaaggtgctgggccctggggtgtacagcaatgtgtcctactttgtggagtggatcaagaggcagatctacatccagaccttcctgctgaactag

SEQ ID NO: 166369 - DNA, 2928 bp, Artificial Sequence
  derived and/or modified sequence
atgaagcagagccctgccctggcccctgaggagcgctgccggcgggccggcagccccaagcctgtgctgcgggcagatgacaacaacatgggaaatggctgcagccagaagctggccacagccaacctgctgcgcttcctgctgctggtgctgatcccctgcatctgtgccctggtgctgctgctggtgatcctgctgtcctatgtgggcgcctgcatgaacatcacccacagccagtgccagatgctgccctaccacgccaccctgacccccctgctgtctgtggtgaggaacatggagatggagaagttcctgaagttcttcacctacctgcaccggctgagctgctaccagcacatcatgctgtttggctgcaccctggccttccctgagtgcatcattgatggagatgacagccacggcctgctgccctgccgctccttctgtgaggccgccaaggagggctgtgagagcgtgctgggcatggtgaactacagctggccagacttcctgcgctgcagccagttcaggaaccagacagagagcagcaatgtgagccgcatctgcttcagcccccagcaggagaatggcaagcagctgctgtgtggccgcggggagaacttcctgtgtgccagcggcatctgcatccctgggaagctgcagtgcaatggctacaatgactgtgatgactggagcgatgaggcccactgcaactgcagtgaaaatctcttccactgccacacaggcaagtgcctgaactacagcctggtgtgtgatggctatgatgactgtggggacctgagtgatgagcagaactgtgactgcaaccccaccacagagcaccgctgtggagatggccgctgcatcgccatggagtgggtgtgtgatggagaccatgactgtgtggacaagagtgatgaggtgaactgcagctgccacagccagggcctggtggagtgcagaaatggccagtgcatccccagcaccttccagtgtgatggagatgaggactgcaaggatggcagtgatgaggagaactgcagcgtcatccagaccagctgccaggagggggaccagcgctgcctgtacaacccctgcctggacagctgtggcggcagcagcctgtgtgaccccaacaacagcctgaacaactgcagccagtgtgagcccatcaccctggagctgtgcatgaacctgccctacaacagcaccagctaccccaactacttcggccacaggacccagaaggaggccagcatctcctgggagagcagcctcttccctgccctggtgcagaccaactgctacaagtacctgatgttcttcagctgcaccatcctggtgcccaagtgtgatgtgaacacaggagagcacatccccccctgccgggccctgtgtgagcacagcaaggagcgctgtgagagcgtgctgggcatcgtgggcctgcagtggccagaggacacagactgcagccagtttcctgaggagaacagcgacaaccagacctgcctgatgccagatgaatatgtggaggagtgcagccccagccacttcaagtgccgcagcggccagtgtgtgctggccagccgccgctgtgatggccaggccgactgtgatgatgacagtgatgaggagaactgtggctgcaaggagcgggacctgtgggagtgccccagcaacaagcagtgcctgaagcacacagtcatctgtgatggcttcccagactgcccagactacatggatgagaagaactgcagcttctgccaggatgatgagctggagtgtgccaaccacgcctgtgtgtcccgggacctgtggtgtgatggagaggccgactgcagcgacagcagtgatgagtgggactgtgtgaccctgagcatcaacgtgaacagcagcagcttcctgatggtgcaccgggccgccacagagcaccacgtgtgtgctgatggctggcaggagatcctgagccagctggcctgcaagcagatgggcctgggggagcccagcgtgaccaagctgatccaggagcaggagaaggagccccgctggctgaccctgcacagcaactgggagagcctgaatggcaccaccctgcacgagctgctggtgaatggccagagctgtgagagccgcagcaagatcagcctgctgtgcaccaagcaggactgtggcagaagacctgctgccaggatgaacaagaggatcctgggcggccgcaccagcaggcctggccgctggccctggcagtgcagcctgcagagcgagcccagcggccacatctgtggctgtgtgctgattgccaagaagtgggtgctgactgtggcccactgctttgagggccgggagaatgctgctgtgtggaaggtggtgctgggcatcaacaacctggaccaccccagcgtcttcatgcagaccaggtttgtgaagaccatcatcctgcacccccgctacagcagagctgtggtggactatgacatcagcatcgtggagctgtctgaggacatcagcgagaccggctacgtgcggcctgtgtgcctgcccaaccctgagcagtggctggagccagacacctactgctacatcaccggctggggccacatgggcaacaagatgcccttcaagctgcaggagggggaggtgcgcatcatcagcctggagcactgccagagctactttgacatgaagaccatcaccaccaggatgatctgtgccggctatgagagcggcaccgtggacagctgcatgggagacagcggcggccccctggtgtgtgagaagccaggcggccgctggaccctgtttggcctgacctcctggggctctgtgtgcttcagcaaggtgctgggccctggggtgtacagcaatgtgtcctactttgtggagtggatcaagaggcagatctacatccagaccttcctgctgaactag

SEQ ID NO: 166370 - DNA, 3018 bp, Artificial Sequence
  derived and/or modified sequence
atgaagcagagccctgccctggcccctgaggagcgctgccggcgggccggcagccccaagcctgtgctgcgggcagatgacaacaacatgggaaatggctgcagccagaagctggccacagccaacctgctgcgcttcctgctgctggtgctgatcccctgcatctgtgccctggtgctgctgctggtgatcctgctgtcctatgtgggcaccctgcagaaggtgtacttcaagagcaatggcagcgagcccctggtgacagatggagagatccagggcagtgatgtgatcctgaccaacaccatctacaaccagagcacagtggtgtccacagcccacccagaccagcacgtgcctgcctggaccacagatgccagcctgcccggggaccagagccacaggaacaccagcgcctgcatgaacatcacccacagccagtgccagatgctgccctaccacgccaccctgacccccctgctgtctgtggtgaggaacatggagatggagaagttcctgaagttcttcacctacctgcaccggctgagctgctaccagcacatcatgctgtttggctgcaccctggccttccctgagtgcatcattgatggagatgacagccacggcctgctgccctgccgctccttctgtgaggccgccaaggagggctgtgagagcgtgctgggcatggtgaactacagctggccagacttcctgcgctgcagccagttcaggaaccagacagagagcagcaatgtgagccgcatctgcttcagcccccagcaggagaatggcaagcagctgctgtgtggcagaggagagaacttcctgtgtgccagcggcatctgcatccctgggaagctgcagtgcaatggctacaatgactgtgatgactggagcgatgaggcccactgcaactgcagcgagaacctcttccactgccacacaggcaagtgcctgaactacagcctggtgtgtgatggctatgatgactgtggggacctgagtgatgagcagaactgtgcctgccacagccagggcctggtggagtgcagaaatggccagtgcatccccagcaccttccagtgtgatggagatgaggactgcaaggatggcagtgatgaggagaactgcagcgtcatccagaccagctgccaggagggggaccagcgctgcctgtacaacccctgcctggacagctgtggcggcagcagcctgtgtgaccccaacaacagcctgaacaactgcagccagtgtgagcccatcaccctggagctgtgcatgaacctgccctacaacagcaccagctaccccaactacttcggccacaggacccagaaggaggccagcatctcctgggagagcagcctcttccctgccctggtgcagaccaactgctacaagtacctgatgttcttcagctgcaccatcctggtgcccaagtgtgatgtgaacacaggagagcacatccccccctgccgggccctgtgtgagcacagcaaggagcgctgtgagagcgtgctgggcatcgtgggcctgcagtggccagaggacacagactgcagccagtttcctgaggagaacagcgacaaccagacctgcctgatgccagatgaatatgtggaggagtgcagccccagccacttcaagtgccgcagcggccagtgtgtgctggccagccgccgctgtgatggccaggccgactgtgatgatgacagtgatgaggagaactgtggctgcaaggagcgggacctgtgggagtgccccagcaacaagcagtgcctgaagcacacagtcatctgtgatggcttcccagactgcccagactacatggatgagaagaactgcagcttctgccaggatgatgagctggagtgtgccaaccacgcctgtgtgtcccgggacctgtggtgtgatggagaggccgactgcagcgacagcagtgatgagtgggactgtgtgaccctgagcatcaacgtgaacagcagcagcttcctgatggtgcaccgggccgccacagagcaccacgtgtgtgctgatggctggcaggagatcctgagccagctggcctgcaagcagatgggcctgggggagcccagcgtgaccaagctgatccaggagcaggagaaggagccccgctggctgaccctgcacagcaactgggagagcctgaatggcaccaccctgcacgagctgctggtgaatggccagagctgtgagagccgcagcaagatcagcctgctgtgcaccaagcaggactgtggcagaagacctgctgccaggatgaacaagaggatcctgggcggccgcaccagcaggcctggccgctggccctggcagtgcagcctgcagagcgagcccagcggccacatctgtggctgtgtgctgattgccaagaagtgggtgctgactgtggcccactgctttgagggccgggagaatgctgctgtgtggaaggtggtgctgggcatcaacaacctggaccaccccagcgtcttcatgcagaccaggtttgtgaagaccatcatcctgcacccccgctacagcagagctgtggtggactatgacatcagcatcgtggagctgtctgaggacatcagcgagaccggctacgtgcggcctgtgtgcctgcccaaccctgagcagtggctggagccagacacctactgctacatcaccggctggggccacatgggcaacaagatgcccttcaagctgcaggagggggaggtgcgcatcatcagcctggagcactgccagagctactttgacatgaagaccatcaccaccaggatgatctgtgccggctatgagagcggcaccgtggacagctgcatgggagacagcggcggccccctggtgtgtgagaagccaggcggccgctggaccctgtttggcctgacctcctggggctctgtgtgcttcagcaaggtgctgggccctggggtgtacagcaatgtgtcctactttgtggagtggatcaagaggcagatctacatccagaccttcctgctgaactag

SEQ ID NO: 166371 - DNA, 3129 bp, Artificial Sequence
  derived and/or modified sequence
atgaagcagagccccgccctggcccccgaggagcggtgccggcgggccgggtccccaaagcccgtcctgcgggctgacgataacaacatgggtaacggttgttcacaaaagctggccacagctaacctgctcagatttctgctcttggtattaatcccatgtatctgtgccttggtccttctactggtgatcctgctgagctatgtaggcacccttcagaaagtgtacttcaagagcaacggctccgaacctctcgtgacagatggcgaaatccagggtagcgacgtgatcctgactaacacaatctataaccagtctactgtggtgagcacagcgcaccccgaccagcatgtgccagcgtggacgacagatgcttccctgccgggggatcagtcgcatcggaacacatcagcttgcatgaacatcactcacagccagtgtcagatgctgccctaccacgccactctgacacctttattgtctgtcgtgcggaatatggagatggaaaagttcctaaaatttttcacctacttgcatcgcctgtcctgctatcagcacattatgctgtttggctgtactctcgcattccccgagtgtattatcgacggcgacgattctcacggcctgctgccctgccggtccttttgcgaagcagctaaagaaggttgcgaaagcgtactcggcatggtcaactatagttggccagactttctacggtgttcacagttccggaaccagaccgagagctcaaacgtgtcaagaatctgcttctccccccaacaagagaatgggaaacagctgctgtgcggacggggggagaattttctgtgtgctagcgggatttgcattcctggaaagctgcagtgcaacggatataatgattgcgacgattggtctgacgaagcacattgtaattgctccgaaaacttattccactgtcacacaggaaaatgcctcaactattcgctggtgtgcgatgggtacgacgactgtggggatctgtccgacgagcagaactgcgactgcaacccgaccacagagcatagatgtggagatggccgctgtatcgcaatggaatgggtatgcgatggtgaccatgactgcgtagacaagagcgacgaggtgaattgttcatgccacagccaagggctggtagagtgccgcaatggacagtgcattcccagcaccttccagtgcgacggagacgaagactgcaaggatgggagcgatgaggagaattgtagtgtgattcagacttcttgccaagaaggggaccagcggtgcctctataacccatgtttagattcgtgcggcgggtcatctctgtgtgacccaaataactctctgaacaactgcagccagtgcgagccgattaccctggaactgtgcatgaatttaccatacaatagcaccagctatccaaattattttggtcatcgcacacagaaagaggccagcatttcctgggagagctccctgttcccagccctggttcagaccaattgctacaaatacctgatgttcttctcttgcacaatcctggtacccaaatgcgacgtgaatacaggagagcacataccgccttgcagggctctgtgcgaacattccaaagaacgttgtgagtcagtgttaggaatcgtgggactgcagtggcccgaggatacagattgttcccagttccccgaagaaaatagtgataatcagacttgtctcatgcctgacgagtacgtagaggaatgtagcccttcacattttaagtgccggtcgggtcagtgcgtacttgcaagtagaaggtgcgacggccaggcagattgcgacgacgactccgatgaggagaactgtggatgcaaggagcgcgatctctgggagtgccccagtaataaacagtgtttgaaacatacagtgatctgcgatgggttccccgattgtcctgattatatggatgaaaaaaattgcagtttctgccaggatgacgagcttgaatgcgctaatcacgcatgtgtttcacgagatctgtggtgtgacggagaggcggattgcagcgattcatcggatgagtgggattgcgtgacattgtctatcaatgttaacagctcttcattccttatggttcacagggccgccaccgagcaccacgtgtgtgccgatggctggcaggaaatcctgtctcagcttgcttgcaagcaaatgggcttgggggagccgtccgtgacgaagctgattcaggaacaggagaaagagccgaggtggcttaccttgcactctaactgggagagccttaacggaaccacattacacgagctccttgtgaatggacaaagctgcgagtccaggtccaagataagcttgctgtgcacgaaacaggattgtgggcggcggcctgccgctagaatgaataagagaatcctcgggggtaggacctctcgtcctggacgctggccgtggcagtgcagcctgcagagcgagcccagtggacatatctgtggctgcgttctgatcgctaaaaaatgggtgctgactgtggcacattgttttgaaggtagggaaaatgccgccgtctggaaggtggttcttgggatcaacaacctggaccatcccagcgtgtttatgcagactcgctttgtaaagacgatcatcctgcatccaaggtattctcgtgccgtggtcgactacgacattagcatcgtggagctctcagaagacatcagtgagactggatacgtgaggcccgtctgtctaccaaacccagagcagtggctcgagccagacacttattgttacatcactggctggggccacatgggtaacaagatgcctttcaaactacaggagggtgaagtacgtattattagtttggaacactgtcagagttatttcgacatgaagaccatcaccacccgaatgatctgcgccgggtacgaatcaggtacagtggacagctgtatgggagacagcggagggcccctggtgtgtgaaaagccgggggggcggtggaccctttttggcctgacctcatggggttctgtgtgctttagtaaagttttagggccaggcgtttattctaacgtatcttattttgtggaatggatcaaacggcagatctacatccagacttttctgctcaactag

SEQ ID NO: 166372 - DNA, 2928 bp, Artificial Sequence
  derived and/or modified sequence
atgaagcagagccccgccctggcccccgaggagcggtgccggcgggccggctctcccaagcccgtcctgagagctgatgacaacaatatgggtaatggatgctctcaaaagttggcaacggctaatctcctaagattcttgttgctggtgctgattccttgcatctgcgcgctggtgctgttattggtaatcctgctgtcatatgtgggggcttgtatgaacatcacacactcccagtgccagatgctgccctaccacgccactctaacacccttgctgagtgtagtgcggaatatggagatggaaaaattccttaagttcttcacatatctgcatcggcttagttgctatcagcacatcatgctgtttggttgcaccctggcattcccggaatgtattattgacggggatgacagccacggtttactgccctgtcggagcttctgtgaggcggcgaaggaggggtgtgagagtgtgcttggtatggtaaattattcgtggccggatttcctgcgctgctctcagttccggaaccaaactgagtcgagtaacgtgtcacggatctgttttagcccccaacaagaaaatgggaaacaactactttgcggtcggggagagaactttctatgtgcatcgggaatttgcatccccggtaagttgcaatgtaatggttataatgattgtgatgattggagcgatgaggcccactgcaattgcagcgaaaatctctttcattgccacaccggaaagtgtctgaactattctctggtttgtgacggttatgatgactgcggcgacctaagcgacgaacagaactgcgactgcaaccccactacagagcacaggtgtggcgatgggcgttgtatcgcaatggagtgggtgtgcgatggggaccacgattgcgtcgacaagtccgatgaggtcaattgttcctgccactcccagggacttgtggaatgcagaaacgggcagtgtatcccaagtaccttccaatgcgacggagacgaggactgcaaggacggaagtgacgaggaaaattgttcagtgatccagacaagttgtcaggaaggggatcaaaggtgcttatacaatccttgtctagatagctgtggcggctcgagcctgtgcgatcccaacaacagcctcaacaattgctcgcagtgtgagcctatcaccttggagctgtgtatgaatctgccgtacaactcgacctcctatcccaactattttggccatcggacccagaaggaggcaagtatctcttgggagagcagccttttccccgctttggtgcagacaaactgctacaaatatctcatgtttttcagttgtaccattttagttccaaagtgtgatgtaaataccggcgagcacatccctccatgccgagcactctgcgagcactccaaggagcgctgcgagtccgtcttaggtatcgtcgggcttcaatggcctgaagacaccgactgttcccagtttccagaagagaactctgacaatcagacatgcctcatgccagacgaatacgttgaggagtgtagcccctcccatttcaagtgtcgcagcggccagtgtgtgttggcaagtcggcggtgcgatggtcaagcagactgcgatgacgacagtgacgaagagaactgtgggtgtaaagagcgggatctctgggaatgtccgagcaataaacagtgtctgaaacatactgtaatatgcgatggcttcccggattgtcctgattatatggacgaaaaaaactgtagcttctgtcaggacgatgaacttgaatgtgcaaaccatgcctgtgtgtcacgggatctgtggtgcgacggggaagccgattgctcagattcatctgacgagtgggactgcgtgacacttagcatcaacgtaaactcgtcaagcttcctcatggttcatcgcgctgctaccgagcaccatgtgtgcgctgatgggtggcaagaaatcctgtcgcagctcgcttgtaagcaaatggggttaggcgagccatccgtcactaagctaatccaggagcaagaaaaggagccaagatggcttactcttcatagcaactgggagagcttaaatggtacaaccctgcacgagctcctggtaaatggccaaagttgtgaatcgagatcaaagatcagcctgctgtgtacaaagcaggactgtggcagaagacccgccgcaagaatgaataagcgcatcctgggagggagaacgagccggccagggaggtggccctggcaatgcagtttgcagtcagaaccttccggccacatttgtgggtgcgtccttatagcaaagaagtgggtgcttacagtagctcattgttttgaggggagagagaacgcggcagtatggaaggtagtgctgggcattaacaacctggaccatccaagtgttttcatgcagactcgattcgtgaaaacaatcattctgcaccctcggtattcacgcgcggtggtggattacgatatttcaattgtggagctctccgaagatatttcagaaacaggttacgtgcggccagtgtgcctgcccaatcccgaacagtggcttgagcccgacacatattgctacattactggctggggccatatggggaataagatgcctttcaagctgcaggagggcgaagtccgcatcatcagcttagaacactgtcagtcatactttgatatgaagacaatcacaactcgaatgatatgcgcaggctacgaatctgggacggtcgacagctgcatgggggactcaggtgggcccctggtgtgcgagaagcccggcggaagatggacccttttcggcttgacctcttgggggtccgtgtgttttagtaaggtgctcgggccaggtgtgtattctaacgtctcttacttcgtggagtggataaagagacagatctacatacagacattcttgctgaattag

SEQ ID NO: 166373 - DNA, 3018 bp, Artificial Sequence
  derived and/or modified sequence
atgaagcagagccccgccctggcccccgaggagcggtgccggcgggccgggtccccaaaacctgtcctgagggcagacgacaataatatggggaatgggtgttcccaaaagctcgccaccgctaatcttctgaggtttctcttgctcgtactgattccatgtatctgcgcgctggtgctgttgctcgttatcttacttagctatgttggcacgctgcagaaggtgtactttaaaagtaatggctccgagccactagtgacagatggggagatccagggctccgacgtcattctgaccaacacaatatacaaccagtctactgtggtgagcacagcccatccagatcaacacgtaccagcttggacgactgacgcgtcactgcctggagaccagagccatagaaacacatccgcttgcatgaatatcacccattcacagtgtcagatgctcccttaccatgccacgcttacccctctgctaagtgtcgtgagaaacatggaaatggaaaagttcctcaaatttttcacctatttgcacaggctttcctgttaccagcatataatgttattcggctgcactctcgccttccccgaatgtatcatcgacggggacgattctcacggcctgctgccctgtagatccttttgcgaggccgcaaaggaggggtgtgaatcggtcctcggcatggtgaactacagttggccggatttcctgcgctgttcacagttccggaaccagaccgaatcatccaatgtttcccggatctgctttagcccacaacaagagaatggcaagcagctcctatgcgggaggggcgaaaacttcctctgtgcttccggcatttgcattccaggtaaactgcagtgcaatgggtacaacgattgtgatgattggtccgacgaggcacactgcaactgcagtgagaacctgtttcactgtcatactggtaagtgcctgaactattcactggtttgcgacggatatgacgactgcggcgatctgagcgacgaacagaactgcgcttgccactctcagggccttgtggagtgcagaaacggccagtgcatccccagcactttccagtgtgacggagatgaagactgcaaggatggctccgacgaagagaattgctcagtcattcagacaagctgtcaagagggagaccagcggtgcctttataacccgtgcctcgattcctgcggtggttcaagtctgtgtgatccaaacaatagcctcaacaattgcagccagtgtgaaccaataaccctggaactctgcatgaacctcccctacaacagtacctcttaccccaactacttcggtcaccgaacccagaaggaggctagcatcagttgggagagttcactcttccctgcactggtgcaaaccaactgctacaaataccttatgttcttcagctgcacaatacttgtgcctaagtgcgacgtaaatacgggagaacacattcctccctgtcgggccctttgtgaacatagcaaggaacggtgcgaatctgtcctgggcattgtagggctgcagtggcccgaggacacagactgctcccaattccccgaagaaaactctgataatcagacttgcctaatgcccgatgaatatgttgaagagtgttccccaagccattttaagtgtaggagcgggcagtgtgttcttgcctcccgccggtgtgacggtcaggccgattgcgacgatgatagtgatgaagagaattgcgggtgtaaagaacgcgatctgtgggaatgtccgtcaaacaagcagtgtcttaagcacacagtgatctgcgatggctttcctgactgtcctgactatatggatgagaaaaattgctcgttttgccaggatgatgagctcgagtgtgccaatcatgcatgtgtatccagggatctgtggtgcgacggggaagctgactgttcagattcctcagacgagtgggactgcgttaccctaagtatcaatgtgaacagcagttcattcctgatggtgcatcgagcagcaacagaacatcacgtgtgtgccgatggctggcaggagatcctctctcaactcgcctgcaagcagatgggactcggcgagccgagcgttaccaagttaattcaggagcaagagaaggagccccgttggctgactctacactctaactgggaaagccttaatggaacaacgctgcacgaactgctggtgaatgggcagtcctgcgaaagcagaagtaaaataagccttctttgcacaaaacaggattgcgggcgaagaccggccgctagaatgaataaaagaatactcgggggacggacctcaaggccaggtcgctggccgtggcaatgttctttacaatcagaaccaagtggccatatctgtgggtgtgtccttatcgcaaagaaatgggtactcacggtggcacactgtttcgaggggcgcgaaaacgcggccgtgtggaaagtggtgctcggaattaataacctcgatcatcccagtgtgttcatgcagactagatttgtcaagactataattctgcatcccaggtactccagagcggtggtggactacgatatcagcatcgtcgaactgagcgaggacatctccgagacaggctacgtgaggcctgtctgtctgcccaaccctgagcagtggctagaacccgacacctactgttacatcactggctggggacatatgggcaacaagatgcccttcaaactgcaggagggagaagttcggatcatttcccttgaacattgtcaatcttacttcgatatgaaaactattactacaagaatgatctgcgcagggtatgagtcaggcactgtcgacagctgtatgggggacagcggtggacctttggtgtgcgaaaaacccggaggacgatggacactctttggactgaccagttggggttccgtctgcttcagcaaagtgctgggtccaggcgtatatagcaatgtgagctacttcgtcgagtggatcaaaagacaaatatatatccagaccttcttattgaattag

SEQ ID NO: 166374 - DNA, 3129 bp, Artificial Sequence
  derived and/or modified sequence
atgaaacagtccccagctcttgctcccgaggagcgctgccgacgcgcaggcagtccgaaaccagtcctgagagcggacgacaataacatggggaacgggtgctcgcagaaactggctactgcgaatctgttaaggtttctgctgctggtcctgataccatgtatctgcgcgttggttcttttattggtcatcctgcttagttatgtcggtaccctacaaaaggtgtactttaagtcaaatggatccgaacctctggtgactgacggggagatccaaggctctgacgtgattctgacaaacacgatctacaatcagagtactgtggtttccactgcccatccagatcaacacgtccctgcttggacaacggacgctagtctcccaggcgaccagagccaccggaacacctctgcatgcatgaacattacccactcccagtgccagatgctcccctaccatgctaccctcactccactgctcagtgtggtgaggaatatggagatggagaagtttctgaagttcttcacctacttgcaccggctttcctgttatcaacatatcatgctttttggctgtacactggccttccctgaatgcattatcgatggcgatgattcccacggcctgctcccctgtagaagcttctgtgaggccgctaaggagggctgcgaaagtgttctgggtatggtcaattactcatggcccgactttttgcggtgctctcaatttcgaaatcaaaccgaaagctctaacgtgtcacgaatctgtttcagcccacaacaggagaacgggaaacaactgctgtgtggcaggggagagaattttctctgtgccagtggcatctgtattcctggcaaattgcagtgtaacggatacaacgattgtgatgattggagtgatgaggcccattgcaactgttctgaaaacttattccattgtcacaccggaaagtgccttaattattccttagtttgcgacggctacgatgactgtggcgacttatccgatgaacagaattgtgattgcaatcctaccaccgagcataggtgtggcgatggacgatgcattgcgatggagtgggtgtgcgatggtgatcatgactgtgtagacaagtctgatgaggtgaattgtagttgccatagtcaaggactagtggaatgtcggaacgggcagtgcatcccatccaccttccagtgtgatggggatgaggactgcaaggacgggagcgatgaagagaactgcagcgtcattcagacaagctgccaggagggtgaccagcggtgcctctacaatccctgcctcgacagctgtgggggatcctctctgtgtgaccctaataattcattaaataactgcagccaatgtgagccaatcacattggagctctgcatgaatctcccctacaactctacgtcctatcctaactatttcggacacaggacgcagaaagaggcctccatctcctgggagtcatcactgttccctgccctagtccaaacaaattgctataaatacctgatgttctttagctgtaccattctggtgccaaaatgtgacgtcaacacaggcgaacacatcccaccatgtagggccctgtgcgagcacagtaaagaacgctgtgaaagcgtgctaggcatagttggcctgcagtggcctgaggatactgattgttcacagtttcctgaggaaaactctgacaatcagacttgtttgatgccagacgagtacgtcgaggagtgctctccctctcatttcaagtgtagatctggtcagtgtgtgctcgcttcgaggaggtgtgatggtcaggccgattgtgatgacgattccgatgaagaaaactgtggctgcaaagaaagggatctctgggaatgcccgtctaacaagcagtgtctcaagcacaccgtcatctgcgatggatttccggattgtccagactatatggacgagaaaaattgctccttttgccaggacgatgaactggagtgcgctaaccacgcgtgcgtgtcccgtgacctctggtgtgatggcgaagctgactgttctgacagctctgatgaatgggactgtgtgacacttagcatcaacgtgaatagcagcagctttcttatggtgcatcgcgcagctactgaacaccacgtgtgtgcagatgggtggcaggagattctgagtcagctggcgtgcaaacaaatgggccttggcgagccctcagtgacaaagctcattcaggaacaggaaaaggagccacggtggttaacactgcactcaaattgggaatccctcaacgggaccacactgcatgaactactggttaacggccaaagctgtgagtcacggagcaagatatctctgctgtgcaccaaacaggattgtgggaggagacccgcagctcggatgaacaaacggatactggggggtcgaacatcaaggcccggaaggtggccttggcagtgctcacttcagtcagagccgagcggccacatctgcggctgcgttttgattgctaagaaatgggtgctgacagtcgcccattgtttcgaagggcgtgaaaacgcagcggtgtggaaagtggttcttgggatcaacaatctggaccatccatctgtcttcatgcagactcgattcgtgaaaacaattatcctgcaccctcggtatagccgggctgtagttgactatgacatcagtatcgtggagctcagtgaagatatatctgaaactggctacgttcggcctgtatgcttgccaaaccctgagcagtggctcgagccagatacctattgctatattacaggatgggggcacatggggaataagatgcctttcaaactacaggagggtgaggtgaggattataagcctggaacattgccaatcctacttcgatatgaagaccatcaccacccggatgatctgtgcagggtatgagtccggaaccgtcgactcatgtatgggtgactccggagggcctctggtctgcgagaaaccagggggacggtggacgctctttggtctgacctcttggggctcagtttgtttctccaaggtcttgggccctggggtttactccaatgtctcctattttgtggaatggattaagagacaaatctatatccagactttcctgctcaattag

SEQ ID NO: 166375 - DNA, 2928 bp, Artificial Sequence
  derived and/or modified sequence
atgaaacagtctcctgcactcgcacccgaggagcgttgtcgccgtgctggatctcccaagcctgtgctccgagctgatgataacaatatgggaaacgggtgctcccagaaattggctactgccaatttgttgcgatttctgctcttagtactcatcccctgtatctgcgccctagtgctcctgctggtgatcctgttaagttacgtcggagcttgtatgaatatcacccactcccagtgccaaatgttgccttatcatgctacgctaactcccctgctgtcagtggtgcggaatatggagatggaaaaattcctgaaatttttcacgtacctgcatagactctcttgctaccagcatataatgttgtttggatgcaccctggccttccctgagtgtatcatcgatggggatgacagtcatggactcctcccctgtcggagtttctgcgaagctgcaaaagaggggtgtgaaagtgtgttaggcatggtgaattatagctggccagattttctgcggtgcagccagttccgaaatcagaccgaatcttccaacgtttcccgcatttgttttagtccccagcaggagaacggcaaacagttattgtgcggccgaggagagaacttcctgtgtgcgtctggcatctgtatcccaggtaagcttcaatgtaatggctataatgactgcgacgactggtccgacgaagcccattgcaactgtagtgaaaacttgtttcattgtcacaccgggaaatgcctcaactactctctggtatgtgacgggtacgatgactgcggagacttgtccgatgaacagaattgcgattgcaatcccacgactgagcatcggtgcggagacggaaggtgtattgctatggagtgggtatgcgatggcgatcacgactgtgtcgacaaatctgatgaggtgaattgtagttgtcatagccaggggcttgtggaatgccgcaatggccagtgcatccccagcacctttcagtgcgacggtgacgaggactgtaaggacggctccgatgaagaaaactgtagcgttatccaaacttcatgccaggagggggaccaacggtgcctatataacccctgtttagactcctgtggcggatctagcctttgtgaccctaataactctttgaataactgctctcaatgcgaacccatcacactggaactttgcatgaatttaccgtacaattctaccagctaccccaactactttgggcacagaacccagaaagaagcaagcataagctgggaatcttccctgttcccggctcttgtccagaccaattgctataagtatctgatgttctttagttgcacgattctggtgccaaagtgcgacgtgaataccggcgaacatattcctccttgccgcgctctgtgcgaacactcaaaagaacgctgcgaatctgtgctgggaatcgtcggccttcagtggccagaagacaccgattgctctcagttccctgaggagaattctgacaatcagacatgtcttatgccggacgagtacgtggaggagtgttctccgtcccatttcaagtgtagatcaggtcagtgcgttcttgcttcccgtcgctgcgatggccaggctgactgcgacgacgactctgatgaggaaaactgtggatgcaaagagcgggacctgtgggaatgtcctagtaacaaacaatgtctaaaacacaccgtcatttgcgatggttttcccgactgtcccgattacatggatgagaagaactgttctttctgccaagatgatgaattggaatgcgccaatcatgcctgtgtgtcccgtgacctgtggtgtgatggcgaggccgattgttccgattcttccgacgagtgggactgtgtcaccctcagcattaatgtgaactctagcagtttcctcatggtgcaccgcgcagccactgagcaccacgtatgtgcagacgggtggcaggagatcctctcccaactagcatgtaagcagatgggactgggcgaacccagtgtcaccaaactgattcaagaacaggagaaagagcccaggtggttaacgctgcactcaaattgggagagtctgaatgggacaactttacatgagcttctggtcaatggccaatcttgcgagtctaggtctaagatcagcctgctctgcacaaaacaggactgtggtaggagacccgcagcacggatgaataaacgcatccttgggggtcgaacatctaggcctggacgctggccttggcagtgtagtttacagtccgaaccatccggacacatatgcgggtgcgtgctgatcgccaaaaaatgggtgctcacagtcgcacattgttttgagggcagggaaaatgctgccgtgtggaaggtggtcctggggattaacaatctcgatcaccctagtgtattcatgcagacaagatttgtgaagactattatcttgcaccccagatacagccgggctgtcgtggactatgatatttcaatcgtggagctgagcgaggacatatccgaaactggatatgttaggccagtatgccttcccaaccctgaacagtggctggagccggacacgtattgttacattaccggttgggggcacatgggcaacaagatgcccttcaagcttcaggagggcgaggtgcgcatcattagtctcgagcactgtcagtcatattttgacatgaagactatcacaacgcgcatgatttgtgcagggtatgaatccggcactgtggatagctgcatgggtgacagcggtgggccactggtatgcgaaaaacccggtgggaggtggaccttatttggtctaacctcttggggttcagtttgcttttccaaggtcctcgggcctggagtgtatagcaatgtgagctacttcgtggaatggattaaaagacagatctatattcagacctttttgttgaactag

SEQ ID NO: 166376 - DNA, 3018 bp, Artificial Sequence
  derived and/or modified sequence
atgaagcagtcccctgccctggccccagaagaacgatgccggagagcaggaagtcctaagccggtccttcgcgctgacgataataatatgggcaacggttgcagtcagaaattagccactgcaaatttactgcgctttctcctgctcgttcttatcccatgcatatgcgccctcgttctgctgctggttatcctgctgagttacgtcggcacactgcagaaggtctacttcaaaagtaacggaagtgaacccctggtgactgatggcgaaatccaggggtccgacgtaattttgactaacactatctacaatcagtcaacagttgtcagtacggcccaccccgatcaacacgtacctgcatggacaaccgacgcctctttgcctggcgatcagtctcatcggaatacctctgcgtgcatgaatatcacccattcccagtgccagatgctgccgtatcatgccacactcacgcctctcctgagcgttgtgcgaaatatggaaatggaaaaattcctgaaattctttacgtatctacacagactctcatgctatcagcatattatgctatttggatgtaccctcgcttttccagagtgtattatagatggggatgacagccacggattgctgccctgtaggtccttctgtgaggcggcaaaggaaggctgcgaaagcgtactcgggatggtgaactactcatggccagacttcctcaggtgttcgcaatttcgcaaccagaccgagagttcaaacgtctccagaatatgcttcagtcctcagcaggaaaatggtaaacagcttttatgcggacgtggggaaaatttcctgtgtgcctccggaatctgtatcccaggtaagttgcagtgcaatgggtataacgattgcgatgactggagtgatgaggcgcactgcaattgctccgaaaatctattccactgccacaccggcaagtgcctgaactatagtttggtgtgtgacggctacgacgactgtggagaccttagtgatgaacagaactgcgcctgccattcacagggcctggtggagtgcaggaatggccagtgtatcccttccactttccagtgcgacggagacgaagactgtaaagacggcagtgacgaagagaattgcagtgtgattcagacgagttgtcaggaaggagatcagaggtgtctgtacaacccttgcctggatagttgcggcggttccagtctgtgcgacccaaacaacagtcttaacaactgcagtcaatgcgagcccattaccctggagctgtgtatgaacctgccatataattccactagctaccccaactacttcgggcatcgaacccaaaaggaggccagtataagctgggaaagctccctcttccctgccctggtccagaccaactgttacaaatacctgatgtttttcagctgtactatcctggtgccaaaatgcgatgtgaatacaggcgaacatatcccgccttgccgggctttgtgtgagcattccaaagagaggtgcgagagcgttctgggtattgtggggctgcagtggccagaagatacagattgttcccagtttcccgaggagaacagtgacaaccagacttgtctgatgccggacgaatacgttgaggagtgtagtcctagtcactttaaatgtcggtctggccagtgtgttttagcttctaggcgctgtgacggccaggcggactgcgacgatgatagtgacgaagagaattgcggttgtaaagagagggatctctgggagtgtccttcaaacaagcagtgtctgaagcacacggttatttgtgacggctttccagactgtcctgattatatggatgagaaaaactgttcattctgtcaggacgatgaactggaatgcgctaatcacgcctgcgtcagccgcgatctgtggtgcgacggagaagcagattgttccgacagctccgatgagtgggactgcgttaccctgagcattaacgtaaattcttccagctttctgatggttcaccgggcagcgaccgaacaccatgtctgcgcggacgggtggcaagagattctgtctcagcttgcctgcaagcaaatggggctgggcgaacccagcgtgaccaagctgatccaggagcaggaaaaagaaccccgttggttaaccctccactccaactgggagagcctgaacggcacaactctgcacgagctgctggtgaatggccagtcttgcgagtcaaggtctaagatctcattgctgtgcactaagcaagattgtgggcgtaggcctgccgcaagaatgaataagagaatcttagggggacggacatcccgccctggccgttggccatggcagtgcagtctccagtccgagccaagcggccacatttgcggatgcgtactgatcgctaagaagtgggtgctgaccgtggcccattgctttgagggccgagagaatgctgccgtgtggaaagtggttcttggaatcaacaacttagaccatccgagtgtctttatgcagactcgtttcgtcaaaaccatcatattacatccgagatatagtagagccgtggtcgattacgacatcagcattgtcgaactgtctgaggacatttctgagaccggatacgtaaggcctgtgtgcctgcctaacccagaacagtggctggaaccagatacctactgctacatcaccgggtgggggcacatgggcaataagatgcctttcaagcttcaggagggcgaggtcaggatcatttccctggagcattgtcaatcatacttcgatatgaagactataacaacaaggatgatctgcgccggatatgagtctggaacggtggacagctgcatgggcgattcaggtggcccactggtgtgtgaaaagccgggaggcaggtggaccctctttggtttaacttcatggggaagcgtttgcttttctaaggtcttgggtcccggagtgtatagcaacgtgtcctatttcgtggaatggatcaaaaggcagatttatatccaaactttcctgctgaattag

SEQ ID NO: 166377 - protein, 668 aa, Artificial Sequence
  derived and/or modified sequence
MMPSPSDSSRSLTSRPSTRGLTHLRLHRPWLQALLTLGLVQVLLGILVVTFSMVASSVTTTESIKRSCPSWAGFSLAFSGVVGIVSWKRPFTLVISFFSLLSVLCVMLSMAGSVLSCKNAQLARDFQQCSLEGKVCVCCPSVPLLRPCPESGQELKVAPNSTCDEARGALKNLLFSVCGLTICAAIICTLSAIVCCIQIFSLDLVHTLAPERSVSGPLGPLGCTSPPPAPLLHTMLDLEEFVPPVPPPPYYPPEYTCSSETDAQSITYNGSMDSPVPLYPTDCPPSYEAVMGLRGDSQATLFDPQLHDGSCICERVASIVDVSMDSGSLVLSAIGDLPGGSSPSEDSCLLELQGSVRSVDYVLFRSIQRSRAGYCLSLDCGLRGPFEESPLPRRPPRAARSYSCSAPEAPPPLGAPTAARSCHRLEGWPPWVGPCFPELRRRVPRGGGRPAAAPPTRAPTRRFSDSSGSLTPPGHRPPHPASPPPLLLPRSHSDPGITTSSDTADFRDLYTKVLEEEAASVSSADTGLCSEACLFRLARCPSPKLLRARSAEKRRPVPTFQKVPLPSGPAPAHSLGDLKGSWPGRGLVTRFLQISRKAPDPSGTGAHGHKQVPRSLWGRPGRESLHLRSCGDLSSSSSLRRLLSGRRLERGTRPHSLSLNGGSRETGL

SEQ ID NO: 166378 - DNA, 3209 bp, Artificial Sequence
  derived and/or modified sequence
attcccatcccccttctctagtccccgacctgcggcagccggagctcggggagcggagcgtggtggggaggggagcgggacaggcgacacaggagacagcggcgccgcggcctctccccaccaggcggccccggatcctactggacgccctgagggcacaccgaccgcgcctctagagtcaccccacgccgacccctcccctcttctctagacttatttccatccttcccgcttttaccctccccacccctccctgggctccaggccgccgccccctcctcactcctggaccggcccttctcggtgcccctcttccctagggagatgcgatgagccggtgcccccgcgtcctcatcgtcgccccgggcacggtgcccgtccagtgcccgtggtggggagggagcactccgcggtccctccgtgacgcccctcgcttggccccccccacagctggcgtccctcggccatgccccaggggacccagccagggggtgggctctagagcgagtggggtggagaggagaaaggacggggccttgggcgcctctgagatgctcccaagtgccagggagggccgagcgaggcgcaggcaaccgggcagcaggcatgatgccctcgcctagtgactccagccgctcgctgaccagccggcccagcaccaggggccttacccacctccgcctccaccgaccctggctgcaggccctgcttacgctggggctggtccaagtgctcctgggcatcctggtggtcaccttcagcatggtggcctcttccgtcaccaccaccgagagcatcaagaggtcctgcccgtcttgggctgggttctcgctggcgttctccggggtggttggcattgtgtcctggaagcggccattcactctagtgatctccttcttctccttgctttcggtgctctgtgtcatgcttagcatggctggctctgttctctcctgtaagaatgctcaactggcccgagacttccaacagtgctctctggaaggaaaggtctgtgtgtgctgtccctctgttcccctcctccggccctgtccagagtcggggcaggaactgaaagttgcccctaactccacctgtgatgaagcccgaggggccctcaagaacctgctcttcagcgtctgtgggctcaccatttgtgccgctataatctgtacactctctgctattgtctgctgcatccaaatcttctccctggacctcgtgcatacgctggcccctgagcggtcagtctcaggcccactgggacctctgggctgcacgtccccgcccccagcccctctcctacacaccatgctggacctggaggaatttgtcccgcctgtgcccccaccgccctactatcccccagagtatacctgcagctcagaaacagatgcacagagcatcacgtacaatggctccatggacagcccagtgcccttgtaccctaccgattgccccccttcttatgaggcagtcatgggactacgaggagacagccaggccactctctttgaccctcagcttcacgatggctcgtgcatctgtgaacgagtggcctccattgtagacgtgtccatggacagcgggtctctggtgctgtcagccattggtgacctccctgggggctctagcccgtcggaggactcgtgcctgctggagctgcagggctccgtgcgctccgtggactacgttctctttcgctccatccagcgcagccgtgccggctactgcctcagcctggactgtggcctgcggggccccttcgaggaaagccccctgccacggcgccccccacgggctgcccgctcctattcctgctctgcccctgaagctccacccccactgggtgcccccacagctgcccgcagctgccaccggttggagggctggccgccctgggtgggaccctgcttccccgagctgaggcggcgggtcccccggggagggggccgcccagccgcagccccgcccacccgagccccgactcgtcgcttcagcgatagctcaggttccctcaccccaccggggcaccggcctcctcatccggcatccccaccaccgctgctgctgccacggtcccacagcgacccaggcatcacgacctccagtgacactgctgacttcagggacctttataccaaagtgcttgaggaagaagctgcttctgtttcctctgcagatacagggctctgctctgaagcctgcctcttccgcctagcccgctgcccttcccccaagttgctacgtgcccggtcagccgagaaacggcgccctgtgcccaccttccaaaaagttcccctgccctcgggccctgcacctgcccactccctgggggacctaaagggcagctggccaggtcggggcctggtcactcgtttcctccagatatccaggaaagccccagaccccagtgggactggagctcatggacataagcaggtgccccggagcctgtggggccggcctggccgagagagcctccaccttcgcagctgcggagatctgagctctagctcttccctgcggcgtctcctgtctggccgcaggctggagcgtggtacccgcccccacagcctcagcctcaacgggggcagccgggagactgggctctgacctaggcttcttgtcacactgaacacatccagccacaggcaccagctggttgggaccagcagcccccagcatcctcttgcactggctggcacaaaaagaaacctgctgtataccccccaaagtgtccctttccctcctacctctggggtctcttgctgcttgcctctgctgctctggactgggagagcttctgtcctgtgctgcatgggtatttagactgtgggggagatgccccttcttatagcactggaggaggaaaacaaattcttgtccccctcagaatgagagtggctctttctgatttgcaagggcactatggtcagggcaaaggcatggcccaggtgtttaagtacagggtgacgtgtgcctatgcaatggggtggtaaggcaggcacgaagagtccaaaaaatctaggtggcctctcagctctgccacctctagctgcatgaccttgggcaagctatgtaaccccaattgcctgctccattaaagactgtgaaggtagaatgtttgtaaagctcttaacagtatgtaagccttcaataaatttcagttttccccttgttttcttgatcaaaaaaaaaaaaaaaaaaaa

SEQ ID NO: 166379 - DNA, 2007 bp, Artificial Sequence
  derived and/or modified sequence
atgatgcccagccccagcgacagcagcagaagcctgaccagcagacccagcaccagaggcctgacccacctgagactgcacagaccctggctgcaggccctgctgaccctgggcctggtgcaggtgctgctgggcatcctggtggtgaccttcagcatggtggccagcagcgtgaccaccaccgagagcatcaagagaagctgccccagctgggccggcttcagcctggccttcagcggcgtggtgggcatcgtgagctggaagagacccttcaccctggtgatcagcttcttcagcctgctgagcgtgctgtgcgtgatgctgagcatggccggcagcgtgctgagctgcaagaacgcccagctggccagagacttccagcagtgcagcctggagggcaaggtgtgcgtgtgctgccccagcgtgcccctgctgagaccctgccccgagagcggccaggagctgaaggtggcccccaacagcacctgcgacgaggccagaggcgccctgaagaacctgctgttcagcgtgtgcggcctgaccatctgcgccgccatcatctgcaccctgagcgccatcgtgtgctgcatccagatcttcagcctggacctggtgcacaccctggcccccgagagaagcgtgagcggccccctgggccccctgggctgcaccagccccccccccgcccccctgctgcacaccatgctggacctggaggagttcgtgccccccgtgcccccccccccctactacccccccgagtacacctgcagcagcgagaccgacgcccagagcatcacctacaacggcagcatggacagccccgtgcccctgtaccccaccgactgcccccccagctacgaggccgtgatgggcctgagaggcgacagccaggccaccctgttcgacccccagctgcacgacggcagctgcatctgcgagagagtggccagcatcgtggacgtgagcatggacagcggcagcctggtgctgagcgccatcggcgacctgcccggcggcagcagccccagcgaggacagctgcctgctggagctgcagggcagcgtgagaagcgtggactacgtgctgttcagaagcatccagagaagcagagccggctactgcctgagcctggactgcggcctgagaggccccttcgaggagagccccctgcccagaagaccccccagagccgccagaagctacagctgcagcgcccccgaggcccccccccccctgggcgcccccaccgccgccagaagctgccacagactggagggctggcccccctgggtgggcccctgcttccccgagctgagaagaagagtgcccagaggcggcggcagacccgccgccgccccccccaccagagcccccaccagaagattcagcgacagcagcggcagcctgaccccccccggccacagacccccccaccccgccagccccccccccctgctgctgcccagaagccacagcgaccccggcatcaccaccagcagcgacaccgccgacttcagagacctgtacaccaaggtgctggaggaggaggccgccagcgtgagcagcgccgacaccggcctgtgcagcgaggcctgcctgttcagactggccagatgccccagccccaagctgctgagagccagaagcgccgagaagagaagacccgtgcccaccttccagaaggtgcccctgcccagcggccccgcccccgcccacagcctgggcgacctgaagggcagctggcccggcagaggcctggtgaccagattcctgcagatcagcagaaaggcccccgaccccagcggcaccggcgcccacggccacaagcaggtgcccagaagcctgtggggcagacccggcagagagagcctgcacctgagaagctgcggcgacctgagcagcagcagcagcctgagaagactgctgagcggcagaagactggagagaggcaccagaccccacagcctgagcctgaacggcggcagcagagagaccggcctgtag

SEQ ID NO: 166380 - DNA, 2550 bp, Artificial Sequence
  derived and/or modified sequence
attcccatcccccttctctagtccccgacctgcggcagccggagctcggggagcggagcgtggtggggaggggagcgggacaggcgacacaggagacagcggcgccgcggcctctccccaccaggcggccccggatcctactggacgccctgagggcacaccgaccgcgcctctagagtcaccccacgccgacccctcccctcttctctagacttatttccatccttcccgcttttaccctccccacccctccctgggctccaggccgccgccccctcctcactcctggaccggcccttctcggtgcccctcttccctagggagatgcgatgagccggtgcccccgcgtcctcatcgtcgccccgggcacggtgcccgtccagtgcccgtggtggggagggagcactccgcggtccctccgtgacgcccctcgcttggccccccccacagctggcgtccctcggccatgccccaggggacccagccagggggtgggctctagagcgagtggggtggagaggagaaaggacggggccttgggcgcctctgagatgctcccaagtgccagggagggccgagcgaggcgcaggcaaccgggcagcaggcatgatgccctcgcctagtgactccagccgctcgctgaccagccggcccagcaccaggggccttacccacctccgcctccaccgaccctggctgcaggccctgcttacgctggggctggtccaagtgctcctgggcatcctggtggtcaccttcagcatggtggcctcttccgtcaccaccaccgagagcatcaagaggtcctgcccgtcttgggctgggttctcgctggcgttctccggggtggttggcattgtgtcctggaagcggccattcactctagtgatctccttcttctccttgctttcggtgctctgtgtcatgcttagcatggctggctctgttctctcctgtaagaatgctcaactggcccgagacttccaacagtgctctctggaaggaaaggtctgtgtgtgctgtccctctgttcccctcctccggccctgtccagagtcggggcaggaactgaaagttgcccctaactccacctgtgatgaagcccgaggggccctcaagaacctgctcttcagcgtctgtgggctcaccatttgtgccgctataatctgtacactctctgctattgtctgctgcatccaaatcttctccctggacctcgtgcatacgctggcccctgagcggtcagtctcaggcccactgggacctctgggctgcacgtccccgcccccagcccctctcctacacaccatgctggacctggaggaatttgtcccgcctgtgcccccaccgccctactatcccccagagtatacctgcagctcagaaacagatgcacagagcatcacgtacaatggctccatggacagcccagtgcccttgtaccctaccgattgccccccttcttatgaggcagtcatgggactacgaggagacagccaggccactctctttgaccctcagcttcacgatggctcgtgcatctgtgaacgagtggcctccattgtagacgtgtccatggacagcgggtctctggtgctgtcagccattggtgacctccctgggggctctagcccgtcggaggactcgtgcctgctggagctgcagggctccgtgcgctccgtggactacgttctctttcgctccatccagcgcagccgtgccggctactgcctcagcctggactgtggcctgcggggccccttcgaggaaagccccctgccacggcgccccccacgggctgcccgctcctattcctgctctgcccctgaagctccacccccactgggtgcccccacagctgcccgcagctgccaccggttggagggctggccgccctgggtgggaccctgcttccccgatagctcaggttccctcaccccaccggggcaccggcctcctcatccggcatccccaccaccgctgctgctgccacggtcccacagcgacccaggcatcacgacctccagtgacactgctgacttcagggacctttataccaaagtgcttgaggaagaagctgcttctgtttcctctgcagatacagggctctgctctgaagcctgcctcttccgcctagcccgctgcccttcccccaagttgctacgtgcccggtcagccgagaaacggcgccctgtgcccaccttccaaaaagttcccctgccctcgggccctgcacctgcccactccctgggggacctaaagggcagctggccaggtcggggcctggtcactcgtttcctccagatatccaggaaagccccagaccccagtgggactggagctcatggacataagcaggtgccccggagcctgtggggccggcctggccgagagagcctccaccttcgcagctgcggagatctgagctctagctcttgcggcgtctcctgtctggccgcaggctggagcgtggtacccgcccccacagcctcagcctcaacgggggcagccgggagactgggctctgacctaggcttcttgtcacactga

SEQ ID NO: 166381 - DNA, 3082 bp, Artificial Sequence
  derived and/or modified sequence
cagcggcgccgcggcctctccccaccaggcggccccggatcctactggacgccctgagggcacaccgaccgcgcctctagagtcaccccacgccgacccctcccctcttctctagacttatttccatccttcccgcttttaccctccccacccctccctgggctccaggccgccgccccctcctcactcctggaccggcccttctcggtgcccctcttccctagggagatgcgatgagccggtgcccccgcgtcctcatcgtcgccccgggcacggtgcccgtccagtgcccgtggtggggagggagcactccgcggtccctccgtgacgcccctcgcttggccccccccacagctggcgtccctcggccatgccccaggggacccagccagggggtgggctctagagcgagtggggtggagaggagaaaggacggggccttgggcgcctctgagatgctcccaagtgccagggagggccgagcgaggcgcaggcaaccgggcagcaggcatgatgccctcgcctagtgactccagccgctcgctgaccagccggcccagcaccaggggccttacccacctccgcctccaccgaccctggctgcaggccctgcttacgctggggctggtccaagtgctcctgggcatcctggtggtcaccttcagcatggtggcctcttccgtcaccaccaccgagagcatcaagaggtcctgcccgtcttgggctgggttctcgctggcgttctccggggtggttggcattgtgtcctggaagcggccattcactctagtgatctccttcttctccttgctttcggtgctctgtgtcatgcttagcatggctggctctgttctctcctgtaagaatgctcaactggcccgagacttccaacagtgctctctggaaggaaaggtctgtgtgtgctgtccctctgttcccctcctccggccctgtccagagtcggggcaggaactgaaagttgcccctaactccacctgtgatgaagcccgaggggccctcaagaacctgctcttcagcgtctgtgggctcaccatttgtgccgctataatctgtacactctctgctattgtctgctgcatccaaatcttctccctggacctcgtgcatacgctggcccctgagcggtcagtctcaggcccactgggacctctgggctgcacgtccccgcccccagcccctctcctacacaccatgctggacctggaggaatttgtcccgcctgtgcccccaccgccctactatcccccagagtatacctgcagctcagaaacagatgcacagagcatcacgtacaatggctccatggacagcccagtgcccttgtaccctaccgattgccccccttcttatgaggcagtcatgggactacgaggagacagccaggccactctctttgaccctcagcttcacgatggctcgtgcatctgtgaacgagtggcctccattgtagacgtgtccatggacagcgggtctctggtgctgtcagccattggtgacctccctgggggctctagcccgtcggaggactcgtgcctgctggagctgcagggctccgtgcgctccgtggactacgttctctttcgctccatccagcgcagccgtgccggctactgcctcagcctggactgtggcctgcggggccccttcgaggaaagccccctgccacggcgccccccacgggctgcccgctcctattcctgctctgcccctgaagctccacccccactgggtgcccccacagctgcccgcagctgccaccggttggagggctggccgccctgggtgggaccctgcttccccgagctgaggcggcgggtcccccggggagggggccgcccagccgcagccccgcccacccgagccccgactcgtcgcttcagcgatagctcaggttccctcaccccaccggggcaccggcctcctcatccggcatccccaccaccgctgctgctgccacggtcccacagcgacccaggcatcacgacctccagtgacactgctgacttcagggacctttataccaaagtgcttgaggaagaagctgcttctgtttcctctgcagatacagggctctgctctgaagcctgcctcttccgcctagcccgctgcccttcccccaagttgctacgtgcccggtcagccgagaaacggcgccctgtgcccaccttccaaaaagttcccctgccctcgggccctgcacctgcccactccctgggggacctaaagggcagctggccaggtcggggcctggtcactcgtttcctccagatatccaggaaagccccagaccccagtgggactggagctcatggacataagcaggtgccccggagcctgtggggccggcctggccgagagagcctccaccttcgcagctgcggagatctgagctctagctcttccctgcggcgtctcctgtctggccgcaggctggagcgtggtacccgcccccacagcctcagcctcaacgggggcagccgggagactgggctctgacctaggcttcttgtcacactgaacacatccagccacaggcaccagctggttgggaccagcagcccccagcatcctcttgcactggctggcacaaaaagaaacctgctgtataccccccaaagtgtccctttccctcctacctctggggtctcttgctgcttgcctctgctgctctggactgggagagcttctgtcctgtgctgcatgggtatttagactgtgggggagatgccccttcttatagcactggaggaggaaaacaaattcttgtccccctcagaatgagagtggctctttctgatttgcaagggcactatggtcagggcaaaggcatggcccaggtgtttaagtacagggtgacgtgtgcctatgcaatggggtggtaaggcaggcacgaagagtccaaaaaatctaggtggcctctcagctctgccacctctagctgcatgaccttgggcaagctatgtaaccccaattgcctgctccattaaagactgtgaaggtagaatgtttgtaaagctcttaacagtatgtaagccttcaataaatttcagttttccccttg

SEQ ID NO: 166382 - DNA, 2007 bp, Artificial Sequence
  derived and/or modified sequence
atgatgccttccccaagcgattctagccgctctctcacttctagaccctccacgagaggtctgacccatcttcgcctgcaccggccatggcttcaggctctgctaaccctgggacttgttcaggtgctgctcgggatcctggtggttacatttagtatggtggcctcctctgtgactacgactgagtcaattaagcgatcttgcccgagctgggccggctttagcctcgcctttagcggagtcgtaggaatagtcagctggaagcggccttttacactggttatctctttctttagcttgctctccgtgctgtgcgtcatgttgtcaatggccggctccgttctatcatgcaaaaacgcacagctggccagggacttccagcagtgctccttggaagggaaggtctgtgtgtgctgtccatcagttccgctgctgcgaccttgtcctgagtccggacaagaacttaaagtggcccctaattctacatgcgacgaggcccgcggggccttaaagaacctcctgttcagcgtttgcggactaactatttgcgccgctatcatctgcacacttagcgccattgtgtgttgtatccaaatcttcagcttggacttggtgcacacacttgccccagagagatcagtttctggtccacttggtcccctgggatgcaccagcccacctcctgctccgctgcttcatacaatgctagatctggaggaatttgtgcctcctgttcccccaccaccatactatccccctgagtatacatgctcttctgagaccgacgcccagagcatcacttacaacggctcaatggattctcccgtgcccctatatccaacagattgtcctccgtcttacgaggctgttatgggactaagaggtgactctcaagctacccttttcgacccacagttgcacgacggctcatgcatttgcgagcgagtggccagtattgtcgatgttagcatggactccggatcccttgtgctcagtgccatcggagacctgcccgggggatccagtccttccgaagacagctgtctgctcgagctccagggctcagtgaggtctgtagactatgttttgttccgaagcattcagaggtctcgagccgggtactgtctctcactggactgcggtctgcggggcccattcgaagaatctcccctgcctcgccgaccaccaagagcagctaggtcctactcatgttctgctccagaggcccctcccccgctgggggccccaactgccgcaagaagctgtcatcgtctggaaggctggcccccgtgggtgggcccctgctttcctgagctgcgcagacgcgtgcctagggggggggggcgcccagctgccgcccctccaacacgagctccgaccaggcgttttagcgatagttctggctcactgacccctcctggacatagacctccacaccctgcctcccccccccccttactgttgcctcggagccatagcgatcctggaattacgactagttccgatacagccgactttcgcgatctgtatacaaaggtgctggaagaagaggccgcctcagtgtcctctgcagatactgggttgtgcagtgaggcttgcttgtttcggcttgccagatgcccaagccctaagttattgcgagccaggagtgctgaaaaacgacggccagtgccgacttttcaaaaagtgcccttgccatcaggccccgcacccgcccactccctcggcgacctgaagggaagctggccaggcagaggactggttacacggttcctgcaaatcagcaggaaagcccctgatccgagtgggacgggcgctcacggacataagcaggtgcctaggtcgctatggggtcggcccgggagggaatctctccaccttagatcatgtggggatctgtcctcctcttcctccctccggcgcctgctgtctggacggcggctggagagggggacgcgaccgcactctctttcccttaatggcggttccagagagacaggcctgtag

SEQ ID NO: 166383 - DNA, 2007 bp, Artificial Sequence
  derived and/or modified sequence
atgatgcccagccccagcgacagcagccgcagcctgaccagccggcccagcacccggggcctgacccacctgcggctgcaccggccctggctgcaggccctgctgaccctgggcctggtgcaggtgctgctgggcatcctggtggtgaccttctccatggtggccagctctgtgaccaccacagagagcatcaagaggagctgccccagctgggccggcttcagcctggccttctctggagtggtgggcatcgtgtcctggaagaggcccttcaccctggtgatctccttcttcagcctgctgtctgtgctgtgtgtgatgctgtccatggccggctctgtgctgagctgcaagaatgcccagctggcccgggacttccagcagtgcagcctggagggcaaggtgtgtgtgtgctgccccagcgtgcccctgctgcggccctgcccagagagcggccaggagctgaaggtggcccccaacagcacctgtgatgaggcccggggggccctgaagaacctgctcttctctgtgtgtggcctgaccatctgtgccgccatcatctgcaccctgagcgccatcgtgtgctgcatccagatcttcagcctggacctggtgcacaccctggcccctgagaggtctgtgtctggccccctgggccccctgggctgcaccagccccccaccagcccccctgctgcacaccatgctggacctggaggagtttgtgccccctgtgcccccaccaccctactacccacctgagtacacctgcagcagcgagacagatgcccagagcatcacctacaacggctccatggacagccctgtgcccctgtaccccacagactgcccccccagctatgaagctgtgatgggcctgcggggggacagccaggccaccctgtttgacccccagctgcatgatggcagctgcatctgtgagcgggtggccagcatcgtggatgtgtccatggacagcggcagcctggtgctgagcgccatcggggacctgcccggcggcagcagccccagcgaggacagctgcctgctggagctgcagggctctgtgcgctctgtggactatgtgctcttccgcagcatccagaggagccgggccggctactgcctgagcctggactgtggcctgcggggcccctttgaggagagccccctgcccaggaggcctccccgggccgcccggagctacagctgcagcgcccctgaggcccccccacccctgggcgcccccacagctgcccggagctgccaccggctggagggctggccaccctgggtgggcccctgcttccctgagctgcggaggagagtgccccggggcggcggccggcctgctgctgccccacccacccgggcccccacccggcgcttcagtgacagcagcggcagcctgaccccacctggccacaggcctccccacccagccagccccccacccctgctgctgcccaggagccacagcgaccccggcatcaccaccagcagtgacacagctgacttccgggacctgtacaccaaggtgctggaggaggaggccgcctctgtgtcctctgctgacaccggcctgtgcagcgaggcctgcctcttccggctggcccgctgccccagccccaagctgctgcgggcccggtctgctgagaagaggaggcctgtgcccaccttccagaaggtgcccctgcccagcggccctgccccagcccacagcctgggggacctgaagggctcctggccaggccggggcctggtgacccgcttcctgcagatcagcaggaaggccccagaccccagcggcaccggggcccacggccacaagcaggtgcccaggagcctgtggggccggcccggccgggagagcctgcacctgcggagctgtggggacctgagcagcagcagcagcctgcggcggctgctgagcggccggcggctggagcggggcacccggccccacagcctgagcctgaatggaggcagccgggagaccggcctgtag

SEQ ID NO: 166384 - DNA, 2007 bp, Artificial Sequence
  derived and/or modified sequence
atgatgcccagccccagcgacagcagccggagcctgaccagccggccttctactcgaggactaacacatcttcggctacaccggccctggctccaagcattactgaccttggggttagttcaggtcttgctcggcatcctagtcgtaacgtttagcatggtagcaagttccgtaacaaccacagagtcaataaagaggtcctgtccctcgtgggcggggttctcgctcgcgttcagcggtgtggttggcatcgtctcctggaaacgccccttcacactcgtcattagtttcttcagtctgctgtctgttttgtgcgtcatgttatccatggctggtagcgtcctgagttgcaagaacgcacagttggcaagggattttcaacagtgcagtctggaggggaaagtgtgtgtgtgctgtccttctgttccactacttcgtccatgtcctgaatccggtcaggaactgaaggtcgctcctaattctacctgcgacgaggcccgcggcgccctgaaaaatctcctattttctgtgtgcggactgacaatatgtgcagcaataatttgtactttgtccgccatagtgtgttgcatacagatctttagcctggatctggtgcacactttggcccctgaacgtagtgtgagtggcccgctggggcccctcggatgcacgagtccacctccagcccccttactgcacactatgctcgacctggaggagttcgtccctcccgtaccgccaccaccgtattatccaccggaatatacctgttctagcgagaccgatgcacaatcaatcacatataacggttccatggacagccccgtgcctctgtacccaacagactgcccaccatcgtatgaggctgtcatggggctgaggggcgatagtcaagctactttgtttgacccccagctgcacgacggctcttgcatttgcgagcgtgtggccagcatcgtggacgtctcaatggactcaggatctctggtgctatccgcaattggggatttaccaggggggtcaagtccatctgaagacagctgtctgctcgagctgcagggtagcgtgcggagcgtcgactacgtactatttagatcaattcagcgttccagagctggctactgtcttagtttggactgcggcctgcgtggcccttttgaggagagccctttaccaagacgtccccccagagctgcacggtcgtattcgtgctcagctccagaggctcccccacccctgggagctcctacggccgcaaggtcatgtcatcgtctggaaggctggcctccctgggtgggaccttgctttcctgagctaagaagaagggtgccgcggggcggaggcaggccagccgccgcaccacccactagagcacccacacgaagattctccgattctagtggatctttgacgccaccagggcatcggcccccccacccagcctccccacccccactgctcttaccgcgcagtcatagcgacccgggtatcaccacgtctagcgatacagctgacttcagggacctgtacactaaagtcttagaagaggaggccgcatctgtatcttcggctgacactgggctgtgctcggaggcctgtctgttccggttagctagatgtcctagccctaagctgctgcgtgcacgtagcgctgaaaagcgaaggccagtacccaccttccagaaagtgccactgccctctgggccggccccggcacatagcctcggggatcttaagggcagttggcccggcagagggttagttacgcgattcctgcagatcagccggaaggcccccgacccatcaggaacaggggcccacggccacaaacaggtgccgaggagtctgtggggtcggcccggccgtgagagtttgcacctgcggtcttgcggcgatctctcatcatccagttcactgaggagacttctaagcgggcgacggctggaaagaggaacacggccacacagtctgagcctcaacggaggctctagggagaccggactttag

SEQ ID NO: 166385 - DNA, 2007 bp, Artificial Sequence
  derived and/or modified sequence
atgatgccatctcccagcgattcttcaaggagccttacttctcgccctagcacccgcggactgacacatctcagactgcacagaccatggcttcaggcactacttactctcggtctggtacaggtgcttctgggtatcctggtcgttacattctccatggtcgcctctagtgttactactacggaaagcataaaaagatcatgcccctcgtgggcgggattctcattggccttttcaggcgtagtcggaatcgtgtcctggaagaggccctttacactggtcattagctttttttcactgctcagtgttctgtgtgttatgctgtctatggcaggttccgtcctgtcttgtaaaaatgcccagctcgccagggacttccagcagtgctccctcgaggggaaggtctgtgtctgttgcccatcagtaccattgcttaggccctgccctgagagcgggcaagaattgaaagtggctcccaatagtacgtgcgacgaggcacggggagcattaaagaatctcctgttcagtgtctgtggtctgactatctgtgccgcaatcatttgcaccctgtcagcaattgtctgttgcattcagatcttctccttagatcttgtgcatactctcgctcctgaacgcagtgtgagcggccctcttggtccacttggctgtactagccctccccctgcgcctttactgcacaccatgctggacctagaagaatttgtgccccctgtcccaccaccgccatactatccccctgaatacacatgttctagcgagacagatgcacagagcattacgtataacgggtctatggactctcctgtcccactctatcccactgactgccctccaagctatgaagctgttatggggctacgcggagactcacaggctacactttttgatccacagctccatgacggctcctgcatttgcgaaagggtcgcttcaatagtagacgtttcaatggatagcgggtccttggttctgagtgcgatcggagacctccctggcggaagctctcctagcgaggattcctgtctgctggagctgcagggcagtgtgaggtccgtggactacgtactgtttaggtccatccaacgttcccgggctggatattgcctgtctttggactgtggactacgaggcccttttgaggagagtccactcccaaggaggcctcctcgtgctgccaggtcgtactcttgttcagcccctgaggcacctccccctctcggggctcccacagctgctaggtcctgtcatcgcctggaagggtggcccccttgggtcgggccatgctttcctgagctccgtaggagggtcccgcgaggcggtggacggccagctgctgcgccacctacaagggccccaacaaggaggttctcagattccagcggctctctgactccgccagggcaccgaccccctcatcccgcatccccccctccactgctcttacccagatcgcattctgaccctggcataaccacttcctccgatacagccgatttccgcgatctgtataccaaagtactcgaggaagaagctgcatctgtatcatccgctgataccggcctctgctccgaggcatgcctcttcagactggccagatgcccttcccctaagctactccgagcacgatccgccgagaagcgcagaccagtgccgactttccagaaagtaccattaccttccggccctgcccctgcccactcactgggagacctcaaagggagctggcccggacggggtctggtgacgcgattcctccagatctcccgcaaggcacctgatccaagcggtaccggggctcacggtcacaagcaggtgcccaggtccctgtggggcagaccaggcagagagtccctacatctgcgctcctgcggggatctgtcttcgtcatcctctctgcgcaggcttctgtccggccgtcgcctggaacgaggaaccagaccacactccctgagcctgaacggtggaagtagagagactggattgtag

SEQ ID NO: 166386 - protein, 466 aa, Artificial Sequence
  derived and/or modified sequence
MADQLYLENIDEFVTDQNKIVTYKWLSYTLGVHVNQAKQMLYDYVERKRKENSGAQLHVTYLVSGSLIQNGHSCHKVAVVREDKLEAVKSKLAVTASIHVYSIQKAMLKDSGPLFNTDYDILKSNLQNCSKFSAIQCAAAVPRAPAESSSSSKKFEQSHLHMSSETQANNELTTNGHGPPASKQVSQQPKGIMGMFASKAAAKTQETNKETKTEAKEVTNASAAGNKAPGKGNMMSNFFGKAAMNKFKVNLDSEQAVKEEKIVEQPTVSVTEPKLATPAGLKKSSKKAEPVKVLQKEKKRGKRVALSDDETKETENMRKKRRRIKLPESDSSEDEVFPDSPGAYEAESPSPPPPPSPPLEPVPKTEPEPPSVKSSSGENKRKRKRVLKSKTYLDGEGCIVTEKVYESESCTDSEEELNMKTSSVHRPPAMTVKKEPREERKGPKKGTAALGKANRQVSITGFFQRK

SEQ ID NO: 166387 - protein, 427 aa, Artificial Sequence
  derived and/or modified sequence
MLYDYVERKRKENSGAQLHVTYLVSGSLIQNGHSCHKVAVVREDKLEAVKSKLAVTASIHVYSIQKAMLKDSGPLFNTDYDILKSNLQNCSKFSAIQCAAAVPRAPAESSSSSKKFEQSHLHMSSETQANNELTTNGHGPPASKQVSQQPKGIMGMFASKAAAKTQETNKETKTEAKEVTNASAAGNKAPGKGNMMSNFFGKAAMNKFKVNLDSEQAVKEEKIVEQPTVSVTEPKLATPAGLKKSSKKAEPVKVLQKEKKRGKRVALSDDETKETENMRKKRRRIKLPESDSSEDEVFPDSPGAYEAESPSPPPPPSPPLEPVPKTEPEPPSVKSSSGENKRKRKRVLKSKTYLDGEGCIVTEKVYESESCTDSEEELNMKTSSVHRPPAMTVKKEPREERKGPKKGTAALGKANRQVSITGFFQRK

SEQ ID NO: 166388 - protein, 360 aa, Artificial Sequence
  derived and/or modified sequence
MLKDSGPLFNTDYDILKSNLQNCSKFSAIQCAAAVPRAPAESSSSSKKFEQSHLHMSSETQANNELTTNGHGPPASKQVSQQPKGIMGMFASKAAAKTQETNKETKTEAKEVTNASAAGNKAPGKGNMMSNFFGKAAMNKFKVNLDSEQAVKEEKIVEQPTVSVTEPKLATPAGLKKSSKKAEPVKVLQKEKKRGKRVALSDDETKETENMRKKRRRIKLPESDSSEDEVFPDSPGAYEAESPSPPPPPSPPLEPVPKTEPEPPSVKSSSGENKRKRKRVLKSKTYLDGEGCIVTEKVYESESCTDSEEELNMKTSSVHRPPAMTVKKEPREERKGPKKGTAALGKANRQVSITGFFQRK

SEQ ID NO: 166389 - protein, 267 aa, Artificial Sequence
  derived and/or modified sequence
MADQLYLENIDEFVTDQNKIVTYKWLSYTLGVHVNQAKQMLYDYVERKRKENSGAQLHVTYLVSGSLIQNGHSCHKVAVVREDKLEAVKSKLAVTASIHVYSIQKAMLKDSGPLFNTDYDILKSNLQNCSKFSAIQCAAAVPRAPAESSSSSKKFEQSHLHMSSETQANNELTTNGHGPPASKQVSQQPKGIMGMFASKAAAKTQETNKETKTEAKEVTNASAAGNKAPGKGNMMSNFFGKAAMNKFKVNLDSEQAVKEEKIKEKKR

SEQ ID NO: 166390 - DNA, 1401 bp, Artificial Sequence
  derived and/or modified sequence
atggccgaccagctgtacctggagaacatcgacgagttcgtgaccgaccagaacaagatcgtgacctacaagtggctgagctacaccctgggcgtgcacgtgaaccaggccaagcagatgctgtacgactacgtggagagaaagagaaaggagaacagcggcgcccagctgcacgtgacctacctggtgagcggcagcctgatccagaacggccacagctgccacaaggtggccgtggtgagagaggacaagctggaggccgtgaagagcaagctggccgtgaccgccagcatccacgtgtacagcatccagaaggccatgctgaaggacagcggccccctgttcaacaccgactacgacatcctgaagagcaacctgcagaactgcagcaagttcagcgccatccagtgcgccgccgccgtgcccagagcccccgccgagagcagcagcagcagcaagaagttcgagcagagccacctgcacatgagcagcgagacccaggccaacaacgagctgaccaccaacggccacggcccccccgccagcaagcaggtgagccagcagcccaagggcatcatgggcatgttcgccagcaaggccgccgccaagacccaggagaccaacaaggagaccaagaccgaggccaaggaggtgaccaacgccagcgccgccggcaacaaggcccccggcaagggcaacatgatgagcaacttcttcggcaaggccgccatgaacaagttcaaggtgaacctggacagcgagcaggccgtgaaggaggagaagatcgtggagcagcccaccgtgagcgtgaccgagcccaagctggccacccccgccggcctgaagaagagcagcaagaaggccgagcccgtgaaggtgctgcagaaggagaagaagagaggcaagagagtggccctgagcgacgacgagaccaaggagaccgagaacatgagaaagaagagaagaagaatcaagctgcccgagagcgacagcagcgaggacgaggtgttccccgacagccccggcgcctacgaggccgagagccccagccccccccccccccccagcccccccctggagcccgtgcccaagaccgagcccgagccccccagcgtgaagagcagcagcggcgagaacaagagaaagagaaagagagtgctgaagagcaagacctacctggacggcgagggctgcatcgtgaccgagaaggtgtacgagagcgagagctgcaccgacagcgaggaggagctgaacatgaagaccagcagcgtgcacagaccccccgccatgaccgtgaagaaggagcccagagaggagagaaagggccccaagaagggcaccgccgccctgggcaaggccaacagacaggtgagcatcaccggcttcttccagagaaagtag

SEQ ID NO: 166391 - DNA, 1401 bp, Artificial Sequence
  derived and/or modified sequence
atggctgaccagctctacttagaaaatatcgacgaattcgtaaccgatcagaataagatcgtcacctacaagtggctgtcatacacactcggggtacatgtgaatcaagccaagcagatgctctacgactatgtagaaaggaagagaaaagagaattctggcgcccaactccacgtgacctatctcgttagcggatcactcattcagaacggacatagttgtcataaagtcgctgtagtccgagaggacaaactggaggccgttaagtccaaattagcggtgacagcctcaattcacgtctattctattcaaaaggccatgttaaaagattctggacctctctttaatacggattatgacattctgaagtccaacctacagaattgctctaagttcagcgctatacagtgtgcggccgccgtcccccgagctcccgctgaatcaagcagttcctccaagaagtttgagcagtctcacttgcacatgagctctgagacccaagctaacaacgagttaactacgaacggccatggaccaccagcatccaagcaggtgtctcagcaacctaagggtataatgggaatgttcgccagtaaagccgctgctaaaacccaggagaccaacaaggaaaccaagacagaggccaaagaagtgacgaacgcctctgccgctgggaataaggcacctggtaagggaaacatgatgagcaatttcttcggaaaagccgctatgaataagttcaaggtgaacctggacagcgagcaggcagtcaaggaggagaagattgtcgagcaaccaaccgtgagcgtgactgagcctaaactagccacccccgctggtctgaagaaaagctccaaaaaggcagaaccagtgaaggtgttacagaaagaaaaaaaaagaggaaagagagtagctctgagcgacgatgaaacaaaagaaactgagaatatgcgtaaaaaaaggcgtaggataaagctgcccgagagtgattcatcagaagacgaagtgtttcctgactccccgggtgcctacgaggcagagagcccgtctcccccccccccaccgtctcctcctctggagccggtacccaaaacagagccagagccaccatctgtaaagagttcttccggcgaaaataagcgaaagagaaagagggtgctcaagtcaaagacgtatctggatggcgaggggtgcatcgtcaccgagaaggtgtacgagtctgaaagctgcacggatagcgaggaagaactaaacatgaagacatccagcgtccataggcctcctgcgatgaccgttaagaaggaaccgagagaggaaagaaaaggacctaagaagggaacagctgccctgggcaaagccaacagacaggtctcaattaccggcttttttcaacgtaagtag

SEQ ID NO: 166392 - DNA, 1401 bp, Artificial Sequence
  derived and/or modified sequence
atggctgaccagctgtacctggagaacattgatgaatttgtgacagaccagaacaagatcgtgacctacaagtggctgagctacaccctgggcgtgcacgtgaaccaggccaagcagatgctgtatgactatgtggagaggaagaggaaagaaaattctggggcccagctgcacgtgacctacctggtgtctggcagcctcatccagaatggccacagctgccacaaggtggccgtggtgcgggaggacaagctggaggccgtgaagagcaagctggccgtgacagccagcatccacgtgtacagcatccagaaggccatgctgaaggacagcggccccctcttcaacacagattatgacatcctgaagagcaacctgcagaactgcagcaagttcagcgccatccagtgtgccgctgctgtgccccgggccccagctgagagcagcagcagcagcaagaagtttgagcagagccacctgcacatgagcagcgagacccaggccaacaatgagctgaccaccaatggacatggccccccagccagcaagcaggtgtcccagcagcccaagggcatcatgggcatgtttgccagcaaggctgctgccaagacccaggagaccaacaaggagaccaagacagaggccaaggaggtgaccaatgccagcgctgctggcaacaaggcccctggaaaaggaaacatgatgagcaacttcttcggcaaggccgccatgaacaagttcaaggtgaacctggacagcgagcaggccgtgaaggaggagaagatcgtggagcagcccaccgtgtctgtgacagagcccaagctggccaccccagctggcctgaagaagagcagcaagaaggccgagcctgtgaaggtgctgcagaaggagaagaagaggggcaagagggtggccctgagtgatgatgagaccaaggagacagagaacatgaggaagaagagaagacgcatcaagctgcctgagagtgacagcagtgaagatgaggtgtttcctgacagccctggggcctatgaggccgagagccccagccccccacctccacccagcccccccctggagcctgtgcccaagacagagcctgagcccccatctgtgaagagcagcagcggggagaacaagaggaagaggaagagggtgctgaagagcaagacctacctggatggagagggctgcatcgtgacagagaaggtgtatgaaagtgagagctgcacagattctgaggaggagctgaacatgaagaccagctctgtgcaccggcccccagccatgacagtgaagaaggagccccgggaggagaggaagggccccaagaagggcacagctgccctgggcaaggccaaccggcaggtgtccatcaccggcttcttccagaggaagtag

SEQ ID NO: 166393 - DNA, 1401 bp, Artificial Sequence
  derived and/or modified sequence
atggccgaccagctgtacctggagaacatcgacgagttcgtgaccgaccagaacaagatcgtcacgtacaagtggctcagctacaccctgggcgttcacgtaaaccaggctaaacagatgctgtatgactacgtagagcggaagcgaaaagaaaactccggtgcccaacttcacgtcacatacctcgtgtctggcagtctgattcagaatggccacagctgtcataaggtcgcggtcgttcgggaggacaagctcgaggccgtaaagtcaaagttggcagtcactgcgtcaattcacgtttatagcatccagaaggccatgctcaaggattccggacccttatttaacactgactacgacattctcaagtccaatctgcagaattgctctaagttctctgccatccagtgtgcagctgccgtcccacgggccccggcggaatctagcagctccagtaagaagttcgagcagagtcatctgcatatgtcctcagaaacgcaagccaataacgagctgacaactaacggccatgggccccccgcctcaaagcaggtgagtcagcagccaaaagggataatgggaatgttcgcaagtaaagccgctgccaaaacacaggagaccaacaaggagaccaaaacggaggctaaggaggtcacgaatgcaagtgcagctggtaataaagccccaggaaaaggaaacatgatgagcaatttcttcggaaaagcagccatgaataaattcaaggttaacctggattctgagcaggctgtaaaagaagaaaaaatagtagaacagcccaccgtatccgtgactgagcccaaactcgcgaccccagctgggcttaagaaatcctcaaagaaagcggagccggtcaaggtattgcagaaagagaaaaaacgaggcaaacgggtggccttatctgacgacgagacaaaagagaccgaaaatatgcggaagaaacgcaggcggatcaagctgcccgagagtgattccagcgaggacgaggtgttcccagattctcccggtgcttacgaggcggaaagcccaagtccaccgcctcccccatcgccaccgctagagccagttcccaagaccgagcccgagcccccctccgttaaatctagctccggagagaataaaaggaaacgaaaaagggtgctgaagagtaaaacttacctggacggcgagggatgtattgtgaccgagaaggtgtacgaatccgagagttgtacggatagtgaggaggaactgaacatgaaaacatcgagcgtgcacaggccgccagcaatgaccgttaaaaaggaaccccgggaggagcgcaagggtcccaaaaaaggcacggccgcgttaggcaaggcaaacagacaggtgagtattaccggattctttcagcggaagtag

SEQ ID NO: 166394 - DNA, 1401 bp, Artificial Sequence
  derived and/or modified sequence
atggccgaccagctgtacctcgaaaacatcgatgagttcgtgacagatcaaaacaaaattgtgacctacaaatggttaagttacaccctgggagtccatgtcaaccaggcaaagcagatgctttacgactacgtagaaagaaagagaaaagaaaactccggggctcagctacacgtaacatatctcgtgtccggctcgctgatacagaatggtcatagctgccataaggtggcagttgttagggaggataaactggaagcggttaaatccaagctggcagtgactgccagcatccatgtgtattctatccagaaggcaatgttgaaggatagcggccctctgtttaataccgactacgatattcttaagtctaacctacaaaattgctccaagttcagcgccatccaatgcgcagccgcagtgccgagagccccagcggagtcaagctccagcagcaagaagtttgagcagtcccatctgcatatgagttcagagacgcaagcaaacaacgagctgaccaccaacgggcatggaccacctgcctccaaacaggtgtctcagcaaccaaaaggcattatgggaatgtttgcctccaaggccgcagcaaaaactcaagaaaccaataaggaaactaagaccgaagcgaaagaggtgacaaacgcctcagccgctggcaataaagctcccggaaaaggcaacatgatgtccaatttctttgggaaggccgcaatgaataaatttaaggtcaacctcgattctgagcaggcagtcaaagaggagaaaatagtagaacagccaacggtgtccgttacagagcctaaactggctaccccagctgggttaaagaaaagtagtaaaaaggctgagcccgtcaaggttctgcagaaagagaaaaagcgtgggaagagagtcgcgttgtctgatgatgaaaccaaggagaccgagaatatgcgcaaaaaacgcaggaggatcaaactccccgagagtgacagctctgaagacgaggtgtttccagattcaccaggtgcgtacgaagccgaatctccatcaccccctcctccgccatcacccccacttgagccagtgcccaagacggaacccgagcctccatctgtgaagagctcttccggggagaataaaagaaagcggaaaagagtgttgaagagcaaaacatatctggacggcgagggttgcattgtcaccgaaaaagtatacgagtcagagtcatgtacagactcagaggaggagctgaatatgaaaacatcctccgtccacaggccccctgcaatgactgtgaaaaaggaacctcgcgaagaacgaaaggggcctaagaagggcaccgccgctctgggcaaggccaatcgtcaggtgtcgataacaggatttttccaaaggaagtag

SEQ ID NO: 166395 - DNA, 3821 bp, Artificial Sequence
  derived and/or modified sequence
gtagtgcgtcgcctccgttgccggggaaacgacccgggacctgggagggagcaaagacgtttcccgccggcgggagctgtggctgtgattgagagaggggttagaggcgggtcccagcgctgccgcaccatggcggaccagctttatctggaaaatatagacgagttcgtcacggaccaaaacaagatcgtgacatacaaatggctgagctatacactaggggttcatgttaaccaggccaaacagatgctgtatgattatgttgaaaggaaacgaaaagaaaattcaggagcccaactgcatgttacctacttggtgtctggcagtctcattcagaatggacattcctgccacaaggttgcagtagtgagagaagataaattggaagcagtgaagtccaagctagctgtgactgccagcatccatgtgtacagcatccagaaagccatgctaaaggacagtgggcctctgttcaatactgactatgacatccttaaaagcaacttgcagaactgcagcaaatttagtgctatacaatgtgcagctgccgtccctagagctcctgctgaatcctcttcgtcttccaaaaagtttgagcagtcacatcttcacatgtcaagtgagacacaagccaacaatgagctgaccaccaatggtcatggcccacctgcatccaagcaggtttcccagcagcccaaaggaattatgggaatgtttgcctccaaagctgctgctaaaacccaagaaaccaacaaggaaacgaaaacagaggctaaagaagtaacaaatgcatctgcagcaggcaacaaggcaccagggaaagggaatatgatgagcaacttttttggaaaagctgctatgaataaatttaaagtcaatttggactcagaacaagcagtgaaagaagaaaaaatagtggagcagcctacagtgtctgtcacggaaccaaagctggcaactcctgcaggcctgaaaaaatccagcaaaaaagcagagcctgttaaggtgctgcagaaggaaaaaaaaagggggaagcgagtagcattatctgatgatgagacaaaggaaactgaaaacatgaggaaaaagaggagaagaatcaaacttcctgaatctgatagcagtgaagatgaagtctttccagactctcctggggcttatgaagctgagtcaccatccccacctcctcctccgtctccacctcttgaaccagtgccaaagactgagcctgaacctccttctgtcaagagctcaagtggagaaaacaaaagaaaacgaaaacgcgtactaaaatctaaaacttacctggatggggaaggctgcatagtgactgaaaaagtctacgagagtgaatcctgcacagatagtgaagaggagcttaacatgaagacatcctcagtacacagaccccctgccatgactgtgaaaaaagaacccagagaggaacgaaagggccccaagaaagggactgctgctctgggcaaagccaacagacaggtgtccattactggcttcttccagaggaaataaactgccatctctggtagatcagagacttggagtggtcaagggagaagaccaagaaatgtactcctcacttactatgtaagttcatctagatctccacctcacctgtatcaaaagactgttctttcatcctgtgaggtttatactatttctggtttttaaccaaaaggaaatcatctggaagcaggaggcaaaaagctgttaccttctaatgacatttaaaaagcacagtctttgacctgtccaggagaaggatttactccaaaattatactggaacagttttcagaattctcactgaagccatttagtggctaacccactgtgctccactcaccctatgccctggtccgcatatggcacaggaattattccttcttgttcctctgtattctaagaattcatgtgggtgtttcttatccttacattctgctggatacgtttacccctcttgtcttcctgcagtaccacacttctgtcccctaacctcctgaggctgttctctgtaagtcttttaagttttggttggactaaaggctgaagtgaaaatctccctgtaatcctcttcctccattatgcagtacacggacacctggctacagaccaggacgtggcttgtgttctgttcctttcacaaaagctctctgggaccttcacttgcaattagtggttagggaaaagcctcaggcagaacacaaatagaaatttaatgatgtgttcaactccaccagaaattacctcgagtcagcattgacgatattggaggagctgccgtgctgctgatacggggtgtgctttatgctgctctttgcggtttgttgatcccctcctcccccactctcaatacctagagagtgaaacccgtacaatgagataaagactaaaaagagaaatcccttcctatatacagtgtgctacatttacaaaaaatttctccttaagaaaacagaatattcaaaaacagcacttttccaggaagttagtgaggaagataaggcacacatttatttataaatggatgttgctcctttgtatttttagcttccctatttgcttaaaagtacaggctccctaagagaggatggagagggagagactgaattgttagtaggtctaaacatcaaagaaaacatttttattagttacttatggaaaatcatctattacaatgataaccttcaagtgacttccattatggctggacaggcggtgagctcagtggattgcagtggtgtgctggtgattttgcacagtgagctctgcggaaggggtcaggctcaactgctgatgtgtctcacacgtagcagacaaggggtgtctgactggcttcttttgcctcaagatggtgtatgtcgtaagtgatgcaatcagctgtctgctttttaaggttgggattgtgctgactttgggattaacatgagcttctttagcaaccaagcatgaacttgattaagaccagaagtttgggagatgagtcctggcattatgtctaggactaaagcagtggctttgtatagcaagctgagtaaaggttgacatattccaaaacccttctttttaaaaggaaaaaggatggagagaaggatggaaagcctggacttaaacctttagaaaaaacttctggagagaaatcccttttaaacagttacttttgtcattgcctctggtcatttgtctaaataggaatggaaaattaaaagaaaagcaacaatccaatcttttttctaaaaattatgctggggtctcgactaaaactgaatttgaattggaaaattctggtgttggttggagttccatcttgcaagggataatacaaatcctatgatctctatgcccaatatgctgcctcaactctgagctgtctgcaaggcttagtaagtattgagtggtgttttttttttctttttatacaataccatgttaaccacatgagttaaataaatttgagaagttgttttaaaacagtgcttcaaactgagtatctgatgagtctcttatttgatggatggtaacagtgttgcaattatttaagctctgaatgggaagaaggctggttttcagttgatattgttaaaactgcatacccacagtctgagatgaacaagttatttgctgccttcatcgtttttttcagcactggggaaatgttagtttcagccaacctcattttttagttcatctagaagaaaatctagcacattgtattagtttggcttcatcacttgctagctgtatgactgtgggcaagtttcacagcctcaagttctttatcaaaataaaactaaaatgagttac

SEQ ID NO: 166396 - protein, 682 aa, Artificial Sequence
  derived and/or modified sequence
MQLEHCLSPSIMLSKKFLNVSSSYPHSGGSELVLHDHPIISTTDNLERSSPLKKITRGMTNQSDTDNFPDSKDSPGDVQRSKLSPVLDGVSELRHSFDGSAADRYLLSQSSQPQSAATAPSAMFPYPGQHGPAHPAFSIGSPSRYMAHHPVITNGAYNSLLSNSSPQGYPTAGYPYPQQYGHSYQGAPFYQFSSTQPGLVPGKAQVYLCNRPLWLKFHRHQTEMIITKQGRRMFPFLSFNISGLDPTAHYNIFVDVILADPNHWRFQGGKWVPCGKADTNVQGNRVYMHPDSPNTGAHWMRQEISFGKLKLTNNKGASNNNGQMVVLQSLHKYQPRLHVVEVNEDGTEDTSQPGRVQTFTFPETQFIAVTAYQNTDITQLKIDHNPFAKGFRDNYDTIYTGCDMDRLTPSPNDSPRSQIVPGARYAMAGSFLQDQFVSNYAKARFHPGAGAGPGPGTDRSVPHTNGLLSPQQAEDPGAPSPQRWFVTPANNRLDFAASAYDTATDFAGNAATLLSYAAAGVKALPLQAAGCTGRPLGYYADPSGWGARSPPQYCGTKSGSVLPCWPNSAAAAARMAGANPYLGEEAEGLAAERSPLPPGAAEDAKPKDLSDSSWIETPSSIKSIDSSDSGIYEQAKRRRISPADTPVSESSSPLKSEVLAQRDCEKNCAKDISGYYGFYSHS

SEQ ID NO: 166397 - protein, 395 aa, Artificial Sequence
  derived and/or modified sequence
MHPDSPNTGAHWMRQEISFGKLKLTNNKGASNNNGQMVVLQSLHKYQPRLHVVEVNEDGTEDTSQPGRVQTFTFPETQFIAVTAYQNTDITQLKIDHNPFAKGFRDNYDTIYTGCDMDRLTPSPNDSPRSQIVPGARYAMAGSFLQDQFVSNYAKARFHPGAGAGPGPGTDRSVPHTNGLLSPQQAEDPGAPSPQRWFVTPANNRLDFAASAYDTATDFAGNAATLLSYAAAGVKALPLQAAGCTGRPLGYYADPSGWGARSPPQYCGTKSGSVLPCWPNSAAAAARMAGANPYLGEEAEGLAAERSPLPPGAAEDAKPKDLSDSSWIETPSSIKSIDSSDSGIYEQAKRRRISPADTPVSESSSPLKSEVLAQRDCEKNCAKDISGYYGFYSHS

SEQ ID NO: 166398 - protein, 351 aa, Artificial Sequence
  derived and/or modified sequence
MHPDSPNTGAHWMRQEISFGKLKLTNNKGASNNNGQMVVLQSLHKYQPRLHVVEVNEDGTEDTSQPGRVQTFTFPETQFIAVTAYQNTDITQLKIDHNPFAKGFRDNYDTIYTGCDMDRAGPGPGTDRSVPHTNGLLSPQQAEDPGAPSPQRWFVTPANNRLDFAASAYDTATDFAGNAATLLSYAAAGVKALPLQAAGCTGRPLGYYADPSGWGARSPPQYCGTKSGSVLPCWPNSAAAAARMAGANPYLGEEAEGLAAERSPLPPGAAEDAKPKDLSDSSWIETPSSIKSIDSSDSGIYEQAKRRRISPADTPVSESSSPLKSEVLAQRDCEKNCAKDISGYYGFYSHS

SEQ ID NO: 166399 - DNA, 3186 bp, Artificial Sequence
  derived and/or modified sequence
caggtgattatcctaattaatgtctatctaattaaattactgtcagcagctaaccaatggcaggagccgtttcatcggctgcacaagcagcaagatcaaaagtgagccttttctgattgctgcatagtgtcaattggccaatctcttctcccagggaaaaaaaaaagtaaatcaaacctttgagaagcatttgctggttgaagtgctttctgtctagtgagggggtctgtggatttctagtttatgataaataggactttaaaaaccagggacgggagggcgagtgttcaggttctagagctatgcagctggagcactgcctttctccttctatcatgctctccaagaaatttctcaatgtgagcagcagctacccacattcaggcggatccgagcttgtcttgcacgatcatcccattatctcgaccactgacaacctggagagaagttcacctttgaaaaaaattaccagggggatgacgaatcagtcagatacagacaattttcctgactccaaggactcaccaggggacgtccagagaagtaaactctctcctgtcttggacggggtctctgagcttcgtcacagtttcgatggctctgctgcagatcgctacctcctctctcagtccagccagccacagtctgcggccactgctcccagtgccatgttcccgtaccccggccagcacggaccggcgcaccccgccttctccatcggcagccctagccgctacatggcccaccacccggtcatcaccaacggagcctacaacagcctcctgtccaactcctcgccgcagggataccccacggccggctacccctacccacagcagtacggccactcctaccaaggagctccgttctaccagttctcctccacccagccggggctggtgcccggcaaagcacaggtgtacctgtgcaacaggcccctttggctgaaatttcaccggcaccaaacggagatgatcatcaccaaacagggaaggcgcatgtttccttttttaagttttaacatttctggtctcgatcccacggctcattacaatatttttgtggatgtgattttggcggatcccaatcactggaggtttcaaggaggcaaatgggttccttgcggcaaagcggacaccaatgtgcaaggaaatcgggtctatatgcatccggattcccccaacactggggctcactggatgcgccaagaaatctcttttggaaaattaaaacttacgaacaacaaaggagcttcaaataacaatgggcagatggtggttttacagtccttgcacaagtaccagccccgcctgcatgtggtggaagtgaacgaggacggcacggaggacactagccagcccggccgcgtgcagacgttcactttccctgagactcagttcatcgccgtcaccgcctaccagaacacggatattacacaactgaaaatagatcacaacccttttgcaaaaggatttcgggataattatgacacgatctacaccggctgtgacatggaccgcctgaccccctcgcccaacgactcgccgcgctcgcagatcgtgcccggggcccgctacgccatggccggctctttcctgcaggaccagttcgtgagcaactacgccaaggcccgcttccacccgggcgcgggcgcgggccccgggccgggtacggaccgcagcgtgccgcacaccaacgggctgctgtcgccgcagcaggccgaggacccgggcgcgccctcgccgcaacgctggtttgtgacgccggccaacaaccggctggacttcgcggcctcggcctatgacacggccacggacttcgcgggcaacgcggccacgctgctctcttacgcggcggcgggcgtgaaggcgctgccgctgcaggctgcaggctgcactggccgcccgctcggctactacgccgacccgtcgggctggggcgcccgcagtcccccgcagtactgcggcaccaagtcgggctcggtgctgccctgctggcccaacagcgccgcggccgccgcgcgcatggccggcgccaatccctacctgggcgaggaggccgagggcctggccgccgagcgctcgccgctgccgcccggcgccgccgaggacgccaagcccaaggacctgtccgattccagctggatcgagacgccctcctcgatcaagtccatcgactccagcgactcggggatttacgagcaggccaagcggaggcggatctcgccggccgacacgcccgtgtccgagagttcgtccccgctcaagagcgaggtgctggcccagcgggactgcgagaagaactgcgccaaggacattagcggctactatggcttctactcgcacagctaggccgcccctgcccgcccggccccgccgcggcccggacccccagccagcccctcacagctcttccccagctccgcctccccacactcctccttgcgcacccactcattttatttgaccctcgatggccgtctgcagcgaataagtgcaggtctccgagcgtgattttaaccttttttgcacagcagtctctgcaattagctcaccgaccttcaactttgctgtaaaccttttggttttcctacttactcttcttctgtggagttatcctcctacaattcccctccccctcgtctttctcttacctcctacttctctttcttgtaatgaaactcttcacctttaggagacctgggcagtcctgtcaggcagcagcgattccgacccgccaagtctcggcctccacattaaccataggatgttgactctagaacctggacccacccagcgcgtcctttcttatccccgagtggatggatggatggatggatggtagggatgttaataattttagtggaacaaagcctgtgaaatgattgtacatagtgttaatttattgtaacgaatggctagtttttattctcgtcaaggcacaaaaccagttcatgcttaacctttttttcctttcctttctttgcttttctttctctcctctcatactttctcttctctctcttttaattttcttgtgagataatattctaagaggctctagaaacatgaaatactcagtagtgatgggtttcccacttctcctcaatccgttgcatgaaataattactatgtgccctaatgcacacaaatagctaaggagaatccacccaaacacctttaaagg

SEQ ID NO: 166400 - DNA, 2049 bp, Artificial Sequence
  derived and/or modified sequence
atgcagctcgaacactgcctgagtcctagcatcatgttatcaaagaaatttttaaacgtctcctcttcttacccccactcaggcggatcagagctagtccttcacgaccatccgattatttctactactgataatctggagcgttcttcacccctgaaaaagatcacacggggaatgactaaccagagtgatactgacaattttcccgactcgaaagattctccgggagatgttcagaggtctaagctgtctcccgtgctggatggcgttagcgaactccgccacagctttgatgggagtgccgcagatcggtatttgctatcacagagcagccaaccccagtccgccgccaccgcaccttccgcaatgttcccgtaccctggtcagcatggacctgcccaccccgccttttccatcgggagtcccagccgctatatggcccatcatcccgtgatcacaaacggtgcctataacagcctgctgtctaactcaagcccacagggctatccaaccgcaggatatccctatccccagcagtatggccactcatatcagggcgccccattctatcagttctcttccacgcagccaggcctggtgccagggaaagcccaggtgtacctctgtaaccgacccctctggttgaaattccataggcatcagacagagatgattataaccaaacaggggaggcgtatgtttcccttcctgtccttcaatatcagcggcctcgatcccacggctcattataatatcttcgttgatgtcatactcgcagaccccaaccactggaggttccagggaggcaagtgggtgccttgtggcaaggccgacaccaatgtgcaggggaaccgcgtatacatgcatcctgacagcccaaataccggagcccactggatgagacaggagatctccttcggaaaactgaagttaaccaacaataaaggggcttccaacaacaatggacaaatggtcgttttgcaatccctgcataagtatcagcctcggctacacgttgtcgaggtcaacgaggacggtaccgaagatacgagccagccgggcagagttcaaactttcacttttcccgaaacgcaattcattgctgtcacagcatatcagaacactgatattacacaactgaagatcgatcataatccatttgcgaaagggtttcgcgacaactacgacactatctacaccggatgcgacatggaccgcctcaccccttcacccaatgacagccccagatctcagattgtccctggagcccggtatgcaatggcaggcagcttcctgcaggatcagttcgtctctaactacgcaaaggcacggttccatcccggcgcgggggcaggacctggtcctggcacagaccgcagcgtcccacatacaaacggactgttaagcccacagcaagcagaagaccctggggctcccagtccgcaacgctggtttgtcacccctgccaacaaccggctcgattttgcggccagtgcctacgacacagcaactgactttgccggcaacgccgccactttgctgagttatgccgctgctggcgtgaaggcactgcctctgcaggctgccggttgcaccgggagacccctgggctactatgccgatccatccggctggggagcaaggtcgcccccacagtactgcggtaccaagtctgggtccgtcctgccttgctggccgaacagcgcagcggccgctgccaggatggcaggggcaaatccgtacttgggtgaggaagcagaaggactggcggcggagaggagtcccctgcccccaggagcagcagaagatgctaagcccaaggacctctcagacagcagttggattgagaccccttccagcatcaaaagtattgacagcagcgacagtggcatatacgagcaggccaaacgccggagaatttctcccgccgacactcccgtatccgagtccagttcccccctcaagtccgaagtgttggcacaacgggactgtgaaaagaattgtgccaaagatatttccggatactatggcttttattcgcacagttag

SEQ ID NO: 166401 - DNA, 1188 bp, Artificial Sequence
  derived and/or modified sequence
atgcatcccgacagcccgaataccggagctcactggatgcggcaggaaatcagctttggaaaactgaagcttaccaataacaaaggagcgtcaaacaacaacggtcagatggtggtcctgcagtctctgcataaataccagccgagactgcatgtcgtggaggtaaacgaagatggcaccgaggataccagtcagcccggccgggtgcagaccttcaccttcccagaaacccagttcatcgccgttactgcctatcaaaacacagacattacacaactgaaaattgaccacaatccctttgctaaagggtttcgtgataactatgacactatttatacaggatgtgatatggatagactgaccccaagtcctaatgactcacctcgctcacaaatcgtgccaggggcccgctacgccatggccggctcttttctgcaagaccagtttgtctccaactacgccaaggccagattccacccgggcgcaggagccggaccaggtcccggaacagaccgtagcgtgcctcatacgaatgggctgttaagtcctcagcaggcagaagatccaggcgccccatctccacagcgctggtttgtgactccggctaataacagacttgattttgccgcaagcgcttatgataccgctactgatttcgcaggaaacgctgccacgctgttgagttatgcagccgcaggggttaaggctctgccactccaggctgccgggtgtactgggcgaccgttgggatattacgctgatcctagtgggtggggcgccagaagtccaccccagtattgcggcaccaagtctggttctgtgttgccttgctggcctaacagcgcggctgccgctgctagaatggctggagccaacccctacctgggagaagaggcagaaggcttggcagccgagcggtcaccgcttccgcccggggctgccgaggacgccaaacccaaggatctctccgatagctcctggattgagacacctagctcgattaaatctattgacagcagcgactctggaatctacgagcaagcaaaaagaaggcgaattagcccagccgatacacccgtttccgaatcatcctccccactgaagtctgaagtactagctcagcgtgattgcgaaaagaactgtgcgaaagatattagcgggtattacggattttatagccactcttag

SEQ ID NO: 166402 - DNA, 1056 bp, Artificial Sequence
  derived and/or modified sequence
atgcaccccgactccccaaacactggagcccattggatgcggcaggaaatctcattcgggaagctaaaactaacaaacaataaaggtgcctcgaataataacggtcagatggtggtgcttcagtctcttcacaagtaccagcctaggctgcacgtggtggaagtgaacgaagacggaaccgaagacacctctcagccaggaagggttcagactttcacttttccagagacccaattcattgccgtcacagcataccagaataccgatatcacccaactcaagattgaccataaccccttcgccaagggtttccgggacaactacgacaccatttatactggatgtgacatggatagagccggacctgggcctggcacggatagaagcgtccctcacactaacggactgttatccccccagcaggcggaggaccccggggcaccaagcccccagaggtggtttgtgacacctgctaacaatcgcctggacttcgccgcctcggcatacgacacagcaacagacttcgccggtaatgccgcaacgctgttgtcttatgctgccgcaggggtaaaggcacttcctctgcaggctgctggctgcacggggagaccattaggctactacgccgatcccagtggttggggagccaggtcccctccccagtattgtgggacgaaaagcgggtccgttctgccctgctggcccaacagcgcagccgcggccgctcgaatggcaggggccaacccgtatcttggcgaagaggccgaaggactggcagccgagagatcccccctacctcctggtgctgcagaagatgccaagccgaaggacctgtcagatagcagctggatcgagacaccaagctctatcaaatccatagactccagcgactctggaatctatgagcaggcaaagcggcgtcggattagccctgccgacacacccgtttcagaatctagctctcctctcaaaagtgaagtcctcgctcagcgggactgcgagaagaattgtgcaaaggacattagtggttactacggcttttactcgcacagttag

SEQ ID NO: 166403 - DNA, 2049 bp, Artificial Sequence
  derived and/or modified sequence
atgcagctggagcactgcctgagccccagcatcatgctgagcaagaagttcctgaatgtgagcagcagctacccccacagcggcggcagcgagctggtgctgcatgaccaccccatcatcagcaccacagacaacctggagaggagcagccccctgaagaagatcacccggggcatgaccaaccagagcgacacagacaacttcccagacagcaaggacagccctggagatgtgcagaggagcaagctgagccctgtgctggatggagtgtctgagctgcggcacagctttgatggcagcgctgctgaccgctacctgctgagccagagcagccagccccagagcgctgccacagcccccagcgccatgttcccctacccaggccagcacggccctgcccacccagccttcagcatcggcagccccagccgctacatggcccaccaccctgtgatcaccaacggggcctacaacagcctgctgagcaacagcagcccccagggctaccccacagctggctacccctacccccagcagtatggccacagctaccagggcgcccccttctaccagttcagcagcacccagcccggcctggtgcctgggaaggcccaggtgtacctgtgcaaccggcccctgtggctgaagttccaccgccaccagacagagatgatcatcaccaagcagggccgcaggatgttccccttcctgtccttcaacatcagcggcctggaccccacagcccactacaacatctttgtggatgtgatcctggccgaccccaaccactggaggttccagggcggcaagtgggtgccctgtgggaaggctgacaccaacgtgcagggcaacagagtgtacatgcacccagacagccccaacacaggagcccactggatgaggcaggagatcagctttgggaagctgaagctgaccaacaacaagggggccagcaacaacaacggccagatggtggtgctgcagagcctgcacaagtaccagccccggctgcacgtggtggaggtgaatgaagatggaacagaggacaccagccagcccggccgggtgcagaccttcaccttccctgagacccagttcatcgctgtgacagcctaccagaacacagacatcacccagctgaagattgaccacaacccctttgccaagggcttccgggacaactatgacaccatctacacaggctgtgacatggaccggctgacccccagccccaatgacagccccaggagccagatcgtgcctggggcccgctatgccatggccggcagcttcctgcaggaccagtttgtgagcaactatgccaaggcccgcttccaccctggagctggagctggccctggccctggaacagacagatctgtgccccacaccaacggcctgctgagcccccagcaggccgaggaccccggggcccccagcccccagcgctggtttgtgaccccagccaacaaccggctggactttgctgccagcgcctatgacacagccacagactttgctggaaatgctgccaccctgctgtcctatgctgctgctggggtgaaggccctgcccctgcaggccgccggctgcaccggccggcccctgggctactatgctgaccccagcggctggggcgcccggagccccccccagtactgcggcaccaagagcggctctgtgctgccctgctggcccaacagcgctgctgctgctgccaggatggccggggccaacccctacctgggggaggaggccgagggcctggccgctgagaggagccccctgcccccaggagctgctgaagatgccaagcccaaggacctgagtgacagctcctggattgagacccccagcagcatcaagagcattgacagcagtgacagcggcatctatgagcaggccaagagaagacgcatcagccctgctgacacccctgtgtctgagagcagcagccccctgaagtctgaggtgctggcccagagggactgtgagaagaactgtgccaaggacatcagcggctactacggcttctacagccacagctag

SEQ ID NO: 166404 - DNA, 1188 bp, Artificial Sequence
  derived and/or modified sequence
atgcacccagacagccccaacacaggagcccactggatgaggcaggagatcagctttgggaagctgaagctgaccaacaacaagggggccagcaacaacaacggccagatggtggtgctgcagagcctgcacaagtaccagccccggctgcacgtggtggaggtgaatgaagatggaacagaggacaccagccagcccggccgggtgcagaccttcaccttccctgagacccagttcatcgctgtgacagcctaccagaacacagacatcacccagctgaagattgaccacaacccctttgccaagggcttccgggacaactatgacaccatctacacaggctgtgacatggaccggctgacccccagccccaatgacagccccaggagccagatcgtgcctggggcccgctatgccatggccggcagcttcctgcaggaccagtttgtgagcaactatgccaaggcccgcttccaccctggggccggggccggccctggccctggaacagacagatctgtgccccacaccaacggcctgctgagcccccagcaggctgaagatcctggggcccccagcccccagcgctggtttgtgaccccagccaacaaccggctggactttgctgccagcgcctatgacacagccacagactttgctggaaatgctgccaccctgctgtcctatgctgctgctggggtgaaggccctgcccctgcaggccgccggctgcaccggccggcccctgggctactatgctgaccccagcggctggggcgcccggagccccccccagtactgcggcaccaagagcggctctgtgctgccctgctggcccaacagcgctgctgctgctgccaggatggccggggccaacccctacctgggggaggaggccgagggcctggccgctgagaggagccccctgcccccaggagctgctgaagatgccaagcccaaggacctgagtgacagctcctggattgagacccccagcagcatcaagagcattgacagcagtgacagcggcatctatgagcaggccaagagaagacgcatcagccctgctgacacccctgtgtctgagagcagcagccccctgaagtctgaggtgctggcccagagggactgtgagaagaactgtgccaaggacatcagcggctactacggcttctacagccacagctag

SEQ ID NO: 166405 - DNA, 1056 bp, Artificial Sequence
  derived and/or modified sequence
atgcacccagacagccccaacacaggagcccactggatgaggcaggagatcagctttgggaagctgaagctgaccaacaacaagggggccagcaacaacaacggccagatggtggtgctgcagagcctgcacaagtaccagccccggctgcacgtggtggaggtgaatgaagatggaacagaggacaccagccagcccggccgggtgcagaccttcaccttccctgagacccagttcatcgctgtgacagcctaccagaacacagacatcacccagctgaagattgaccacaacccctttgccaagggcttccgggacaactatgacaccatctacacaggctgtgacatggaccgggccggccctggccctggaacagacagatctgtgccccacaccaacggcctgctgagcccccagcaggctgaagatcctggggcccccagcccccagcgctggtttgtgaccccagccaacaaccggctggactttgctgccagcgcctatgacacagccacagactttgctggaaatgctgccaccctgctgtcctatgctgctgctggggtgaaggccctgcccctgcaggccgccggctgcaccggccggcccctgggctactatgctgaccccagcggctggggcgcccggagccccccccagtactgcggcaccaagagcggctctgtgctgccctgctggcccaacagcgctgctgctgctgccaggatggccggggccaacccctacctgggggaggaggccgagggcctggccgctgagaggagccccctgcccccaggagctgctgaagatgccaagcccaaggacctgagtgacagctcctggattgagacccccagcagcatcaagagcattgacagcagtgacagcggcatctatgagcaggccaagagaagacgcatcagccctgctgacacccctgtgtctgagagcagcagccccctgaagtctgaggtgctggcccagagggactgtgagaagaactgtgccaaggacatcagcggctactacggcttctacagccacagctag

SEQ ID NO: 166406 - DNA, 2049 bp, Artificial Sequence
  derived and/or modified sequence
atgcagctggagcactgcctgagccccagcatcatgctgagcaagaagtttctgaatgtttcgagctcataccctcattcgggcgggagtgagctcgtcctgcatgaccatcctattatttcaactacagacaatttggagcgtagctctcccctcaagaaaatcacgcggggcatgacgaatcaatccgacacagacaactttccagactctaaagatagccctggggacgtccagcgcagtaaactgagccccgttctggatggggtgtccgagctccgccacagttttgatggttccgcagccgaccgctatcttcttagtcaatcgagccagcctcagtctgctgctactgcaccgtcagccatgttcccataccccggtcagcatggaccagcccacccagcctttagcatcggctctcctagtagatacatggctcaccatcctgtcatcacgaatggggcctacaacagcttgctttctaattcttctccacagggatatccgacagctggttacccttaccctcagcagtatggacactcctatcagggagctcccttctaccaattctcttccacccagcctggcctcgtgcccggaaaggcccaggtttatctgtgtaacaggcctctgtggttgaagtttcacagacaccagaccgaaatgattattacaaagcagggacggagaatgttcccattcctatcatttaacatcagcggtctggaccccacggcacactataacatctttgttgacgtcatactcgcagacccgaaccactggaggtttcaaggcgggaagtgggtgccgtgtgggaaagcggataccaatgtacagggcaatagagtatatatgcaccccgattcccccaacactggagcacattggatgcggcaggaaataagtttcggcaagctgaaactgacaaataacaagggcgcctccaacaacaacggccaaatggttgtcttgcagtccctgcacaagtaccaacctcgcctgcacgtggtcgaggtgaacgaggacggcacagaggacacctctcagccaggaagagtacagacatttacattcccagagactcagtttatcgcggtgactgcctatcagaatacagacatcactcagctgaaaattgaccacaacccgtttgctaagggttttagggacaattatgacactatctacacaggttgtgacatggacaggctcacgccatctcctaatgacagccctcgctcccagattgtaccgggggcccggtacgccatggccgggtcatttctccaagatcaattcgtgtccaattacgccaaggcaagattccatccgggggccggcgccggtcccgggcctggcaccgatcggagcgttccgcacacaaacggactgctctcaccccaacaagcggaggaccctggggcaccatctccccagcgctggttcgtgacgcccgctaataaccggctggattttgccgcctcggcttacgacaccgccaccgactttgcaggaaacgccgcgactctgctgagttacgccgccgcaggggtcaaggctctgcctctgcaggcggccggttgtactgggaggcccctgggatactacgctgacccatccggctggggagctaggagcccacctcagtattgcgggaccaagagcggcagcgtgctcccttgttggccaaactcagctgccgctgccgcccgaatggcgggcgctaatccttacctaggtgaagaggcagaaggtctggcggccgaaaggtcacctctacccccaggcgcggctgaagacgccaaaccaaaagacctatcggattcaagctggatcgaaacccctagcagtattaagtctattgatagctctgactctggcatatatgaacaggcaaagagaagacgcatcagtccagcagacacgccagtgagtgagtcttcatcccctttgaaaagcgaggttttggcacagagggattgtgagaagaattgtgcaaaggacatcagcggatattatggcttttatagtcattcctag

SEQ ID NO: 166407 - DNA, 1188 bp, Artificial Sequence
  derived and/or modified sequence
atgcaccccgacagccccaacaccggcgcccactggatgcggcaggagatctcttttgggaaactaaaactcactaacaataagggggccagcaataataacggtcagatggttgtcctgcagtctttgcacaagtaccagcctagattacatgtagtggaggtaaacgaggatggcaccgaggacacatcacagcccggtcgagtccagacatttacgttccctgaaacccaattcattgcagtaactgcttaccagaacaccgatatcactcagttgaagatcgatcacaacccctttgccaagggattcagggataactacgacacgatttatacaggctgtgacatggaccgtctcacacctagccctaatgacagtcctcggtcccaaattgtccccggcgcccgttacgccatggcgggatcattccttcaggatcagtttgtaagcaactacgcaaaagcaaggtttcaccccggtgcgggggcgggaccaggacccgggacagacaggtcagtgccacataccaatggcctgcttagtccgcagcaggcagaggaccctggagcaccatcaccccagcgctggttcgttacgccagcgaataatcgcctagatttcgcagcaagcgcctacgataccgcgaccgattttgctggaaatgccgccaccttattaagctatgcagcggctggtgtgaaggccctgcctttgcaggccgctggatgcaccggcagaccactgggctattacgccgacccaagtggttggggggctagaagcccgccacagtactgcggcaccaagagcggcagtgttcttccatgttggcccaactccgctgcagctgctgctagaatggccggggccaatccctacctgggtgaagaggcggaagggctcgccgccgagcgcagtcccctgcctcctggagccgcagaggatgctaagccaaaggacctgagtgactcctcgtggattgagacacccagcagcataaaatccattgacagctcggattctggtatttacgaacaagccaaacgccgtcgaattagcccagccgataccccagtctctgagtcaagtagccctctcaagtccgaagttctggcccagcgggactgtgagaaaaactgtgccaaagacatctccggttactacgggttctactcacatagctag

SEQ ID NO: 166408 - DNA, 1056 bp, Artificial Sequence
  derived and/or modified sequence
atgcaccccgacagccccaacaccggcgcccactggatgcggcaggaaatctcattcgggaaactgaaacttaccaacaacaagggagcaagtaataataacggtcaaatggtggtgctgcagagcttgcataaataccagccccgcctgcacgtcgtggaggtgaacgaggacggaacagaagatacatctcaaccaggacgtgttcagaccttcactttcccagaaacccagttcatcgctgtgactgcatatcagaacactgacatcacacaactaaagattgaccacaacccatttgctaaaggctttagagacaattacgatacaatttatactggctgtgacatggatcgagccggccctggacctgggactgaccgctcagtgccccatacaaacgggctcctcagcccacagcaagcagaagaccccggggccccatccccacagaggtggttcgtgacccccgccaataatagactggatttcgccgcctccgcctatgacaccgccaccgacttcgccggcaacgctgccacacttctgagttacgctgccgccggagtgaaagccctgccactccaggccgctggctgcaccggaagacccctgggctattacgcggatccctctggttggggggccagatctcctccacagtactgcggtacaaagtccggcagcgtattaccctgctggcccaatagcgcagctgccgccgcgcgcatggccggagctaacccctatctgggtgaggaggcagagggcctggccgccgaacggtctcctctgccgcccggtgccgccgaggatgcaaaacctaaggacttaagtgattcctcgtggatcgagacacctagttccatcaagtccatagattcttccgactccgggatctacgaacaggccaaacgccgccgtatttcccccgccgacaccccagtgagcgaaagctcatcacctctcaaatctgaggtcctggcacagagggactgtgaaaaaaattgtgccaaagatatatccgggtactacggattctattctcattcatag

SEQ ID NO: 166409 - DNA, 4009 bp, Artificial Sequence
  derived and/or modified sequence
gtcgctaccaggagccaggtgattatcctaattaatgtctatctaattaaattactgtcagcagctaaccaatggcaggagccgtttcatcggctgcacaagcagcaagatcaaaagtgagccttttctgattgctgcatagtgtcaattggccaatctcttctcccagggaaaaaaaaaagtaaatcaaacctttgagaagcatttgctggttgaagtgctttctgtctagtgagggggtctgtggatttctagtttatgataaataggactttaaaaaccagggacgggagggcgagtgttcaggttctagagctatgcagctggagcactgcctttctccttctatcatgctctccaagaaatttctcaatgtgagcagcagctacccacattcaggcggatccgagcttgtcttgcacgatcatcccattatctcgaccactgacaacctggagagaagttcacctttgaaaaaaattaccagggggatgacgaatcagtcagatacagacaattttcctgactccaaggactcaccaggggacgtccagagaagtaaactctctcctgtcttggacggggtctctgagcttcgtcacagtttcgatggctctgctgcagatcgctacctcctctctcagtccagccagccacagtctgcggccactgctcccagtgccatgttcccgtaccccggccagcacggaccggcgcaccccgccttctccatcggcagccctagccgctacatggcccaccacccggtcatcaccaacggagcctacaacagcctcctgtccaactcctcgccgcagggataccccacggccggctacccctacccacagcagtacggccactcctaccaaggagctccgttctaccagttctcctccacccagccggggctggtgcccggcaaagcacaggtgtacctgtgcaacaggcccctttggctgaaatttcaccggcaccaaacggagatgatcatcaccaaacagggaaggcgcatgtttccttttttaagttttaacatttctggtctcgatcccacggctcattacaatatttttgtggatgtgattttggcggatcccaatcactggaggtttcaaggaggcaaatgggttccttgcggcaaagcggacaccaatgtgcaaggaaatcgggtctatatgcatccggattcccccaacactggggctcactggatgcgccaagaaatctcttttggaaaattaaaacttacgaacaacaaaggagcttcaaataacaatgggcagatggtggttttacagtccttgcacaagtaccagccccgcctgcatgtggtggaagtgaacgaggacggcacggaggacactagccagcccggccgcgtgcagacgttcactttccctgagactcagttcatcgccgtcaccgcctaccagaacacggatattacacaactgaaaatagatcacaacccttttgcaaaaggatttcgggataattatgacacgatctacaccggctgtgacatggaccgcctgaccccctcgcccaacgactcgccgcgctcgcagatcgtgcccggggcccgctacgccatggccggctctttcctgcaggaccagttcgtgagcaactacgccaaggcccgcttccacccgggcgcgggcgcgggccccgggccgggtacggaccgcagcgtgccgcacaccaacgggctgctgtcgccgcagcaggccgaggacccgggcgcgccctcgccgcaacgctggtttgtgacgccggccaacaaccggctggacttcgcggcctcggcctatgacacggccacggacttcgcgggcaacgcggccacgctgctctcttacgcggcggcgggcgtgaaggcgctgccgctgcaggctgcaggctgcactggccgcccgctcggctactacgccgacccgtcgggctggggcgcccgcagtcccccgcagtactgcggcaccaagtcgggctcggtgctgccctgctggcccaacagcgccgcggccgccgcgcgcatggccggcgccaatccctacctgggcgaggaggccgagggcctggccgccgagcgctcgccgctgccgcccggcgccgccgaggacgccaagcccaaggacctgtccgattccagctggatcgagacgccctcctcgatcaagtccatcgactccagcgactcggggatttacgagcaggccaagcggaggcggatctcgccggccgacacgcccgtgtccgagagttcgtccccgctcaagagcgaggtgctggcccagcgggactgcgagaagaactgcgccaaggacattagcggctactatggcttctactcgcacagctaggccgcccctgcccgcccggccccgccgcggcccggacccccagccagcccctcacagctcttccccagctccgcctccccacactcctccttgcgcacccactcattttatttgaccctcgatggccgtctgcagcgaataagtgcaggtctccgagcgtgattttaaccttttttgcacagcagtctctgcaattagctcaccgaccttcaactttgctgtaaaccttttggttttcctacttactcttcttctgtggagttatcctcctacaattcccctccccctcgtctttctcttacctcctacttctctttcttgtaatgaaactcttcacctttaggagacctgggcagtcctgtcaggcagcagcgattccgacccgccaagtctcggcctccacattaaccataggatgttgactctagaacctggacccacccagcgcgtcctttcttatccccgagtggatggatggatggatggatggtagggatgttaataattttagtggaacaaagcctgtgaaatgattgtacatagtgttaatttattgtaacgaatggctagtttttattctcgtcaaggcacaaaaccagttcatgcttaacctttttttcctttcctttctttgcttttctttctctcctctcatactttctcttctctctcttttaattttcttgtgagataatattctaagaggctctagaaacatgaaatactcagtagtgatgggtttcccacttctcctcaatccgttgcatgaaataattactatgtgccctaatgcacacaaatagctaaggagaatccacccaaacacctttaaaggataggtgtctgttcataggcaagtcgattaagtggcatgatgcctgcaaagcaaagtcaactggagttgtatgttccccccaccttctaaatagaatagctcgacatcagcaatattattttgccttatttgtttttccccaaagtgccaaatccattactggtctgtgcaggtgccaaatatgctgacaaactgtttctgaatatctttcagtaccccttcacctttatatgctgtaaatctttgtaatgaatactctattaatgatatagatgactgaattgttggtaactatagtgtagtctagtgaagatgaattgtgtgagttgtatattttactgcattttagttttgaaaatgacttccccaccacctagaaacagctgaaatttgacttccttgggagaacactagcattaatgcaagtaagactgattttcccctaagtcttgttatatttgataaggagcattaatccccctggaaatagattagtaggatttctaatgttgtgtagcaaacctatacttttttgtatttaaaaattaatgtgaaatatgcatcatacacaatattcaatctagattccagtccatggggggatttttcctaataggaattcagggtctaaacgtgtgtatattttggctcttctgtaaatctaatgttgtgatttttatatttgtttcgttttgtctgtgaactgaataatttatacaagaacacactccattgagaaacgttttgttttttgctcgtttgtatcgtctgtgtataacaagtaaaataaacctggtaaaaacgctaa

SEQ ID NO: 166410 - DNA, 1454 bp, Artificial Sequence
  derived and/or modified sequence
tttgtggactggctcgagcgacttttaaaacgatcggccaatgacttctaaaaggaaacgagggggacagggggacagactgagctgcgagaagggggaggattatgcaaaagctattttaatcacccccagttaataggaagaaagaatggcctaaaaaagccccagttaatgggcttcatggtggagtaaggaaatcgggtctatatgcatccggattcccccaacactggggctcactggatgcgccaagaaatctcttttggaaaattaaaacttacgaacaacaaaggagcttcaaataacaatgggcagatggtggttttacagtccttgcacaagtaccagccccgcctgcatgtggtggaagtgaacgaggacggcacggaggacactagccagcccggccgcgtgcagacgttcactttccctgagactcagttcatcgccgtcaccgcctaccagaacacggatattacacaactgaaaatagatcacaacccttttgcaaaaggatttcgggataattatgacacgatctacaccggctgtgacatggaccgcctgaccccctcgcccaacgactcgccgcgctcgcagatcgtgcccggggcccgctacgccatggccggctctttcctgcaggaccagttcgtgagcaactacgccaaggcccgcttccacccgggcgcgggcgcgggccccgggccgggtacggaccgcagcgtgccgcacaccaacgggctgctgtcgccgcagcaggccgaggacccgggcgcgccctcgccgcaacgctggtttgtgacgccggccaacaaccggctggacttcgcggcctcggcctatgacacggccacggacttcgcgggcaacgcggccacgctgctctcttacgcggcggcgggcgtgaaggcgctgccgctgcaggctgcaggctgcactggccgcccgctcggctactacgccgacccgtcgggctggggcgcccgcagtcccccgcagtactgcggcaccaagtcgggctcggtgctgccctgctggcccaacagcgccgcggccgccgcgcgcatggccggcgccaatccctacctgggcgaggaggccgagggcctggccgccgagcgctcgccgctgccgcccggcgccgccgaggacgccaagcccaaggacctgtccgattccagctggatcgagacgccctcctcgatcaagtccatcgactccagcgactcggggatttacgagcaggccaagcggaggcggatctcgccggccgacacgcccgtgtccgagagttcgtccccgctcaagagcgaggtgctggcccagcgggactgcgagaagaactgcgccaaggacattagcggctactatggcttctactcgcacagctaggccgcccctgcccgcccggccccgccgcggcccggacccccagccagcccctcacagct

SEQ ID NO: 166411 - DNA, 1335 bp, Artificial Sequence
  derived and/or modified sequence
atcactggaggtttcaaggaggcaaatgggttccttgcggcaaagcggacaccaatgtgcaaggaaatcgggtctatatgcatccggattcccccaacactggggctcactggatgcgccaagaaatctcttttggaaaattaaaacttacgaacaacaaaggagcttcaaataacaatgggcagatggtggttttacagtccttgcacaagtaccagccccgcctgcatgtggtggaagtgaacgaggacggcacggaggacactagccagcccggccgcgtgcagacgttcactttccctgagactcagttcatcgccgtcaccgcctaccagaacacggatattacacaactgaaaatagatcacaacccttttgcaaaaggatttcgggataattatgacacgatctacaccggctgtgacatggaccgcgcgggccccgggccgggtacggaccgcagcgtgccgcacaccaacgggctgctgtcgccgcagcaggccgaggacccgggcgcgccctcgccgcaacgctggtttgtgacgccggccaacaaccggctggacttcgcggcctcggcctatgacacggccacggacttcgcgggcaacgcggccacgctgctctcttacgcggcggcgggcgtgaaggcgctgccgctgcaggctgcaggctgcactggccgcccgctcggctactacgccgacccgtcgggctggggcgcccgcagtcccccgcagtactgcggcaccaagtcgggctcggtgctgccctgctggcccaacagcgccgcggccgccgcgcgcatggccggcgccaatccctacctgggcgaggaggccgagggcctggccgccgagcgctcgccgctgccgcccggcgccgccgaggacgccaagcccaaggacctgtccgattccagctggatcgagacgccctcctcgatcaagtccatcgactccagcgactcggggatttacgagcaggccaagcggaggcggatctcgccggccgacacgcccgtgtccgagagttcgtccccgctcaagagcgaggtgctggcccagcgggactgcgagaagaactgcgccaaggacattagcggctactatggcttctactcgcacagctaggccgcccctgcccgcccggccccgccgcggcccggacccccacctccccacactcctccttgcgcacccactcattttatttgaccctcgatggccgtctgcagcgaataagtgcaggtctccgagcgtgattttaaccttttttgcacagcagtctctgcaattagctcaccgaccttcaactttgctgtaaaccttttgg

SEQ ID NO: 166412 - DNA, 2049 bp, Artificial Sequence
  derived and/or modified sequence
atgcagctcgaacattgcctgagcccaagtattatgctgagcaaaaagttccttaacgtctcgtctagttacccacacagtggtggctctgagctagtgctgcacgatcatcctattatcagcacgacagataatctggagcgtagctcgccccttaagaagatcacccggggaatgactaatcagtctgatactgataattttccagacagcaaagatagccccggagatgtacaacggtctaaactgtcaccagtgctcgatggcgtcagtgaattgcggcactcttttgacggcagtgccgcagatcgctacctgctgagtcagtcatcccagccacagagcgctgccaccgcgccttccgctatgtttccctatccaggtcaacatggaccagcacacccagctttctcaatcggcagcccttcacgctatatggctcatcatcccgttatcaccaatggcgcttacaactcgctgctgagtaacagcagtccacagggctatcccactgcaggctacccttacccccaacagtatggacacagttaccagggagcccctttctatcagttctcaagtacacagcccggtctcgttcctgggaaagcacaagtgtacctttgcaacagacccctatggctgaagttccacagacaccagaccgagatgatcattacaaagcaaggaagacggatgttccctttcctaagctttaatatatccggcctagatcccaccgctcattataacatctttgtggatgtaatcctcgccgatcctaatcactggcgttttcagggcggaaagtgggtgccctgcggtaaggcagataccaacgtgcagggcaaccgagtctacatgcatccggattctcccaatacgggggctcactggatgaggcaggagattagctttggaaaattaaagctgacaaataataagggggcatccaacaataatgggcagatggtcgtgctccagtctttgcacaagtaccaaccacggttgcacgtggtggaagtcaatgaagacggaacggaggatacctcccagcctggacgcgtgcagacatttaccttccccgagacacagttcattgctgttactgcctaccagaatactgacataacacagctgaagatcgaccacaacccattcgctaaaggatttagggacaattatgacaccatatatactggatgtgatatggatcggctgacaccatcccccaatgactcgccgagaagccagatcgtgcccggtgctcggtatgctatggctggttcctttctccaggatcagtttgtaagcaattacgctaaagctcgattccacccaggggctggagccggacccggtcccggtactgatagatctgtcccccacaccaatggtctgctctcacctcagcaagccgaagacccaggcgcaccctcacctcagaggtggtttgtgaccccagcaaataaccgcctcgacttcgcagcttcagcatacgatacggctaccgacttcgcgggaaacgccgctacattacttagctacgccgcagccggagtgaaggctttacccctgcaagctgcaggctgcaccgggcgaccactggggtactacgccgatccgtcggggtggggggcacgttcccccccacagtattgtgggaccaagagcggaagcgtactgccctgctggccaaacagcgcagcggcagcagctcgaatggcaggcgcaaacccttacttaggcgaggaagcagagggactggctgccgaacggtcacctctgccacctggtgctgcggaagacgccaagcctaaggacttgtctgattcgtcctggattgagactcctagctcaatcaagagcatcgatagcagcgatagcggaatttatgaacaggctaagcgtaggagaatctcgcccgcagatacccctgtcagtgagtcaagctcacccctgaaatccgaggtcctcgctcaaagggactgcgaaaagaactgtgctaaggacatctctggctactatgggttctattcgcacagctag

SEQ ID NO: 166413 - DNA, 1188 bp, Artificial Sequence
  derived and/or modified sequence
atgcaccccgattcacccaacaccggggctcattggatgaggcaggaaattagttttggcaagttgaaattaaccaataacaaaggggctagcaacaataacggacagatggtggtgctacagtcactgcacaaataccaacctcgcttgcacgttgtcgaggtgaatgaggatgggaccgaggacacctcccagcctggacgggtgcagacctttacttttcccgagacgcagttcattgccgtcacagcctaccagaacacggatattacacagctcaaaattgaccacaacccatttgccaaaggatttcgggacaactatgataccatttacactggttgtgacatggaccgcctgacaccttctcccaatgactcccctaggtctcagatcgtgcccggagctagatatgcgatggccggaagcttcctgcaggatcaattcgtctccaattatgccaaagcacgatttcatccaggggctggcgctggtcccggaccaggcaccgaccgatctgtgccccacaccaatggtctgctgagtccgcagcaagctgaagatccaggagcaccaagcccccagagatggttcgtcacaccggctaacaacaggcttgatttcgccgcttccgcctacgacacagctactgatttcgcaggcaacgccgcaacacttctctcctatgccgcagcaggggttaaagcactcccactgcaagctgctggttgcactggtagacccctggggtactatgctgacccgtccgggtggggcgctcgatccccaccacagtactgcggaactaagagcggttccgtgctgccgtgctggcctaacagtgccgctgcagcagcaagaatggcaggcgcaaacccctaccttggcgaggaggccgagggtttagcggctgagcgctcccctcttccacccggagctgcggaagacgcaaagccaaaggacttgtccgactccagctggattgaaactccatcaagcattaagtctattgactcgagtgattcgggcatctatgaacaggctaagagacggaggatttctccggctgacacacccgtctccgagtccagctcccctctcaaaagcgaagtactggcgcagcgcgactgcgaaaaaaattgtgccaaagacataagcgggtactacggcttttattcacactcctag

SEQ ID NO: 166414 - DNA, 1056 bp, Artificial Sequence
  derived and/or modified sequence
atgcaccccgattcccccaacaccggcgctcattggatgcggcaagagatatccttcggcaagctgaaactcaccaataacaagggggcttccaacaataatggtcagatggtggtccttcagtctctgcacaagtaccagccccgtttacacgtggttgaagtgaacgaggatgggacagaagacacatcgcagccaggcagagtccagactttcacattccctgaaactcagttcattgcagtgacagcttaccagaataccgacataacccagcttaagatagaccataacccttttgctaagggtttccgagataactacgatactatatatacgggttgtgatatggatcgggcaggtcccggtcctggaactgacagatcagtcccccacaccaacggcttgctgagtccgcagcaggcagaggatcctggcgcaccctcccctcagagatggttcgttacgcctgccaacaacagactggactttgccgcttccgcctacgacactgccaccgatttcgcaggcaacgccgctactctattgagctatgccgctgcgggtgtgaaagcattacctttacaggccgctggatgcaccggtcgacctcttggatattatgccgatccatctgggtggggcgcacggtcacctccacaatactgtgggacgaagtccgggtctgttttgccatgttggcccaacagcgctgctgcggcagcaaggatggccggagccaatccatacttgggagaagaggctgaaggactggcagctgagaggagccccttacctcctggagccgctgaagacgccaaaccaaaggacctcagtgacagctcctggatagaaactccgtccagcatcaaaagcatcgacagctccgattccggaatctacgagcaggcaaagaggcgcaggatctcccctgctgacactccagtgtctgagtctagctcacctctgaaatcggaggttctggctcaacgagactgcgagaagaattgtgcaaaggacataagcggctattatggattctacagtcacagttag

SEQ ID NO: 166415 - DNA, 2049 bp, Artificial Sequence
  derived and/or modified sequence
atgcagctggagcactgcctgagccccagcatcatgctgagcaagaagttcctgaacgtgagcagcagctacccccacagcggcggcagcgagctggtgctgcacgaccaccccatcatcagcaccaccgacaacctggagagaagcagccccctgaagaagatcaccagaggcatgaccaaccagagcgacaccgacaacttccccgacagcaaggacagccccggcgacgtgcagagaagcaagctgagccccgtgctggacggcgtgagcgagctgagacacagcttcgacggcagcgccgccgacagatacctgctgagccagagcagccagccccagagcgccgccaccgcccccagcgccatgttcccctaccccggccagcacggccccgcccaccccgccttcagcatcggcagccccagcagatacatggcccaccaccccgtgatcaccaacggcgcctacaacagcctgctgagcaacagcagcccccagggctaccccaccgccggctacccctacccccagcagtacggccacagctaccagggcgcccccttctaccagttcagcagcacccagcccggcctggtgcccggcaaggcccaggtgtacctgtgcaacagacccctgtggctgaagttccacagacaccagaccgagatgatcatcaccaagcagggcagaagaatgttccccttcctgagcttcaacatcagcggcctggaccccaccgcccactacaacatcttcgtggacgtgatcctggccgaccccaaccactggagattccagggcggcaagtgggtgccctgcggcaaggccgacaccaacgtgcagggcaacagagtgtacatgcaccccgacagccccaacaccggcgcccactggatgagacaggagatcagcttcggcaagctgaagctgaccaacaacaagggcgccagcaacaacaacggccagatggtggtgctgcagagcctgcacaagtaccagcccagactgcacgtggtggaggtgaacgaggacggcaccgaggacaccagccagcccggcagagtgcagaccttcaccttccccgagacccagttcatcgccgtgaccgcctaccagaacaccgacatcacccagctgaagatcgaccacaaccccttcgccaagggcttcagagacaactacgacaccatctacaccggctgcgacatggacagactgacccccagccccaacgacagccccagaagccagatcgtgcccggcgccagatacgccatggccggcagcttcctgcaggaccagttcgtgagcaactacgccaaggccagattccaccccggcgccggcgccggccccggccccggcaccgacagaagcgtgccccacaccaacggcctgctgagcccccagcaggccgaggaccccggcgcccccagcccccagagatggttcgtgacccccgccaacaacagactggacttcgccgccagcgcctacgacaccgccaccgacttcgccggcaacgccgccaccctgctgagctacgccgccgccggcgtgaaggccctgcccctgcaggccgccggctgcaccggcagacccctgggctactacgccgaccccagcggctggggcgccagaagccccccccagtactgcggcaccaagagcggcagcgtgctgccctgctggcccaacagcgccgccgccgccgccagaatggccggcgccaacccctacctgggcgaggaggccgagggcctggccgccgagagaagccccctgccccccggcgccgccgaggacgccaagcccaaggacctgagcgacagcagctggatcgagacccccagcagcatcaagagcatcgacagcagcgacagcggcatctacgagcaggccaagagaagaagaatcagccccgccgacacccccgtgagcgagagcagcagccccctgaagagcgaggtgctggcccagagagactgcgagaagaactgcgccaaggacatcagcggctactacggcttctacagccacagctag

SEQ ID NO: 166416 - DNA, 1188 bp, Artificial Sequence
  derived and/or modified sequence
atgcaccccgacagccccaacaccggcgcccactggatgagacaggagatcagcttcggcaagctgaagctgaccaacaacaagggcgccagcaacaacaacggccagatggtggtgctgcagagcctgcacaagtaccagcccagactgcacgtggtggaggtgaacgaggacggcaccgaggacaccagccagcccggcagagtgcagaccttcaccttccccgagacccagttcatcgccgtgaccgcctaccagaacaccgacatcacccagctgaagatcgaccacaaccccttcgccaagggcttcagagacaactacgacaccatctacaccggctgcgacatggacagactgacccccagccccaacgacagccccagaagccagatcgtgcccggcgccagatacgccatggccggcagcttcctgcaggaccagttcgtgagcaactacgccaaggccagattccaccccggcgccggcgccggccccggccccggcaccgacagaagcgtgccccacaccaacggcctgctgagcccccagcaggccgaggaccccggcgcccccagcccccagagatggttcgtgacccccgccaacaacagactggacttcgccgccagcgcctacgacaccgccaccgacttcgccggcaacgccgccaccctgctgagctacgccgccgccggcgtgaaggccctgcccctgcaggccgccggctgcaccggcagacccctgggctactacgccgaccccagcggctggggcgccagaagccccccccagtactgcggcaccaagagcggcagcgtgctgccctgctggcccaacagcgccgccgccgccgccagaatggccggcgccaacccctacctgggcgaggaggccgagggcctggccgccgagagaagccccctgccccccggcgccgccgaggacgccaagcccaaggacctgagcgacagcagctggatcgagacccccagcagcatcaagagcatcgacagcagcgacagcggcatctacgagcaggccaagagaagaagaatcagccccgccgacacccccgtgagcgagagcagcagccccctgaagagcgaggtgctggcccagagagactgcgagaagaactgcgccaaggacatcagcggctactacggcttctacagccacagctag

SEQ ID NO: 166417 - DNA, 1056 bp, Artificial Sequence
  derived and/or modified sequence
atgcaccccgacagccccaacaccggcgcccactggatgagacaggagatcagcttcggcaagctgaagctgaccaacaacaagggcgccagcaacaacaacggccagatggtggtgctgcagagcctgcacaagtaccagcccagactgcacgtggtggaggtgaacgaggacggcaccgaggacaccagccagcccggcagagtgcagaccttcaccttccccgagacccagttcatcgccgtgaccgcctaccagaacaccgacatcacccagctgaagatcgaccacaaccccttcgccaagggcttcagagacaactacgacaccatctacaccggctgcgacatggacagagccggccccggccccggcaccgacagaagcgtgccccacaccaacggcctgctgagcccccagcaggccgaggaccccggcgcccccagcccccagagatggttcgtgacccccgccaacaacagactggacttcgccgccagcgcctacgacaccgccaccgacttcgccggcaacgccgccaccctgctgagctacgccgccgccggcgtgaaggccctgcccctgcaggccgccggctgcaccggcagacccctgggctactacgccgaccccagcggctggggcgccagaagccccccccagtactgcggcaccaagagcggcagcgtgctgccctgctggcccaacagcgccgccgccgccgccagaatggccggcgccaacccctacctgggcgaggaggccgagggcctggccgccgagagaagccccctgccccccggcgccgccgaggacgccaagcccaaggacctgagcgacagcagctggatcgagacccccagcagcatcaagagcatcgacagcagcgacagcggcatctacgagcaggccaagagaagaagaatcagccccgccgacacccccgtgagcgagagcagcagccccctgaagagcgaggtgctggcccagagagactgcgagaagaactgcgccaaggacatcagcggctactacggcttctacagccacagctag

SEQ ID NO: 166418 - protein, 504 aa, Artificial Sequence
  derived and/or modified sequence
MPTVEELYRNYGILADATEQVGQHKDAYQVILDGVKGGTKEKRLAAQFIPKFFKHFPELADSAINAQLDLCEDEDVSIRRQAIKELPQFATGENLPRVADILTQLLQTDDSAEFNLVNNALLSIFKMDAKGTLGGLFSQILQGEDIVRERAIKFLSTKLKTLPDEVLTKEVEELILTESKKVLEDVTGEEFVLFMKILSGLKSLQTVSGRQQLVELVAEQADLEQTFNPSDPDCVDRLLQCTRQAVPLFSKNVHSTRFVTYFCEQVLPNLGTLTTPVEGLDIQLEVLKLLAEMSSFCGDMEKLETNLRKLFDKLLEYMPLPPEEAENGENAGNEEPKLQFSYVECLLYSFHQLGRKLPDFLTAKLNAEKLKDFKIRLQYFARGLQVYIRQLRLALQGKTGEALKTEENKIKVVALKITNNINVLIKDLFHIPPSYKSTVTLSWKPVQKVEIGQKRASEDTTSGSPPKKSSAGPKRDARQIYNPPSGKYSSNLGNFNYERSLQGK

SEQ ID NO: 166419 - DNA, 1515 bp, Artificial Sequence
  derived and/or modified sequence
atgcccactgttgaggaactgtaccgcaactacggtattctcgccgatgcaacagagcaggtgggtcagcataaggatgcgtaccaggtgatcctcgacggggtcaagggcggcaccaaagaaaagagactggccgcccagttcatacctaagttcttcaaacacttcccagaacttgccgacagcgctattaatgcccagctcgatctgtgcgaggacgaagatgtgtcaattagaaggcaagcgatcaaagaactgccccaatttgctacgggcgaaaaccttcctagagttgcagatatcttaactcagcttttgcagactgatgactctgcggaatttaatctggtcaataacgctcttctctccatcttcaagatggatgcaaaaggtacactggggggccttttttcccagattttgcagggtgaagatatcgtgagagagcgagctatcaagtttctgagcaccaagttgaaaaccctccccgatgaggttctgactaaggaggtggaggagttgatattgactgagtcgaagaaggtcctggaggacgtgacaggagaggagttcgttttgttcatgaagatcttgtcgggtctgaagtctctgcaaacagtgagcgggcgtcagcagctggtggaactagtggctgaacaggctgatctggagcagaccttcaatccatccgatccagactgcgtggacaggcttctccagtgtaccagacaagcagtgcccttgttttcgaaaaacgttcatagcacccggtttgtgacctacttttgtgagcaggtcctgcctaatctgggaacactgaccacgcccgtggaggggctggacatacagctcgaggtgctgaagctgctggctgagatgagctctttttgtggggatatggaaaagttggaaacaaatttacgaaagctgtttgataaactgctggagtatatgccattgcccccggaggaggcggaaaacggcgagaacgctggtaatgaagagcctaagttgcagttttcttatgtggaatgcctgttatatagctttcaccagttaggacggaaacttcccgacttcctgactgccaagctcaacgcagaaaagctgaaagactttaaaattcgcctgcagtactttgctaggggcctgcaggtttacatcagacagctgagactcgccctgcagggaaagactggcgaggccctcaagaccgaagaaaataagatcaaggtggttgcacttaagatcactaacaacattaatgtgcttatcaaagatctgttccacataccaccatcctacaagtccaccgtgaccctgtcctggaaacccgttcagaaagtggaaattgggcagaagcgagcctccgaagatacaactagtggcagcccccccaagaagtcatccgccggcccaaagcgcgacgctagacagatttacaacccacccagcgggaagtatagcagtaatctgggcaatttcaattacgagaggagccttcagggaaagtag

SEQ ID NO: 166420 - DNA, 1515 bp, Artificial Sequence
  derived and/or modified sequence
atgcccaccgtggaggagctgtacagaaattatggcatcctggctgatgccacagagcaggtgggccagcacaaggatgcctaccaggtgatcctggatggagtgaagggcggcaccaaggagaagaggctggccgcccagttcatccccaagttcttcaagcacttccctgagctggccgacagcgccatcaatgcccagctggacctgtgtgaagatgaagatgtgtccatccggcggcaggccatcaaggagctgccccagtttgccactggagagaacctgccccgggtggccgacatcctgacccagctgctgcagacagatgattctgctgagttcaacctggtgaacaatgccctgctgagcatcttcaagatggatgccaagggcaccctgggcggcctcttcagccagatcctgcagggcgaggacatcgtgcgggagcgggccatcaagttcctgagcaccaagctgaagaccctgcctgatgaggtgctgaccaaggaggtggaggagctgatcctgacagagagcaagaaggtgctggaggatgtgactggagaggagtttgtgctcttcatgaagatcctgagcggcctgaagagcctgcagacagtgtctggccggcagcagctggtggagctggtggccgagcaggccgacctggagcagaccttcaaccccagcgaccctgactgtgtggaccggctgctgcagtgcacccggcaggccgtgcccctcttcagcaagaatgtgcacagcaccaggtttgtgacctacttctgtgagcaggtgctgcccaacctgggcaccctgaccacccctgtggagggcctggacatccagctggaggtgctgaagctgctggccgagatgagcagcttctgtggggacatggagaagctggagaccaacctgaggaagctgtttgacaagctgctggagtacatgcccctgcccccagaggaggccgagaatggagaaaatgctggaaatgaggagcccaagctgcagttctcctatgtggagtgcctgctgtacagcttccaccagctgggcaggaagctgcctgacttcctgacagccaagctgaatgctgagaagctgaaggacttcaagatccggctgcagtactttgcccggggcctgcaggtgtacatccggcagctgcggctggccctgcagggcaagacaggagaggccctgaagacagaggagaacaagatcaaggtggtggccctgaagatcaccaacaacatcaacgtgctgatcaaggacctcttccacatcccccccagctacaagagcacagtgaccctgtcctggaagcctgtgcagaaggtggagatcggccagaagagggccagcgaggacaccaccagcggcagcccccccaagaagagcagcgctggccccaagagagatgcccggcagatctacaaccccccatctgggaagtacagcagcaacctgggcaacttcaactatgaaagaagcctgcagggcaagtag

SEQ ID NO: 166421 - DNA, 1515 bp, Artificial Sequence
  derived and/or modified sequence
atgcccaccgtggaggagctgtaccggaactacggcatcctggccgacgctaccgaacaggtggggcagcacaaggacgcttaccaggtgattctcgacggtgtgaaggggggaactaaggagaagcgcctcgctgcgcagttcatccccaaattcttcaagcacttccctgagctggccgactccgctatcaacgcccagttggacctgtgcgaagatgaagatgtgtctatacggcgccaggctattaaggaactgcctcagtttgcgaccggcgaaaatctaccaagggtagcagacatcttgacgcagttgctgcagactgacgacagtgccgagtttaacctcgttaataatgcgttgctgtccatttttaagatggacgccaagggtacgctgggtggattgtttagccaaatactgcagggcgaagatatcgtgagagagcgcgcaataaagttcctctccactaagctcaagaccctcccagatgaagtgctcaccaaagaggttgaagaactgattctcacagaatctaaaaaggtgctggaagatgtgactggggaggagtttgtgctgtttatgaaaatcctgtctgggctgaagtccctgcaaactgtgagcggccgtcaacaactagtcgaacttgtggctgaacaggctgatctagaacagaccttcaacccatcagatcccgattgcgtagacagactcctccaatgcactcgtcaggctgttccactgttctccaagaacgtgcactctacccgcttcgtgacctatttttgcgagcaagtactcccgaatctgggcacactgaccacgcctgtggaaggactagatatacaactagaggtgcttaaactgcttgccgaaatgtcctctttctgcggcgacatggaaaaactggagacaaacttacggaagttgtttgataagctcttagagtatatgcccctgccaccagaagaagctgagaatggtgagaatgccggtaatgaagagcctaaattgcagttttcctatgtcgaatgtctgctgtattcattccaccagctcggacgcaagctccccgactttctgaccgccaagcttaacgccgagaaactcaaggacttcaaaattaggctacagtattttgcccgcggcttgcaggtctatattcggcagctgcggctggcgcttcaagggaaaaccggtgaggctcttaagacagaggagaacaaaattaaagtggtagcactgaaaatcacaaacaacatcaatgtgcttatcaaggatctgtttcacatcccacctagctataagtcaacagtaacattaagctggaaacctgtgcaaaaagttgagatcggacagaaacgggcctctgaagataccaccagcggtagtccgcctaaaaagtcgagcgccggccctaaaagagacgcccggcagatttacaatcccccgagcggcaagtattcaagcaatcttggaaactttaactatgagaggtctctacagggtaagtag

SEQ ID NO: 166422 - DNA, 1515 bp, Artificial Sequence
  derived and/or modified sequence
atgcccacagtcgaagagctttatcgaaactacggcatcctggcagatgcaaccgaacaggtgggtcaacacaaggacgcatatcaggttatcctcgacggcgtcaagggcggtactaaagagaagaggctcgcggctcagttcatccctaagtttttcaagcattttccagaattggcagattctgctatcaacgcacaactggacctctgcgaagatgaagacgtgtctatcaggaggcaggctattaaggagctcccccaattcgcaacaggagagaatctgccgagagtagcagatatactcacacaactgctgcaaaccgacgatagtgcagagtttaatttagtgaacaacgccctactgtccattttcaagatggacgctaaggggactcttggtggcctgttttcgcagatactgcagggcgaggatatcgtccgagaaagggctatcaaatttctgtccacaaagctgaagactctgccagacgaggtactgacaaaagaagtagaagagttaatcctcacagagagcaaaaaagtgcttgaggacgtgaccggagaagaattcgtgctgtttatgaaaattctatctgggctgaaatcgctgcagaccgtcagtgggcgtcaacagctagtcgagctggtcgccgagcaagccgatttggagcagacatttaaccccagcgacccagactgcgtagatcggctgttgcaatgtacgcgtcaggccgttccgctattttctaaaaatgttcattccacccgcttcgtaacttatttctgtgaacaagtgttacctaacctaggcactctgaccactcccgtggagggcctcgacattcagctcgaggtccttaagctgctcgctgagatgtcatcattttgtggagacatggagaaactcgagacaaacctcaggaaactttttgacaaactgctggagtacatgcccctccctccggaagaggcggaaaatggcgaaaacgccggtaatgaagagcccaaactacagttctcttacgtcgaatgccttttgtatagctttcatcaactgggaagaaaactacctgatttcctgactgcaaaactaaacgccgaaaaactcaaggacttcaagatccggctgcaatacttcgcccgaggtctgcaggtctacataaggcagctgaggctcgcactgcagggaaaaactggggaggccttgaaaacagaggaaaataaaattaaggtagtggctctcaagatcaccaataatatcaacgtccttatcaaagatcttttccacatcccaccatcatacaaatcgactgttacgctatcctggaaacctgtacagaaggtagagataggccagaaacgggcaagtgaagatacaacctctggctccccacccaaaaagagttccgccggaccaaagagagatgccagacaaatctacaatcctccatctggaaaatattcatctaaccttggaaattttaactacgaaagaagcctccaagggaagtag

SEQ ID NO: 166423 - DNA, 3714 bp, Artificial Sequence
  derived and/or modified sequence
gcggctgcactggcggcagctggaggtgtaatagtgcgggtagtgggtttggagaagttccgaggcggcggtggcgccggtcaggacaaggatagcggaaccgggccctgggcttgtcgctcaccatgccgacagtagaggagctttaccgcaattatggcatcctggccgatgccacggagcaagtgggccagcataaagatgcctatcaagtgatattggatggtgtgaaaggtggtactaaggaaaagcgattagcagctcaatttattccgaaattctttaagcattttccagaattggctgattctgctatcaatgcacagttagacctctgtgaggatgaagatgtatctattcgacgtcaagcaattaaagaactgcctcaatttgccactggagaaaatcttcctcgagtggcagatatactaacgcaacttttgcagacagatgactctgcagaatttaacctagtgaacaatgccctattaagtatatttaaaatggatgcaaaagggactttaggtgggttgttcagccaaatacttcaaggagaggacattgttagagaacgagcaattaaattcctttctacaaaacttaagactttaccagatgaagtcttaacaaaggaagtggaagagcttatactaactgaatccaaaaaggtcctagaagatgtgactggtgaagaatttgttctatttatgaagatactgtctgggttaaaaagcttacagacagtgagtggaagacagcaacttgtagagttggtggctgaacaggccgacctagaacagaccttcaatccctcggatcctgactgtgtggacaggctcttacagtgcactcggcaggcagtacccctcttctctaaaaatgtccattccacaaggtttgtgacatatttctgtgagcaggttctccctaacctcggtaccttgactaccccagtggaaggtcttgatatacagttggaggtattgaaattgttggcggagatgagttcattttgtggtgacatggaaaaactagaaacaaatttaaggaaactatttgataagttattggaatacatgcccctccctccagaagaggcagaaaatggagagaatgctggtaatgaagaacccaagctacagttcagttatgtggaatgtttgttgtacagttttcaccagttgggccgaaaacttccagatttcttaacagccaaactgaatgcagaaaagctcaaagatttcaaaatcaggctgcagtactttgcacggggcctgcaagtttatatcagacaacttcgcttagctctccagggtaaaacgggtgaggccttaaaaacagaagagaacaagattaaagtcgttgcattgaaaataacaaacaatatcaatgttttaatcaaggatctcttccacattcctccttcttataagagcacagtaacactatcctggaaacctgtacaaaaggttgagattgggcaaaagagagccagtgaagatacaacttcaggttcaccacccaagaaatcttcagcaggaccaaaaagagatgccaggcagatttataaccctcccagtgggaaatatagcagcaatttgggcaactttaattatgagaggagccttcaggggaagtagaggtggccgaggttggggcacacgaggaaatcgtagtcggggaagactctactgaataagacatcagcattcttcagcattgtcatgagcttaatatacttaaattctactactcattggattgccggggatgtccctttaaacagactgctgccttcagctaaaaacttaatgttctttatacctttgtatgtatgacctacttttgtaacagaccatggttgtgtccaaggtaaaaccacagtgatatttttggatgctttgtctgcaatcttgacttgtttttgcagtatcattattcagacttcaaattgtgaatcttttaaacatcttgataatttgttgttgagagctgttcattctaaaatgtaatgaaattcagtctagttctgctgataaagatcatcagttttgaaaggttactgattttcctcttccctcttagttttttacccaatatatggagaagagtaatggtcaatcttaacattttgttttaattgtttaataaagctgctgggcagtggtgcagcattcctacctagtgtcataaaagcaaaatacttacatagctttcttaaaatataggaatgacattacatttttaggagaaagtaagttgctttgcaccgcctacttaattcttttccatatattgtgatacaaacttttgaatatggaatcttactatttgaatagaaatgtgtatgtataatatacatacatacataagcatatatgtgtgtgtgtgtgtgtatatatatatatatgcatgctgtgaaacttgactacacaacataaatcactttttaaattccaggaacgggtagtctgacacggtgattatccttttgaggctgaatccgttattaacttgttatttaggtttttactcccagtagcaagggattctaagttagttgcacttacatgattattgttatttaaaactaagaataaaggctgcattttcaaagataaattggaattgctgttggtgaaataacaaccaaaatactgaatctgatgtacatacaggtttctacaggaagagatggtataatttacaatttggagatttaataaccagggctacccagaaaaagtgacttgataacatggtaccaataagtaagggatgctctctcggtttgcttttgccactttcaagattttaacttctcaggttattaatcaaaattattgtataagttagccaatagaatttttaggttaaaacaacagatggggggtttgtggagtgtttaatgtcatgggcatttttagtaggatagaccctttgttctgcatttgaatgtttcgtatatttttgtttcacagttaatcttccctccccaagtttgctattcaaatcaactgcctgaatgacatttctagtagtctgatgtatttttctgaggaatagtttgtgattccaatgcaggtgtcttcattaccattacctctacactgcagaagaagcaaaactcctttattagaattactgcacatgtgtatggggaaaatagttctgaaaggctagaatgatacaagtgagcaaaagttggtcagcttggctatggagtggtggcaataatctctaaacattccaaaagaccatgagctgaacctaaactcccttggaatctgaacaaaggaatataaaattgccatttgaaaactgaccagctaatctggacctcagagatagatcagccagtggcccaaagccatttcaagtacagaaattatagagactacagctaaataaatttgaacattaaatataattttaccactttttgtctttataagcatatttgtaaactcagaactgagcagaagtgactttactttctcaagtttgatactgagttgactgttcccttatccctcacccttccccttccctttcctaaggcaatagtgcacaacttaggttatttttgcttccgaatttgaatgaaaaacttaatgccatggatttttttcttttgcaagacacctgtttatcatcttgtttaaatgtaaatgtccccttatgcttttgaaataaatttccttttgtaatttt

SEQ ID NO: 166424 - DNA, 1515 bp, Artificial Sequence
  derived and/or modified sequence
atgcccaccgtggaggagctgtacagaaactacggcatcctggccgacgccaccgagcaggtgggccagcacaaggacgcctaccaggtgatcctggacggcgtgaagggcggcaccaaggagaagagactggccgcccagttcatccccaagttcttcaagcacttccccgagctggccgacagcgccatcaacgcccagctggacctgtgcgaggacgaggacgtgagcatcagaagacaggccatcaaggagctgccccagttcgccaccggcgagaacctgcccagagtggccgacatcctgacccagctgctgcagaccgacgacagcgccgagttcaacctggtgaacaacgccctgctgagcatcttcaagatggacgccaagggcaccctgggcggcctgttcagccagatcctgcagggcgaggacatcgtgagagagagagccatcaagttcctgagcaccaagctgaagaccctgcccgacgaggtgctgaccaaggaggtggaggagctgatcctgaccgagagcaagaaggtgctggaggacgtgaccggcgaggagttcgtgctgttcatgaagatcctgagcggcctgaagagcctgcagaccgtgagcggcagacagcagctggtggagctggtggccgagcaggccgacctggagcagaccttcaaccccagcgaccccgactgcgtggacagactgctgcagtgcaccagacaggccgtgcccctgttcagcaagaacgtgcacagcaccagattcgtgacctacttctgcgagcaggtgctgcccaacctgggcaccctgaccacccccgtggagggcctggacatccagctggaggtgctgaagctgctggccgagatgagcagcttctgcggcgacatggagaagctggagaccaacctgagaaagctgttcgacaagctgctggagtacatgcccctgccccccgaggaggccgagaacggcgagaacgccggcaacgaggagcccaagctgcagttcagctacgtggagtgcctgctgtacagcttccaccagctgggcagaaagctgcccgacttcctgaccgccaagctgaacgccgagaagctgaaggacttcaagatcagactgcagtacttcgccagaggcctgcaggtgtacatcagacagctgagactggccctgcagggcaagaccggcgaggccctgaagaccgaggagaacaagatcaaggtggtggccctgaagatcaccaacaacatcaacgtgctgatcaaggacctgttccacatcccccccagctacaagagcaccgtgaccctgagctggaagcccgtgcagaaggtggagatcggccagaagagagccagcgaggacaccaccagcggcagcccccccaagaagagcagcgccggccccaagagagacgccagacagatctacaacccccccagcggcaagtacagcagcaacctgggcaacttcaactacgagagaagcctgcagggcaagtag

SEQ ID NO: 166425 - protein, 646 aa, Artificial Sequence
  derived and/or modified sequence
MSKGPAVGIDLGTTYSCVGVFQHGKVEIIANDQGNRTTPSYVAFTDTERLIGDAAKNQVAMNPTNTVFDAKRLIGRRFDDAVVQSDMKHWPFMVVNDAGRPKVQVEYKGETKSFYPEEVSSMVLTKMKEIAEAYLGKTVTNAVVTVPAYFNDSQRQATKDAGTIAGLNVLRIINEPTAAAIAYGLDKKVGAERNVLIFDLGGGTFDVSILTIEDGIFEVKSTAGDTHLGGEDFDNRMVNHFIAEFKRKHKKDISENKRAVRRLRTACERAKRTLSSSTQASIEIDSLYEGIDFYTSITRARFEELNADLFRGTLDPVEKALRDAKLDKSQIHDIVLVGGSTRIPKIQKLLQDFFNGKELNKSINPDEAVAYGAAVQAAILSGDKSENVQDLLLLDVTPLSLGIETAGGVMTVLIKRNTTIPTKQTQTFTTYSDNQPGVLIQVYEGERAMTKDNNLLGKFELTGIPPAPRGVPQIEVTFDIDANGILNVSAVDKSTGKENKITITNDKGRLSKEDIERMVQEAEKYKAEDEKQRDKVSSKNSLESYAFNMKATVEDEKLQGKINDEDKQKILDKCNEIINWLDKNQTAEKEEFEHQQKELEKVCNPIITKLYQSAGGMPGGMPGGFPGGGAPPSGGASSGPTIEEVD

SEQ ID NO: 166426 - protein, 627 aa, Artificial Sequence
  derived and/or modified sequence
MSKGPAVGIDLGTTYSCVGVFQHGKVEIIANDQGNRTTPSYVAFTDTERLIGDAAKNQVAMNPTNTVFDAKRLIGRRFDDAVVQSDMKHWPFMVVNDAGRPKVQVEYKGETKSFYPEEVSSMVLTKMKEIAEAYLGKATKDAGTIAGLNVLRIINEPTAAAIAYGLDKKVGAERNVLIFDLGGGTFDVSILTIEDGIFEVKSTAGDTHLGGEDFDNRMVNHFIAEFKRKHKKDISENKRAVRRLRTACERAKRTLSSSTQASIEIDSLYEGIDFYTSITRARFEELNADLFRGTLDPVEKALRDAKLDKSQIHDIVLVGGSTRIPKIQKLLQDFFNGKELNKSINPDEAVAYGAAVQAAILSGDKSENVQDLLLLDVTPLSLGIETAGGVMTVLIKRNTTIPTKQTQTFTTYSDNQPGVLIQVYEGERAMTKDNNLLGKFELTGIPPAPRGVPQIEVTFDIDANGILNVSAVDKSTGKENKITITNDKGRLSKEDIERMVQEAEKYKAEDEKQRDKVSSKNSLESYAFNMKATVEDEKLQGKINDEDKQKILDKCNEIINWLDKNQTAEKEEFEHQQKELEKVCNPIITKLYQSAGGMPGGMPGGFPGGGAPPSGGASSGPTIEEVD

SEQ ID NO: 166427 - protein, 500 aa, Artificial Sequence
  derived and/or modified sequence
MSKGPAVGIDLGTTYSCVGVFQHGKVEIIANDQGNRTTPSYVAFTDTERLIGDAAKNQVAMNPTNTVFDAKRLIGRRFDDAVVQSDMKHWPFMVVNDAGRPKHKKDISENKRAVRRLRTACERAKRTLSSSTQASIEIDSLYEGIDFYTSITRARFEELNADLFRGTLDPVEKALRDAKLDKSQIHDIVLVGGSTRIPKIQKLLQDFFNGKELNKSINPDEAVAYGAAVQAAILSGDKSENVQDLLLLDVTPLSLGIETAGGVMTVLIKRNTTIPTKQTQTFTTYSDNQPGVLIQVYEGERAMTKDNNLLGKFELTGIPPAPRGVPQIEVTFDIDANGILNVSAVDKSTGKENKITITNDKGRLSKEDIERMVQEAEKYKAEDEKQRDKVSSKNSLESYAFNMKATVEDEKLQGKINDEDKQKILDKCNEIINWLDKNQTAEKEEFEHQQKELEKVCNPIITKLYQSAGGMPGGMPGGFPGGGAPPSGGASSGPTIEEVD

SEQ ID NO: 166428 - protein, 410 aa, Artificial Sequence
  derived and/or modified sequence
MVNHFIAEFKRKHKKDISENKRAVRRLRTACERAKRTLSSSTQASIEIDSLYEGIDFYTSITRARFEELNADLFRGTLDPVEKALRDAKLDKSQIHDIVLVGGSTRIPKIQKLLQDFFNGKELNKSINPDEAVAYGAAVQAAILSGDKSENVQDLLLLDVTPLSLGIETAGGVMTVLIKRNTTIPTKQTQTFTTYSDNQPGVLIQVYEGERAMTKDNNLLGKFELTGIPPAPRGVPQIEVTFDIDANGILNVSAVDKSTGKENKITITNDKGRLSKEDIERMVQEAEKYKAEDEKQRDKVSSKNSLESYAFNMKATVEDEKLQGKINDEDKQKILDKCNEIINWLDKNQTAEKEEFEHQQKELEKVCNPIITKLYQSAGGMPGGMPGGFPGGGAPPSGGASSGPTIEEVD

SEQ ID NO: 166429 - DNA, 1941 bp, Artificial Sequence
  derived and/or modified sequence
atgagcaagggacccgcagtgggcattgatctcggaactacatactcctgtgtgggggtgttccagcacggaaaagttgaaatcattgctaatgaccagggcaaccgcacgactccatcctacgtggcatttacagatactgagcgacttattggggatgctgctaagaaccaggtggccatgaatccgaccaacacagtgttcgacgcaaagcggctcatcggtcggcgattcgacgacgccgtagtgcagtctgacatgaagcattggccattcatggtggtgaatgatgctggaagacctaaagttcaggtagagtataagggagagacgaaaagcttctatcctgaggaagtttcctcgatggtgttgactaagatgaaggagatcgcagaggcctacctcggaaaaactgtcaccaacgctgtggtgactgtgccagcatacttcaacgatagccagcggcaggccacgaaagacgcagggacaattgcaggtctgaacgtgcttagaatcatcaacgagcccaccgcagcagctatagcttacggacttgataaaaaggttggagcagagcggaatgtcctgattttcgacctgggagggggcacctttgacgtgtcaattcttacaatagaggacgggatatttgaagttaaatctacagcgggcgacacgcacctgggcggagaggattttgataaccggatggtgaatcactttattgctgaatttaagagaaagcataaaaaagatatctctgagaacaagcgagcggtcagaaggttgagaacagcttgtgaacgggctaaaagaacgctgagctctagcacccaagctagcatcgaaatcgattctctttacgagggtatagatttttacacaagcatcacaagggctcgattcgaggagctcaacgctgaccttttccgcggtacccttgatccagtggagaaagctcttagggatgcaaagctggacaagtcgcagatccacgacatcgttctggtcggggggtccaccagaatcccaaagatccagaaacttctgcaggattttttcaacgggaaggaactgaacaagagcatcaatccagacgaggcagtcgcttatggtgccgcggtacaggccgctatcctgtctggagataaatcagagaatgtacaggatctcctcctgttggacgtcaccccactgtctctggggatagagacagccggcggggtgatgaccgttcttattaaacgaaataccacaataccaacaaagcagactcagacgttcacaacttatagcgacaaccagcccggagtcctgatccaggtctatgaaggagagcgcgccatgactaaagacaataatctcctgggcaagttcgaactgactgggatccctcccgccccacggggtgttccacagatcgaagtcacctttgacatcgatgctaacggaattttaaatgtgtcagcagttgacaaaagtacaggcaaggagaataaaattacaatcactaacgacaagggccgactttccaaggaggatatcgagaggatggtgcaggaagccgagaagtataaagccgaagacgaaaagcagagagacaaggtttctagtaaaaattcgttagaatcatatgccttcaacatgaaagcgaccgtggaggatgaaaagctgcaggggaaaattaatgatgaagataaacaaaaaattctagacaagtgtaatgaaataataaattggctggacaaaaaccagaccgccgaaaaggaggaatttgagcaccagcagaaggaattggagaaagtgtgtaaccctatcattacaaagttataccagtcagctggcggcatgcccggcggcatgccaggaggcttccctggcggaggcgcgcccccttcgggtggagcttcttcagggccaactatcgaggaggtcgactag

SEQ ID NO: 166430 - DNA, 1941 bp, Artificial Sequence
  derived and/or modified sequence
atgagcaaaggacctgctgtgggcatcgacctgggcaccacctacagctgtgtgggcgtcttccagcacggcaaggtggagatcatcgccaatgaccagggcaacagaaccacccccagctatgtggccttcacagacacagagcggctgattggagatgctgccaagaaccaggtggccatgaaccccaccaacacagtgtttgatgccaagaggctcatcggccgccgctttgatgatgctgtggtgcagagcgacatgaagcactggcccttcatggtggtgaatgatgctggccggcccaaggtgcaggtggagtacaagggggagaccaagagcttctacccagaggaggtgtcctccatggtgctgaccaagatgaaggagattgctgaggcctacctgggcaagacagtgaccaatgctgtggtgacagtgcctgcctacttcaatgacagccagaggcaggccaccaaggatgctggcaccatcgccggcctgaatgtgctgcgcatcatcaatgagcccacagctgctgccatcgcctacggcctggacaagaaggtgggcgctgagagaaatgtgctgatctttgacctgggcggcggcacctttgatgtgtccatcctgaccattgaagatggcatctttgaggtgaagagcacagctggggacacccacctgggcggagaagattttgacaacaggatggtgaaccacttcatcgccgagttcaagaggaagcacaagaaggacatcagcgagaacaagagagctgtgcggcggctgaggacagcctgtgagcgggccaagaggaccctgagcagcagcacccaggccagcattgaaattgacagcctgtatgagggcatcgacttctacaccagcatcacccgggccaggtttgaggagctgaatgctgacctcttccggggcaccctggaccctgtggagaaggccctgagagatgccaagctggacaagagccagatccatgacatcgtgctggtgggcggcagcacccgcatccccaagatccagaagctgctgcaggacttcttcaacgggaaggagctgaacaagagcatcaacccagatgaggccgtggcctatggagctgctgtgcaggccgccatcctgagcggggacaagtcagaaaatgtgcaggacctgctgctgctggatgtgacccccctgagcctgggcattgaaacagctgggggcgtgatgacagtgctgatcaagaggaacaccaccatccccaccaagcagacccagaccttcaccacctacagcgacaaccagcccggggtgctgatccaggtgtatgaaggagagcgggccatgaccaaggacaacaacctgctgggcaagtttgagctgaccggcatccccccagccccccggggcgtgccccagatcgaggtgacctttgatattgatgccaacggcatcctgaatgtgtctgctgtggacaagagcacaggcaaggagaacaagatcaccatcaccaatgacaagggccgcctgagcaaagaagatattgaaagaatggtgcaggaggccgagaagtacaaggccgaggatgagaagcagagggacaaggtgagcagcaagaacagcctggagagctatgccttcaacatgaaggccaccgtggaggatgagaagctgcagggcaagatcaatgatgaggacaagcagaagatcctggacaagtgcaatgagatcatcaactggctggacaagaaccagacagctgagaaggaggagtttgagcaccagcagaaggagctggagaaggtgtgcaaccccatcatcaccaagctgtaccagagcgctgggggcatgcctgggggcatgcctgggggcttccctgggggcggggcccctccttctggaggagccagcagcggccccaccatcgaggaggtggactag

SEQ ID NO: 166431 - DNA, 1941 bp, Artificial Sequence
  derived and/or modified sequence
atgagcaagggccccgccgtgggcatcgacctgggcaccacctactcctgtgtgggtgtcttccagcacggaaaagtcgagattatcgccaacgaccagggtaaccgcaccactccatcttacgtggcttttacggacactgaaagacttatcggagatgcggcgaagaatcaagtggccatgaacccaacaaacactgtattcgacgccaaaaggctgattgggcggcgctttgacgacgcagttgtccaaagcgacatgaaacattggccatttatggttgtgaacgacgcaggaaggccaaaggtgcaggtagagtataaaggggagactaagagtttttatcccgaagaggtgtcttcaatggtgctcactaaaatgaaggagatcgccgaagcatacctgggcaagaccgttacaaacgccgtcgtgaccgttcccgcctatttcaacgattcccaacgccaggcgacaaaggatgcaggtactatcgcagggctcaatgtgctgagaataataaatgaaccaacagcggccgcgatcgcatatggtctggacaagaaagtcggcgccgagagaaatgtgctgattttcgacctcggcggcggtactttcgacgtgagtattctgacgatagaggacggaatattcgaagtaaaaagcacggctggtgatacacacctgggcggtgaagatttcgacaacagaatggttaaccattttattgccgaattcaagaggaagcataagaaggacatctctgaaaataaacgggccgtccgacgcctccgcaccgcctgcgaacgcgctaaacgaaccctgtcatcttccacgcaggcttccatcgaaatcgacagtctctatgagggcatcgatttttacacttcgataactagggctcgatttgaggagcttaacgcagacctgtttcgcggcactctggatcctgtcgaaaaagcacttagagacgccaagttagacaagtcccagatccatgacatcgtgctagtcggcggctccaccaggatccctaagattcagaagctgctgcaagactttttcaacgggaaagagttgaacaagagcatcaatcctgatgaagcggtcgcatatggcgccgctgtccaagccgccatcctgagcggagacaaatctgagaacgtgcaagaccttttactactcgatgtaactccgctgagcctagggatcgaaacagctggaggtgtgatgaccgttttaatcaaacgtaataccaccatccctactaaacagacccagacctttaccacctacagcgataaccagccaggcgttcttatacaagtgtacgagggcgagcgtgctatgactaaagacaacaacttattggggaagtttgagctcacgggcataccaccggctccccgaggcgtgcctcaaattgaggtgacattcgacatcgacgctaacggcatcttgaatgtgtcagctgtcgataagtcaactggcaaagaaaacaaaattaccatcacaaatgacaaggggcggctgtccaaggaggacattgaaaggatggtccaagaagcagaaaagtataaagcagaggacgagaagcagcgtgacaaagtgagttcgaagaatagcctggagtcttacgcatttaacatgaaagctacagttgaggacgagaaacttcaggggaaaattaacgatgaagacaagcagaagatcctagataaatgtaatgagatcatcaattggttggacaagaaccagaccgcagagaaagaggagtttgagcatcaacagaaggaactcgagaaggtctgtaatcccattatcaccaagctctatcagagcgcaggtgggatgccaggcggtatgcccggtggtttccctggcggcggcgccccaccctccggcggcgcatcttccggccccaccattgaagaggtcgactag

SEQ ID NO: 166432 - DNA, 1941 bp, Artificial Sequence
  derived and/or modified sequence
atgtctaaaggccctgccgtcgggatcgatctggggacaacctattcctgtgtcggcgtatttcagcatggaaaagtagaaataatcgctaacgaccaaggcaacagaaccactccctcatatgttgcctttacagatactgagagacttattggagacgcagctaaaaaccaggtagctatgaaccctaccaatactgtgttcgacgcgaagagattaattggcagacgctttgatgacgccgtggtgcaatctgacatgaaacactggccgtttatggtagtgaatgacgctgggaggccgaaagtacaggtggaatataagggagagacgaaatcattctatccagaggaggtgtctagtatggtcctgacgaagatgaaggagatcgccgaagcatatctgggcaagaccgtaaccaatgccgtggttaccgtgcctgcttattttaacgattcacagcggcaggccactaaggatgcaggtaccattgcaggcctaaatgtgcttagaataattaatgagcctactgctgcggcaatcgcctatggtcttgataagaaagtcggcgctgagcgcaacgttctgatattcgacctaggcggaggcacgttcgacgtctcaatacttacaattgaagatggaatttttgaagtaaagtctactgctggtgacacgcacttggggggagaggacttcgataatcgcatggtcaatcatttcatcgccgagtttaagaggaaacacaaaaaggatatctctgagaataaacgggctgttagaaggctgcgcactgcgtgcgagcgcgcaaagcggacactgagcagctcaacccaagcctccatcgagatcgatagtctctatgaaggaattgatttctacacttctatcacccgcgcacgctttgaggagctgaacgcagacctcttccgtggcacactcgatcccgtcgagaaggctctgcgcgacgccaagttggataagagccagattcacgacatcgtgcttgtgggaggatctacccgcatcccgaagatacagaagctcctccaggacttcttcaacggcaaggagttaaacaaatccataaaccccgacgaggccgttgcatacggggcagctgtgcaagccgcaattttgtctggggataagtctgagaacgtgcaggacttgctgctgctggatgttacccctctgagccttggaatcgagaccgccggtggtgtcatgaccgtgctgataaagagaaatacaaccatccctaccaaacagacccaaactttcactacgtacagcgacaaccagcccggtgtgctgatccaggtctacgagggggagagagccatgaccaaggacaacaacctcctaggcaagttcgaactcacaggcatcccacctgctccgaggggtgtcccacagattgaggtgaccttcgacatcgacgctaatggtattctcaacgtttctgctgtggataaatccactggcaaggaaaataagatcaccatcaccaacgataaggggagactgagcaaggaagatatcgaaagaatggtgcaagaggccgagaaatacaaagctgaggacgagaagcagcgcgacaaggtgagctctaagaactcattagaatcgtatgcctttaacatgaaggcaaccgtcgaggacgagaagctgcagggcaagatcaatgatgaggataagcagaagattctcgataagtgtaacgaaatcattaactggctggataagaaccagaccgccgagaaagaggaatttgaacatcaacagaaagaactcgagaaagtttgcaacccaatcatcacaaaattgtaccagagtgcaggagggatgccaggcggaatgcccggtggctttccaggcggaggggcacctccctccgggggagcctcatctggacccactatcgaagaggtagattag

SEQ ID NO: 166433 - DNA, 1941 bp, Artificial Sequence
  derived and/or modified sequence
atgtcaaagggcccagcagtgggcattgatttaggaaccacatatagctgcgtcggggtttttcagcacgggaaggtggagattattgcaaacgatcagggcaatcggaccacgcccagctatgtggcctttactgacacagaaagactaataggagacgccgccaaaaatcaagtggccatgaacccaacgaacacagtgtttgacgccaagagactgataggccggaggttcgacgatgcagttgtgcagagcgacatgaagcattggcccttcatggtggtaaatgatgccggacgcccgaaggttcaggtcgagtacaaaggcgaaactaagtctttttacccggaggaggtaagctctatggtgctgacgaaaatgaaggaaatagcagaggcgtacctagggaagacagtgacaaatgccgtggtaaccgtgccagcttacttcaacgattcacaacgacaagccacgaaggacgccggaaccattgctggccttaacgtcttacgcattatcaacgagcccacagccgcagctattgcgtacgggttagacaaaaaagtcggagcagagcggaatgtgttaattttcgaccttggcggagggactttcgatgtgagtattttgacaatagaggatggaatcttcgaagtgaagagcacagccggcgacactcatctgggcggagaggattttgataatcgcatggtgaatcactttatagccgagtttaagaggaagcataagaaagacatcagtgaaaacaagcgggccgtccggcgccttcgaacagcatgcgaacgcgcaaagcggacactgagcagttctacccaggctagcattgagatcgattccctgtatgagggtatagatttttacacttccataacccgggcgaggttcgaagaactcaacgccgatttgtttcgtggcactttggacccagtagaaaaagctctccgcgacgcgaagctggataaaagtcagatccatgatattgtgctcgtgggcggctccactcgcatccccaagattcagaagctcctccaggacttcttcaatggaaaagagctgaacaaatctatcaatcccgacgaagccgtggcctatggagcagccgtgcaagccgctatcctgtcaggcgataagagcgaaaatgtccaggatctgctgctcctggatgtcacacccctgagcctgggcatagagactgccggcggagtgatgaccgtgctgatcaaaaggaacacgactattcccaccaagcagacccagaccttcactacgtatagcgataatcagcctggagtgcttattcaggtctacgagggtgagagagcgatgacaaaagacaataacctgttgggcaaattcgagttaacaggcatacctccggcgccaagaggggtgcctcagatagaggtcacttttgatatagacgccaatgggatattaaatgtgagtgcggtggataagtcaaccggcaaagagaataaaattacgataacaaacgacaaaggccgtctgagtaaggaggacattgagcgaatggtgcaagaagccgagaaatacaaagctgaagacgagaagcagagagacaaagttagcagcaaaaattcactcgagagctacgcattcaacatgaaagcgaccgtggaggacgaaaagctgcagggcaaaataaatgatgaggataaacagaaaatattggacaaatgtaacgaaatcattaactggttagataagaaccaaaccgcagagaaggaagagttcgagcaccagcaaaaggagctggaaaaagtttgtaatcctattattactaagctgtaccaatctgccggcggtatgccgggcggcatgccaggagggtttccaggaggaggggcccctccttccggaggcgccagttctggacctactatagaggaggtggattag

SEQ ID NO: 166434 - DNA, 1941 bp, Artificial Sequence
  derived and/or modified sequence
atgagcaaaggacctgctgtaggaattgacctgggaacaacttactcttgtgttggagtgtttcagcacggcaaggtggaaatcatagccaatgatcaggggaataggaccaccccttcatacgtggccttcacagatacagaaagactcatcggggacgctgcgaagaaccaggttgcaatgaatcctaccaacacagtattcgacgccaaacgcctcatcgggaggcgatttgatgacgctgtcgtacaatcagacatgaagcattggccattcatggtggttaacgatgccggacgacctaaggtgcaagtcgagtacaagggagaaacaaagtcattttaccccgaggaggtaagtagtatggtattaacaaagatgaaagaaatcgccgaggcctacttgggtaagactgtgactaatgccgttgtaacagtgcccgcctattttaacgacagccagagacaggccacgaaggacgcaggaacgatagccggtctaaacgttttacggatcatcaacgaacctacagccgcggccattgcgtatggtctggacaagaaagtgggggcggagagaaatgtgctgatctttgatcttgggggtggtactttcgatgtgagcattcttaccatagaagatggcatctttgaagttaaatcaacagctggtgatacacacttaggcggggaagatttcgacaatcgaatggtcaatcactttattgcagagtttaagcgaaaacataagaaggatattagcgaaaataaacgggcagtccggcggctgaggactgcatgcgagcgagccaaacggacactgtcaagcagcacacaggcaagcattgagattgacagcctctatgaaggtattgacttttacacctctatcacaagggcgagattcgaggaacttaacgccgacctgtttcgcggaaccttggacccagtagagaaggccctcagggacgctaagcttgataagtctcaaatacacgacattgtgctcgtaggtggctcgacccggattccaaagattcagaagctcttgcaggattttttcaacgggaaagagcttaacaagtccatcaacccagatgaggccgtggcatatggcgctgctgtgcaggctgctatactctccggagataaatctgagaacgtgcaggatctcctccttctggatgtcacacctctatcgttggggattgagaccgcgggaggtgttatgaccgttctgattaaacgaaacaccactattcctacaaagcagacccagacattcactacttactctgacaatcagcctggtgtgctaattcaggtctacgaaggagagagggcaatgacaaaagataataacctcctggggaaattcgaactcacagggatcccaccagccccacgaggagtcccacagattgaggtaacattcgatattgacgcaaatggtatcttgaacgtgtcggccgtagacaagtcaacaggaaaagaaaataagataacaatcaccaacgacaaaggaaggttgtcgaaggaggacattgaacgaatggtccaggaagcagagaaatataaagccgaagacgagaaacagagagataaggtttccagcaaaaattcactcgagagctacgcatttaatatgaaagcaactgtggaggatgaaaagcttcaggggaaaattaacgacgaggataaacagaagatactggataaatgtaatgagattattaactggttggataagaaccaaacagcagaaaaggaggaattcgaacatcaacagaaggagctagagaaggtgtgcaatccaatcattacaaaattataccagagtgcaggaggaatgcccggaggcatgcccgggggcttcccaggtggcggagcacctccaagcgggggcgcttcctctgggcccactatagaggaggttgattag

SEQ ID NO: 166435 - DNA, 1941 bp, Artificial Sequence
  derived and/or modified sequence
atgagcaagggccccgccgtgggcatcgacctgggcaccacctacagctgcgtgggcgtgttccagcacggcaaggtggagatcatcgccaacgaccagggcaacagaaccacccccagctacgtggccttcaccgacaccgagagactgatcggcgacgccgccaagaaccaggtggccatgaaccccaccaacaccgtgttcgacgccaagagactgatcggcagaagattcgacgacgccgtggtgcagagcgacatgaagcactggcccttcatggtggtgaacgacgccggcagacccaaggtgcaggtggagtacaagggcgagaccaagagcttctaccccgaggaggtgagcagcatggtgctgaccaagatgaaggagatcgccgaggcctacctgggcaagaccgtgaccaacgccgtggtgaccgtgcccgcctacttcaacgacagccagagacaggccaccaaggacgccggcaccatcgccggcctgaacgtgctgagaatcatcaacgagcccaccgccgccgccatcgcctacggcctggacaagaaggtgggcgccgagagaaacgtgctgatcttcgacctgggcggcggcaccttcgacgtgagcatcctgaccatcgaggacggcatcttcgaggtgaagagcaccgccggcgacacccacctgggcggcgaggacttcgacaacagaatggtgaaccacttcatcgccgagttcaagagaaagcacaagaaggacatcagcgagaacaagagagccgtgagaagactgagaaccgcctgcgagagagccaagagaaccctgagcagcagcacccaggccagcatcgagatcgacagcctgtacgagggcatcgacttctacaccagcatcaccagagccagattcgaggagctgaacgccgacctgttcagaggcaccctggaccccgtggagaaggccctgagagacgccaagctggacaagagccagatccacgacatcgtgctggtgggcggcagcaccagaatccccaagatccagaagctgctgcaggacttcttcaacggcaaggagctgaacaagagcatcaaccccgacgaggccgtggcctacggcgccgccgtgcaggccgccatcctgagcggcgacaagagcgagaacgtgcaggacctgctgctgctggacgtgacccccctgagcctgggcatcgagaccgccggcggcgtgatgaccgtgctgatcaagagaaacaccaccatccccaccaagcagacccagaccttcaccacctacagcgacaaccagcccggcgtgctgatccaggtgtacgagggcgagagagccatgaccaaggacaacaacctgctgggcaagttcgagctgaccggcatcccccccgcccccagaggcgtgccccagatcgaggtgaccttcgacatcgacgccaacggcatcctgaacgtgagcgccgtggacaagagcaccggcaaggagaacaagatcaccatcaccaacgacaagggcagactgagcaaggaggacatcgagagaatggtgcaggaggccgagaagtacaaggccgaggacgagaagcagagagacaaggtgagcagcaagaacagcctggagagctacgccttcaacatgaaggccaccgtggaggacgagaagctgcagggcaagatcaacgacgaggacaagcagaagatcctggacaagtgcaacgagatcatcaactggctggacaagaaccagaccgccgagaaggaggagttcgagcaccagcagaaggagctggagaaggtgtgcaaccccatcatcaccaagctgtaccagagcgccggcggcatgcccggcggcatgcccggcggcttccccggcggcggcgccccccccagcggcggcgccagcagcggccccaccatcgaggaggtggactag

SEQ ID NO: 166436 - DNA, 1884 bp, Artificial Sequence
  derived and/or modified sequence
atgagcaagggacctgcagtcggaattgacctgggaacaacctacagttgcgtcggggtatttcagcacgggaaggtggaaattattgcaaatgatcaagggaacagaactacccccagctacgtggccttcacggataccgaacggttaatcggcgacgctgctaagaatcaggtggccatgaaccctacaaacacagtgtttgacgccaagagactgattggtcgcaggttcgacgatgcagtcgtgcagtcagatatgaaacactggcctttcatggtggtcaacgacgccggccgccccaaagtacaggtggaatataaaggtgagactaaatctttttaccctgaagaggtttcctcgatggttctgactaaaatgaaggagatcgctgaggcatatctgggcaaagccactaaagacgcaggcaccattgcaggactaaatgtcttgcgtatcataaacgaacccaccgcggccgcgatcgcttacggattggacaagaaagtgggggccgagcgcaacgtgttaatttttgatctgggcggtggaacatttgatgtgagcatcctaactatagaggacggaatcttcgaagtaaaaagcactgcgggcgacactcatctggggggtgaggattttgataacaggatggttaaccactttatagcagagttcaagcggaagcataagaaagacattagtgagaacaagcgcgcagtgcgccgcctcagaaccgcttgtgagagagctaagcggacgctgagcagctccacacaagcatctatcgaaatcgactccctgtacgagggaatcgacttttatacttcaatcacacgggcccgttttgaggaacttaacgccgatctcttcagggggactctggaccctgtggaaaaagcactccgcgatgctaagctggataaatcccaaatccatgatatagttctggtgggcggaagtacccggatccctaagatccagaagctcctgcaggacttcttcaatgggaaagaattgaataaatcaatcaatcccgatgaggctgtcgcctacggagctgctgtgcaggctgcaatcctgagcggcgataaatccgagaacgtacaggatttattgctgctagatgtaacaccactctcgctgggcatagagaccgccggaggtgtaatgacagtgttaataaagagaaacacaaccatccccaccaaacagactcagactttcacaacctactccgataaccaacctggagtcctcatccaagtatacgagggcgagcgggccatgactaaggataacaatctgctcggaaagttcgaactgaccggcatccccccggcgccaagaggcgtacctcaaatcgaagtcacattcgatatagatgctaatggtattctgaacgtctccgcagtagacaaatctacaggaaaagaaaataaaattaccattaccaatgacaagggccgcctgagcaaagaagatattgagagaatggtgcaagaagcagaaaaatataaggccgaagatgaaaaacaaagagacaaggtttcatctaagaactccctggaatcctacgctttcaacatgaaggccacagttgaggatgagaagctgcaaggcaagattaacgacgaagacaagcagaagatactggataagtgcaatgaaattattaactggctcgacaagaaccaaaccgcagaaaaggaagaatttgaacaccaacagaaagaattggagaaagtgtgcaaccccattatcacgaaattatatcagtctgccggggggatgccaggcggtatgcccggtgggttcccgggcgggggcgcgcccccatcagggggtgcatcatctggacctactatcgaagaagtggattag

SEQ ID NO: 166437 - DNA, 1941 bp, Artificial Sequence
  derived and/or modified sequence
atgtctaaaggtcccgccgttggaatcgatctgggtacaacctactcctgtgtgggagtgttccagcacggtaaagtagagattattgcgaacgatcaaggaaaccgcaccaccccttcttacgtggctttcacagacacagagaggcttatcggagatgcagccaagaatcaggtggccatgaatcctacgaacaccgtgttcgatgcaaaacgcctgattgggagacgatttgatgatgcagtggtgcaatcagacatgaagcattggccatttatggtggtcaacgacgccggcaggcccaaggtccaggttgaatataagggggagacgaagtcattttaccctgaggaggtgtcttcaatggttctgactaaaatgaaggagattgccgaagcttacctgggcaagacagttacgaatgcggttgtgacagtgccagcctatttcaatgacagccagaggcaagccacgaaggacgcagggacgattgcgggcctgaacgtactgaggattatcaacgaaccaacagccgctgccatagcatacggtctcgataagaaagttggagctgaaagaaacgtcttgatcttcgatctgggcggaggtacatttgacgtatctattttaactattgaggatggaatctttgaggtgaaatcgacagccggtgatacccaccttggcggcgaggacttcgacaacagaatggtgaaccatttcattgcagagttcaagcgcaaacataaaaaagacatctcggagaataaacgggcggtgcgccggctaaggaccgcatgtgagagggccaaaaggactctgtcttcctccacgcaggccagcattgaaatcgactcattatatgaaggtattgatttttacacttctattacgcgcgcaagattcgaggaactgaatgcggatctgtttcggggaacattagacccggtggagaaagctcttcgagacgccaagttggataagtctcaaattcacgatattgtgctagtgggcggttccactcgcattcccaagattcagaagctgcttcaggatttctttaatgggaaggagcttaataaaagcatcaacccagacgaagctgtggcgtatggagcagcagtgcaggcggccatattgagcggagataagagcgagaacgtgcaggacttattactcctggatgtgaccccactgagtctgggtatcgagacagctggcggcgtgatgaccgttctgattaagcgaaataccacaattcccacaaaacagacccagaccttcaccacttattccgacaatcaacccggagtactgatacaagtgtacgagggagaacgagcgatgacgaaagacaacaatctgttgggcaagttcgagctgaccgggatcccccctgcgccccgcggtgtgccccagatagaagtcaccttcgacatcgatgccaacggcattctgaatgtgtccgcagttgacaagtccacaggcaaggagaataagataacaatcacaaatgataaaggcaggctttctaaagaggacattgagagaatggtccaagaagccgaaaagtacaaagccgaagacgagaagcaaagggataaggtgagcagcaagaactctttagagtcttacgctttcaatatgaaggcaaccgtcgaggatgaaaaacttcagggcaagatcaacgatgaggacaaacagaagatcctggataagtgcaatgaaatcataaactggctcgataaaaatcagactgccgagaaagaggaatttgaacaccaacagaaagagctcgagaaggtttgtaacccaatcattactaagctgtatcagtcggccgggggcatgcctggaggaatgcctggcggattccctggggggggagcaccacccagcggcggagccagcagcggccccaccatcgaagaagtggactag

SEQ ID NO: 166438 - DNA, 1503 bp, Artificial Sequence
  derived and/or modified sequence
atgagcaagggccctgctgtgggcattgacctcggcacaacatattcctgcgtgggggtgtttcaacatggcaaggttgagattatcgcaaacgatcaaggaaatcgcacaactcctagttacgtggccttcacagatactgagaggttaattggcgacgcagctaagaatcaggtcgcaatgaaccccacaaacacggtttttgatgccaagaggctgatcggccgcaggtttgacgacgcagtcgtacaatctgacatgaagcattggcctttcatggtcgttaatgatgccggacgcccaaagcataagaaggacatatctgagaataagagggccgttcgtcgtcttcggactgcgtgcgagagggccaagcgaaccctctcgtcctctactcaggcgtccatcgagatagattcactttacgagggcattgatttctacacttcaattacgagggcacgctttgaagagcttaatgcagacctcttccgggggactctggaccccgtggagaaagccttaagggacgcaaagctcgataagtcccagatccacgatatcgtcctcgtaggtgggtccacacgaattccaaagattcaaaaactgctccaggactttttcaacggcaaagagctcaataaatcaatcaatccagatgaggcggtcgcctacggcgcagcagtgcaggctgcaattctgagcggggacaaatcagagaatgtgcaggaccttctgctgctggacgtgaccccactgtcactagggatcgagactgctggcggagtcatgactgtgctgatcaagcgtaacaccaccatccctaccaagcagactcaaacatttaccacctactccgataatcagcctggcgtgttgatccaggtctacgagggcgagcgtgcaatgacgaaggacaacaatttactcgggaagtttgaactaacagggatcccccctgcacccagaggtgtgccacagattgaagtaacgtttgacatcgacgcaaatgggatcctgaatgtgtccgcagttgacaaatccacgggcaaagaaaacaagataaccataaccaatgataaggggcgcctaagtaaggaggatattgagagaatggtgcaggaggctgaaaagtacaaggccgaggatgagaaacagcgagataaggtgtccagtaagaacagtttggaatcttatgctttcaatatgaaagctaccgttgaggatgagaagctgcagggaaaaattaacgacgaggataagcagaagattttggataagtgcaatgaaatcatcaactggttggacaagaaccagacagccgagaaggaggaattcgagcaccaacagaaggagctcgaaaaagtttgtaacccaatcattacaaagctttaccagagcgctggaggcatgcccggaggaatgcctggaggatttcctgggggcggtgcccctccaagtggcggagcctccagcgggcccacgatcgaggaggtggactag

SEQ ID NO: 166439 - DNA, 1233 bp, Artificial Sequence
  derived and/or modified sequence
atggtaaatcactttatcgcggagttcaaacgtaagcataaaaaagacatatctgaaaataagcgtgcggtacggcggcttcggacagcttgcgagagagccaaaaggaccctgtcctcctccacgcaagcgagcatcgagatagacagcctgtatgaagggatcgacttttatactagtatcacaagagcaaggtttgaagagctgaacgcagacttgtttaggggaacactggaccccgtggaaaaagccctaagggatgctaaactggacaaatcccagattcatgatatagtgctggtgggcggtagcaccaggattcccaagatccagaaactgttacaggatttttttaacgggaaggaactgaacaagtctattaacccagacgaggctgttgcgtacggagcggccgtccaggctgctatcctgtccggcgacaaatccgagaacgtccaggaccttctactgctggatgttacacctctatccctcgggattgaaaccgcgggaggggtcatgactgtactcattaaaaggaacacaacgatacctactaagcagacccagacattcacaacttattcagataaccagcctggcgtgcttatccaggtgtacgagggcgagagagctatgactaaggacaacaatctgctgggaaaatttgaattgacaggcattcccccagcccctaggggcgtacctcaaattgaggtgacattcgatatcgacgccaatggcattcttaatgtgtcagccgtggacaagtctactggtaaggagaataagatcactattacaaacgataagggtaggctgagtaaggaggacatcgagagaatggtccaggaggccgagaagtacaaggctgaagatgaaaagcagcgtgacaaagtgagcagcaagaactctctggagtcctacgctttcaatatgaaggccacagtagaagatgagaagttgcagggcaaaatcaatgatgaagataaacagaaaattctagacaagtgtaatgaaatcattaactggttggacaaaaatcagacagccgagaaggaggagttcgaacaccagcagaaagagttggagaaggtctgcaaccctatcatcacgaagctgtatcaatcagctggtgggatgcctggcgggatgcccggtggttttccaggcggcggcgcccctccctcaggtggagctagctcagggcctacaatcgaagaagtcgactag

SEQ ID NO: 166440 - DNA, 1941 bp, Artificial Sequence
  derived and/or modified sequence
atgtcaaagggtcctgccgtgggaatcgacctgggtactacctacagttgcgttggggtgtttcagcatgggaaggtggagattatcgccaatgatcaaggcaataggaccacgcctagctacgtagccttcaccgatactgaaagactgatcggagacgctgccaaaaatcaggtggcaatgaaccctacgaacacggtgtttgacgccaaacgcctaattggaagacgattcgatgacgccgtagtacaatccgatatgaagcattggcctttcatggtggtaaacgacgccggccgcccaaaagtgcaagtcgagtataagggtgaaacaaaaagcttctaccctgaggaagtctcttccatggtcttgactaaaatgaaggaaatcgctgaggcataccttggcaagacagtgaccaacgctgtcgtcacagtccctgcctacttcaatgactctcagaggcaggccacaaaggatgccggaaccattgccggcctgaatgtgctgcgcatcataaatgaaccaacagccgcagctatcgcttacggcctagataaaaaggtgggcgccgaaagaaatgtgctaatctttgacctcgggggaggaacttttgatgtgtctatcttgacgattgaagatggaatctttgaggttaagtccacagcaggtgatacacatttaggcggggaggactttgacaaccgaatggttaatcacttcatcgcagaatttaagcgaaagcataaaaaggacataagtgaaaataagagggctgtgaggcgcttgcgcaccgcctgtgagagggccaaaagaacgctgtcaagcagcacacaggcctccatcgaaatcgattccctctatgagggcattgatttctatacttctatcacacgcgcccggtttgaagagttaaacgccgacctatttcgcggtacgctcgatccagttgaaaaggcattacgcgatgcgaagttggacaaaagccagattcacgatatcgtgctcgtgggcgggtctactcgcattcccaaaatacagaaactgctgcaggatttcttcaacggtaaggagttgaataagagcatcaatcccgacgaggctgtggcgtatggggccgcggtgcaggcagctatcttaagtggggataagagtgaaaacgtccaggatttgctgttattggacgtgacccctttgagtctgggaattgaaaccgcaggcggagtgatgacagtgctgatcaagcgtaacactacaatccccactaagcagacgcagacattcacaacgtattcggataatcaacctggggtgctcatccaggtgtatgagggcgagcgtgcgatgaccaaagataataatctgcttgggaagtttgagttaacgggaatccctcccgcgcccagaggggtgccacagattgaagtaacattcgatatcgacgcaaacggcatcttgaatgtgagtgcagttgacaagtccaccgggaaagaaaacaaaatcaccatcacgaacgacaaaggtaggctctccaaagaggatattgaacggatggtgcaagaggctgaaaagtataaggcggaggatgaaaagcagcgtgataaggtgagctcgaaaaattccctcgagtcttacgcctttaatatgaaggccactgtggaggacgaaaaactacaaggaaagataaatgatgaagataagcagaagattctggacaaatgcaacgagattatcaattggttagataaaaatcagacggctgaaaaagaagaattcgagcatcaacagaaagagctcgaaaaggtgtgtaacccaataatcactaagttgtatcaatctgctgggggcatgcctggtggcatgccgggaggctttcctgggggaggggcgcccccctctggcggtgcttccagtggtcctaccatcgaagaagttgattag

SEQ ID NO: 166441 - DNA, 2186 bp, Artificial Sequence
  derived and/or modified sequence
cagcaaccatgtccaagggacctgcagttggtattgatcttggcaccacctactcttgtgtgggtgttttccagcacggaaaagtcgagataattgccaatgatcagggaaaccgaaccactccaagctatgtcgcctttacggacactgaacggttgatcggtgatgccgcaaagaatcaagttgcaatgaaccccaccaacacagtttttgatgccaaacgtctgattggacgcagatttgatgatgctgttgtccagtctgatatgaaacattggccctttatggtggtgaatgatgctggcaggcccaaggtccaagtagaatacaagggagagaccaaaagcttctatccagaggaggtgtcttctatggttctgacaaagatgaaggaaattgcagaagcctaccttgggaagactgttaccaatgctgtggtcacagtgccagcttactttaatgactctcagcgtcaggctaccaaagatgctggaactattgctggtctcaatgtacttagaattattaatgagccaactgctgctgctattgcttacggcttagacaaaaaggttggagcagaaagaaacgtgctcatctttgacctgggaggtggcacttttgatgtgtcaatcctcactattgaggatggaatctttgaggtcaagtctacagctggagacacccacttgggtggagaagattttgacaaccgaatggtcaaccattttattgctgagtttaagcgcaagcataagaaggacatcagtgagaacaagagagctgtaagacgcctccgtactgcttgtgaacgtgctaagcgtaccctctcttccagcacccaggccagtattgagatcgattctctctatgaaggaatcgacttctatacctccattacccgtgcccgatttgaagaactgaatgctgacctgttccgtggcaccctggacccagtagagaaagcccttcgagatgccaaactagacaagtcacagattcatgatattgtcctggttggtggttctactcgtatccccaagattcagaagcttctccaagacttcttcaatggaaaagaactgaataagagcatcaaccctgatgaagctgttgcttatggtgcagctgtccaggcagccatcttgtctggagacaagtctgagaatgttcaagatttgctgctcttggatgtcactcctctttcccttggtattgaaactgctggtggagtcatgactgtcctcatcaagcgtaataccaccattcctaccaagcagacacagaccttcactacctattctgacaaccagcctggtgtgcttattcaggtttatgaaggcgagcgtgccatgacaaaggataacaacctgcttggcaagtttgaactcacaggcatacctcctgcaccccgaggtgttcctcagattgaagtcacttttgacattgatgccaatggtatactcaatgtctctgctgtggacaagagtacgggaaaagagaacaagattactatcactaatgacaagggccgtttgagcaaggaagacattgaacgtatggtccaggaagctgagaagtacaaagctgaagatgagaagcagagggacaaggtgtcatccaagaattcacttgagtcctatgccttcaacatgaaagcaactgttgaagatgagaaacttcaaggcaagattaacgatgaggacaaacagaagattctggacaagtgtaatgaaattatcaactggcttgataagaatcagactgctgagaaggaagaatttgaacatcaacagaaagagctggagaaagtttgcaaccccatcatcaccaagctgtaccagagtgcaggaggcatgccaggaggaatgcctgggggatttcctggtggtggagctcctccctctggtggtgcttcctcagggcccaccattgaagaggttgattaagccaaccaagtgtagatgtagcattgttccacacatttaaaacatttgaaggacctaaattcgtagcaaattctgtggcagttttaaaaagttaagctgctatagtaagttactgggcattctcaatacttgaatatggaacatatgcacaggggaaggaaataacattgcactttataaacactgtattgtaagtggaaaatgcaatgtcttaaataaaactatttaaaattggca

SEQ ID NO: 166442 - DNA, 1924 bp, Artificial Sequence
  derived and/or modified sequence
agcaaccatgtccaagggacctgcagttggtattgatcttggcaccacctactcttgtgtgggtgttttccagcacggaaaagtcgagataattgccaatgatcagggaaaccgaaccactccaagctatgtcgcctttacggacactgaacggttgatcggtgatgccgcaaagaatcaagttgcaatgaaccccaccaacacagtttttgatgccaaacgtctgattggacgcagatttgatgatgctgttgtccagtctgatatgaaacattggccctttatggtggtgaatgatgctggcaggcccaaggtccaagtagaatacaagggagagaccaaaagcttctatccagaggaggtgtcttctatggttctgacaaagatgaaggaaattgcagaagcctaccttgggaaggctaccaaagatgctggaactattgctggtctcaatgtacttagaattattaatgagccaactgctgctgctattgcttacggcttagacaaaaaggttggagcagaaagaaacgtgctcatctttgacctgggaggtggcacttttgatgtgtcaatcctcactattgaggatggaatctttgaggtcaagtctacagctggagacacccacttgggtggagaagattttgacaaccgaatggtcaaccattttattgctgagtttaagcgcaagcataagaaggacatcagtgagaacaagagagctgtaagacgcctccgtactgcttgtgaacgtgctaagcgtaccctctcttccagcacccaggccagtattgagatcgattctctctatgaaggaatcgacttctatacctccattacccgtgcccgatttgaagaactgaatgctgacctgttccgtggcaccctggacccagtagagaaagcccttcgagatgccaaactagacaagtcacagattcatgatattgtcctggttggtggttctactcgtatccccaagattcagaagcttctccaagacttcttcaatggaaaagaactgaataagagcatcaaccctgatgaagctgttgcttatggtgcagctgtccaggcagccatcttgtctggagacaagtctgagaatgttcaagatttgctgctcttggatgtcactcctctttcccttggtattgaaactgctggtggagtcatgactgtcctcatcaagcgtaataccaccattcctaccaagcagacacagaccttcactacctattctgacaaccagcctggtgtgcttattcaggtttatgaaggcgagcgtgccatgacaaaggataacaacctgcttggcaagtttgaactcacaggcatacctcctgcaccccgaggtgttcctcagattgaagtcacttttgacattgatgccaatggtatactcaatgtctctgctgtggacaagagtacgggaaaagagaacaagattactatcactaatgacaagggccgtttgagcaaggaagacattgaacgtatggtccaggaagctgagaagtacaaagctgaagatgagaagcagagggacaaggtgtcatccaagaattcacttgagtcctatgccttcaacatgaaagcaactgttgaagatgagaaacttcaaggcaagattaacgatgaggacaaacagaagattctggacaagtgtaatgaaattatcaactggcttgataagaatcagactgctgagaaggaagaatttgaacatcaacagaaagagctggagaaagtttgcaaccccatcatcaccaagctgtaccagagtgcaggaggcatgccaggaggaatgcctgggggatttcctggtggtggagctcctccctctggtggtgcttcctcagggcccaccattgaagaggttgattaagccaaccaagtgtagatgtagcattgttccaca

SEQ ID NO: 166443 - DNA, 2306 bp, Artificial Sequence
  derived and/or modified sequence
ggtttgcctggcgcgcggggaagtggagccagcgttttctttcacccagttccctgcttagtccagtcccaccgtggttcttcagagctgttcttggcgtgcttccagtatggggcaaccatgtccaagggacctgcagttggtattgatcttggcaccacctactcttgtgtgggtgttttccagcacggaaaagtcgagataattgccaatgatcagggaaaccgaaccactccaagctatgtcgcctttacggacactgaacggttgatcggtgatgccgcaaagaatcaagttgcaatgaaccccaccaacacagtttttgatgccaaacgtctgattggacgcagatttgatgatgctgttgtccagtctgatatgaaacattggccctttatggtggtgaatgatgctggcaggcccaaggtccaagtagaatacaagggagagaccaaaagcttctatccagaggaggtgtcttctatggttctgacaaagatgaaggaaattgcagaagcctaccttgggaagactgttaccaatgctgtggtcacagtgccagcttactttaatgactctcagcgtcaggctaccaaagatgctggaactattgctggtctcaatgtacttagaattattaatgagccaactgctgctgctattgcttacggcttagacaaaaaggttggagcagaaagaaacgtgctcatctttgacctgggaggtggcacttttgatgtgtcaatcctcactattgaggatggaatctttgaggtcaagtctacagctggagacacccacttgggtggagaagattttgacaaccgaatggtcaaccattttattgctgagtttaagcgcaagcataagaaggacatcagtgagaacaagagagctgtaagacgcctccgtactgcttgtgaacgtgctaagcgtaccctctcttccagcacccaggccagtattgagatcgattctctctatgaaggaatcgacttctatacctccattacccgtgcccgatttgaagaactgaatgctgacctgttccgtggcaccctggacccagtagagaaagcccttcgagatgccaaactagacaagtcacagattcatgatattgtcctggttggtggttctactcgtatccccaagattcagaagcttctccaagacttcttcaatggaaaagaactgaataagagcatcaaccctgatgaagctgttgcttatggtgcagctgtccaggcagccatcttgtctggagacaagtctgagaatgttcaagatttgctgctcttggatgtcactcctctttcccttggtattgaaactgctggtggagtcatgactgtcctcatcaagcgtaataccaccattcctaccaagcagacacagaccttcactacctattctgacaaccagcctggtgtgcttattcaggtttatgaaggcgagcgtgccatgacaaaggataacaacctgcttggcaagtttgaactcacaggcatacctcctgcaccccgaggtgttcctcagattgaagtcacttttgacattgatgccaatggtatactcaatgtctctgctgtggacaagagtacgggaaaagagaacaagattactatcactaatgacaagggccgtttgagcaaggaagacattgaacgtatggtccaggaagctgagaagtacaaagctgaagatgagaagcagagggacaaggtgtcatccaagaattcacttgagtcctatgccttcaacatgaaagcaactgttgaagatgagaaacttcaaggcaagattaacgatgaggacaaacagaagattctggacaagtgtaatgaaattatcaactggcttgataagaatcagactgctgagaaggaagaatttgaacatcaacagaaagagctggagaaagtttgcaaccccatcatcaccaagctgtaccagagtgcaggaggcatgccaggaggaatgcctgggggatttcctggtggtggagctcctccctctggtggtgcttcctcagggcccaccattgaagaggttgattaagccaaccaagtgtagatgtagcattgttccacacatttaaaacatttgaaggacctaaattcgtagcaaattctgtggcagttttaaaaagttaagctgctatagtaagttactgggcattctcaatacttgaatatggaacatatgcacaggggaaggaaataacattgcactttataaacactgtattgtaagtggaaaatgcaatgtcttaaataaaactatttaaaattggcaccatacaa

SEQ ID NO: 166444 - DNA, 1826 bp, Artificial Sequence
  derived and/or modified sequence
ctcattgaactcgcctgcagctcttgggttttttgtggcttccttcgttattggagccaggcctacaccccagcaaccatgtccaagggacctgcagttggtattgatcttggcaccacctactcttgtgtgggtgttttccagcacggaaaagtcgagataattgccaatgatcagggaaaccgaaccactccaagctatgtcgcctttacggacactgaacggttgatcggtgatgccgcaaagaatcaagttgcaatgaaccccaccaacacagtttttgatgccaaacgtctgattggacgcagatttgatgatgctgttgtccagtctgatatgaaacattggccctttatggtggtgaatgatgctggcaggcccaagcataagaaggacatcagtgagaacaagagagctgtaagacgcctccgtactgcttgtgaacgtgctaagcgtaccctctcttccagcacccaggccagtattgagatcgattctctctatgaaggaatcgacttctatacctccattacccgtgcccgatttgaagaactgaatgctgacctgttccgtggcaccctggacccagtagagaaagcccttcgagatgccaaactagacaagtcacagattcatgatattgtcctggttggtggttctactcgtatccccaagattcagaagcttctccaagacttcttcaatggaaaagaactgaataagagcatcaaccctgatgaagctgttgcttatggtgcagctgtccaggcagccatcttgtctggagacaagtctgagaatgttcaagatttgctgctcttggatgtcactcctctttcccttggtattgaaactgctggtggagtcatgactgtcctcatcaagcgtaataccaccattcctaccaagcagacacagaccttcactacctattctgacaaccagcctggtgtgcttattcaggtttatgaaggcgagcgtgccatgacaaaggataacaacctgcttggcaagtttgaactcacaggcatacctcctgcaccccgaggtgttcctcagattgaagtcacttttgacattgatgccaatggtatactcaatgtctctgctgtggacaagagtacgggaaaagagaacaagattactatcactaatgacaagggccgtttgagcaaggaagacattgaacgtatggtccaggaagctgagaagtacaaagctgaagatgagaagcagagggacaaggtgtcatccaagaattcacttgagtcctatgccttcaacatgaaagcaactgttgaagatgagaaacttcaaggcaagattaacgatgaggacaaacagaagattctggacaagtgtaatgaaattatcaactggcttgataagaatcagactgctgagaaggaagaatttgaacatcaacagaaagagctggagaaagtttgcaaccccatcatcaccaagctgtaccagagtgcaggaggcatgccaggaggaatgcctgggggatttcctggtggtggagctcctccctctggtggtgcttcctcagggcccaccattgaagaggttgattaagccaaccaagtgtagatgtagcattgttccacacatttaaaacatttgaaggacctaaattcgtagcaaattctgtggcagttttaaaaagttaagctgctatagtaagttactgggcattctcaatacttgaatatggaacatatgcacaggggaaggaaataacattgcactttataaacactgtattgtaagtggaaaatgcaatgtcttaaataaaactatttaaaattggcaccatacaa

SEQ ID NO: 166445 - DNA, 1884 bp, Artificial Sequence
  derived and/or modified sequence
tacattttggtggggggggtgctccagctgttctttcaccagcattaatccatttgctggagtttgcatatatgtaagtataatagttaccaatctgtggtcttttccttattcctagactgttaccaatgctgtggtcacagtgccagcttactttaatgactctcagcgtcaggctaccaaagatgctggaactattgctggtctcaatgtacttagaattattaatgagccaactgctgctgctattgcttacggcttagacaaaaaggttggagcagaaagaaacgtgctcatctttgacctgggaggtggcacttttgatgtgtcaatcctcactattgaggatggaatctttgaggtcaagtctacagctggagacacccacttgggtggagaagattttgacaaccgaatggtcaaccattttattgctgagtttaagcgcaagcataagaaggacatcagtgagaacaagagagctgtaagacgcctccgtactgcttgtgaacgtgctaagcgtaccctctcttccagcacccaggccagtattgagatcgattctctctatgaaggaatcgacttctatacctccattacccgtgcccgatttgaagaactgaatgctgacctgttccgtggcaccctggacccagtagagaaagcccttcgagatgccaaactagacaagtcacagattcatgatattgtcctggttggtggttctactcgtatccccaagattcagaagcttctccaagacttcttcaatggaaaagaactgaataagagcatcaaccctgatgaagctgttgcttatggtgcagctgtccaggcagccatcttgtctggagacaagtctgagaatgttcaagatttgctgctcttggatgtcactcctctttcccttggtattgaaactgctggtggagtcatgactgtcctcatcaagcgtaataccaccattcctaccaagcagacacagaccttcactacctattctgacaaccagcctggtgtgcttattcaggtttatgaaggcgagcgtgccatgacaaaggataacaacctgcttggcaagtttgaactcacaggcatacctcctgcaccccgaggtgttcctcagattgaagtcacttttgacattgatgccaatggtatactcaatgtctctgctgtggacaagagtacgggaaaagagaacaagattactatcactaatgacaagggccgtttgagcaaggaagacattgaacgtatggtccaggaagctgagaagtacaaagctgaagatgagaagcagagggacaaggtgtcatccaagaattcacttgagtcctatgccttcaacatgaaagcaactgttgaagatgagaaacttcaaggcaagattaacgatgaggacaaacagaagattctggacaagtgtaatgaaattatcaactggcttgataagaatcagactgctgagaaggaagaatttgaacatcaacagaaagagctggagaaagtttgcaaccccatcatcaccaagctgtaccagagtgcaggaggcatgccaggaggaatgcctgggggatttcctggtggtggagctcctccctctggtggtgcttcctcagggcccaccattgaagaggttgattaagccaaccaagtgtagatgtagcattgttccacacatttaaaacatttgaaggacctaaattcgtagcaaattctgtggcagttttaaaaagttaagctgctatagtaagttactgggcattctcaatacttgaatatggaacatatgcacaggggaaggaaataacattgcactttataaacactgtattgtaagtggaaaatgcaatgtcttaaataaaactatttaaaattggc

SEQ ID NO: 166446 - DNA, 2463 bp, Artificial Sequence
  derived and/or modified sequence
atcgtgaggcggagcgcggtggggtgggtgcggaagggggcgaggcccgaggagtggagccgggcttgtgattgggtcttgtaagggcagccgggcgtctattggccggggaagccgtaatggcaggcagcaggggcgggccccttctggaaggttctaagatagggtataagaggcagggtggcgggcggaaaccggtctcattgaactcgcctgcagctcttgggttttttgtggcttccttcgttattggagccaggcctacaccccagcaaccatgtccaagggacctgcagttggtattgatcttggcaccacctactcttgtgtgggtgttttccagcacggaaaagtcgagataattgccaatgatcagggaaaccgaaccactccaagctatgtcgcctttacggacactgaacggttgatcggtgatgccgcaaagaatcaagttgcaatgaaccccaccaacacagtttttgatgccaaacgtctgattggacgcagatttgatgatgctgttgtccagtctgatatgaaacattggccctttatggtggtgaatgatgctggcaggcccaaggtccaagtagaatacaagggagagaccaaaagcttctatccagaggaggtgtcttctatggttctgacaaagatgaaggaaattgcagaagcctaccttgggaagactgttaccaatgctgtggtcacagtgccagcttactttaatgactctcagcgtcaggctaccaaagatgctggaactattgctggtctcaatgtacttagaattattaatgagccaactgctgctgctattgcttacggcttagacaaaaaggttggagcagaaagaaacgtgctcatctttgacctgggaggtggcacttttgatgtgtcaatcctcactattgaggatggaatctttgaggtcaagtctacagctggagacacccacttgggtggagaagattttgacaaccgaatggtcaaccattttattgctgagtttaagcgcaagcataagaaggacatcagtgagaacaagagagctgtaagacgcctccgtactgcttgtgaacgtgctaagcgtaccctctcttccagcacccaggccagtattgagatcgattctctctatgaaggaatcgacttctatacctccattacccgtgcccgatttgaagaactgaatgctgacctgttccgtggcaccctggacccagtagagaaagcccttcgagatgccaaactagacaagtcacagattcatgatattgtcctggttggtggttctactcgtatccccaagattcagaagcttctccaagacttcttcaatggaaaagaactgaataagagcatcaaccctgatgaagctgttgcttatggtgcagctgtccaggcagccatcttgtctggagacaagtctgagaatgttcaagatttgctgctcttggatgtcactcctctttcccttggtattgaaactgctggtggagtcatgactgtcctcatcaagcgtaataccaccattcctaccaagcagacacagaccttcactacctattctgacaaccagcctggtgtgcttattcaggtttatgaaggcgagcgtgccatgacaaaggataacaacctgcttggcaagtttgaactcacaggcatacctcctgcaccccgaggtgttcctcagattgaagtcacttttgacattgatgccaatggtatactcaatgtctctgctgtggacaagagtacgggaaaagagaacaagattactatcactaatgacaagggccgtttgagcaaggaagacattgaacgtatggtccaggaagctgagaagtacaaagctgaagatgagaagcagagggacaaggtgtcatccaagaattcacttgagtcctatgccttcaacatgaaagcaactgttgaagatgagaaacttcaaggcaagattaacgatgaggacaaacagaagattctggacaagtgtaatgaaattatcaactggcttgataagaatcagactgctgagaaggaagaatttgaacatcaacagaaagagctggagaaagtttgcaaccccatcatcaccaagctgtaccagagtgcaggaggcatgccaggaggaatgcctgggggatttcctggtggtggagctcctccctctggtggtgcttcctcagggcccaccattgaagaggttgattaagccaaccaagtgtagatgtagcattgttccacacatttaaaacatttgaaggacctaaattcgtagcaaattctgtggcagttttaaaaagttaagctgctatagtaagttactgggcattctcaatacttgaatatggaacatatgcacaggggaaggaaataacattgcactttataaacactgtattgtaagtggaaaatgcaatgtcttaaataaaactatttaaaattggcaccatacaa

SEQ ID NO: 166447 - DNA, 1884 bp, Artificial Sequence
  derived and/or modified sequence
atgagcaaaggacctgctgtgggcatcgacctgggcaccacctacagctgtgtgggcgtcttccagcacggcaaggtggagatcatcgccaatgaccagggcaacagaaccacccccagctatgtggccttcacagacacagagcggctgattggagatgctgccaagaaccaggtggccatgaaccccaccaacacagtgtttgatgccaagaggctcatcggccgccgctttgatgatgctgtggtgcagagcgacatgaagcactggcccttcatggtggtgaatgatgctggccggcccaaggtgcaggtggagtacaagggggagaccaagagcttctacccagaggaggtgtcctccatggtgctgaccaagatgaaggagattgctgaggcctacctgggcaaggccaccaaggatgctggcaccatcgccggcctgaatgtgctgcgcatcatcaatgagcccacagctgctgccatcgcctacggcctggacaagaaggtgggcgctgagagaaatgtgctgatctttgacctgggcggcggcacctttgatgtgtccatcctgaccattgaagatggcatctttgaggtgaagagcacagctggggacacccacctgggcggggaggactttgacaacaggatggtgaaccacttcatcgccgagttcaagaggaagcacaagaaggacatcagcgagaacaagagagctgtgcggcggctgaggacagcctgtgagcgggccaagaggaccctgagcagcagcacccaggccagcattgaaattgacagcctgtatgagggcatcgacttctacaccagcatcacccgggccaggtttgaggagctgaatgctgacctcttccggggcaccctggaccctgtggagaaggccctgagagatgccaagctggacaagagccagatccatgacatcgtgctggtgggcggcagcacccgcatccccaagatccagaagctgctgcaggacttcttcaacgggaaggagctgaacaagagcatcaacccagatgaagctgtggcctacggggctgctgtgcaggccgccatcctgagcggggacaagtcagaaaatgtgcaggacctgctgctgctggatgtgacccccctgagcctgggcatcgagacagctggaggagtgatgacagtgctgatcaagaggaacaccaccatccccaccaagcagacccagaccttcaccacctacagcgacaaccagcccggggtgctgatccaggtgtatgaaggagagcgggccatgaccaaggacaacaacctgctgggcaagtttgagctgaccggcatccccccagccccccggggcgtgccccagatcgaggtgacctttgatattgatgccaacggcatcctgaatgtgtctgctgtggacaagagcacaggcaaggagaacaagatcaccatcaccaatgacaagggccgcctgagcaaggaggacatcgagaggatggtgcaggaggccgagaagtacaaggcagaagatgagaagcagagggacaaggtgagcagcaagaacagcctggagagctatgccttcaacatgaaggccaccgtggaggatgagaagctgcagggcaagatcaatgatgaggacaagcagaagatcctggacaagtgcaatgagatcatcaactggctggacaagaaccagacagctgagaaggaggagtttgagcaccagcagaaggagctggagaaggtgtgcaaccccatcatcaccaagctgtaccagagcgctgggggcatgcctgggggcatgcctgggggcttccctgggggcggggccccacccagcggcggggccagcagcggccccaccatcgaggaggtggactag

SEQ ID NO: 166448 - DNA, 1503 bp, Artificial Sequence
  derived and/or modified sequence
atgagcaaaggacctgctgtgggcatcgacctgggcaccacctacagctgtgtgggcgtcttccagcacggcaaggtggagatcatcgccaatgaccagggcaacagaaccacccccagctatgtggccttcacagacacagagcggctgattggagatgctgccaagaaccaggtggccatgaaccccaccaacacagtgtttgatgccaagaggctcatcggccgccgctttgatgatgctgtggtgcagagcgacatgaagcactggcccttcatggtggtgaatgatgctggccggcccaagcacaagaaggacatcagcgagaacaagagagctgtgcggcggctgaggacagcctgtgagcgggccaagaggaccctgagcagcagcacccaggccagcattgaaattgacagcctgtatgagggcatcgacttctacaccagcatcacccgggccaggtttgaggagctgaatgctgacctcttccggggcaccctggaccctgtggagaaggccctgagagatgccaagctggacaagagccagatccatgacatcgtgctggtgggcggcagcacccgcatccccaagatccagaagctgctgcaggacttcttcaacgggaaggagctgaacaagagcatcaacccagatgaggccgtggcctatggagctgctgtgcaggccgccatcctgagcggggacaagtcagaaaatgtgcaggacctgctgctgctggatgtgacccccctgagcctgggcattgaaacagctgggggcgtgatgacagtgctgatcaagaggaacaccaccatccccaccaagcagacccagaccttcaccacctacagcgacaaccagcccggggtgctgatccaggtgtatgaaggagagcgggccatgaccaaggacaacaacctgctgggcaagtttgagctgaccggcatccccccagccccccggggcgtgccccagatcgaggtgacctttgatattgatgccaacggcatcctgaatgtgtctgctgtggacaagagcacaggcaaggagaacaagatcaccatcaccaatgacaagggccgcctgagcaaagaagatattgaaagaatggtgcaggaggccgagaagtacaaggccgaggatgagaagcagagggacaaggtgagcagcaagaacagcctggagagctatgccttcaacatgaaggccaccgtggaggatgagaagctgcagggcaagatcaatgatgaggacaagcagaagatcctggacaagtgcaatgagatcatcaactggctggacaagaaccagacagctgagaaggaggagtttgagcaccagcagaaggagctggagaaggtgtgcaaccccatcatcaccaagctgtaccagagcgctgggggcatgcctgggggcatgcctgggggcttccctgggggcggggcccctccttctggaggagccagcagcggccccaccatcgaggaggtggactag

SEQ ID NO: 166449 - DNA, 1233 bp, Artificial Sequence
  derived and/or modified sequence
atggtgaaccacttcatcgccgagttcaagaggaagcacaagaaggacatcagcgagaacaagagagctgtgcggcggctgaggacagcctgtgagcgggccaagaggaccctgagcagcagcacccaggccagcattgaaattgacagcctgtatgagggcatcgacttctacaccagcatcacccgggccaggtttgaggagctgaatgctgacctcttccggggcaccctggaccctgtggagaaggccctgagagatgccaagctggacaagagccagatccatgacatcgtgctggtgggcggcagcacccgcatccccaagatccagaagctgctgcaggacttcttcaacgggaaggagctgaacaagagcatcaacccagatgaggccgtggcctatggagctgctgtgcaggccgccatcctgagcggggacaagtcagaaaatgtgcaggacctgctgctgctggatgtgacccccctgagcctgggcattgaaacagctgggggcgtgatgacagtgctgatcaagaggaacaccaccatccccaccaagcagacccagaccttcaccacctacagcgacaaccagcccggggtgctgatccaggtgtatgaaggagagcgggccatgaccaaggacaacaacctgctgggcaagtttgagctgaccggcatccccccagccccccggggcgtgccccagatcgaggtgacctttgatattgatgccaacggcatcctgaatgtgtctgctgtggacaagagcacaggcaaggagaacaagatcaccatcaccaatgacaagggccgcctgagcaaagaagatattgaaagaatggtgcaggaggccgagaagtacaaggccgaggatgagaagcagagggacaaggtgagcagcaagaacagcctggagagctatgccttcaacatgaaggccaccgtggaggatgagaagctgcagggcaagatcaatgatgaggacaagcagaagatcctggacaagtgcaatgagatcatcaactggctggacaagaaccagacagctgagaaggaggagtttgagcaccagcagaaggagctggagaaggtgtgcaaccccatcatcaccaagctgtaccagagcgctgggggcatgcctgggggcatgcctgggggcttccctgggggcggggcccctccttctggaggagccagcagcggccccaccatcgaggaggtggactag

SEQ ID NO: 166450 - DNA, 1884 bp, Artificial Sequence
  derived and/or modified sequence
atgagcaagggccccgccgtgggcatcgacctgggcaccacctactcctgtgtcggagtcttccagcacggcaaggtggagattatagctaacgaccagggcaatcgcactacgccaagctatgttgcgttcacagacaccgaacgtctgatcggagatgccgctaagaaccaggtagccatgaacccaacaaacacagtgttcgatgccaagaggcttattggccgcaggttcgatgatgcggtggtgcagtccgatatgaagcactggccttttatggtcgtgaacgatgctggacgccccaaggtgcaggtggagtacaaaggcgagactaaatctttttacccggaggaggtctcatcgatggtgctcacaaaaatgaaggaaatcgccgaagcatacttggggaaagccacgaaggatgcaggcactatcgccggactgaatgtcctccggatcattaacgaaccaactgcggctgccatcgcatatggcttggacaagaaggtaggggctgaaaggaacgttttgatttttgatttaggcggggggacctttgatgttagcattttaaccatcgaagatgggatctttgaagttaaatctacggcgggcgacacgcacctgggcggagaggatttcgataacagaatggtgaatcactttatcgccgagtttaaacggaaacacaagaaagacattagtgagaataaacgggctgtccgcaggcttcgcacagcttgtgagcgagcaaagcgcacattaagtagtagcacacaggcatcaattgagatcgactcgttgtatgaaggcatcgatttctacactagcattacacgggcccgattcgaagagcttaacgcagatttgttccgaggcactctggaccccgttgaaaaagctctgagagacgccaagctggacaagtcacagatccacgatatcgtgttagtgggaggttccacccgtatccccaaaattcagaagctcttgcaagacttttttaacgggaaagaactcaataaaagcatcaacccagacgaagctgtagcgtacggggccgcagtccaagccgctattctgagtggcgacaagtctgagaatgttcaggatctactgctgttagacgtgacacccctgtctcttggtattgaaaccgctggcggcgtgatgaccgtcctgatcaagaggaatactactatcccgactaagcaaacccagactttcacgacatattcagacaaccagcctggtgttctgattcaggtgtatgaaggagaacgggccatgacaaaggacaataatttactgggaaagtttgaactgaccgggattcccccagctccccgcggggtgccacagatagaagtgacctttgatattgatgccaacggaatccttaacgtgagcgccgtggacaagtccactgggaaagaaaataagattacaatcactaatgataagggcagactcagtaaagaagacattgagcggatggtgcaggaggcggaaaaatataaggctgaggacgagaagcagagagacaaggtgtcaagcaagaacagcttggagtcgtacgcctttaatatgaaggctaccgtcgaggacgaaaagttgcagggaaaaattaatgacgaagacaagcagaagattctggacaagtgcaatgaaatcataaactggctggacaagaaccagaccgctgagaaggaggagtttgaacatcagcagaaagagctcgagaaggtatgcaaccccataattaccaagctctatcagtccgctggaggaatgcccggaggtatgccaggggggtttccgggaggtggcgcccccccttctgggggcgccagctccggaccaaccatcgaagaagtggattag

SEQ ID NO: 166451 - DNA, 1941 bp, Artificial Sequence
  derived and/or modified sequence
atgagcaagggccccgccgtgggcatcgacctgggcaccacctactcctgtgtgggagtgttccagcatggtaaggtcgagattatcgcaaacgatcagggaaacagaactaccccatcctacgtcgcctttacagacactgagcgactgatcggcgacgctgctaagaatcaagttgccatgaatccaacaaacaccgtgtttgatgctaaaagactaatcggcaggcgcttcgatgatgcggtggtgcaaagtgacatgaagcattggcctttcatggttgtgaatgatgccggaaggcccaaagtgcaggtggagtataaaggcgagaccaaatctttttatcccgaagaggtgtccagcatggtgctgactaagatgaaagagattgcagaggcttacctgggaaagacagtgaccaacgctgtcgtgacagtgccagcatacttcaatgactctcagcgccaggcaaccaaggacgcgggcacaattgctggtcttaacgtgctgagaatcatcaatgaacctaccgcagcggcaatcgcttacggtctggataagaaggtgggtgcagagagaaacgtactaatcttcgatttaggtgggggaacatttgatgtgtccatcctgaccatcgaggatgggatattcgaggtcaagagcacagctggtgacacccatctgggcggagaagactttgacaatcgcatggtaaatcacttcattgctgagtttaagagaaagcataagaaggacatctccgagaacaaaagggctgtcaggcgactgagaacggcatgcgagcgagcgaagaggaccctttcatcatctacccaggcaagcattgagattgattccctgtacgaaggtattgacttctatacttccatcactcgggcccgcttcgaagagcttaacgctgatctctttcgcggaacattggatcccgttgaaaaagcgctgcgcgacgcgaagctggacaagagccagattcacgacattgtccttgtgggcggcagtactcgaatacccaagatccagaagctgctccaggacttcttcaatgggaaggagctcaacaaatccatcaatcccgacgaggccgtcgcttatggcgccgcagtccaggccgccatattaagcggcgataagagcgaaaatgtccaagacctgctgctcttggacgttacacccctctcactaggaatcgagacagctgggggcgtcatgaccgtgcttattaagcgcaatacaaccatccccacaaaacagactcagactttcactacatatagcgacaaccagcctggcgtgctgatccaggtgtatgagggtgagagggcaatgacaaaggacaataatctcctgggaaaatttgaattgactggaattccccccgcacctcgtggggtgccgcagatcgaagtcacctttgacatcgacgccaacggtatcttgaacgtctctgctgttgataaatcaacaggcaaggaaaacaagatcactatcactaatgacaagggtcgattgagcaaagaggacatcgagcgcatggtacaagaggctgagaaatataaagcagaggacgagaaacagcgggataaggtaagtagcaaaaactcacttgagtcttatgccttcaatatgaaggctacagtggaagatgaaaagttacaggggaagataaacgacgaggataagcagaagatccttgataaatgcaacgaaatcataaactggctggataaaaatcagacagcggagaaagaggaattcgagcatcagcagaaggagctggagaaagtctgcaacccaattataactaagctttaccagtcagccgggggtatgcctggagggatgcctggtgggttccccggggggggagcgccaccatcaggtggagcctcatcaggaccaacaattgaggaggtagattag

SEQ ID NO: 166452 - DNA, 1503 bp, Artificial Sequence
  derived and/or modified sequence
atgagcaagggccccgccgtgggcatcgacctgggcaccacctactcctgtgtcggcgtcttccagcacggcaaagtggaaatcattgccaacgatcagggaaaccgcacaactcctagttacgttgcctttacggacaccgaacgtctgatcggagacgctgccaaaaaccaagtcgccatgaaccctacaaatacagtgttcgatgcaaaacgcctgattggacggaggttcgacgatgctgtggtgcaatccgatatgaaacactggccctttatggtggtgaatgacgccggcagaccaaagcataaaaaggacatatcagagaacaaaagagctgttaggaggctgagaaccgcctgtgaaagagcaaagaggaccctttctagctctactcaggcttctatcgaaattgattctctgtacgaaggaattgacttttacacttctattacccgggcacgttttgaagaactgaatgcagatctgttcaggggcaccctggatcccgtcgagaaggctctgcgcgacgccaaattggacaagtcccagatccacgacatcgtcttagtcggcggcagcacaaggataccaaaaattcagaaactgctgcaggatttttttaatggcaaagaattaaacaaaagtatcaatccagatgaggctgtggcatacggcgccgccgtgcaggcagcaattctgagcggcgacaagtctgagaacgtccaggacctgttgttgctcgacgtcacgccactgtccctgggtatcgagactgccgggggtgtgatgaccgtgcttattaaaagaaatactaccattccaactaaacagacccaaactttcacaacctacagcgataaccagcctggagtactgattcaggtgtacgaaggcgaaagagccatgactaaggacaacaacctgctgggcaaatttgaactaactggcatcccaccagctcctaggggtgtccctcagatcgaagtcactttcgatatcgatgccaacggcattctgaatgtgagcgctgtcgataaaagcacagggaaggagaataagatcactataacaaatgataagggacgcctctccaaagaggacatagagcgtatggttcaggaggcagaaaaatataaggctgaggacgagaagcaaagggataaagtgtcgagcaagaattccctggaatcctacgccttcaacatgaaagctactgtggaggacgagaaattgcaggggaagatcaacgacgaggacaaacagaaaatcctcgataaatgtaacgagataattaactggctggacaagaatcagactgctgaaaaagaagagtttgaacaccagcagaaggagctggagaaagtctgcaatccgattatcacaaaactctaccagagcgccggcggaatgcccggaggaatgcccggggggttcccggggggaggagcccccccaagcggaggagctagctcaggacccaccatcgaagaagtggactag

SEQ ID NO: 166453 - DNA, 1233 bp, Artificial Sequence
  derived and/or modified sequence
atggtgaaccacttcatcgccgagttcaagcggaagcacaagaaggacatcagcgaaaataaaagggcggtcagacgattgagaactgcgtgtgagcgtgctaaaaggaccctttccagcagcacacaagccagcattgaaattgatagcctgtatgagggaattgacttttacacctccatcacgagagctcggttcgaggaactgaacgccgatctctttcgaggaacgctggaccctgttgagaaagctctgcgggacgccaaactcgataaaagccagattcacgatattgttcttgtggggggatccacgcggatccccaagatacagaagctgttacaggacttctttaacggtaaagagctgaataaaagcataaaccccgatgaagctgtggcctacggtgccgcagtgcaagcagctatcttatccggtgataaatctgagaatgtgcaagatctcttattactggatgtaacgcctttaagtctaggcatcgagaccgctggaggagtcatgacagttcttattaaacgtaatacaactattcctacaaaacaaacccaaacgtttactacatatagcgacaatcagcctggggtactcattcaggtgtatgaaggagagagagccatgaccaaggacaataaccttctggggaagttcgaacttacgggcataccccccgccccacggggggtgccccagatagaagtgaccttcgatatcgatgctaacggaattctgaatgtcagcgctgtggataagagcactggcaaggagaataagatcaccattacgaatgataagggaaggttaagtaaagaagacattgaacgcatggtccaagaagcagaaaagtacaaggccgaagatgaaaagcagcgtgacaaagtgtcttccaagaattctttagagtcgtacgcattcaatatgaaagcgaccgtcgaagacgagaagctgcaggggaagatcaacgacgaggataagcagaaaatcctggataaatgcaatgagatcatcaactggttagataaaaatcagaccgcggagaaggaagaatttgagcatcaacaaaaagagctggaaaaggtgtgtaacccaattatcaccaagctctatcagagtgccggcgggatgccgggaggcatgcctggagggttccccggaggcggagctccgccatcagggggggcttcttccggccctaccattgaagaggtggactag

SEQ ID NO: 166454 - DNA, 1941 bp, Artificial Sequence
  derived and/or modified sequence
atgagcaagggccccgccgtgggcatcgacctgggcaccacctactcatgtgtaggcgtgtttcaacacggtaaggttgaaatcatagccaatgaccaaggcaaccgtaccaccccttcctatgtggcctttactgatactgagagactgattggggatgccgccaagaatcaggttgctatgaaccctacaaataccgtctttgatgctaagcgcctgatagggagacgattcgatgacgctgtggtccaatcagacatgaaacactggcccttcatggtagtaaacgatgccggccggcctaaagtccaggtcgagtataaaggcgagacaaagagtttttatcccgaagaggtcagcagcatggttctgacaaaaatgaaggaaatagctgaggcctacctgggaaaaaccgttacgaacgccgtcgtgactgttccggcctatttcaacgactcccagcggcaggccactaaggacgccgggacaatagctgggctgaatgtgctccgcatcatcaacgagcctaccgcggccgctatcgcctacggcctggataaaaaggtaggggccgaacgcaatgtgctcatcttcgacttaggcggagggaccttcgacgtgtcaattctgaccatagaggatgggatctttgaggtcaagagtacagctggagacactcatcttgggggcgaagactttgataacagaatggtgaatcactttatcgccgagtttaagaggaaacataagaaagacattagtgagaataagagagcggtgagaaggttgagaaccgcctgtgagcgggcaaagcgtactctttcatctagcacccaggcctctatagaaatcgatagtctctatgagggaatcgacttttatacttctattactagagcaagatttgaggagcttaacgcggacctgttccgcggtaccctcgaccccgtagaaaaggcattgagggatgcaaaactcgataagtcccaaattcacgacattgttctggttggcggatccacccgtattcccaagatccagaagctgctccaggacttttttaatggcaaagagctgaataaatcaatcaacccagatgaagctgtggcctatggcgccgccgtgcaggccgcaatcctatccggtgataaatccgaaaacgtacaggaccttcttttacttgatgtgacaccactatctttagggatcgagactgcaggaggggtcatgaccgtgctgatcaagcggaatacaacaatcccaaccaagcagacacagacgtttacaacttattccgacaaccaacccggggttctaatccaagtatacgagggtgaaagagcgatgacaaaggataataatctcctagggaagtttgaactgactggcatccccccagcaccccgaggggtgccacaaattgaagtcacattcgacattgatgctaatggtatactaaacgtgtcggcggttgacaagtctaccggaaaagagaacaagattactatcacaaacgataaaggaagactgagcaaggaagatatcgagcggatggtgcaagaagctgaaaagtacaaggcagaggatgagaagcagcgggataaggtgtccagcaagaattcactggaaagttacgcatttaatatgaaagctactgtggaggatgaaaaactccaggggaaaattaacgatgaggataagcagaagattcttgataagtgcaacgagattattaattggctggacaagaaccagaccgccgagaaggaggagtttgaacatcagcagaaagaactggagaaggtctgtaaccctatcatcacaaaactgtatcagtcagccgggggcatgcctggcggcatgcccggcggcttcccgggagggggagctcctccatctgggggtgcatcctccggtcctactattgaagaagtggactag

SEQ ID NO: 166455 - DNA, 1884 bp, Artificial Sequence
  derived and/or modified sequence
atgtcaaaggggcctgcggttgggattgacctcggaactacatattcgtgcgttggagtattccaacatggcaaagtggaaatcatagccaatgaccagggcaatcgcacaaccccaagctacgtcgcatttacagacacggagaggctgatcggagatgccgctaaaaatcaggtggccatgaaccctactaatactgtgttcgacgcaaaaagactcattggcagacgattcgacgacgccgtggtgcaaagcgatatgaaacactggccattcatggtggtgaacgacgcaggacgcccaaaagtccaagtcgaatacaagggtgagactaagtcgttttatccagaagaagtaagtagtatggtgctgacaaaaatgaaggagattgccgaggcttacctcggtaaagccacaaaggacgccggaacaattgccggtctcaacgtgctcagaatcattaatgagccaactgctgccgctatcgcctatggcctggataaaaaggttggggcagaacggaatgtgctcatcttcgatctggggggaggcacgtttgacgtctccatcctgaccattgaagatggaatcttcgaagtaaagtctaccgcaggagacacccacctgggcggagaggactttgataataggatggtgaatcactttatagcagagttcaaacggaaacacaaaaaggatattagcgagaataagagagctgtgcggagattgcggaccgcctgtgaacgggcaaagagaacgttgtcatcttctactcaggcgtcaattgaaatcgacagtctctacgaaggcattgatttctacacatctattactagagcgagatttgaggagcttaatgccgacctattcaggggcaccctcgatcccgtggagaaggcactaagagacgccaaattggacaaaagccaaatccacgatatcgttctggtgggcggaagtactcggatacccaaaatccagaagctgttgcaggacttcttcaatggcaaggagctcaacaagagcattaacccggatgaagctgtcgcttacggtgctgctgtgcaggccgctatcctctcaggagacaaatccgaaaatgtgcaggatctgctcctcctggacgtgacccctctgagcttagggatcgagaccgcagggggagtgatgaccgttttgatcaagcgtaacacaaccatcccaactaaacaaactcagacttttaccacttacagcgataaccaacccggagttttaatccaggtatatgagggtgagagggccatgactaaagacaacaacctgctgggcaaatttgagctaacggggatcccaccggctccccgtggcgtccctcagatcgaagtgacatttgacatagatgccaatggaatcctgaacgtctcagcagtggacaagtcgactggcaaagaaaataagataacaatcaccaacgataaaggtcgcctgagcaaggaggatatagaacgcatggtccaggaggccgagaagtacaaggccgaggatgaaaaacaacgcgataaagttagctcaaagaattcactcgagagctacgcctttaacatgaaggccactgttgaagacgaaaagctccaaggaaagataaacgatgaggacaagcagaaaattctagataaatgtaatgagataatcaactggctggataagaatcagacagcggagaaagaggaatttgagcaccagcaaaaggagttagaaaaagtgtgcaatcctattattactaagctatatcaatcggcaggtggcatgcctggcggaatgccaggaggattcccaggtggcggagcccctcccagcggaggggcatcgtctggcccaaccatcgaagaagtcgattag

SEQ ID NO: 166456 - DNA, 1941 bp, Artificial Sequence
  derived and/or modified sequence
atgtcgaagggaccagctgttgggatcgatctgggcacaacatactcatgcgtcggagtgttccagcatggcaaagtggagattattgctaacgaccaaggtaatcgcaccactccaagctacgttgcctttaccgatactgagcggctaattggcgacgccgctaaaaatcaagtcgcaatgaaccccacaaatacagttttcgacgctaagaggcttataggcaggcgatttgatgacgccgtggtccagagtgatatgaaacactggccgtttatggtcgtcaacgatgcaggccgacccaaggtacaggtcgagtataagggtgagactaaatcattttaccccgaagaggtgagcagcatggtgctgaccaaaatgaaagagatcgccgaggcctatctaggaaaaactgttacaaacgctgtagtgacagtgcccgcttacttcaacgatagccagaggcaagcaacaaaggatgccggaactattgcagggcttaatgttctgcggataattaacgagcctacagccgctgcaattgcctatggcctcgataagaaggtgggcgctgaaaggaacgtactgatcttcgatctgggcggaggaactttcgacgttagcattttaaccatcgaagatggtatcttcgaagtgaagtccacagctggagatactcaccttggtggagaggactttgacaacaggatggtgaatcactttattgccgaattcaagagaaagcataagaaggatatcagcgaaaataagcgcgcagtgaggcggctccgcaccgcttgtgaaagagcgaagaggaccctgtcctccagcacacaggcgagtatcgaaatcgatagcctgtatgagggcattgacttttacacatccataacacgtgctcggtttgaggaacttaacgccgacctgtttagaggcacgctagatcccgtggaaaaggccctcagagacgccaagcttgacaaatcacagatacatgacatagtcctcgttgggggaagcacacggatccctaaaattcaaaagctgttgcaggacttttttaacgggaaggagctgaataaatccattaaccctgatgaggctgttgcatatggcgcagccgttcaggctgcaatcctgagcggcgacaagtcagagaatgtccaggatctgctgctgttagacgtcaccccgctgagtcttggaatagaaacagccggaggtgtgatgaccgtgctgatcaagcggaacactaccatccccaccaagcagacacaaacattcactacatatagcgacaaccagcccggagtgctgattcaggtgtatgagggtgagagagcgatgacaaaggataacaatctactcgggaagtttgaattgactgggataccccctgcccctcggggagtacctcagatcgaggtcacctttgatattgatgctaatggcatcctgaacgtgtctgcagtggacaagtccaccggcaaggagaataaaatcaccattacgaacgataaaggccgtctgtctaaggaagatatcgagcgaatggtccaggaagccgaaaaatacaaagccgaggacgagaagcaaagggataaagtgtccagtaagaactccctggaaagctacgctttcaatatgaaggcaacagtggaagacgagaaactccaggggaagattaacgatgaggataaacagaagatactggataaatgcaatgaaattatcaactggcttgacaagaatcaaaccgccgaaaaagaggagttcgagcaccagcagaaggagttagagaaagtctgtaatcctatcattaccaaactataccagtcggccggaggaatgccaggaggcatgcctggaggatttcctggcggaggagccccaccgagcggaggcgcttctagtgggccaaccatcgaggaggtggattag

SEQ ID NO: 166457 - DNA, 1503 bp, Artificial Sequence
  derived and/or modified sequence
atgtccaaggggccagctgtgggcatcgacttgggaaccacatacagttgcgtaggcgttttccaacacggcaaggtcgagatcattgccaatgatcagggcaaccgaacaacaccatcctacgtggctttcaccgacacagaaaggctgatcggggacgcagctaaaaaccaggtcgctatgaaccccaccaataccgtttttgacgccaagcgattgataggcagacggttcgacgacgcagtggtgcagtctgacatgaagcactggcctttcatggtcgtgaacgacgctggaagacctaagcataaaaaagatatttctgaaaataagcgggctgtgagacgtctgcgcactgcgtgtgagagggccaaaaggacactcagctcctctactcaagctagtattgagatcgatagcctgtacgaaggtattgatttttatacatccataacccgcgctagattcgaggagcttaacgctgatctgttccggggaacactcgatcctgttgagaaggccctccgagatgctaagctggataagagccagatacatgacatcgtccttgtggggggtagcacgcggatccccaaaatccagaaactcctacaagacttctttaatggcaaggaactcaacaagtctatcaatcctgacgaagctgtggcctacggagctgccgtgcaggccgctatcttaagtggcgacaaatccgagaacgtgcaggacctgcttctcctggacgtgacccctctgagtctcggaatcgaaaccgccggtggagtgatgaccgtgctgatcaagagaaataccaccattccaaccaagcaaacacagacctttacgacgtattccgacaatcagccgggagtactcatacaggtctatgagggggagcgggcaatgaccaaagacaacaacctgttggggaaattcgaactcacaggtatccctccagctcctcgcggagtgccccaaattgaggtcacatttgatatagatgcaaatggtattcttaacgtgagtgccgtcgacaagagtaccggcaaggagaataagataaccattactaacgataaaggtagattatctaaggaagatatcgaaagaatggtgcaggaagccgagaagtacaaggcagaggatgagaaacagcgagataaggtgtcctccaagaatagtctggaaagctacgcctttaatatgaaggccacggtggaggacgaaaagctgcagggcaagattaacgatgaagacaaacagaagattctggacaagtgcaatgagattatcaattggttagacaagaaccagaccgctgaaaaggaggaatttgagcaccagcagaaagagctcgagaaagtatgtaacccaatcataaccaagctgtatcaaagtgccggaggaatgcccggtggcatgccaggagggttcccaggaggaggagcgccaccatcagggggtgccagcagtggacccaccattgaagaggtggactag

SEQ ID NO: 166458 - DNA, 1233 bp, Artificial Sequence
  derived and/or modified sequence
atggttaatcacttcattgcagaatttaaaaggaagcataagaaagacataagcgaaaacaaacgggcagtgagacggttgaggaccgcatgtgagcgtgctaaacgcactctgtcttcttccacacaggcgtccatcgagatcgacagcttgtatgaaggtattgatttctatacctccatcacgagagcaaggtttgaggagctgaatgccgacttgtttagaggcactctcgatccggttgaaaaggctctgcgagacgccaagttggacaaaagccaaatacacgacatcgtgctcgtagggggatctactcgcattccaaaaattcagaaacttcttcaggacttcttcaatgggaaagagctaaacaaatctatcaatccagatgaggcagtcgcgtacggggctgctgtgcaggctgctatcctgagtggagataaatccgagaacgtgcaggacttgctgcttctggacgtgaccccgctgtctttagggattgaaactgccggtggtgtgatgacagtgctgatcaagagaaataccaccatacctacaaaacagacacagactttcacaacctacagcgataatcagcctggcgtattgattcaggtttatgagggggagcgcgcaatgactaaagacaataatttactggggaaattcgagttgactggcattccccctgcacctagaggggtgccccagattgaagtgacatttgatatcgacgccaacggtattctgaacgtgtccgctgtagataagtctaccggaaaggagaataagatcactattaccaacgacaaagggaggctgtctaaagaggacatagagaggatggtgcaggaagccgaaaaatataaagccgaagatgaaaagcaacgcgataaagtctcctcaaagaattctctggagagctatgcttttaacatgaaggccactgttgaggatgaaaaactccagggaaaaattaacgacgaggacaaacaaaagattctagataagtgtaacgaaatcatcaactggctggacaagaaccagacagccgaaaaagaagaatttgagcatcaacagaaagaattagagaaggtgtgcaaccctatcatcaccaaactctatcagagcgccggaggtatgcccggaggcatgccgggtgggtttcccggagggggagctcctccttcaggcggagcttcaagtggcccaactatagaggaggtggactag

SEQ ID NO: 166459 - DNA, 1941 bp, Artificial Sequence
  derived and/or modified sequence
atgtctaaaggccctgccgtcggcatcgacctggggactacatacagttgtgtgggggtgttccagcacgggaaggtcgagattatcgctaatgaccaaggcaatcggactaccccatcttatgtcgctttcactgacaccgagcgtctcattggggacgccgcaaagaatcaggttgctatgaatcctactaatacggtgtttgacgcaaagcggctgatcggcagaaggtttgatgacgccgtggtccaatccgatatgaaacattggccattcatggtagtgaacgatgcgggtcgtcctaaggttcaagtcgagtataaaggtgagactaaaagcttctatcctgaggaggtgtccagcatggtcctgacgaaaatgaaggaaatagcggaagcgtacctcggcaaaactgtcaccaatgcagtcgtgaccgtgcctgcctacttcaacgattctcagagacaggccacaaaggacgccggaactattgcaggcctgaacgtcctgaggatcatcaacgagccaacggccgcagcgattgcctatggtttggacaagaaggtcggcgcagagaggaacgtcctgatatttgatctcgggggtggtacgtttgatgtgtccatcttgacgatcgaggacggcatattcgaagtgaagagcacagccggagacactcacctgggaggcgaagacttcgacaatagaatggtgaaccacttcattgcagaatttaagaggaagcacaagaaggatatttctgagaacaaaagagcggtgcgccgacttcgaaccgcctgtgagagggcaaaacgcaccttatcctcatcaactcaggctagcatcgagattgacagtctgtacgaaggaatcgatttttacaccagtatcacccgggctaggtttgaggagttaaatgcggatctgtttagggggaccttagatcctgtggagaaagctctgagggacgccaagctcgataaatcacaaatccacgacatcgtcctggttggaggctcaactcgcatccccaagatccaaaaattactccaggacttctttaatggtaaggagctgaacaaaagcatcaatccagacgaggccgtcgcctatggggctgccgtgcaggccgctatcctgagtggcgacaaatcggaaaatgttcaggacctgctgcttctggatgtgacacctctaagcctcggcattgaaaccgccggaggcgtgatgacggttcttataaagagaaacaccaccatccccacaaaacaaactcagactttcaccacatacagcgataaccagcccggtgtgctcatccaggtgtacgaaggggagcgtgccatgacaaaggacaacaatttgctaggcaagttcgaactcactggcatcccgccagctccaagaggggttcctcagatagaggtgactttcgatatcgatgccaatgggattctcaatgtatcggccgtcgacaaatccaccgggaaagagaataagatcactataactaatgataagggaaggctgtctaaggaagatattgaacgtatggtgcaggaggctgagaaatacaaagctgaggacgaaaagcagcgggacaaagtttcaagcaaaaacagtcttgaatcatacgcctttaacatgaaagcgactgttgaagacgagaaactccaggggaaaataaacgatgaggataaacaaaagatcctggataaatgcaacgagattattaactggctggataagaatcagaccgccgaaaaagaagagtttgaacaccaacagaaggagttggagaaagtgtgcaaccctataatcactaaactgtaccagtccgccggaggaatgcccggtggaatgcccggaggattccctggtggaggtgctccaccatccggcggagcgagttcggggccaaccatcgaagaggtggattag

SEQ ID NO: 166460 - DNA, 1884 bp, Artificial Sequence
  derived and/or modified sequence
atgtctaaggggcctgccgtcggcattgatctcgggaccacatactcttgcgttggcgttttccaacacgggaaagtggagatcattgctaatgaccagggaaaccggaccactccctcctacgttgctttcacagacactgaaaggttaattggagatgctgcgaaaaaccaagtggccatgaacccaacaaataccgtctttgacgctaagaggctgatcggtcgcagatttgacgatgcagtggttcagtctgacatgaagcactggccgttcatggtcgtcaacgacgctggtcggcctaaggtgcaggtcgaatacaagggcgaaacgaagagcttttaccctgaggaggtaagttcaatggtgttgacaaagatgaaggaaatcgcagaggcatacctggggaaggctaccaaagacgccgggacaattgctgggcttaacgtgttgcgcattatcaacgaacccacggcagcagccattgcctatggactggacaaaaaggtgggcgccgaacgaaatgtgctcatcttcgaccttggcggagggacctttgatgtctctattttgactatcgaagatgggatctttgaggttaaaagcaccgctggagatacccacttaggtggggaggacttcgataatcgcatggttaatcatttcatagccgaattcaaacggaagcacaaaaaagatatatcagagaataagcgtgcagtgcggcgccttcggactgcgtgcgagcgggctaaaaggacattgtcttcaagcactcaggcaagcatagagatcgactctctttacgagggaattgacttctacacatcaattaccagagcaagattcgaggaactcaatgcagatttgtttcgaggtacattggacccagtcgaaaaagccttgagagatgctaaactggataagagccaaatacacgacattgtcttggttggcggaagtacacgtatcccaaagattcagaagctcctgcaggatttttttaacggaaaagaactgaacaaatcaattaacccagacgaagccgtcgcgtatggtgctgccgtgcaggcagccattctgtccggcgataagagcgaaaacgtgcaggacctgctacttcttgacgtgacaccgttgtctcttggcatcgaaacggccggaggggttatgacagtgttgattaaaaggaacaccaccatccccactaagcagacccagacattcacaacgtactcagacaaccagcctggagtgcttatccaagtctacgaaggcgagcgggctatgaccaaggacaataatctgctgggcaagttcgaactgacagggattccccctgcacccagaggggtaccgcaaatagaagtaactttcgatatcgatgccaacggtatactgaatgtaagcgcagtcgataagtctaccgggaaggagaataaaattaccattacaaatgacaaaggccgattatcaaaggaagacattgaacggatggtgcaggaggctgaaaaatataaggcggaagacgaaaaacagagagacaaggtgagctccaagaacagcctggaatcttacgcatttaatatgaaggctacagttgaagacgagaagcttcagggcaagatcaacgacgaggacaaacagaaaattttggataagtgcaacgagatcataaattggttagataagaaccagaccgcggaaaaggaagaattcgagcatcagcagaaagaactcgagaaggtctgtaatcccattattaccaaactctaccagtccgccggaggtatgcccggagggatgcctggaggatttcctggaggtggggcgccccccagcggcggagcatcaagtgggccgactattgaagaagtggattag

SEQ ID NO: 166461 - DNA, 1941 bp, Artificial Sequence
  derived and/or modified sequence
atgagcaagggccctgccgtcgggatcgatctcgggacaacctactcgtgcgtgggtgtgtttcaacacggaaaagttgagatcatagccaatgaccagggaaacagaactacaccctcttatgtggcttttaccgacacagaaagactcattggagatgccgccaaaaaccaagtcgccatgaatcctacaaatacagtgttcgatgctaagagattaatcggacgccggtttgatgatgccgtggtccaatccgacatgaaacactggcctttcatggtggtaaatgatgctggccggcctaaggtccaagtcgaatacaagggggaaaccaagagcttttatccggaggaagtaagtagcatggtactcacgaagatgaaggaaatcgccgaggcctacctggggaaaactgtaaccaacgccgtggtgaccgtgcccgcctatttcaatgatagtcagcggcaagcaaccaaagacgccggcaccatcgccgggctgaacgtcctgaggatcataaacgagcccacagccgcagctattgcttatggccttgacaagaaagttggcgcagagagaaacgttctgatcttcgatctaggtggcggcactttcgacgtatctattctgaccatcgaggacgggatatttgaggttaagagcacagctggcgacacacacctggggggcgaggacttcgacaatcgcatggtaaatcactttattgccgaatttaagagaaagcacaagaaagacatttcggagaacaaacgtgccgttagacgactgcggaccgcctgtgagcgcgctaaacggaccctctcctcctccacccaggctagtatcgagattgattccttgtacgaaggcattgatttttacacctccattacgcgagcaagatttgaagagctgaacgctgacctgttcagaggcacattagatcccgtggaaaaggctttgagggacgccaagctggataagagccagattcacgatatcgtcctagtgggaggctccactagaattcccaagatccaaaagctgttacaggatttttttaatggtaaagagttgaataaaagcattaatcccgatgaggctgtagcctatggagccgccgtgcaagccgccatcttatccggagataaaagcgaaaatgtgcaagatctgctcttgctcgatgtgacccctctcagcttagggatagaaacggccggcggggttatgacagtcttgatcaagagaaacacaacaatacctactaagcagacacagactttcacgacttactctgacaatcagcccggtgtgctgatccaagtatacgaaggggaaagggcaatgactaaagataacaatttactcggtaagttcgaactgacaggcattccccccgccccacgcggcgtgccacagattgaggtcacatttgacattgatgcaaacggtatcttaaacgtgtccgctgtcgacaagtcaaccggcaaggagaacaagatcaccattaccaacgacaaaggccgccttagcaaagaggacatagaaagaatggtacaagaagctgagaagtacaaggcggaggatgaaaagcagagggataaagtttcttctaaaaattctctggaaagctacgcctttaacatgaaggctacagtcgaggacgagaagcttcaggggaagatcaatgatgaagacaagcaaaagatccttgacaagtgtaatgagatcatcaactggctggataagaatcagaccgcggaaaaggaagagttcgagcatcagcagaaggagctggagaaggtttgcaatcctattattacaaagttatatcagtccgccgggggcatgccaggcggtatgcccggaggattcccggggggaggagccccgccttctggaggggccagttcagggcctacgatcgaagaggttgattag

SEQ ID NO: 166462 - DNA, 1503 bp, Artificial Sequence
  derived and/or modified sequence
atgtccaagggaccagctgttgggatcgatctagggacaacatacagctgtgttggagttttccagcatggtaaagtggaaatcatcgcaaacgaccagggaaatagaacaacaccaagctacgtggctttcaccgataccgagaggttgatcggagacgccgctaaaaatcaggtagcaatgaaccctacgaatacagtgtttgatgcgaagaggctcattggccgacggttcgatgacgcagtcgtacagagcgatatgaaacattggccctttatggtggtgaatgatgccggtcggcccaaacataagaaggatatcagcgagaataaacgcgcagttagaagactgagaaccgcttgcgaacgggctaaacgcaccctctctagcagcacccaggctagcatcgagatagatagcctttatgaggggatcgacttttacacgagcattacccgtgccagattcgaggagctgaacgctgacctgttccgcggaaccctcgacccggttgagaaggctttgagggacgccaaactggataagagccagatacatgacatagtcctggttggtggatccacaagaatccccaaaattcagaaactgctccaggacttttttaacggcaaagaactcaacaaaagtattaaccccgacgaggctgtcgcttatggcgctgcagttcaggcagccatactgtccggagataaatcagagaacgtgcaggacctcctactgctggacgtgacacctctgagcctgggtattgagaccgctgggggggtgatgactgtacttatcaaacgtaatacaactataccgacaaagcagacacaaacttttaccacatacagtgacaatcagccaggagtactgattcaggtatatgaaggggaacgagctatgactaaggacaataatcttctgggtaaattcgagcttactggcatccccccagcacccagaggtgtgccgcagatcgaggtgactttcgatattgatgctaacggaattctgaacgtctcagcagttgacaagagtactggaaaagagaacaagatcacgataacaaacgataaaggacgactaagcaaagaagacattgaacgtatggtccaagaagcagagaagtacaaggccgaggacgaaaagcaacgcgacaaggtgtccagcaaaaactccctagagtcttacgctttcaacatgaaggcaacagtcgaagatgagaagctgcagggcaagatcaatgatgaggacaagcagaaaatcctggacaagtgtaacgagatcattaattggttggataagaatcagacagctgaaaaggaggagtttgagcatcaacagaaggaactggagaaggtctgcaatcctattattaccaagctgtatcagagtgcaggaggcatgccaggtggcatgcccgggggctttccagggggaggcgctcctccatccggtggtgctagttcagggcccactattgaagaagttgactag

SEQ ID NO: 166463 - DNA, 1233 bp, Artificial Sequence
  derived and/or modified sequence
atggtgaaccattttatcgctgaattcaagagaaaacacaaaaaggacatcagtgaaaacaaaagagcagtgcggaggctccgaactgcgtgtgaaagagcgaaacggactctcagttcctcaacacaagcaagtattgaaattgacagtctgtacgagggtattgacttttacacttcaattacccgggcccgattcgaggagctcaatgctgacctgttccgggggacattggatccggtggaaaaggcacttcgagacgccaaactggacaaatctcagatccatgacattgtcctggtgggcgggagcacacgaatccccaagatccagaaattgctacaggacttctttaacggaaaggaactgaataaaagcattaatccagacgaagccgtcgcttacggtgccgcagtgcaagcagccatcctctcgggagacaaatctgaaaacgtccaggatctgctcctcttagacgttactcctctatctttaggtattgagaccgcaggcggagttatgaccgtcttaatcaaacggaataccacaatccctaccaaacagactcagacttttaccacttactctgacaaccagccaggcgttctaatccaggtttacgaaggtgagcgagctatgacaaaggataacaatttactgggtaaattcgaattgacgggaattccacctgccccaaggggggtcccacagattgaggttaccttcgatatcgacgctaacggaatcctcaacgtcagcgctgttgacaaaagcaccgggaaggagaataaaatcacaatcaccaacgacaaaggaaggcttagtaaggaggatattgagagaatggtgcaggaagccgagaaatacaaagccgaagacgaaaaacaaagggataaggtgtcttccaaaaattccttggaatcctacgcattcaatatgaaagccactgttgaggacgagaaactgcagggaaagatcaacgatgaggacaagcagaagatcctcgataagtgcaacgaaataattaactggttggataaaaaccagactgccgaaaaggaagaattcgagcatcaacagaaagaactggagaaagtgtgtaaccctataattacgaagctgtaccagagcgcggggggaatgccaggtggaatgcctggaggttttcctggaggtggggcacccccctcaggcggggcctcctctggccctacaatcgaagaggtggactag

SEQ ID NO: 166464 - DNA, 1941 bp, Artificial Sequence
  derived and/or modified sequence
atgtctaaaggaccagccgtggggatcgatttaggaaccacatacagttgcgtgggggtctttcaacatggcaaggttgaaatcatagccaacgaccagggcaataggaccacccccagctacgtggccttcactgacaccgaacgcctgatcggagatgccgctaagaaccaggtagccatgaatccgacaaacaccgtgtttgatgccaaacgtctgatagggcgaaggttcgatgatgctgtggtgcagagcgacatgaagcattggccatttatggtagtgaatgatgccgggaggccaaaagtccaggttgaatataaaggcgaaacgaagtctttttaccccgaggaggtttcttctatggtactaacaaagatgaaggagatcgccgaggcttatctgggcaagacagtaacaaacgccgttgtgacagtgccagcctacttcaacgacagccaacgccaggccacaaaagatgcaggaacaatagcgggtctgaatgtactccggataatcaatgagccgacagccgccgctattgcttacggactggacaagaaggtgggggcggaaagaaatgtcctaatatttgacctcggcggcggcacattcgacgtgagcattctaaccatcgaagacgggatattcgaggttaagtcaacggccggcgatacgcatctgggaggtgaagattttgacaaccgcatggtgaatcattttattgcggaatttaaacgtaagcacaagaaagacatctctgagaataagcgcgctgttcgacggctacggacagcgtgcgaaagggccaagagaaccttgtccagttctacccaggccagtattgaaatcgatagcctttatgagggaatagacttctacacgagtattacccgagccagatttgaggagctcaacgccgacctatttaggggcacactggacccagtcgaaaaggccctacgggacgcaaagctggataagagtcaaattcacgacatcgttctggttggtggctctacacgcataccaaaaatccagaagttactgcaggatttctttaatggcaaggagctcaacaagtcaatcaatccagatgaggctgtggcgtatggagccgctgtgcaggcagctattttgagtggagacaagagtgagaatgttcaagacttattgctcctcgacgtgaccccgctttcgctgggtattgaaacagctggcggcgtgatgactgttcttatcaagcggaataccactatccctacaaagcagacgcagacattcacgacctactctgacaaccagccaggcgtcttgatccaagtctatgagggggagcgtgctatgaccaaggacaataacttgctgggaaagttcgagctgacaggaatccccccagccccaagaggcgtgccccagatagaggtgacttttgatattgacgccaatggcatactgaatgtgtctgccgtcgataaatccacaggtaaagaaaataagataaccatcactaacgataagggtcgattatctaaagaagatattgagagaatggtccaggaggccgaaaaatacaaagcagaagacgaaaagcagcgggacaaggtgtctagtaagaatagtctcgagtcttatgcatttaacatgaaagccaccgtggaggacgaaaagctgcagggcaaaatcaatgatgaagataaacagaaaatccttgataagtgtaatgaaatcatcaactggctggataaaaatcagaccgccgagaaggaggagtttgagcatcagcagaaagaattggagaaggtttgtaatccaatcattacaaaattgtatcaaagtgctggcggaatgccgggaggcatgccaggtgggttcccaggcggtggggcccctccaagtggcggcgcctcttcaggacctaccattgaagaagtcgattag

SEQ ID NO: 166465 - DNA, 1884 bp, Artificial Sequence
  derived and/or modified sequence
atgtcgaagggcccagcagtgggaatagatcttggaacgacgtactcgtgcgtgggcgtatttcagcatggaaaagtggagattattgcaaatgatcaggggaatagaaccactccttcatacgtagctttcaccgatacagagcgcctgatcggagatgcagcaaagaaccaagttgctatgaacccaactaacacagtgtttgatgctaaaagacttatcgggagaaggttcgacgacgcagtggtgcagtctgatatgaaacattggcccttcatggtggtcaacgatgcaggaagacctaaggtgcaagtggaatataagggcgagaccaagtctttttaccctgaggaagtaagtagcatggttttgacaaagatgaaggaaatagcagaggcttacctggggaaagcaaccaaagacgctggaaccatagccggactgaatgtgttgaggatcataaatgagccaacggcagccgccattgcttatgggttggacaaaaaggttggtgccgagcggaatgttcttatctttgatcttggcgggggtacctttgatgtgtcaatcctgaccattgaagatgggatatttgaggttaagtccacagctggagacactcatttggggggcgaagatttcgataacaggatggtgaaccattttatcgccgagttcaaacgcaaacataaaaaggacatctccgagaacaaaagagctgtcagacgcctacgaaccgcatgcgagcgggctaaaaggacactaagttcttctacccaagcatcaatagagatagatagtctgtacgagggaatcgatttttacacaagcatcacccgggctagattcgaagaactgaatgctgaccttttcagaggcactctggacccagtggaaaaagctctcagagacgcaaaactcgataagtcacagatccatgacatcgtgctggttgggggctctacaaggatccctaagattcaaaaactactccaagacttctttaacggaaaagaactcaataaatccatcaaccctgacgaagccgtggcatatggcgcagcggtgcaagccgccatcctgagtggcgataagtcagagaatgtgcaggacctgttgctgctggatgtgacacctctatctctggggatcgaaacagcgggcggagtgatgacagttttaattaaacgcaatacaacgatcccaacaaagcagacccaaacattcaccacttactccgataatcagccaggcgttctcatacaggtgtacgagggagaacgcgccatgacaaaagacaataatctccttggtaaattcgaacttactggaatccctccggcccctcgcggagtgcctcagattgaggtgacctttgacattgatgccaacggaatattaaatgtctccgccgtagacaaaagcactggcaaggaaaacaaaattaccatcacaaatgacaaagggcgcttgtccaaagaagatatagagagaatggttcaagaagcagaaaagtacaaagccgaagacgaaaaacagcgggataaggtcagcagcaaaaacagtctggagagctacgcattcaatatgaaagccaccgtcgaggacgagaagcttcagggtaaaattaatgatgaagacaaacagaaaatcctggacaaatgcaacgagattataaactggctggataagaaccagaccgctgaaaaagaagagtttgagcatcagcaaaaggaactcgagaaagtgtgtaacccaatcattacaaagttgtaccaaagcgcaggagggatgccgggtgggatgcctggaggatttcctggaggtggggcgccccccagcggcggagcatcaagtgggccgactattgaagaagtggattag

SEQ ID NO: 166466 - DNA, 1941 bp, Artificial Sequence
  derived and/or modified sequence
atgagtaagggaccagccgtaggcattgacctgggtaccacttattcatgcgttggtgtgttccagcatgggaaggtggaaataattgctaacgaccaaggtaatcggaccaccccatcatacgtagcttttacagatacagagaggttgatcggtgatgcagccaaaaatcaagtcgcaatgaatcctactaataccgttttcgatgctaagaggctcattggtcggcgattcgacgacgctgtcgtgcagagtgatatgaagcactggccgtttatggtggtgaacgacgcgggacgtcctaaggtgcaggtggaatataagggagagactaaaagcttttatcccgaagaggttagttctatggttcttaccaaaatgaaagaaattgcagaggcctatctgggtaaaacagtcacaaatgcagtagtgaccgtaccagcctatttcaatgacagccaaagacaggccacaaaagatgcaggcactattgcagggctgaacgtgcttagaatcattaacgagcccacagcagcagctatcgcttatggattggacaagaaggtgggagctgagcgcaacgtgctgattttcgatctgggtgggggtacattcgacgtgtccatccttaccatagaagatggcatattcgaggtgaagtctacggcaggcgacacacacttgggcggcgaggatttcgacaatagaatggtcaatcattttatagccgagtttaaaagaaagcacaagaaggatatcagcgagaacaaaagagcagtgagaagacttagaaccgcttgcgaacgggcaaagcgaactttatctagcagcacccaggccagcattgaaatagattccctctatgagggcattgatttttatacatcgatcaccagagcaagattcgaagaattgaacgcagatctgtttcgcgggactctggacccggtcgagaaagcacttcgagatgcaaagttggacaagtcacagatccacgatattgtactggtcgggggaagtacccgcataccgaaaatccagaagttgcttcaggatttttttaatggtaaagaactgaataaatctatcaatcccgatgaggctgtcgcctatggagccgcagtccaagctgccatactgtccggcgataagagtgagaatgtacaagatctcctgctactcgacgtcaccccactatcattagggatcgaaaccgcaggaggcgtgatgaccgtgctgataaaacgtaacactacaatccctaccaagcaaacccaaacatttactacttactcagacaatcagccaggcgtcttgattcaggtctatgagggcgaacgcgctatgaccaaggacaataacttactgggcaaatttgagttgacaggcatcccacccgcgccacggggagttccacagatagaggtgacattcgatatcgatgccaatggaattctcaatgtctctgctgtcgacaaatcaaccggcaaggaaaacaagattactatcactaacgataaggggaggctttcaaaggaagatatagaacgcatggttcaagaggcagagaagtataaggccgaggacgaaaaacagagagacaaggtcagcagcaaaaacagtctggaaagttacgcatttaacatgaaggccacagtcgaggacgagaagctgcaggggaaaataaatgatgaagacaaacagaaaattctggacaagtgcaacgaaataattaactggctagacaagaaccagaccgccgagaaggaggaattcgaacatcagcagaaggaactggaaaaggtgtgcaatcccataattactaaactataccaatcggcaggaggaatgccaggtggtatgcccggaggattcccagggggaggtgcccccccttcaggtggcgcgtcaagtggtcccacaatagaggaggtagattag

SEQ ID NO: 166467 - DNA, 1503 bp, Artificial Sequence
  derived and/or modified sequence
atgagcaaggggcctgccgtgggaatcgaccttgggacgacctattcttgtgttggagtgtttcaacatggaaaagtggagattatcgctaacgatcagggcaatagaaccacaccctcttacgtagcctttacagatacagaacgcctaattggtgacgccgcgaagaaccaggtcgctatgaatccaaccaacacagtttttgacgccaagcggctgattggcagacgatttgacgatgctgtagtccaaagcgacatgaagcactggcctttcatggtggttaacgacgcaggacggcccaagcataagaaggacatcagtgaaaataaacgcgcagtcagaaggttaagaaccgcttgtgagagagccaaacgtaccctgtctagttccacgcaggcatctattgaaatcgattcactctatgaggggatcgatttctatacatccattacacgggcaagatttgaagagctgaatgctgatttgttcagaggtacgctagaccccgtggagaaggcgctccgagacgctaaacttgacaagtcacaaatccacgacatagttttggttggaggcagtacaagaatccccaagattcaaaaattgctccaggatttttttaatgggaaggaactgaataagtccattaacccagacgaagccgtggcctatggagctgcagtccaggcagccatcctcagcggcgataaatcagagaatgtccaagatctccttctgctcgatgtcacacctctgagcctaggcatcgagacagccggcggcgtgatgaccgttttaatcaagcgaaacactaccattcccaccaagcaaacccaaacctttacaacttatagcgataaccagcctggggtcctcatccaagtctacgagggcgagcgagctatgactaaggacaataatcttctgggtaaattcgagcttactggcatccccccagcacccagaggtgtgccgcagatcgaggtgactttcgatattgatgctaacggaattctgaacgtctcagcagttgacaagagtactggaaaagagaacaagatcacgataacaaacgataaaggacgactaagcaaagaagacattgaacgtatggtccaagaagcagagaagtacaaggccgaggacgaaaagcaacgcgacaaggtgtccagcaaaaactccctagagtcttacgctttcaatatgaaggccaccgtggaggatgagaagctgcaagggaaaattaacgatgaagataagcaaaaaattctggacaagtgcaatgaaataattaactggctggataagaatcagacagccgagaaagaagagtttgaacaccaacaaaaggagttagaaaaggtttgcaatccaattatcaccaagctgtaccagtctgccggagggatgccagggggaatgccaggtgggttcccaggtggaggcgctccccctagcggaggtgcgagttccgggccaaccatcgaggaagtcgactag

SEQ ID NO: 166468 - DNA, 1233 bp, Artificial Sequence
  derived and/or modified sequence
atggtcaaccattttatagccgaattcaaacgaaaacacaaaaaagacatcagcgaaaacaaacgggccgtgagacgcttaaggactgcatgtgaacgggctaaacgcacactgagtagtagtacccaggcctcaatcgaaattgattcactgtatgaaggaatcgatttctatacatctattacacgagctaggttcgaagagttgaatgccgatcttttcagaggtactttggatcccgtggagaaagccctgagggacgccaagctcgacaaaagccaaatacacgatatagtgctggtgggcgggagcacacgaatccccaagatccagaaattgctacaggacttctttaacggaaaggaactgaataaaagcattaatccagacgaagccgtcgcttacggtgccgcagtgcaagcagccatcctctcgggagacaaatctgaaaacgtccaggatctgctcctcttagacgttactcctctatctttaggtattgagaccgcaggcggagttatgaccgtcttaatcaaacggaataccacaatccctaccaaacagactcagacttttaccacttactctgacaaccagccaggagtgttaattcaggtctatgagggtgaaagagccatgactaaagataacaatctattaggcaaattcgagctaacaggtatcccaccagccccacgcggcgtccctcagatcgaggtgactttcgatatcgatgcaaacggaattctgaacgtgtccgcggttgataagtcaacaggcaaagagaataagattacgattacaaatgataaggggcgtttgtcaaaggaagacattgaacgaatggtacaggaagcagagaagtataaagctgaagatgagaagcagcgagataaagtgtcctcaaaaaattctttggaatcctacgctttcaacatgaaagccacagtggaagatgagaaactacaaggaaagatcaacgatgaagacaagcagaagattttggataaatgcaatgagatcatcaactggttagacaaaaaccagactgccgagaaagaagagtttgaacatcagcagaaagagctcgagaaggtctgcaaccccatcatcaccaaactgtaccagtctgccggtggaatgccaggtgggatgccaggaggtttccccggaggaggtgccccaccttcaggaggcgcttcatcaggccccactatcgaagaagtagactag

SEQ ID NO: 166469 - DNA, 1941 bp, Artificial Sequence
  derived and/or modified sequence
atgtctaagggacctgccgtcggcatcgacctgggaactacctactcatgcgtcggagtgtttcagcatgggaaagtcgagattatagcaaacgaccaaggcaatcgtaccacacccagctatgtggcatttacggatactgaacgcctcatcggcgacgccgcaaagaatcaggttgcgatgaatcctacaaacacagtgtttgacgcaaaaaggctaatcgggaggagattcgacgatgcagttgtgcaaagtgatatgaagcactggccctttatggtggttaacgatgcgggacgccccaaggttcaggttgaatataagggagaaactaagtctttctaccccgaggaagttagctcaatggtcctaactaaaatgaaagaaatcgcagaggcatatctgggcaagacagtaaccaacgccgtagtaaccgtccccgcttattttaacgattcacagagacaagccaccaaggatgctggaaccattgccggactgaacgttctgcgcataattaacgagcccacagcagccgcaattgcatatggattggataagaaggtaggggcagagcgtaacgtgctgatcttcgatctgggcggaggaaccttcgacgtttccatcctgaccatagaagacggcatctttgaggtcaagtccaccgctggggatacccacctgggaggagaagattttgacaatcgaatggtgaaccatttcattgccgaattcaaacgcaaacataagaaggacatatcagaaaacaaaagagctgtgcgtagacttaggaccgcatgcgagagggccaaaagaacgctgtcaagttctacccaagcttcaatagagattgactcgctatatgaaggaatcgacttctacacatctataacacgtgccaggtttgaagaattaaatgcggatttgtttagaggcactctggaccccgttgagaaggctctgcgcgacgcaaaattagataaatcacagatccatgacattgtgctggtaggcggctccacacgtatccccaagattcaaaaactgcttcaggattttttcaacggcaaagaactgaataaatcgattaacccggatgaggcagtggcatacggtgcagcagtgcaagctgcgatcttgtccggagacaagagcgagaatgtgcaagacctcctacttctcgacgtgacccctctttctctaggcatagaaaccgctggaggcgtaatgaccgtcttgattaagcggaacaccactatccccacaaaacagactcagacctttactacctattccgacaatcagcctggagtactgattcaggtgtacgagggtgagcgcgcaatgaccaaagacaacaacttgcttgggaaatttgaattgaccggaatcccgccagctccaagaggggtcccccagatcgaagtgacgtttgacatagatgcaaatggcatattgaatgtgtcggctgtggataaatcaactggaaaggaaaacaagattaccatcactaatgacaaggggagattatctaaagaagacatagagagaatggtgcaagaggcggaaaagtacaaggctgaagacgagaaacaaagggacaaagtctcaagtaagaactctctggaatcttatgcattcaacatgaaagctacagtcgaagacgagaagctgcagggaaaaataaatgatgaggacaagcagaaaatcctcgacaaatgtaatgaaatcattaactggttggataagaatcagacagctgaaaaggaggaatttgaacatcaacagaaagagctggagaaagtgtgtaacccaattatcactaagttataccaatctgcgggtggtatgccaggcgggatgccagggggcttcccaggcggcggcgctcccccctcaggcggcgcatcctctggacccactattgaagaagtcgactag

SEQ ID NO: 166470 - DNA, 1884 bp, Artificial Sequence
  derived and/or modified sequence
atgagcaagggccccgccgtgggcatcgacctgggcaccacctacagctgcgtgggcgtgttccagcacggcaaggtggagatcatcgccaacgaccagggcaacagaaccacccccagctacgtggccttcaccgacaccgagagactgatcggcgacgccgccaagaaccaggtggccatgaaccccaccaacaccgtgttcgacgccaagagactgatcggcagaagattcgacgacgccgtggtgcagagcgacatgaagcactggcccttcatggtggtgaacgacgccggcagacccaaggtgcaggtggagtacaagggcgagaccaagagcttctaccccgaggaggtgagcagcatggtgctgaccaagatgaaggagatcgccgaggcctacctgggcaaggccaccaaggacgccggcaccatcgccggcctgaacgtgctgagaatcatcaacgagcccaccgccgccgccatcgcctacggcctggacaagaaggtgggcgccgagagaaacgtgctgatcttcgacctgggcggcggcaccttcgacgtgagcatcctgaccatcgaggacggcatcttcgaggtgaagagcaccgccggcgacacccacctgggcggcgaggacttcgacaacagaatggtgaaccacttcatcgccgagttcaagagaaagcacaagaaggacatcagcgagaacaagagagccgtgagaagactgagaaccgcctgcgagagagccaagagaaccctgagcagcagcacccaggccagcatcgagatcgacagcctgtacgagggcatcgacttctacaccagcatcaccagagccagattcgaggagctgaacgccgacctgttcagaggcaccctggaccccgtggagaaggccctgagagacgccaagctggacaagagccagatccacgacatcgtgctggtgggcggcagcaccagaatccccaagatccagaagctgctgcaggacttcttcaacggcaaggagctgaacaagagcatcaaccccgacgaggccgtggcctacggcgccgccgtgcaggccgccatcctgagcggcgacaagagcgagaacgtgcaggacctgctgctgctggacgtgacccccctgagcctgggcatcgagaccgccggcggcgtgatgaccgtgctgatcaagagaaacaccaccatccccaccaagcagacccagaccttcaccacctacagcgacaaccagcccggcgtgctgatccaggtgtacgagggcgagagagccatgaccaaggacaacaacctgctgggcaagttcgagctgaccggcatcccccccgcccccagaggcgtgccccagatcgaggtgaccttcgacatcgacgccaacggcatcctgaacgtgagcgccgtggacaagagcaccggcaaggagaacaagatcaccatcaccaacgacaagggcagactgagcaaggaggacatcgagagaatggtgcaggaggccgagaagtacaaggccgaggacgagaagcagagagacaaggtgagcagcaagaacagcctggagagctacgccttcaacatgaaggccaccgtggaggacgagaagctgcagggcaagatcaacgacgaggacaagcagaagatcctggacaagtgcaacgagatcatcaactggctggacaagaaccagaccgccgagaaggaggagttcgagcaccagcagaaggagctggagaaggtgtgcaaccccatcatcaccaagctgtaccagagcgccggcggcatgcccggcggcatgcccggcggcttccccggcggcggcgccccccccagcggcggcgccagcagcggccccaccatcgaggaggtggactag

SEQ ID NO: 166471 - DNA, 1503 bp, Artificial Sequence
  derived and/or modified sequence
atgagcaagggccccgccgtgggcatcgacctgggcaccacctacagctgcgtgggcgtgttccagcacggcaaggtggagatcatcgccaacgaccagggcaacagaaccacccccagctacgtggccttcaccgacaccgagagactgatcggcgacgccgccaagaaccaggtggccatgaaccccaccaacaccgtgttcgacgccaagagactgatcggcagaagattcgacgacgccgtggtgcagagcgacatgaagcactggcccttcatggtggtgaacgacgccggcagacccaagcacaagaaggacatcagcgagaacaagagagccgtgagaagactgagaaccgcctgcgagagagccaagagaaccctgagcagcagcacccaggccagcatcgagatcgacagcctgtacgagggcatcgacttctacaccagcatcaccagagccagattcgaggagctgaacgccgacctgttcagaggcaccctggaccccgtggagaaggccctgagagacgccaagctggacaagagccagatccacgacatcgtgctggtgggcggcagcaccagaatccccaagatccagaagctgctgcaggacttcttcaacggcaaggagctgaacaagagcatcaaccccgacgaggccgtggcctacggcgccgccgtgcaggccgccatcctgagcggcgacaagagcgagaacgtgcaggacctgctgctgctggacgtgacccccctgagcctgggcatcgagaccgccggcggcgtgatgaccgtgctgatcaagagaaacaccaccatccccaccaagcagacccagaccttcaccacctacagcgacaaccagcccggcgtgctgatccaggtgtacgagggcgagagagccatgaccaaggacaacaacctgctgggcaagttcgagctgaccggcatcccccccgcccccagaggcgtgccccagatcgaggtgaccttcgacatcgacgccaacggcatcctgaacgtgagcgccgtggacaagagcaccggcaaggagaacaagatcaccatcaccaacgacaagggcagactgagcaaggaggacatcgagagaatggtgcaggaggccgagaagtacaaggccgaggacgagaagcagagagacaaggtgagcagcaagaacagcctggagagctacgccttcaacatgaaggccaccgtggaggacgagaagctgcagggcaagatcaacgacgaggacaagcagaagatcctggacaagtgcaacgagatcatcaactggctggacaagaaccagaccgccgagaaggaggagttcgagcaccagcagaaggagctggagaaggtgtgcaaccccatcatcaccaagctgtaccagagcgccggcggcatgcccggcggcatgcccggcggcttccccggcggcggcgccccccccagcggcggcgccagcagcggccccaccatcgaggaggtggactag

SEQ ID NO: 166472 - DNA, 1233 bp, Artificial Sequence
  derived and/or modified sequence
atggtgaaccacttcatcgccgagttcaagagaaagcacaagaaggacatcagcgagaacaagagagccgtgagaagactgagaaccgcctgcgagagagccaagagaaccctgagcagcagcacccaggccagcatcgagatcgacagcctgtacgagggcatcgacttctacaccagcatcaccagagccagattcgaggagctgaacgccgacctgttcagaggcaccctggaccccgtggagaaggccctgagagacgccaagctggacaagagccagatccacgacatcgtgctggtgggcggcagcaccagaatccccaagatccagaagctgctgcaggacttcttcaacggcaaggagctgaacaagagcatcaaccccgacgaggccgtggcctacggcgccgccgtgcaggccgccatcctgagcggcgacaagagcgagaacgtgcaggacctgctgctgctggacgtgacccccctgagcctgggcatcgagaccgccggcggcgtgatgaccgtgctgatcaagagaaacaccaccatccccaccaagcagacccagaccttcaccacctacagcgacaaccagcccggcgtgctgatccaggtgtacgagggcgagagagccatgaccaaggacaacaacctgctgggcaagttcgagctgaccggcatcccccccgcccccagaggcgtgccccagatcgaggtgaccttcgacatcgacgccaacggcatcctgaacgtgagcgccgtggacaagagcaccggcaaggagaacaagatcaccatcaccaacgacaagggcagactgagcaaggaggacatcgagagaatggtgcaggaggccgagaagtacaaggccgaggacgagaagcagagagacaaggtgagcagcaagaacagcctggagagctacgccttcaacatgaaggccaccgtggaggacgagaagctgcagggcaagatcaacgacgaggacaagcagaagatcctggacaagtgcaacgagatcatcaactggctggacaagaaccagaccgccgagaaggaggagttcgagcaccagcagaaggagctggagaaggtgtgcaaccccatcatcaccaagctgtaccagagcgccggcggcatgcccggcggcatgcccggcggcttccccggcggcggcgccccccccagcggcggcgccagcagcggccccaccatcgaggaggtggactag

SEQ ID NO: 166473 - RNA, 1941 nt, Artificial Sequence
  derived and/or modified sequence
augucaaagggcccagcagugggcauugauuuaggaaccacauauagcugcgucgggguuuuucagcacgggaagguggagauuauugcaaacgaucagggcaaucggaccacgcccagcuauguggccuuuacugacacagaaagacuaauaggagacgccgccaaaaaucaaguggccaugaacccaacgaacacaguguuugacgccaagagacugauaggccggagguucgacgaugcaguugugcagagcgacaugaagcauuggcccuucauggugguaaaugaugccggacgcccgaagguucaggucgaguacaaaggcgaaacuaagucuuuuuacccggaggagguaagcucuauggugcugacgaaaaugaaggaaauagcagaggcguaccuagggaagacagugacaaaugccgugguaaccgugccagcuuacuucaacgauucacaacgacaagccacgaaggacgccggaaccauugcuggccuuaacgucuuacgcauuaucaacgagcccacagccgcagcuauugcguacggguuagacaaaaaagucggagcagagcggaauguguuaauuuucgaccuuggcggagggacuuucgaugugaguauuuugacaauagaggauggaaucuucgaagugaagagcacagccggcgacacucaucugggcggagaggauuuugauaaucgcauggugaaucacuuuauagccgaguuuaagaggaagcauaagaaagacaucagugaaaacaagcgggccguccggcgccuucgaacagcaugcgaacgcgcaaagcggacacugagcaguucuacccaggcuagcauugagaucgauucccuguaugaggguauagauuuuuacacuuccauaacccgggcgagguucgaagaacucaacgccgauuuguuucguggcacuuuggacccaguagaaaaagcucuccgcgacgcgaagcuggauaaaagucagauccaugauauugugcucgugggcggcuccacucgcauccccaagauucagaagcuccuccaggacuucuucaauggaaaagagcugaacaaaucuaucaaucccgacgaagccguggccuauggagcagccgugcaagccgcuauccugucaggcgauaagagcgaaaauguccaggaucugcugcuccuggaugucacaccccugagccugggcauagagacugccggcggagugaugaccgugcugaucaaaaggaacacgacuauucccaccaagcagacccagaccuucacuacguauagcgauaaucagccuggagugcuuauucaggucuacgagggugagagagcgaugacaaaagacaauaaccuguugggcaaauucgaguuaacaggcauaccuccggcgccaagaggggugccucagauagaggucacuuuugauauagacgccaaugggauauuaaaugugagugcgguggauaagucaaccggcaaagagaauaaaauuacgauaacaaacgacaaaggccgucugaguaaggaggacauugagcgaauggugcaagaagccgagaaauacaaagcugaagacgagaagcagagagacaaaguuagcagcaaaaauucacucgagagcuacgcauucaacaugaaagcgaccguggaggacgaaaagcugcagggcaaaauaaaugaugaggauaaacagaaaauauuggacaaauguaacgaaaucauuaacugguuagauaagaaccaaaccgcagagaaggaagaguucgagcaccagcaaaaggagcuggaaaaaguuuguaauccuauuauuacuaagcuguaccaaucugccggcgguaugccgggcggcaugccaggaggguuuccaggaggaggggccccuccuuccggaggcgccaguucuggaccuacuauagaggagguggauuag

SEQ ID NO: 166474 - RNA, 1941 nt, Artificial Sequence
  derived and/or modified sequence
augagcaaaggaccugcuguaggaauugaccugggaacaacuuacucuuguguuggaguguuucagcacggcaagguggaaaucauagccaaugaucaggggaauaggaccaccccuucauacguggccuucacagauacagaaagacucaucggggacgcugcgaagaaccagguugcaaugaauccuaccaacacaguauucgacgccaaacgccucaucgggaggcgauuugaugacgcugucguacaaucagacaugaagcauuggccauucauggugguuaacgaugccggacgaccuaaggugcaagucgaguacaagggagaaacaaagucauuuuaccccgaggagguaaguaguaugguauuaacaaagaugaaagaaaucgccgaggccuacuuggguaagacugugacuaaugccguuguaacagugcccgccuauuuuaacgacagccagagacaggccacgaaggacgcaggaacgauagccggucuaaacguuuuacggaucaucaacgaaccuacagccgcggccauugcguauggucuggacaagaaagugggggcggagagaaaugugcugaucuuugaucuugggggugguacuuucgaugugagcauucuuaccauagaagauggcaucuuugaaguuaaaucaacagcuggugauacacacuuaggcggggaagauuucgacaaucgaauggucaaucacuuuauugcagaguuuaagcgaaaacauaagaaggauauuagcgaaaauaaacgggcaguccggcggcugaggacugcaugcgagcgagccaaacggacacugucaagcagcacacaggcaagcauugagauugacagccucuaugaagguauugacuuuuacaccucuaucacaagggcgagauucgaggaacuuaacgccgaccuguuucgcggaaccuuggacccaguagagaaggcccucagggacgcuaagcuugauaagucucaaauacacgacauugugcucguagguggcucgacccggauuccaaagauucagaagcucuugcaggauuuuuucaacgggaaagagcuuaacaaguccaucaacccagaugaggccguggcauauggcgcugcugugcaggcugcuauacucuccggagauaaaucugagaacgugcaggaucuccuccuucuggaugucacaccucuaucguuggggauugagaccgcgggagguguuaugaccguucugauuaaacgaaacaccacuauuccuacaaagcagacccagacauucacuacuuacucugacaaucagccuggugugcuaauucaggucuacgaaggagagagggcaaugacaaaagauaauaaccuccuggggaaauucgaacucacagggaucccaccagccccacgaggagucccacagauugagguaacauucgauauugacgcaaaugguaucuugaacgugucggccguagacaagucaacaggaaaagaaaauaagauaacaaucaccaacgacaaaggaagguugucgaaggaggacauugaacgaaugguccaggaagcagagaaauauaaagccgaagacgagaaacagagagauaagguuuccagcaaaaauucacucgagagcuacgcauuuaauaugaaagcaacuguggaggaugaaaagcuucaggggaaaauuaacgacgaggauaaacagaagauacuggauaaauguaaugagauuauuaacugguuggauaagaaccaaacagcagaaaaggaggaauucgaacaucaacagaaggagcuagagaaggugugcaauccaaucauuacaaaauuauaccagagugcaggaggaaugcccggaggcaugcccgggggcuucccagguggcggagcaccuccaagcgggggcgcuuccucugggcccacuauagaggagguugauuag

SEQ ID NO: 166475 - protein, 1083 aa, Artificial Sequence
  derived and/or modified sequence
MPTNFTVVPVEAHADGGGDETAERTEAPGTPEGPEPERPSPGDGNPRENSPFLNNVEVEQESFFEGKNMALFEEEMDSNPMVSSLLNKLANYTNLSQGVVEHEEDEESRRREAKAPRMGTFIGVYLPCLQNILGVILFLRLTWIVGVAGVLESFLIVAMCCTCTMLTAISMSAIATNGVVPAGGSYYMISRSLGPEFGGAVGLCFYLGTTFAGAMYILGTIEIFLTYISPGAAIFQAEAAGGEAAAMLHNMRVYGTCTLVLMALVVFVGVKYVNKLALVFLACVVLSILAIYAGVIKSAFDPPDIPVCLLGNRTLSRRSFDACVKAYGIHNNSATSALWGLFCNGSQPSAACDEYFIQNNVTEIQGIPGAASGVFLENLWSTYAHAGAFVEKKGVPSVPVAEESRASALPYVLTDIAASFTLLVGIYFPSVTGIMAGSNRSGDLKDAQKSIPTGTILAIVTTSFIYLSCIVLFGACIEGVVLRDKFGEALQGNLVIGMLAWPSPWVIVIGSFFSTCGAGLQSLTGAPRLLQAIARDGIVPFLQVFGHGKANGEPTWALLLTVLICETGILIASLDSVAPILSMFFLMCYLFVNLACAVQTLLRTPNWRPRFKFYHWTLSFLGMSLCLALMFICSWYYALSAMLIAGCIYKYIEYRGAEKEWGDGIRGLSLNAARYALLRVEHGPPHTKNWRPQVLVMLNLDAEQAVKHPRLLSFTSQLKAGKGLTIVGSVLEGTYLDKHMEAQRAEENIRSLMSTEKTKGFCQLVVSSSLRDGMSHLIQSAGLGGLKHNTVLMAWPASWKQEDNPFSWKNFVDTVRDTTAAHQALLVAKNVDSFPQNQERFGGGHIDVWWIVHDGGMLMLLPFLLRQHKVWRKCRMRIFTVAQVDDNSIQMKKDLQMFLYHLRISAEVEVVEMVENDISAFTYERTLMMEQRSQMLKQMQLSKNEQEREAQLIHDRNTASHTAAAARTQAPPTPDKVQMTWTREKLIAEKYRSRDTSLSGFKDLFSMKPDQSNVRRMHTAVKLNGVVLNKSQDAQLVLLNMPGPPKNRQGDENYMEFLEVLTEGLNRVLLVRGGGREVITIYS

SEQ ID NO: 166476 - protein, 266 aa, Artificial Sequence
  derived and/or modified sequence
MPTNFTVVPVEAHADGGGDETAERTEAPGTPEGPEPERPSPGDGNPRENSPFLNNVEVEQESFFEGKNMALFEEEMDSNPMVSSLLNKLANYTNLSQGVVEHEEDEESRRREAKAPRMGTFIGVYLPCLQNILGVILFLRLTWIVGVAGVLESFLIVAMCCTCTMLTAISMSAIATNGVVPAGGSYYMISRSLGPEFGGAVGLCFYLGTTFAGAMYILGTIEIFLTGTEDGVGSLGLGLAQGNRRQTHLSPSDAAQAAHGASYGSF

SEQ ID NO: 166477 - DNA, 3252 bp, Artificial Sequence
  derived and/or modified sequence
atgcctactaatttcacggtggtgccggtggaagcccacgcggacggtggtggggacgaaacggctgaacgcactgaagcacccgggacccccgaggggcctgaacccgagcgtccgagcccaggagatggtaacccgcgggagaatagcccatttctaaacaacgtcgaggtggaacaggagtctttcttcgagggaaaaaatatggccctcttcgaagaagagatggactcgaatcccatggtctcttctttgttaaacaaactagccaattatacgaatctctctcagggtgttgtagaacacgaggaggacgaggagtcccgcagacgcgaagcaaaagcacctcgcatggggacatttatcggcgtgtacctgccatgtctccagaatattcttggtgttattttgttcttacggctgacctggatcgtgggcgtagcaggggtcctggaatctttcctcattgtggccatgtgttgcacatgtactatgttaactgctattagtatgtccgcaattgcaaccaacggagtcgtgcccgccgggggatcgtattacatgatttcacggagtctgggcccagagttcggtggcgctgtgggtctatgcttttacctggggacaactttcgccggggccatgtatattctcgggacaatagaaatctttctgacatacattagtcctggagccgccattttccaagccgaagccgccggcggggaagctgccgcgatgctgcacaatatgcgcgtctacggtacatgcaccctggtcttaatggctctcgtggtgtttgttggtgtaaagtacgtgaataaactggccttggtgttcttagcttgcgtggtcctcagtattctggctatttacgccggtgtaattaaatcagcctttgacccgcccgatatcccagtgtgcctcttaggcaatcgcaccctgagtcggcgcagcttcgacgcatgcgtgaaggcgtacggcattcacaacaatagtgcgacttccgccttatggggtctgttctgcaatggcagccagccaagcgccgcctgcgatgagtatttcattcagaataacgtcaccgagatccaagggattcctggggcagcctctggcgtctttctggagaatctctggtccacttatgcccatgcaggggctttcgtcgagaagaaaggtgtgccatcagtgccggtggctgaggagtcccgagcctcggctctaccctacgtcctgacggacattgcagcatcgtttacactactggtgggcatttactttccatccgtaactgggatcatggctggctctaacagatctggggacttaaaggacgctcagaaaagcataccaaccggaacaatccttgcaattgttacaacttctttcatctatctgagctgtatagtcttatttggtgcatgcatcgagggcgtagtgctccgggacaaattcggcgaggctcttcagggcaatctggtgatcggaatgctggcttggccgagcccgtgggtgatcgtcattgggtcattcttcagcacttgcggagctggtctccagtccctgacgggcgctccaagacttcttcaagcaatcgcccgggacggaatagtaccttttctgcaggtatttggacatggcaaggctaacggggagccgacatgggcactgcttttaactgttttgatttgcgaaacaggaatcctaatcgcctcgttggattctgtggcacctatactgtccatgttcttcttgatgtgctacctgttcgtcaatctcgcctgcgccgtgcagactctgctgcgaaccccaaattggcgtcccaggtttaagttctaccattggactctgagttttttggggatgagcctgtgtctggcccttatgtttatttgcagctggtactatgctttaagcgcaatgctcattgctggctgcatctataagtatatcgagtataggggtgccgaaaaggagtggggagatgggattcggggactgagcctaaatgccgccaggtatgccctcctgcgtgtcgagcatggccctccgcacactaaaaactggaggcctcaggtgctggtcatgctcaatctcgacgcggaacaggctgtgaagcacccgagactgttgtcctttacaagccagctgaaggctggcaaaggtctgacaattgttgggtcggttttggaggggacctacctcgacaaacacatggaggcccagcgcgcagaggaaaatatccggtcactcatgtctacagagaagactaagggattttgccaactagtggtaagttcgtctctgcgggacgggatgtcgcatctcatacagtcagctgggcttggcggtctgaagcataataccgtgctgatggcctggcctgcctcctggaaacaagaggacaatccgttctcatggaaaaacttcgttgacacagtgcgcgacacaacggccgctcaccaggcactgttggtcgcaaagaatgtcgactcctttccacagaaccaggaacgcttcggtggggggcacattgacgtgtggtggatcgtgcacgatggtggcatgctcatgctactgccctttttgcttagacaacataaagtgtggaggaaatgccgcatgcgcatttttacagtggcccaggtcgacgataactctatccaaatgaagaaagatcttcaaatgttcctctatcatctcaggatctccgcagaggtcgaggtcgttgaaatggtggagaatgatatctccgccttcacttatgaacgcactctcatgatggagcagcggtctcaaatgctgaaacagatgcaactgtctaagaacgagcaggaaagagaagcccagctcatccatgatcgcaacacggccagtcataccgcagcagcagctcggacccaggcaccacctactccagataaagtgcagatgacctggacccgcgagaagctgatagctgagaagtaccgttcgagagacacctccttgtccggcttcaaggacctttttagcatgaagccggatcagagcaatgtccgcaggatgcatacggccgttaagctgaacggagtggtactgaataagtctcaagacgcccagctggtcctactaaacatgcccggcccacccaagaacagacagggggatgagaactatatggaatttctagaggtgttgacagaaggccttaaccgggtcctgcttgttagaggcgggggtagggaggtaattacaatatacagctag

SEQ ID NO: 166478 - DNA, 801 bp, Artificial Sequence
  derived and/or modified sequence
atgcctaccaacttcactgtggttccagtggaagcccacgccgacggagggggcgatgagactgctgaacggactgaagcccccggcactcctgaaggtcctgagcccgaacgaccttcgcctggtgatggcaacccacgtgagaacagtccttttttaaacaatgtggaggtcgaacaggagtctttctttgagggaaagaatatggcgctgttcgaagaggagatggattccaatcctatggtctcatccctgctcaataagctggcaaattatactaatttgtcccagggagttgttgagcatgaagaggatgaggagagccggcgccgtgaggccaaagctccacggatgggcacctttattggtgtctatctgccttgcttgcagaatattctgggtgttatcctcttcttaaggctcacttggatagtcggagttgccggggttctggaatcattcctgatcgttgcaatgtgctgtacatgcacaatgcttactgcaatatcgatgtctgccattgcaactaatggagtcgtgcccgccggggggagctactatatgatcagccgatctctgggacccgagttcggaggcgctgtagggttatgtttttaccttggaactactttcgcaggcgcaatgtatattctgggcaccatcgagatatttttaactgggacagaggacggagttggcagcctgggattaggtctggcccaaggaaatcgcaggcagacccacttaagtccaagcgatgccgcccaggcagcacacggggcctcttacggatctttctag

SEQ ID NO: 166479 - DNA, 3252 bp, Artificial Sequence
  derived and/or modified sequence
atgcccaccaacttcaccgtggtgcctgtggaggcccacgcagatggcggcggagatgaaacagctgagaggacagaggcccctggcaccccagagggccctgagcctgagcggcccagccctggagatggcaacccccgggagaacagccccttcctgaacaacgtggaggtggagcaggagagcttctttgagggcaagaacatggccctgtttgaggaggagatggacagcaaccccatggtgagcagcctgctgaacaagctggccaactacaccaacctgagccagggcgtggtggagcacgaggaggatgaggagagcagaagaagagaggccaaggcccccaggatgggcaccttcatcggcgtgtacctgccctgcctgcagaacatcctgggcgtcatcctcttcctgcggctgacctggatcgtgggcgtggccggcgtgctggagagcttcctgattgtggccatgtgctgcacctgcaccatgctgacagccatctccatgtctgccatcgccaccaatggagtggtgcctgctgggggcagctactacatgatcagccgcagcctgggccctgagtttggaggagctgtgggcctgtgcttctacctgggcaccacctttgctggggccatgtacatcctgggcaccatcgagatcttcctgacctacatcagccctggggccgccatcttccaggccgaggccgccggcggggaggccgccgccatgctgcacaacatgagggtgtatggcacctgcaccctggtgctgatggccctggtggtgtttgtgggcgtgaagtatgtgaacaagctggccctggtgttcctggcctgtgtggtgctgagcatcctggccatctatgctggggtcatcaagagcgcctttgaccccccagacatccctgtgtgcctgctgggcaacagaaccctgagcagaagaagctttgatgcctgtgtgaaggcctacggcatccacaacaacagcgccaccagcgccctgtggggcctcttctgcaatggcagccagcccagcgctgcctgtgatgagtacttcatccagaacaacgtgacagagatccagggcatccctggggccgccagcggggtcttcctggagaacctgtggagcacctacgcccacgccggggcctttgtggagaagaagggcgtgcccagcgtgcctgtggccgaggagagccgggccagcgccctgccctacgtgctgacagacattgctgccagcttcaccctgctggtgggcatctacttccccagcgtgacaggcatcatggccggcagcaacagaagtggggacctgaaggatgcccagaagagcatccccaccggcaccatcctggccatcgtgaccaccagcttcatctacctgagctgcatcgtgctgtttggagcctgcattgaaggagtggtgctgcgggacaagtttggagaggccctgcagggcaacctggtgattggcatgctggcctggcccagcccctgggtgattgtgattggcagcttcttcagcacctgtggggccggcctgcagagcctgaccggggccccccggctgctgcaggccatcgccagagatggcatcgtgcccttcctgcaggtgtttggacatggcaaggccaatggagagcccacctgggccctgctgctgactgtgctgatctgtgaaacaggcatcctgattgccagcctggacagcgtggcccccatcctgtccatgttcttcctgatgtgctacctgtttgtgaacctggcctgtgctgtgcagaccctgctgcggacccccaactggaggccccgcttcaagttctaccactggaccctgtccttcctgggcatgagcctgtgcctggccctgatgttcatctgctcctggtactatgccctgagcgccatgctgattgctggctgcatctacaagtacatcgagtacagaggagctgagaaggagtggggagatggcatccggggcctgagcctgaatgctgcccgctatgccctgctgcgggtggagcacggccccccccacaccaagaactggaggccccaggtgctggtgatgctgaacctggatgctgagcaggccgtgaagcacccccggctgctgtccttcaccagccagctgaaggccggcaagggcctgaccatcgtgggctctgtgctggagggcacctacctggacaagcacatggaggcccagagagctgaggagaacatccgcagcctgatgagcacagagaagaccaagggcttctgccagctggtggtgagcagcagcctgagagatggcatgagccacctgatccagagcgctggcctgggcggcctgaagcacaacacagtgctgatggcctggccagcctcctggaagcaggaggacaaccccttctcctggaagaactttgtggacacagtgcgggacaccacagctgcccaccaggccctgctggtggccaagaatgtggacagcttcccccagaaccaggagagatttggaggcggccacattgatgtgtggtggatcgtgcatgatggcggcatgctgatgctgctgcccttcctgctgcggcagcacaaggtgtggaggaaatgtaggatgaggatcttcaccgtggcccaggtggatgacaacagcatccagatgaagaaggacctgcagatgttcctgtaccacctgcgcatctctgctgaggtggaggtggtggagatggtggagaatgacatcagcgccttcacctatgaaagaaccctgatgatggagcagaggagccagatgctgaagcagatgcagctgagcaagaatgagcaggagcgggaggcccagctgattcatgacaggaacacagccagccacacagctgctgctgcccggacccaggccccacccaccccagacaaggtgcagatgacctggacccgggagaagctgattgctgagaagtaccgcagccgggacaccagcctgagcggcttcaaggacctcttctccatgaagccagaccagagcaatgtgcggaggatgcacacagctgtgaagctgaatggagtggtgctgaacaagagccaggatgcccagctggtgctgctgaacatgcctggcccccccaagaaccggcagggagatgagaactacatggagttcctggaggtgctgacagagggcctgaacagagtgctgctggtgcggggcggcggccgggaggtgatcaccatctacagctag

SEQ ID NO: 166480 - DNA, 801 bp, Artificial Sequence
  derived and/or modified sequence
atgcccaccaacttcaccgtggtgcctgtggaggcccacgcagatggcggcggagatgaaacagctgagaggacagaggcccctggcaccccagagggccctgagcctgagcggcccagccctggagatggcaacccccgggagaacagccccttcctgaacaacgtggaggtggagcaggagagcttctttgagggcaagaacatggccctgtttgaggaggagatggacagcaaccccatggtgagcagcctgctgaacaagctggccaactacaccaacctgagccagggcgtggtggagcacgaggaggatgaggagagcagaagaagagaggccaaggcccccaggatgggcaccttcatcggcgtgtacctgccctgcctgcagaacatcctgggcgtcatcctcttcctgcggctgacctggatcgtgggcgtggccggcgtgctggagagcttcctgattgtggccatgtgctgcacctgcaccatgctgacagccatctccatgtctgccatcgccaccaatggagtggtgcctgctgggggcagctactacatgatcagccgcagcctgggccctgagtttggaggagctgtgggcctgtgcttctacctgggcaccacctttgctggggccatgtacatcctgggcaccatcgagatcttcctgaccggcacagaagatggagtgggcagcctgggcctgggcctggcccagggcaacagacggcagacccacctgagccccagtgatgctgcccaggccgcccatggagccagctatggcagcttctag

SEQ ID NO: 166481 - DNA, 3252 bp, Artificial Sequence
  derived and/or modified sequence
atgcccaccaacttcaccgtggtgcccgtggaggcccacgccgacggcggtggcgacgaaacagcggaaagaactgaggcaccaggcactcccgaaggacctgagcccgagcgaccgagccccggcgatgggaatccgagggagaatagccctttcctcaacaacgtggaggtggagcaggagtcgttcttcgaaggcaaaaatatggccctcttcgaggaggagatggacagcaatcccatggtgagctcgttgttgaacaagctcgcaaactacacgaacttgtcccaaggagttgtcgagcatgaggaagatgaagagtcccggaggcgcgaagccaaggccccgcggatggggacattcatcggtgtctacttgccctgcctgcaaaacattctgggcgttatcctcttccttagactgacatggattgtgggagtggccggtgtgttagaaagcttcctgattgttgccatgtgttgcacgtgcaccatgctcactgcaatctctatgtcagcaattgcgaccaacggagtggtgcctgccggcggcagttattatatgataagtaggtctcttggcccagagtttggcggtgccgtaggtctatgtttttacctcgggacaacctttgcgggggcaatgtacattctcggcactattgagatctttctgacttacatctctccgggggctgcaatctttcaagctgaagccgccggaggcgaggcagccgccatgctccacaatatgcgcgtgtacgggacttgcaccttggtgctcatggccctcgtggtgttcgtaggggtcaaatatgttaataagctggcccttgtttttctggcttgcgttgtgttgagcatcctggccatctatgctggggtgattaaaagcgccttcgatcctcccgacatccccgtttgcttgctgggcaacagaactttatcaaggcgctctttcgatgcttgcgtcaaggcttatgggatccacaataattccgcaacaagtgccctctggggcctgttttgtaacgggtcgcagcctagcgccgcctgtgacgagtatttcattcaaaacaatgtcaccgagatacagggaatacctggagctgccagtggagtcttcttagaaaatctttggagcacatacgcccacgccggcgcctttgtggaaaaaaaaggtgtgcctagtgtccctgtcgctgaagaatcccgggcgtccgcactcccatatgtgctaaccgacatagccgcttccttcacactgcttgtaggcatctacttcccttctgtaaccgggataatggccgggagtaatcgcagcggtgatctgaaggatgcccagaagtcaatccctacaggcacaatactggccatcgtgaccacatccttcatctatttgagctgtatcgtcctgttcggcgcctgcatcgagggggttgtattgcgcgataagttcggcgaggccctgcaaggtaacctcgtcatcggcatgctggcctggccttccccatgggttattgtaattggcagttttttctcaacttgtggcgcaggtcttcagtccctcactggcgctccccggttgctccaggcaatagcccgcgacgggattgtgccatttttgcaagtgttcggtcatggaaaagccaacggggagcccacatgggcactgctgttaactgtgctgatctgtgagaccggcatcctaattgcaagcctcgactccgtggcacccatactcagcatgttctttctcatgtgctatctgttcgtgaacctcgcttgcgcagtacagaccctgctgaggactcctaattggaggccgcgttttaagttctatcactggaccctgagcttccttgggatgtcactgtgcctagccttaatgttcatctgctcttggtactatgccctgtcagcaatgctgattgccgggtgcatatataagtacatcgaatataggggagccgagaaggaatggggggacggaattcgcggactgtccttaaacgcagcccgctatgcactgttaagagtcgagcacggaccacctcatactaaaaattggagaccacaggtgttagtcatgcttaatctcgatgcggagcaagctgtgaagcacccacgcctactgagttttacaagtcaattgaaggccggaaaaggccttactatagtagggagcgttttagaggggacctatcttgataagcacatggaggcccagcgagcagaggagaatatccgaagcctgatgagcacggagaagaccaagggcttttgtcagttggtagtgtcatcatctctgagagatggaatgagccacctcatacagagcgctggactgggcgggttgaagcataacacagtgctaatggcctggccagcctcctggaagcaagaggataatccctttagttggaagaattttgtagacacggtgagggacactaccgccgcccaccaggcgctcctcgtggctaagaatgtcgactcctttccgcaaaaccaggagcgatttggcggaggccatatcgacgtatggtggattgttcacgatggaggcatgcttatgctgttgcccttcctgctgcggcagcataaggtatggcgcaagtgccggatgaggatcttcactgtagcacaggtcgacgacaactccatccaaatgaaaaaggatctccagatgttcttgtaccaccttagaatttctgctgaggttgaagtagtggaaatggtggagaacgatattagtgcattcacctacgagagaactttaatgatggaacagagatcacagatgttaaaacagatgcagctaagtaaaaatgagcaggagcgggaagcgcagctgattcatgaccgtaacacagccagtcatacggccgccgcggctagaactcaggcccctccaacaccagataaggttcaaatgacatggactagagaaaaactcatcgcagagaaatacaggtcacgggacacttccctgtcaggcttcaaggatttgttctcaatgaagcccgatcagtccaacgtccggaggatgcacactgccgtcaagctgaacggggtggtacttaacaaatcgcaggatgcccaattagtccttcttaacatgcctggaccacctaagaacagacagggtgatgagaattacatggaattccttgaagtgcttactgaaggtctgaaccgggttctgctggtacggggcgggggacgggaggtgattaccatttactcctag

SEQ ID NO: 166482 - DNA, 801 bp, Artificial Sequence
  derived and/or modified sequence
atgcccaccaacttcaccgtggtgcccgtggaggcccacgccgacggtggtggagatgaaactgcagagcgaacagaggcccctggtacaccggaaggtcctgaacccgagaggccgtcccccggtgatgggaacccacgcgagaactcgcccttcctgaataacgttgaggtcgagcaggaatcttttttcgagggcaagaatatggctttgtttgaagaggagatggattcaaatcccatggtgtcatctctcctcaacaagctggcaaactatacgaacctctcccaaggagtggtggagcatgaagaggatgaagagagcaggagacgcgaggccaaagcaccacggatgggtacatttatcggggtgtatttgccctgcctgcagaatattctaggtgtgatcttgttcctccgattaacttggatcgtgggagtggcgggggtcctggaaagcttcttgattgtggccatgtgctgcacgtgcacgatgttaaccgccatttctatgagcgccatcgccacaaatggagttgttcccgccggtggatcctattatatgataagtagaagtctagggccggagttcggcggcgcggtgggtttgtgtttttacctagggacaacatttgctggggcaatgtatatccttgggactattgagatttttcttactggaaccgaagacggcgtggggtcactgggtctaggcctggcccaaggtaaccggagacagacccacctttccccctccgacgcagcacaggccgcccatggcgcctcatacggctcgttctag

SEQ ID NO: 166483 - DNA, 3252 bp, Artificial Sequence
  derived and/or modified sequence
atgccaaccaatttcaccgtggtaccggtggaggctcacgcagatggtggtggtgatgagactgcggagcgaaccgaggcccctgggacaccagaaggccctgagccggaaagaccaagccctggagacgggaacccaagagaaaattcccccttccttaacaatgtagaggtggaacaggaatccttttttgaaggaaagaatatggcactgtttgaagaggaaatggattctaaccccatggtatctagtttgcttaacaagcttgcgaactacacaaatttgagccaaggcgtggtggagcatgaagaggatgaggagtcacgcaggagggaggcgaaagcccctaggatgggcacctttattggtgtgtacttgccctgcttgcagaatatcctgggagttatcttgtttctacgcttgacttggattgtcggagtggccggagtgttggagagtttcttgatcgtagctatgtgctgtacatgcaccatgctgacagcaattagcatgtccgcaatcgctaccaatggagtagtacccgctggcggatcttattacatgatcagcaggtcactgggtccagaatttgggggagccgttgggctgtgtttttacctggggacaaccttcgcgggagcaatgtatatcttgggtaccatagagatatttttaacctatatctctccaggtgctgcaatcttccaagctgaggccgctggaggagaggccgcagccatgctccacaatatgcgcgtttatggcacatgtacactggtgctaatggccctggttgtattcgtgggcgtgaaatatgtgaacaagctcgcccttgtgtttcttgcttgtgtggtcctaagcattctggctatctacgctggcgttatcaaaagtgcattcgacccccctgacattcccgtatgtctcttgggcaacagaaccctgtcacggcgatccttcgacgcctgtgtgaaggcctacggtattcacaataatagcgctacttccgccctttggggacttttctgcaacggatctcagcctagtgccgcatgcgacgagtacttcatccagaataatgtgacggaaatccaaggcattcccggagccgcatcaggggtctttttggaaaacctgtggagcacttacgcacacgccggagcatttgtggagaagaagggcgtcccatcagtgcccgtcgcggaagaaagtcgggctagcgccctgccatatgtgctgactgacatagctgcgagcttcaccttacttgttgggatctacttccctagtgtcacaggcattatggccggtagcaaccgctctggcgacctgaaggacgctcaaaagagcatacccaccggtacaatcctcgcaatagttactacatcatttatttacctgagctgtattgtccttttcggcgcttgcatcgaaggcgtggtcctgcgggacaagttcggggaggccttacaaggcaatttggtaattggcatgctggcttggccatctccttgggtgatcgtgatcgggagttttttctctacctgtggcgctggccttcagtctctgacaggtgcccctcgcctgttacaggccattgccagggacggcatcgttccctttctccaggtttttggccacggaaaagccaacggagaacccacatgggcacttctgcttacagtactgatatgtgagaccggaatcctcatcgcttccttggactctgtcgctccaatactatccatgtttttcctcatgtgctacctcttcgtgaatctggcctgcgctgttcagaccctgctgaggactccgaattggcggcctagatttaaattttaccattggactttatcattcctgggaatgagtctatgccttgcactcatgttcatttgctcttggtactatgcattgtccgccatgctgatcgcaggttgcatctacaaatacatcgaatatcgcggagctgaaaaagagtggggagacggcatccgtggcctatctcttaatgcggctcgatatgctttgctgcgggtagaacacggtcccccacacactaaaaattggagacctcaggttcttgtaatgttgaacctggacgctgaacaggctgttaagcatccccgtctgctgtctttcacctctcaattaaaggctggcaaaggactgacaatcgtgggatccgtgctggaaggcacctatttagataagcatatggaggctcagcgcgcagaggaaaacatcaggtctcttatgtcaacagaaaagacgaagggattttgccagctggtggtgtcctcttccctaagagacggtatgtcgcatcttatccaatccgcaggactgggcggattgaagcataatactgtactcatggcatggcctgcctcttggaaacaggaagacaatccgttttcgtggaagaattttgtggacaccgtacgagacactactgcagctcaccaggcgttattagttgcaaagaatgtggattcttttccccagaaccaagagagatttgggggaggccacatcgatgtgtggtggattgtgcacgatggaggcatgctcatgctgttgccgtttctgctccggcagcataaggtttggcgcaagtgcagaatgcggatcttcactgtggcccaggtcgatgacaattcaatccagatgaaaaaggatctccagatgtttctttaccacctgcggattagtgcggaggtagaagttgtggagatggtcgagaatgatatatctgcatttacatacgagcgaactctgatgatggaacaaagatcacagatgctgaaacaaatgcagctgtccaaaaacgagcaggagagagaggctcagttaatacatgacagaaataccgccagccatacagccgcagccgctagaacccaggccccacccactcctgataaggtgcagatgacgtggacaagagagaaacttatcgcagaaaagtaccgtagccgcgacaccagcctgtctggctttaaggacttgtttagtatgaagcctgaccagtccaatgttcgtcgaatgcacaccgccgtgaagctgaatggcgtcgtcctgaataagtcccaagatgcacaactggtcctgctgaatatgcccggtccccctaaaaacaggcagggtgacgagaactacatggaattcctggaggttttaactgaaggactgaacagggtcttgcttgtcaggggtggcggaagggaggtcataactatctacagttag

SEQ ID NO: 166484 - DNA, 801 bp, Artificial Sequence
  derived and/or modified sequence
atgcccaccaatttcactgtggttccagttgaggctcacgccgacggtgggggagatgagaccgctgagcggaccgaggcaccaggtaccccagaaggaccggagcctgaacgacctagccccggagacggcaatccgcgtgagaactctcctttcctcaataatgttgaagtcgaacaggagtcctttttcgaggggaagaatatggcactgttcgaggaagaaatggacagtaatccaatggtaagcagcttattaaacaaactggcgaactacactaatctcagccagggcgtcgtggaacatgaagaggatgaagaatcacgtagaagagaggcaaaagcaccccgaatgggcacttttatcggtgtttatctcccgtgtctccaaaatattctgggggtgatattatttttacgacttacatggatcgtaggagtcgccggtgttcttgaatcctttctgatcgtcgccatgtgttgcacctgcacgatgcttactgccatcagtatgagcgccatcgctacgaatggcgtggtccctgcaggcggatcatactacatgattagcagaagcctcggaccagagttcggcggtgccgtgggactgtgtttttatttagggaccacttttgctggagccatgtacattctcggaactattgagatcttcttaaccggcaccgaagacggagttggtagcctgggcctagggctggcgcagggcaataggcggcagacacatctttctcccagtgacgcggcacaggccgctcacggtgccagctatggttccttctag

SEQ ID NO: 166485 - DNA, 5272 bp, Artificial Sequence
  derived and/or modified sequence
agcgcgggccgggccgggacggggactgtcggctgcaggcggccatgcccaccaacttcaccgtggtgcccgtggaggctcacgccgacggcggcggggacgagactgccgagcggacggaggctccgggcacccccgagggccccgagcccgagcgccccagcccgggagatggaaatccaagagaaaacagcccattcctcaacaatgtcgaggtggaacaagagagcttctttgaagggaagaacatggcacttttcgaggaggagatggacagtaaccccatggtgtcctcgctgctcaacaagctggccaactacaccaacctgagccagggcgtggtggagcacgaggaggacgaggagagccggcggcgggaggccaaggctccgcgcatgggcaccttcatcggcgtctacctgccgtgcctgcagaacatcctgggcgtcatcctcttcctgcgcctgacgtggatcgtgggggtggctggtgtcctggagtccttcctcatcgtggccatgtgctgcacatgtacaatgctgaccgccatttccatgagtgcgatcgctaccaacggtgtggtcccagctggcgggtcctactacatgatatcgcgctcgctgggacccgagtttggaggcgctgtcggcctctgcttctacctgggcacgacgtttgcaggggccatgtatattttggggaccatcgagatttttctgacgtacatctccccgggtgcggccatcttccaggcggaggctgcaggtggcgaggcggccgccatgctgcacaacatgcgtgtgtacggcacgtgcacgctcgtgctcatggccctggtggtcttcgtgggcgtcaagtatgtcaacaagctggcgctggtcttcctggcctgcgtcgtgctgtccatcctggccatctatgccggcgtcatcaagtctgccttcgaccccccggacatcccggtctgcctcctggggaaccgcacgctgtcacggcgcagcttcgatgcctgcgtcaaggcctacggcatccacaacaactcagccacctccgcgctctggggcctcttctgcaacggctcccagcccagcgccgcctgtgacgagtacttcatccagaacaacgtcaccgaaatccagggcatcccgggcgcggccagtggtgtcttcctggagaacctgtggagtacgtacgcgcacgcgggggcgtttgtggagaagaaaggtgtgccctcggtgcccgtggcagaggagagccgtgccagcgcactgccctacgtgctcaccgacatcgcggcctccttcaccctgctggttggcatctacttcccttccgtgaccggtatcatggcgggttcaaaccggtccggggacctcaaggatgcacagaagtccatccccacggggaccatcctggccatagtgacgacgtctttcatctatctctcctgcattgtgctgtttggggcctgcattgaaggcgtggtcttacgagataagttcggggaggccctgcaggggaacctggtcatcggcatgctggcctggccctccccctgggtcatcgtcatcggctccttcttctccacctgcggtgccggcctgcagagcctcacgggggcaccgcgcctactgcaggccattgcccgtgacggcatcgtccccttcctgcaggtgtttggccacgggaaggccaacggggagcccacgtgggcgctgctgctgacagtcctcatctgcgagactggcatcctcatcgcctctctggacagcgtggccccgatcctctccatgttcttcctcatgtgctacctgttcgtgaacctggcctgcgccgtgcagaccctgctacgtacccccaactggcgtccacgcttcaagttctaccactggaccctgtcctttctgggtatgagcctgtgcctggcgctgatgttcatctgctcctggtactacgcgctgtccgccatgctcatcgctggctgcatctacaagtacatcgagtaccgcggggccgagaaggagtggggcgatggcatccgtggcctatccctgaacgccgcccgctacgccctgctgcgcgtggagcacggtcccccccacaccaagaactggaggccccaggtgctggtgatgctgaacctggacgcggagcaggccgtgaagcacccccgcctgctgtccttcacgtcgcagctgaaggccggcaagggcctgaccatcgtgggctcggtgctggaggggacgtacctggacaagcacatggaggctcagcgggccgaggagaacatacggtccctaatgagcacagagaagaccaagggcttctgccagctggtggtctcgtccagcctgcgggatggcatgtcccacctgatccagtcggccggcctgggcggcctgaagcacaacacggtgctcatggcctggcccgcatcctggaagcaggaggacaaccccttctcctggaagaactttgtggacaccgtccgcgacaccaccgccgcgcaccaggctctgctggtggccaagaacgtcgactcgtttccgcaaaaccaggagcgcttcggcgggggccacatcgacgtgtggtggatcgtgcacgacggcggcatgctcatgctgctgcccttcctgctgcgccagcacaaggtgtggaggaagtgccggatgcgtatcttcaccgtggcccaggtggacgacaacagcatccagatgaagaaggacctgcagatgttcttgtaccacttgcgcatcagcgccgaggtggaggtggtggagatggttgaaaacgacatatctgctttcacctacgagaggacactaatgatggagcagaggtcgcagatgctgaagcagatgcagctgtccaagaacgagcaggagcgagaggcccagctgatccacgacaggaacaccgcgtcccacaccgcggcggcagccaggacccaagcgccgcctacgccagacaaggtgcagatgacctggaccagggagaagctgatcgctgagaagtacaggagcagagacaccagcctatctggtttcaaagacctcttcagcatgaagccggaccagtccaacgtcaggcggatgcacacggctgtgaagctcaatggcgtcgtcctcaacaagtcccaggatgcgcagctggtcctgctcaacatgccaggtcctcccaaaaaccggcagggagacgagaactacatggagtttcttgaagtcctgaccgaggggctgaacagagtcctcctggtcaggggtggcggccgggaggtgatcaccatctactcctaatgcccaacagcatcacggcactctgggacaggcacggaggacggcgtgggcagcctgggcctgggcttggcccagggaaacagacggcagacacacctgtcccccagtgatgccgcccaagctgcccatggggcttcctacggaagtttctaggcccgtcacctagggctctcctgttcagccttaacaggctcagcaaatcagggcgtggctggacgatttccttgcatctgagggcagacgctgctaccggagtgacctggacgtggccagatcttctcgcaggtcacaagaagccagtgagcccttgccttggtttctggaagttcttttccttggctggatttacccagtggttaggttgcatttctaccccatccagaacattcttggaagagcacccggagctgaagctgtccctgatgatgaaggtgaaacgtcagccctggccatggctccgctcagggccccggtcacctccgagtcactctgttccttgactgtctttgtgtttctgtacctcaaggcactgaagctggaggactctgtccatgcccgtgtcaccctcgtgtgggagcctctgggctcggcaggtccacatttcatgagctgaggcgtgggccagggccatctggaaagggaactcggcttttccagaacgtggtggatcatctgtcgggtgtgtggtgaacacgttcagttcatcagggcctacgctccgggaaggggcccccagctgtggctctgccatgccgggctgtgtttgcagctgtccgagtctccatccacctttagaaaaccagccacttcttttcataagcactgacagggcccagcccacagccacaggtgcgatcagtgcctcacgcaggcaaatgcactgaaacccaggggcacacgcgcgcagagtgaacagtgagttcccccgacagcccacgacagccaggactgccctccccaccccaccccaccccaggagcacggcacacagttcagcctctgagctggctcacacgtgccatccccaccccggtgctccagggaaggaggacacggacccgacgtgggaggtcctcaggcagcagtggcgcctggtgtcaggtctgtctggctgagtcccgggcgtcccctgccatggcctgtgccttgcatggaggcggcggtggcactgaagagatagctttcaagggcccaacactttgcacttcggctggctgtgagtttctgctttgtaggttgtggtcacatttgcaggctgcgggcagtggcaccgacttgggcctccctttctatgtggcatatttatttatttaaacaccccagggagttacgtggtaacaaggttgtccataaagaggttgcttctatatactagaggccccagatggccaggccttgggctacgtctggcttgcatggtctcccaagggaatcagccccatcaacaaagttcaaatcggggcagaggctgcacttgtgcccccagatgtttctgaggagccagactagggctggcattgctgtagagtgacggctgctgcccagagcgtgtcccagacatcacagcggggctcagcagttcccacagcctctgcctgccttggctaagcatgagttaagcagcaaaacgctcctccatgtctggatggggccggcaggtcctgtgtcccctgcacctggaggagagcaggctagaggcacagcggccacatggtgctggctctgaacgttggttggtggctggaaaacagccctgcttctgagggccgctcagttctgcacacgaaaccacctcctgagggctcagctctgcccccgccctgggctgcagcctctgcacgcaagcaccaggcatcctttgtgttgtcaactccgtgtaaccagtaactacagccatttacaattgactccgtttccttttgtaggtttccctgtctgtctgtgttagtagaaaaataaaatcctatgaaatctga

SEQ ID NO: 166486 - DNA, 867 bp, Artificial Sequence
  derived and/or modified sequence
gtggcgtcggcgggagcggcgcagcgcgggccgggccgggacggggactgtcggctgcaggcggccatgcccaccaacttcaccgtggtgcccgtggaggctcacgccgacggcggcggggacgagactgccgagcggacggaggctccgggcacccccgagggccccgagcccgagcgccccagcccgggagatggaaatccaagagaaaacagcccattcctcaacaatgtcgaggtggaacaagagagcttctttgaagggaagaacatggcacttttcgaggaggagatggacagtaaccccatggtgtcctcgctgctcaacaagctggccaactacaccaacctgagccagggcgtggtggagcacgaggaggacgaggagagccggcggcgggaggccaaggctccgcgcatgggcaccttcatcggcgtctacctgccgtgcctgcagaacatcctgggcgtcatcctcttcctgcgcctgacgtggatcgtgggggtggctggtgtcctggagtccttcctcatcgtggccatgtgctgcacatgtacaatgctgaccgccatttccatgagtgcgatcgctaccaacggtgtggtcccagctggcgggtcctactacatgatatcgcgctcgctgggacccgagtttggaggcgctgtcggcctctgcttctacctgggcacgacgtttgcaggggccatgtatattttggggaccatcgagatttttctgacaggcacggaggacggcgtgggcagcctgggcctgggcttggcccagggaaacagacggcagacacacctgtcccccagtgatgccgcccaagctgcccatggggcttcctacggaagtttctag

SEQ ID NO: 166487 - DNA, 3252 bp, Artificial Sequence
  derived and/or modified sequence
atgcccaccaacttcaccgtggtgcccgtggaggcccacgccgacggcggcggcgacgagaccgccgagagaaccgaggcccccggcacccccgagggccccgagcccgagagacccagccccggcgacggcaaccccagagagaacagccccttcctgaacaacgtggaggtggagcaggagagcttcttcgagggcaagaacatggccctgttcgaggaggagatggacagcaaccccatggtgagcagcctgctgaacaagctggccaactacaccaacctgagccagggcgtggtggagcacgaggaggacgaggagagcagaagaagagaggccaaggcccccagaatgggcaccttcatcggcgtgtacctgccctgcctgcagaacatcctgggcgtgatcctgttcctgagactgacctggatcgtgggcgtggccggcgtgctggagagcttcctgatcgtggccatgtgctgcacctgcaccatgctgaccgccatcagcatgagcgccatcgccaccaacggcgtggtgcccgccggcggcagctactacatgatcagcagaagcctgggccccgagttcggcggcgccgtgggcctgtgcttctacctgggcaccaccttcgccggcgccatgtacatcctgggcaccatcgagatcttcctgacctacatcagccccggcgccgccatcttccaggccgaggccgccggcggcgaggccgccgccatgctgcacaacatgagagtgtacggcacctgcaccctggtgctgatggccctggtggtgttcgtgggcgtgaagtacgtgaacaagctggccctggtgttcctggcctgcgtggtgctgagcatcctggccatctacgccggcgtgatcaagagcgccttcgacccccccgacatccccgtgtgcctgctgggcaacagaaccctgagcagaagaagcttcgacgcctgcgtgaaggcctacggcatccacaacaacagcgccaccagcgccctgtggggcctgttctgcaacggcagccagcccagcgccgcctgcgacgagtacttcatccagaacaacgtgaccgagatccagggcatccccggcgccgccagcggcgtgttcctggagaacctgtggagcacctacgcccacgccggcgccttcgtggagaagaagggcgtgcccagcgtgcccgtggccgaggagagcagagccagcgccctgccctacgtgctgaccgacatcgccgccagcttcaccctgctggtgggcatctacttccccagcgtgaccggcatcatggccggcagcaacagaagcggcgacctgaaggacgcccagaagagcatccccaccggcaccatcctggccatcgtgaccaccagcttcatctacctgagctgcatcgtgctgttcggcgcctgcatcgagggcgtggtgctgagagacaagttcggcgaggccctgcagggcaacctggtgatcggcatgctggcctggcccagcccctgggtgatcgtgatcggcagcttcttcagcacctgcggcgccggcctgcagagcctgaccggcgcccccagactgctgcaggccatcgccagagacggcatcgtgcccttcctgcaggtgttcggccacggcaaggccaacggcgagcccacctgggccctgctgctgaccgtgctgatctgcgagaccggcatcctgatcgccagcctggacagcgtggcccccatcctgagcatgttcttcctgatgtgctacctgttcgtgaacctggcctgcgccgtgcagaccctgctgagaacccccaactggagacccagattcaagttctaccactggaccctgagcttcctgggcatgagcctgtgcctggccctgatgttcatctgcagctggtactacgccctgagcgccatgctgatcgccggctgcatctacaagtacatcgagtacagaggcgccgagaaggagtggggcgacggcatcagaggcctgagcctgaacgccgccagatacgccctgctgagagtggagcacggccccccccacaccaagaactggagaccccaggtgctggtgatgctgaacctggacgccgagcaggccgtgaagcaccccagactgctgagcttcaccagccagctgaaggccggcaagggcctgaccatcgtgggcagcgtgctggagggcacctacctggacaagcacatggaggcccagagagccgaggagaacatcagaagcctgatgagcaccgagaagaccaagggcttctgccagctggtggtgagcagcagcctgagagacggcatgagccacctgatccagagcgccggcctgggcggcctgaagcacaacaccgtgctgatggcctggcccgccagctggaagcaggaggacaaccccttcagctggaagaacttcgtggacaccgtgagagacaccaccgccgcccaccaggccctgctggtggccaagaacgtggacagcttcccccagaaccaggagagattcggcggcggccacatcgacgtgtggtggatcgtgcacgacggcggcatgctgatgctgctgcccttcctgctgagacagcacaaggtgtggagaaagtgcagaatgagaatcttcaccgtggcccaggtggacgacaacagcatccagatgaagaaggacctgcagatgttcctgtaccacctgagaatcagcgccgaggtggaggtggtggagatggtggagaacgacatcagcgccttcacctacgagagaaccctgatgatggagcagagaagccagatgctgaagcagatgcagctgagcaagaacgagcaggagagagaggcccagctgatccacgacagaaacaccgccagccacaccgccgccgccgccagaacccaggccccccccacccccgacaaggtgcagatgacctggaccagagagaagctgatcgccgagaagtacagaagcagagacaccagcctgagcggcttcaaggacctgttcagcatgaagcccgaccagagcaacgtgagaagaatgcacaccgccgtgaagctgaacggcgtggtgctgaacaagagccaggacgcccagctggtgctgctgaacatgcccggcccccccaagaacagacagggcgacgagaactacatggagttcctggaggtgctgaccgagggcctgaacagagtgctgctggtgagaggcggcggcagagaggtgatcaccatctacagctag

SEQ ID NO: 166488 - DNA, 801 bp, Artificial Sequence
  derived and/or modified sequence
atgcccaccaacttcaccgtggtgcccgtggaggcccacgccgacggcggcggcgacgagaccgccgagagaaccgaggcccccggcacccccgagggccccgagcccgagagacccagccccggcgacggcaaccccagagagaacagccccttcctgaacaacgtggaggtggagcaggagagcttcttcgagggcaagaacatggccctgttcgaggaggagatggacagcaaccccatggtgagcagcctgctgaacaagctggccaactacaccaacctgagccagggcgtggtggagcacgaggaggacgaggagagcagaagaagagaggccaaggcccccagaatgggcaccttcatcggcgtgtacctgccctgcctgcagaacatcctgggcgtgatcctgttcctgagactgacctggatcgtgggcgtggccggcgtgctggagagcttcctgatcgtggccatgtgctgcacctgcaccatgctgaccgccatcagcatgagcgccatcgccaccaacggcgtggtgcccgccggcggcagctactacatgatcagcagaagcctgggccccgagttcggcggcgccgtgggcctgtgcttctacctgggcaccaccttcgccggcgccatgtacatcctgggcaccatcgagatcttcctgaccggcaccgaggacggcgtgggcagcctgggcctgggcctggcccagggcaacagaagacagacccacctgagccccagcgacgccgcccaggccgcccacggcgccagctacggcagcttctag

SEQ ID NO: 166489 - protein, 1455 aa, Artificial Sequence
  derived and/or modified sequence
MGGACSSFTTSSSPTIYSTSVTDSKAMQVESCSSAVGVSNRGVSEKQLTSNTVQQHPSTPKRHTVLYISPPPEDLLDNSRMSCQDEGCGLESEQSCSMWMEDSPSNFSNMSTSSYNDNTEVPRKSRKRNPKQRPGVKRRDCEESNMDIFDADSAKAPHYVLSQLTTDNKGNSKAGNGTLENQKGTGVKKSPMLCGQYPVKSEGKELKIVVQPETQHRARYLTEGSRGSVKDRTQQGFPTVKLEGHNEPVVLQVFVGNDSGRVKPHGFYQACRVTGRNTTPCKEVDIEGTTVIEVGLDPSNNMTLAVDCVGILKLRNADVEARIGIAGSKKKSTRARLVFRVNIMRKDGSTLTLQTPSSPILCTQPAGVPEILKKSLHSCSVKGEEEVFLIGKNFLKGTKVIFQENVSDENSWKSEAEIDMELFHQNHLIVKVPPYHDQHITLPVSVGIYVVTNAGRSHDVQPFTYTPDPAAAGALNVNVKKEISSPARPCSFEEAMKAMKTTGCNLDKVNIIPNALMTPLIPSSMIKSEDVTPMEVTAEKRSSTIFKTTKSVGSTQQTLENISNIAGNGSFSSPSSSHLPSENEKQQQIQPKAYNPETLTTIQTQDISQPGTFPAVSASSQLPNSDALLQQATQFQTRETQSREILQSDGTVVNLSQLTEASQQQQQSPLQEQAQTLQQQISSNIFPSPNSVSQLQNTIQQLQAGSFTGSTASGSSGSVDLVQQVLEAQQQLSSVLFSAPDGNENVQEQLSADIFQQVSQIQSGVSPGMFSSTEPTVHTRPDNLLPGRAESVHPQSENTLSNQQQQQQQQQQVMESSAAMVMEMQQSICQAAAQIQSELFPSTASANGNLQQSPVYQQTSHMMSALSTNEDMQMQCELFSSPPAVSGNETSTTTTQQVATPGTTMFQTSSSGDGEETGTQAKQIQNSVFQTMVQMQHSGDNQPQVNLFSSTKSMMSVQNSGTQQQGNGLFQQGNEMMSLQSGNFLQQSSHSQAQLFHPQNPIADAQNLSQETQGSLFHSPNPIVHSQTSTTSSEQMQPPMFHSQSTIAVLQGSSVPQDQQSTNIFLSQSPMNNLQTNTVAQEAFFAAPNSISPLQSTSNSEQQAAFQQQAPISHIQTPMLSQEQAQPPQQGLFQPQVALGSLPPNPMPQSQQGTMFQSQHSIVAMQSNSPSQEQQQQQQQQQQQQQQQQQSILFSNQNTMATMASPKQPPPNMIFNPNQNPMANQEQQNQSIFHQQSNMAPMNQEQQPMQFQSQSTVSSLQNPGPTQSESSQTPLFHSSPQIQLVQGSPSSQEQQVTLFLSPASMSALQTSINQQDMQQSPLYSPQNNMPGIQGATSSPQPQATLFHNTAGGTMNQLQNSPGSSQQTSGMFLFGIQNNCSQLLTSGPATLPDQLMAISQPGQPQNEGQPPVTTLLSQQMPENSPLASSINTNQNIEKIDLLVSLQNQGNNLTGSF

SEQ ID NO: 166490 - protein, 1531 aa, Artificial Sequence
  derived and/or modified sequence
MPSDFISLLSADLDLESPKSLYSRESVYDLLPKELQLPPSRETSVASMSQTSGGEAGSPPPAVVAADASSAPSSSSMGGACSSFTTSSSPTIYSTSVTDSKAMQVESCSSAVGVSNRGVSEKQLTSNTVQQHPSTPKRHTVLYISPPPEDLLDNSRMSCQDEGCGLESEQSCSMWMEDSPSNFSNMSTSSYNDNTEVPRKSRKRNPKQRPGVKRRDCEESNMDIFDADSAKAPHYVLSQLTTDNKGNSKAGNGTLENQKGTGVKKSPMLCGQYPVKSEGKELKIVVQPETQHRARYLTEGSRGSVKDRTQQGFPTVKLEGHNEPVVLQVFVGNDSGRVKPHGFYQACRVTGRNTTPCKEVDIEGTTVIEVGLDPSNNMTLAVDCVGILKLRNADVEARIGIAGSKKKSTRARLVFRVNIMRKDGSTLTLQTPSSPILCTQPAGVPEILKKSLHSCSVKGEEEVFLIGKNFLKGTKVIFQENVSDENSWKSEAEIDMELFHQNHLIVKVPPYHDQHITLPVSVGIYVVTNAGRSHDVQPFTYTPDPAAAGALNVNVKKEISSPARPCSFEEAMKAMKTTGCNLDKVNIIPNALMTPLIPSSMIKSEDVTPMEVTAEKRSSTIFKTTKSVGSTQQTLENISNIAGNGSFSSPSSSHLPSENEKQQQIQPKAYNPETLTTIQTQDISQPGTFPAVSASSQLPNSDALLQQATQFQTRETQSREILQSDGTVVNLSQLTEASQQQQQSPLQEQAQTLQQQISSNIFPSPNSVSQLQNTIQQLQAGSFTGSTASGSSGSVDLVQQVLEAQQQLSSVLFSAPDGNENVQEQLSADIFQQVSQIQSGVSPGMFSSTEPTVHTRPDNLLPGRAESVHPQSENTLSNQQQQQQQQQQVMESSAAMVMEMQQSICQAAAQIQSELFPSTASANGNLQQSPVYQQTSHMMSALSTNEDMQMQCELFSSPPAVSGNETSTTTTQQVATPGTTMFQTSSSGDGEETGTQAKQIQNSVFQTMVQMQHSGDNQPQVNLFSSTKSMMSVQNSGTQQQGNGLFQQGNEMMSLQSGNFLQQSSHSQAQLFHPQNPIADAQNLSQETQGSLFHSPNPIVHSQTSTTSSEQMQPPMFHSQSTIAVLQGSSVPQDQQSTNIFLSQSPMNNLQTNTVAQEAFFAAPNSISPLQSTSNSEQQAAFQQQAPISHIQTPMLSQEQAQPPQQGLFQPQVALGSLPPNPMPQSQQGTMFQSQHSIVAMQSNSPSQEQQQQQQQQQQQQQQQQQSILFSNQNTMATMASPKQPPPNMIFNPNQNPMANQEQQNQSIFHQQSNMAPMNQEQQPMQFQSQSTVSSLQNPGPTQSESSQTPLFHSSPQIQLVQGSPSSQEQQVTLFLSPASMSALQTSINQQDMQQSPLYSPQNNMPGIQGATSSPQPQATLFHNTAGGTMNQLQNSPGSSQQTSGMFLFGIQNNCSQLLTSGPATLPDQLMAISQPGQPQNEGQPPVTTLLSQQMPENSPLASSINTNQNIEKIDLLVSLQNQGNNLTGSF

SEQ ID NO: 166491 - DNA, 14123 bp, Artificial Sequence
  derived and/or modified sequence
tgcaacggaaacttttggctccacgaacagaaaagcaagagcaaaaactcagttaaatgcgttcttcctccatctttgcctagtccaaaaggaaaaaaaaagaaacagaaaaaagaaaaactgtttggaagagtagcgttgaggtttgctttttacctgtttttcctctagaacagccaggtggattcacatgatccaattttttaattgtcttctatgtcccactccgaataacccggatgccccagcacaatcagagagatcgttttttttaaaaaaaatttcagcctccaaaggtaggaggggagtgttaggggagaaagtactttaattaaaaatcaataactcgaggtttttgggatacggtttgccatttcctaattaagaaatgggtttgacagtccctttgtacacactgctatgcaaaccccaaagggttggcggctgtccgggcgatgacactccggtcccctgcgagaccccgggccagccaggcccgtccgccgccggcctctggggtccgtccccggctcgcgcagacctctcgcttctctcggctctgtctcctgcgctcagctctgctcggggccggccgcctcaggctcgccgccaccaggtcgttgcaaataccttttccctccccggggccccagcgcgcggccacctcccagcctccccccctcccaccctggcagcggggccctttcccggctcaggaacagcagcagcccgggccgcgccggcaggaagcgaggcccatgttgctgctgttccctggcgcgcctccccgccctccgggggccgccacggctcttccgcgctcccgggcacccccctccgcgcctgcgctgtgccccacgggggcggggctcagattcctgtcagcggcggcggcggtggcggcgaccgtcagttttcgctgaggagaaacacgaaacggaccctttggctctcccccttccccttccccgtcctgaacccctctcctggtcaccgagaatcagtccccgtggagttccccctccacctcgccatcgtttcctcggtcctcggcccagtggaagtcactaccctcgaggaggaggcagcggcagccgccctcgcgtcgccgcccccggttcggtgcccgcggtcccggagaggaggtgccgccgccaccgccgctccccccctcccgctgccctcgggccgggctgggtcgagctgcgatgccctcggacttcatctcattgctcagcgcggacctagacctggaatcgcccaagtccctctactcgcgagaatctgtctatgatcttctcccaaaggagttacagttacctccatctagagaaacatctgtagcatcaatgagtcagacaagcggtggtgaggcaggctcgcctcctccagctgttgttgctgctgatgcttcttcagctccctcctcttcctccatgggcggtgcttgcagctcctttaccacctcttccagccctaccatttattctacctcagtcaccgacagcaaggctatgcaagtggagagctgctcctcagccgtgggggtaagtaacagaggggtaagtgaaaagcagttaaccagtaacacagttcagcagcatccatcaacaccgaagaggcacacagtcttgtacatctcaccaccacctgaggacttgctggataacagtcggatgtcctgccaggatgaggggtgtggattggaatctgagcagagctgcagtatgtggatggaggattccccctccaacttcagtaacatgagcaccagttcctacaatgataacactgaggtacctcgtaaatcacgaaaacgaaatccaaagcagaggccgggggtcaaacgacgagattgtgaagaatctaatatggatatatttgatgccgacagtgccaaagcacctcactatgtgctttctcagcttaccacggacaacaaaggcaactcaaaagcgggaaatggaacattggaaaaccaaaaaggaactggagtaaagaagagccctatgttgtgtggacaatatcctgttaaaagtgagggaaaggagctgaagatagttgtacaacctgagacacagcaccgagctcggtacctgactgagggcagccgtggctcagtgaaagatagaacacagcaaggctttcctacagtaaagctggaaggccataatgaacctgtagtgttgcaagtgtttgtgggcaacgactctggacgagtgaaaccacatggattttatcaggcctgcagagtaactggacgaaatacaactccttgcaaagaagtggacattgaaggcactactgttatagaagtcggccttgatcctagcaacaacatgacactggcggtggactgcgtagggatattgaaattgaggaatgctgatgtcgaagccagaataggaattgctggttccaagaagaaaagcactcgtgccagattggtttttcgagttaatatcatgaggaaagatggctccactttgacactgcaaacaccctcttctccaattttgtgtactcagccagcaggagtgccagaaatcttaaagaaaagcttgcatagctgttcagtgaaaggagaagaagaagtgtttttaatcggcaagaactttctgaaaggaactaaagttattttccaagaaaatgtttctgatgaaaactcttggaagtcagaagctgaaattgatatggaactatttcatcagaatcatcttattgtgaaggttcctccctatcatgaccaacatataactttgcctgtgtcagtgggaatatatgtagtgacaaatgctggaagatctcatgatgttcaaccattcacttacactccagacccagcagcagctggtgctttgaatgtaaatgtgaagaaggaaatatctagtccagcaagaccttgctcttttgaagaggccatgaaagcaatgaaaactactggatgtaatttagataaggtaaatattatccctaatgccctgatgactccactcataccaagcagtatgattaagagtgaagatgttactccaatggaagtaacagcagaaaaaagatcttccactatttttaagactacaaagtctgttggatcaactcagcaaacattagaaaacatctcaaacatagcaggaaatggctctttttcatcaccatcatcttcccacctaccttctgaaaatgaaaaacagcagcagattcagcccaaggcatacaacccagagaccctgacaactattcaaacccaggacatctcacagcctggtacttttccagcagtttctgcttctagtcagctgcccaacagcgatgcactattgcagcaggctacacagtttcagacaagagaaactcagtctagagagatattacagtcagatggtacagtggttaatttgtcacaactgactgaggcatcacaacaacagcagcagtcaccactacaagaacaagcacagactttacagcagcagatttcatcaaatatttttccatcaccaaatagtgtgagtcagcttcagaatactattcagcagctgcaagcagggagtttcacaggcagtactgctagtggcagcagtggaagtgttgacttggtccaacaagttttagaggcacagcagcagttatcttcagttttattttctgctccagatggtaatgagaatgttcaagagcagcttagtgcagatatttttcaacaagtcagtcaaattcagagtggtgtaagccctggaatgttttcctcaacagagccaacagtccataccagaccagataatttattacctggaagagctgaaagtgttcatccacagtctgaaaacacgttatctaatcaacagcagcagcagcagcagcaacagcaagtgatggaatcttcagccgcaatggtgatggagatgcaacagagtatctgccaggcagctgcccagattcagtcagagttattcccttcaactgcttcagcaaatggaaaccttcagcaatcgccagtttaccagcagacttctcacatgatgagtgcattgtctaccaatgaggatatgcaaatgcagtgtgaattgttttcttctcctcctgcagtttctggaaatgaaacttctacaactaccacacagcaggttgcaacccctggcactaccatgtttcagacatcaagttcaggagatggagaagaaactggaacacaagcaaaacagattcagaacagtgtctttcagaccatggtccaaatgcaacatagtggggacaatcaacctcaagttaaccttttttcatccacaaaaagtatgatgagtgttcagaatagtggtacccaacaacaaggtaatggtttattccagcaagggaatgagatgatgtcacttcaatctggaaattttttgcagcagtcttctcattcacaggcccaactttttcatcctcaaaatcctattgccgatgctcagaacctttcccaggaaactcaaggttctctctttcatagtccaaatcctattgtccacagtcagacttctacaacctcctctgaacaaatgcagcctccaatgtttcactctcaaagtaccattgctgtgttacagggctcttcagttcctcaagaccagcagtcaaccaacatatttctttcccagagtcccatgaataatcttcagactaacacagtagcccaagaagcattttttgcagcaccgaactcaatttctccacttcagtcaacatcaaacagtgaacaacaagctgctttccaacagcaagctccaatatcacacatccagactcctatgctttcccaagaacaggcacaacccccgcagcagggtttatttcagcctcaggtggccctgggctcccttccacctaatccaatgcctcaaagccaacaaggaaccatgttccagtcacagcactcaatagttgccatgcagagtaactctccatcccaggaacagcagcagcagcagcaacagcagcagcaacagcagcagcaacaacaacagagcattttattcagtaatcagaataccatggctacaatggcgtctccaaagcaaccaccaccaaacatgatattcaacccaaatcaaaatccaatggctaatcaggagcaacagaaccagtcaatttttcaccaacaaagtaacatggccccaatgaatcaagagcaacagcccatgcaatttcagagtcagtccacagtttcctcacttcagaacccaggtcctacccagtcggaatcatcacagacccccttgttccatagctctcctcagattcagttggtacaagggtcacctagttctcaagagcagcaagtaactctcttcttatctccagcatccatgtctgccttgcagaccagtataaatcaacaagatatgcaacagtctcctctttattcccctcagaacaacatgcctggaattcaaggagccacatcttcgcctcaaccacaggctactttatttcacaacacagcaggaggcacaatgaaccaactgcagaattctcctggctcatctcagcagacatcaggaatgttcttatttggcattcaaaataactgtagtcagcttttaacctctggaccagctacattgcctgatcagttgatggccataagtcagccaggccaaccacaaaacgagggccagccacctgtgacaacacttctttctcagcaaatgccagagaattctccactggcatcctctataaacaccaaccagaacatcgaaaagattgatttgcttgtttcattgcaaaaccaagggaacaacttgactggctccttttaactggatataaattccacgaagaaaatcctgattccaagatgtcctgagatcttgtggttccatgagaattattactttaaaaacaaaacaaaatataaaaaactgtgtttgagtaaactgatagattttactctgactgcaaaagagcacacctatgctgcttgttgcagtaactaaccaccaatgttaacatcttcatattttatattcctaataacagtgatgactgagaatctatttgagtttccagctggcagaattaattgttattattttcctaggcgcaatttccttaaacgtacagtttaaattcaaggctggaccactcagttattattgctattagaaaataatatatcatgtttacttttgttcttcattattttctttcctgcattgttttagtcaagtaatggcttttgaaaaagtaaagttcaataataactaaggctgtgatttttttcaatataaaaggcacagctgttggccaaagtgaaggaatcttttttcagttttattggagaaactgaagggtaacattctaacaagtaaactgtatgtgcagataaaagtactcttgatttaacacaaaggcagatgatacacttataaaactgggaacagctggaatgcttcttgattttattttttcagagagttgttagttctctgggtttctactaaggggtttagccataactgtgcatagaaaaataattatctgtaaaaaatgaaggggataatatatgataaattatgttctgatatcctcctacagtagtttaaattgacagaaaaatttgaatgttttcttcttaacccagtcttaggctggtattccctttttatatatatctatattacttttcacctctttttcactttactttagagaactattaatatactactggcttcatgaccctgtagcatctttggccactttaatctagggtgacctagcaatcctgcagcacagggcagagagtactgtcttaggaattattaggagttgattcctgagaaacaacacatttttccccatgaacggtgctgttctgaagtcttcaaatttttccctctaataggaaacagtataaattttaattaaaaaaaaaaggcaaactaaaatttcttgaaatatcacttctccctgatctgcagtgagtataaattcacttgtcacctcagtgctttacagtttgaagtggtcacttacctgatggttcccacaagccttaggctttacagggttgtatcattgacttaaaatgaagaattaacttgtgttacatctataaagagcaaaataacacactccagaacttggcagttgtagcattagttatacagttttgggtgttcttgccacccgtgggatgcctgcttctcactaccacctgtgtctggacacatgcttatgtctcattttccttttggcatgtggaaagctgtcaatgcagtgtaaggccaacgtgtgtgtggcttctatgtgttgagataatgttttggtatccttgtccgtttcatttattttttaagtgtacaaaaaataacctgttaattgttgaaggctacttttctgttctttttttttttttttttctatcctgtacatttagttgaactgtgcggaattgtggtgttggttttgtttacacagccagatttttccttctttttgttttgtgatgatcttcctttgttctttgaatgtgctcttttgtctttttctcttttttctcatgttttcttccctccacctccacccctttctttctttctctctctgattgagaggcattgaattacgttttcagtagtacaggcttcttgccgatatgaagggaacttttcagaaagagacctactctgggtcatttaattttgaatacagttttcaatcgttcaagttttggatggtttatatctaatgtgtgtttcatttttttggaaagctatattttgtatttaggaaatggtatactattttgctatttgtactgagtgagtacattggcataaatatagaaatttatatatatacatatatataaactattcttttttgccacacatttttgtggtaaatttgtgagtttgtctgatgttctaccacaacgtggcgtctgataacagtgagggggggtggggtttgttatgtctttattgagtatttaagtatcttttgaaacaaatgacctgttcatctgtggccattccatcaggcagttagttccttgatgtcagtagtgggctaaaggcagcttactgtgtgtttgctggagctttcactcagccaagtgttagagtcaggaaacccattgaggcaatggcgtcaaatggtgtttcacaagaatgagccattcagtctttgctcactatatatttaatattttattattgttgttattgttattattaattggctttctgtattctatgccttttatttataaagacactaagaaaacccatgtttgtaattttaataacatttttcccatcttgtaatatccagagctactttataaattctctgaaccaaaagtattttcctcagtgtatctcttctcccccagcccctattgggaaaaattacccagtatagttcaggttatgaggaggatcagccacacaatccagtgcttcagtttgaaaatgtaaaattctaaccctaaagtagggttggttgaaatttcagacaaagcaaacccagcaggtataaaaagtagtataaatacaaatctgtaagttatttttgaattttctgaacttttttctaagagattacataggagactaaagaaatctatctgttcaagttctaattaggatgattgttaatactgcactgtggatgaagtggcgactggcttgtgtgctgacttctgtggtttagcaagaggtttattgttatcaaatgctaattggcaatgccaagtcactgggaccaattttctgttttataatatctaagtttagaacagaatatatacctgaactgtagtggtttgatcggatggagacagaaaacccgatttttattctcataaattttgtggttatttatacaagggctgtgctatgctaccatattcttgttcaataataataggtttgttgttttttttacattgttaaatgttccttacccctaaaggtcaatgttaagtacaacattctgaaaatacaatttggctacgaagagtattcatcttctttgaagctcagtggttgatatttgtgctaataatgcaatttcctgattactgttacaagttatagctacatatgggagagactcagtgagccagcaaaggccatagaaacaacaatttattaaatgtatttatggcagaaggacctaaataaactgtgagccaccttttcttctttatattgttacatttaagtgttcttgctttcagcaactcacattaatgcttggagcttatctctttctctctctctctctctctctctgtgtgtgtgtgtgtatgtgtgtgtgtgtgtgtgtgtgtttccttattgtcattccattatatatccacaccaacatgggtgacgataattcaaagtcatattttgcctctaagcttgatcatgttacctttatgattaaagtatcatgttatttagccaatgcaaatctgttttaaaacaaatagtttaaaaaaagaacaagtttttaagggctttattatagaagaagtattaatgaaggactttccttcctccctccctttcctcccctccctgcctcccttcttcccttccatctccccctcctccctgccttctttgtttctccttcccttattcctccctccctcctttctcccttccttcctttcttccattcatccttccttgccttttatttttattttttgtaatatcacatgtgctgtagtttggaattttattctagtgcatttcttgctcatcagaacctcagctaatctacctaggaaaaatagtatcaaaggaaatgagaaagttgtatctgagtccctccagaactaagataattctttttgaccatttaagcctttataaatgcgttttgaccatttaagcctttataaatgcttgttttaggaaagtgaatctgttagatgcatcaacaaataatgaccaggacaaaacgatttaataattaaagtctcaaatcaccatggttatacattttcaccagaaatagtaatcttacaatttttcatttttctgatgaagatttctgttccaatatctgtttcctaatagattttttaaattaattagctttcctctgctttatgaccacaggttttatccctaaccgagacagctgtcttatatctgcatgccttagactgtgtggagggactccatgaagaaagaccataggttagaaaaataactcatagtatataccctagtaagtgggttagtagaatctcataacatgtattaaaaagaggttttcttctctgcttgtttgtgtcactagagcaaaattgtagagataatgctcataatgcagtaaatatcagaataatatctacaatatcatttgtggatggtcccaggtcccagtgctctagttactttacttctttttttttttttgagatggagtcttgctctgtctctcaggctagagcagtgtgcgatctcagctcactgcagcctccacctcccaggttcaagcgattctcctgcctcagcctcccaagtagccaggattacaggcaccctccactaggcccggctaattttttttgtatttttttagtagagatggggttttgccatgttggccaggctggtttcgaactcctaacctccagtgatccacctgcctcggcgtcccaaagtgctaggattacaggcatgagccaccacatccggcctaattacttctttaatccccatttatttttatgccattctagcctcatttattaataaaattatgtttttactttctctttcaggaaattttttaaattaatattttatatctagatctaatgctatggaaaagtgcctttttatcatttataatttcatttttcactatttccaaaaacacataaacaaatagtttcagtaggtcccagcttttactttttccatttaaaccttcttttctccatttcttccctttggcttaagaataaaagaaaaggtacattgctagaattgtttctttgggagagggtaaaagattacagaattagactgttcagcctttatataaactaaatttgtcttcatctcaaccagctaatggtaggtcttatctgaatactcatgagaattttagcatctgtgaaactccatgcaccagatgtgtgtaaatttcaggaagaaagtgttgaaagcattttctctgatgttaattagatggaaataaatcactaaaacatagtttaggtaaagcctgattatgccacttttttttaactagacagggcaaagttgtttatgttagtgtacttcttgtctatcctcagttaatttacctagacaaaaagtgtcaaaggaaatgagaaaaaggttatatctgactccctccagacctaagataattccttttgatcagatacagtcagatggagtgccttggtttttgttaattttgcctctattccagctccttaccacagcggtggtgcttaaagaaaggatcatcagcaacaggtcaggatagttctacctttgggatagggctgctttccccgtgctagtatttctgtgactgttagtggcactgaggactgcaaacttttatgcaatattcttaataccctattgatattatgcactttaatcattccaaagaagccaagaatgctgtatagtgatgattccttcctaatgaattcatcttaactatttagaatgttatgtcccttttcttttggatagccaacttggtataaatgttatatggatttttctaaaatgactatataggacttaagactttgaaatgtaatttacttataaggggaaataattatgctttagcacatcattttagaaacgtcacattttagaaacattcagcttgctaacctacatgtttgggaattcattaaaaccagttgtctatatattttgtgccatgtatataagaacattacaatatatctttttctacatatgtagtatgtgcaaccagtggttctcagagtatggttctcagcccaccagctagtatcagtatcacctgggaactagttagaaatgtaaattctttggccccatcccagacatactgagtcagaaactctggaatagggcccccgcaatctgttttcacaagccctccaggtgattctgatgcacactttaaagtttaggaaccactgggctaagactctgttgagatatagagtttttcttccactcagactgatatagttatacattgttcttcatgtaaattcagcttaacctggttatctataatcttttattggcaaaagttaattctcagtactgcctatagagatacagtgtattttatgtacatacacaattagtctaattcttgataattcagttaatttagtttggcattttcctaccacttactaaaaggtttacattaaatgactgatttaaatatataggtgcaatgttctatgtttattttaattgttatgacatttaagtagctaatataattgaccggtgctaaagtctcctgtttatccataaaatgggtacattatgggcagtgtaatacaagctttcttttcattgcctagtactttaccagcagaccacagttttgccctggctagaccaaccctcagaacaaaatcatcattccttgtatttatatttgtatctgagatagtaaacaagatggctggccaggtcaacatggcaccttaacttatttttttaataggtaaaacttcttcaaaagtagcttgctttgtataagaactaagctatcagtatagatatagctatccttggagcttatgtttcagacaagaattatttactaaaataaataataaacaagataatgcattatacaatttgggcatttctcgtttctcaagtgtatgcatcatggtaaatataaactaaccacaagataggtagattgattcatttcattttaatctccttgtgtaattcagtacctccataattgttctaatcttcttcccactgtttacaaattaccagttaattaactcgtgaaagaaaaattcacatatcagaataaaaataaatgtatactcactttataaaaatcaccactgctgtctttccttaatactagcagtggaaatgtaagtggcttactctacaaattttggtgctggcaaatacataggcaaactgttgggagctgctctagttacattcctcccttcttattccctttttctcttcctcactttattgcataacatattcctgtacccaaagcattctaccacagttctatttgactcccacttgtaataactcctttaaaaaattccatgtttaaccatatgaccctgcttgcttactcatattctccctccctctccccttcctttctctctcttccagaagtcatttgcctggtttgaaatattttgtagggattgcttattatattattttagctgatgaacctcaggacaacgtctacacacacacacatacatacacgcacacaaaatctcagctgttgaagagtgggcttggaatcagacttctgtgtccagtaaaaaactcctgcactgaagtcattgtgacttgagtagttacagactgattccagtgaacttgatctaatttcttttgatctaatgaatgtgtctgcttaccttgtttccttttaattgataagctccaagtagttgctaattttttgacaactttaaatgagtttcattcacttcttttacttaatgttttaagtatagtaccaataatttcattaacctgttctcaagtggtttagctaccattctgccatttttaatttttatttaattttatttgcttgagcacactgatcaaccactgaactgccttcttccattgtcctgcaatgatataagggttacatttttgtgtatatggctttcatagttgggatttcagagcactgataccagatattttcagtttgttctctgggggaatttcatttgcatctatgtttttagctatctgtgataacttgttaaatattaaaaagatattttgcttctattggaacatttgtatactcgcaactatatttctgtaaacagctgcagtcaaaaataaaacactgaaagttaaaaaaaaaaaaaaaaaaaa

SEQ ID NO: 166492 - DNA, 4596 bp, Artificial Sequence
  derived and/or modified sequence
atgcccagcgacttcatcagcctgctgagcgccgacctggacctggagagccccaagagcctgtacagcagagagagcgtgtacgacctgctgcccaaggagctgcagctgccccccagcagagagaccagcgtggccagcatgagccagaccagcggcggcgaggccggcagccccccccccgccgtggtggccgccgacgccagcagcgcccccagcagcagcagcatgggcggcgcctgcagcagcttcaccaccagcagcagccccaccatctacagcaccagcgtgaccgacagcaaggccatgcaggtggagagctgcagcagcgccgtgggcgtgagcaacagaggcgtgagcgagaagcagctgaccagcaacaccgtgcagcagcaccccagcacccccaagagacacaccgtgctgtacatcagccccccccccgaggacctgctggacaacagcagaatgagctgccaggacgagggctgcggcctggagagcgagcagagctgcagcatgtggatggaggacagccccagcaacttcagcaacatgagcaccagcagctacaacgacaacaccgaggtgcccagaaagagcagaaagagaaaccccaagcagagacccggcgtgaagagaagagactgcgaggagagcaacatggacatcttcgacgccgacagcgccaaggccccccactacgtgctgagccagctgaccaccgacaacaagggcaacagcaaggccggcaacggcaccctggagaaccagaagggcaccggcgtgaagaagagccccatgctgtgcggccagtaccccgtgaagagcgagggcaaggagctgaagatcgtggtgcagcccgagacccagcacagagccagatacctgaccgagggcagcagaggcagcgtgaaggacagaacccagcagggcttccccaccgtgaagctggagggccacaacgagcccgtggtgctgcaggtgttcgtgggcaacgacagcggcagagtgaagccccacggcttctaccaggcctgcagagtgaccggcagaaacaccaccccctgcaaggaggtggacatcgagggcaccaccgtgatcgaggtgggcctggaccccagcaacaacatgaccctggccgtggactgcgtgggcatcctgaagctgagaaacgccgacgtggaggccagaatcggcatcgccggcagcaagaagaagagcaccagagccagactggtgttcagagtgaacatcatgagaaaggacggcagcaccctgaccctgcagacccccagcagccccatcctgtgcacccagcccgccggcgtgcccgagatcctgaagaagagcctgcacagctgcagcgtgaagggcgaggaggaggtgttcctgatcggcaagaacttcctgaagggcaccaaggtgatcttccaggagaacgtgagcgacgagaacagctggaagagcgaggccgagatcgacatggagctgttccaccagaaccacctgatcgtgaaggtgcccccctaccacgaccagcacatcaccctgcccgtgagcgtgggcatctacgtggtgaccaacgccggcagaagccacgacgtgcagcccttcacctacacccccgaccccgccgccgccggcgccctgaacgtgaacgtgaagaaggagatcagcagccccgccagaccctgcagcttcgaggaggccatgaaggccatgaagaccaccggctgcaacctggacaaggtgaacatcatccccaacgccctgatgacccccctgatccccagcagcatgatcaagagcgaggacgtgacccccatggaggtgaccgccgagaagagaagcagcaccatcttcaagaccaccaagagcgtgggcagcacccagcagaccctggagaacatcagcaacatcgccggcaacggcagcttcagcagccccagcagcagccacctgcccagcgagaacgagaagcagcagcagatccagcccaaggcctacaaccccgagaccctgaccaccatccagacccaggacatcagccagcccggcaccttccccgccgtgagcgccagcagccagctgcccaacagcgacgccctgctgcagcaggccacccagttccagaccagagagacccagagcagagagatcctgcagagcgacggcaccgtggtgaacctgagccagctgaccgaggccagccagcagcagcagcagagccccctgcaggagcaggcccagaccctgcagcagcagatcagcagcaacatcttccccagccccaacagcgtgagccagctgcagaacaccatccagcagctgcaggccggcagcttcaccggcagcaccgccagcggcagcagcggcagcgtggacctggtgcagcaggtgctggaggcccagcagcagctgagcagcgtgctgttcagcgcccccgacggcaacgagaacgtgcaggagcagctgagcgccgacatcttccagcaggtgagccagatccagagcggcgtgagccccggcatgttcagcagcaccgagcccaccgtgcacaccagacccgacaacctgctgcccggcagagccgagagcgtgcacccccagagcgagaacaccctgagcaaccagcagcagcagcagcagcagcagcagcaggtgatggagagcagcgccgccatggtgatggagatgcagcagagcatctgccaggccgccgcccagatccagagcgagctgttccccagcaccgccagcgccaacggcaacctgcagcagagccccgtgtaccagcagaccagccacatgatgagcgccctgagcaccaacgaggacatgcagatgcagtgcgagctgttcagcagcccccccgccgtgagcggcaacgagaccagcaccaccaccacccagcaggtggccacccccggcaccaccatgttccagaccagcagcagcggcgacggcgaggagaccggcacccaggccaagcagatccagaacagcgtgttccagaccatggtgcagatgcagcacagcggcgacaaccagccccaggtgaacctgttcagcagcaccaagagcatgatgagcgtgcagaacagcggcacccagcagcagggcaacggcctgttccagcagggcaacgagatgatgagcctgcagagcggcaacttcctgcagcagagcagccacagccaggcccagctgttccacccccagaaccccatcgccgacgcccagaacctgagccaggagacccagggcagcctgttccacagccccaaccccatcgtgcacagccagaccagcaccaccagcagcgagcagatgcagccccccatgttccacagccagagcaccatcgccgtgctgcagggcagcagcgtgccccaggaccagcagagcaccaacatcttcctgagccagagccccatgaacaacctgcagaccaacaccgtggcccaggaggccttcttcgccgcccccaacagcatcagccccctgcagagcaccagcaacagcgagcagcaggccgccttccagcagcaggcccccatcagccacatccagacccccatgctgagccaggagcaggcccagcccccccagcagggcctgttccagccccaggtggccctgggcagcctgccccccaaccccatgccccagagccagcagggcaccatgttccagagccagcacagcatcgtggccatgcagagcaacagccccagccaggagcagcagcagcagcagcagcagcagcagcagcagcagcagcagcagcagcagagcatcctgttcagcaaccagaacaccatggccaccatggccagccccaagcagcccccccccaacatgatcttcaaccccaaccagaaccccatggccaaccaggagcagcagaaccagagcatcttccaccagcagagcaacatggcccccatgaaccaggagcagcagcccatgcagttccagagccagagcaccgtgagcagcctgcagaaccccggccccacccagagcgagagcagccagacccccctgttccacagcagcccccagatccagctggtgcagggcagccccagcagccaggagcagcaggtgaccctgttcctgagccccgccagcatgagcgccctgcagaccagcatcaaccagcaggacatgcagcagagccccctgtacagcccccagaacaacatgcccggcatccagggcgccaccagcagcccccagccccaggccaccctgttccacaacaccgccggcggcaccatgaaccagctgcagaacagccccggcagcagccagcagaccagcggcatgttcctgttcggcatccagaacaactgcagccagctgctgaccagcggccccgccaccctgcccgaccagctgatggccatcagccagcccggccagccccagaacgagggccagccccccgtgaccaccctgctgagccagcagatgcccgagaacagccccctggccagcagcatcaacaccaaccagaacatcgagaagatcgacctgctggtgagcctgcagaaccagggcaacaacctgaccggcagcttctag

SEQ ID NO: 166493 - DNA, 4596 bp, Artificial Sequence
  derived and/or modified sequence
atgcctagcgatttcatctccctgctgagcgccgatttagacctggaatctcccaagagtctgtactcacgggagagtgtatacgacttgttgcccaaggagctgcagttgcctccaagccgcgagacatccgtcgcatctatgagccaaactagcggcggagaagcggggtctccaccccctgcagttgtcgccgccgacgcgagtagcgccccaagctcctcctcaatgggcggggcgtgttcctcttttacaaccagcagttcccccacgatttactctacttccgtcacagacagtaaggctatgcaagtggagagctgttcctcagctgtgggcgtgagtaatcgcggtgtgagtgaaaaacagctgacatcaaacactgtgcaacagcacccctccacccctaagcgacacactgtcctatatatcagtccgcccccagaggatttactggataatagcagaatgtcttgtcaggatgaaggctgtgggctggagagtgagcagagctgcagcatgtggatggaggattctccatcaaactttagtaacatgtccacttcatcttacaacgataacaccgaagtgcctcggaagagcaggaaacggaaccccaagcaacgtccaggggtcaaaagacgggactgcgaagagtctaacatggatatatttgacgctgactcggcaaaggcaccgcactacgtactctcccaactgactacagataacaaaggcaacagtaaagccggcaatgggacacttgaaaaccagaaggggacaggtgtgaagaagtcgcccatgttgtgcggccaataccctgtgaagtccgagggaaaagagctaaaaattgtagtacagcccgagacccagcacagggcccgctacttaactgaaggtagtcggggatcagttaaggacagaacacaacaaggatttccaaccgtgaagctcgagggccataatgagcctgtggtgctgcaagtttttgtcggcaatgatagcggcagagtgaaacctcatgggttttaccaggcttgccgtgtgacagggaggaacacgacaccatgtaaagaagtggacattgagggcaccactgtcatcgaagtaggactcgacccctcgaataacatgacactggccgtggactgtgtgggaattctcaagctccgaaacgctgacgttgaagctcggatcggcatcgctgggagcaagaagaagtctactagagcaagattggtattccgcgtcaacataatgcggaaagacggaagtactctgactttgcagacaccatctagcccaatcttatgtacccagcctgctggagtgcctgagattcttaagaaatctctacatagctgctcagtcaagggggaggaagaggtcttcctaataggcaaaaacttcctgaagggaaccaaagtgattttccaggagaacgtctctgatgagaatagttggaagtctgaggccgaaatcgacatggagctgttccaccagaatcatcttattgtgaaggtgccaccatatcacgatcagcatatcaccctcccagtctcggtaggcatttatgtagtgaccaatgcagggcggtcacacgacgtccagccctttacatatacccctgatcccgctgccgccggcgctctgaatgtgaacgttaaaaaagaaattagttcccctgccagaccttgctccttcgaagaggctatgaaagccatgaaaactacagggtgcaatctcgataaggtgaatattattcctaacgcacttatgacccctctgatacctagctctatgattaaaagcgaggatgtgacccccatggaagtcacagcagaaaagagatcctccacgatattcaaaactacaaaatccgtcggttcaacccagcaaacactcgagaacattagcaatatcgctggtaatggaagcttttccagccctagttcctcgcatttgccatcagagaacgagaagcagcaacagatacagcccaaggcctataaccccgaaaccttaaccacaatacagacacaggacatctctcagcctgggacgttccctgcagttagcgcatcaagtcagcttccgaactccgacgccctcctgcagcaagcaacccagttccaaaccagagagacgcagtcacgcgaaatattacaaagtgatgggaccgtcgtgaatcttagtcagttgacagaagcatcccagcagcaacagcagtcacccctccaggagcaagctcagacactccagcaacagatttctagcaacatattcccgtccccaaatagtgtctctcaacttcagaatacaatccagcagctgcaggccgggtccttcacgggctccaccgcatctggttcttccggcagtgtggacctcgtccagcaggtgttagaagcccagcagcagctgtccagtgtgttgtttagcgccccggacgggaacgagaacgtccaggagcagctaagtgcagatatctttcagcaggtcagccaaattcaatccggtgtaagcccaggcatgttttcgtcgaccgaacctaccgtgcatacccggcctgataaccttctgccgggtagagcagagtctgtgcatcctcagagtgagaacaccctctccaaccagcagcagcagcagcagcaacagcagcaggtaatggaaagctctgcagccatggtaatggagatgcagcagtcaatctgccaggcggcggctcaaattcaaagcgagttgtttccaagcacggcttcagccaacgggaatctgcaacagtctcctgtgtaccagcaaacaagccacatgatgtctgccttatcgaccaacgaagacatgcaaatgcagtgcgagctttttagcagccctccagcagtttctggcaatgagacgagcactaccactacccagcaggtggcaacacccggaacaaccatgtttcaaaccagcagcagcggagatggcgaagaaacgggaacccaggcaaagcaaatccaaaacagcgtctttcagactatggtgcaaatgcagcactctggggacaatcagcctcaggtcaacttgttcagtagcacgaagagtatgatgagcgtacagaactcgggcactcagcagcagggaaacggactgtttcaacaaggcaacgaaatgatgagtctgcaatccggaaacttcttacagcaaagcagtcactcccaggcccaactgtttcacccgcagaatcctatcgccgatgcacagaatctgtctcaggaaacccaggggtcactgttccacagccccaaccctattgtccattcccaaacctcgaccacctcctcagaacagatgcagccaccgatgtttcactcacaatccacaatagctgtgctgcagggcagttctgtaccgcaagaccaacaatccacgaatattttccttagccagtcacctatgaataaccttcaaactaataccgtggctcaggaagctttttttgcagcccctaactcaattagtccactgcagagcacaagcaatagcgagcaacaagcagcattccagcaacaagcgccaatttcacacattcagacaccaatgctgtctcaggaacaggcccagcccccccagcagggcctttttcaaccacaggtggcccttggatcccttcccccaaatcctatgccccagtctcaacaggggactatgttccagagccaacactctatcgtggccatgcaaagcaatagccctagtcaagagcagcagcagcagcaacagcaacaacagcagcagcagcagcaacagcaacagagcattctgttctccaatcagaatactatggcaaccatggcttcaccaaaacagccgcctcctaatatgattttcaatccgaaccagaaccccatggctaaccaggaacagcaaaatcaatccattttccatcagcagtctaatatggcacccatgaaccaagaacaacagccaatgcagttccagagtcagtctacagtgagtagcctccagaatcctgggcccacccagtcagagtctagccaaaccccacttttccactcctctccacaaatccaactggtacaaggaagcccatcatcgcaagaacagcaggtcacactctttctgagcccagcgagcatgagtgcgttacagacgagcattaatcagcaagatatgcagcagtccccactgtactcaccccaaaacaatatgcctgggattcaaggcgccacctcctctccacagccccaggccacccttttccataatactgccggcggaaccatgaaccagctgcaaaacagccctggatccagccagcagacctctggaatgtttttgtttggtattcaaaataactgttctcagctccttaccagtgggcctgctactctacctgaccaactgatggcgatatcccagccaggccagccacaaaatgaggggcagccacctgttaccactttgctgagtcagcagatgcccgagaattctccccttgcttcttcgattaataccaatcaaaatatagaaaagatcgacctgttggtgtcactccagaaccagggaaataacctgacggggtcattctag

SEQ ID NO: 166494 - DNA, 4596 bp, Artificial Sequence
  derived and/or modified sequence
atgcccagcgacttcatcagcctgctgtctgctgacctggacctggagagccccaagagcctgtacagccgggagagcgtgtatgacctgctgcccaaggagctgcagctgccccccagccgggagacctctgtggcctccatgagccagaccagcggcggggaggccggcagccccccacctgctgtggtggccgcagatgccagcagcgcccccagcagcagctccatgggcggggcctgcagcagcttcaccaccagcagcagccccaccatctacagcacctctgtgacagacagcaaggccatgcaggtggagagctgcagcagcgctgtgggcgtgagcaacagaggagtgtctgagaagcagctgaccagcaacacagtgcagcagcaccccagcacccccaagaggcacacagtgctgtacatcagccccccacctgaggacctgctggacaacagcaggatgagctgccaggatgagggctgcggcctggagagcgagcagagctgcagcatgtggatggaggacagccccagcaacttcagcaacatgagcaccagcagctacaatgacaacacagaggtgcccaggaagagcaggaagaggaaccccaagcagaggcctggggtgaagaggcgggactgtgaggagagcaacatggacatctttgatgctgacagcgccaaggccccccactacgtgctgagccagctgaccacagacaacaagggcaacagcaaggctggaaatggcaccctggagaaccagaagggcactggagtgaagaagagccccatgctgtgtggccagtaccctgtgaagtctgagggcaaggagctgaagatcgtggtgcagcctgagacccagcaccgggcccgctacctgacagagggcagccggggctctgtgaaggacaggacccagcagggcttccccaccgtgaagctggagggccacaatgaacctgtggtgctgcaggtgtttgtgggcaatgattctggccgggtgaagccccacggcttctaccaggcctgccgggtgacaggcaggaacaccaccccctgcaaggaggtggacatcgagggcaccaccgtcatcgaggtgggcctggaccccagcaacaacatgaccctggccgtggactgtgtgggcatcctgaagctgagaaatgctgatgtggaggccagaattggaattgctggcagcaagaagaagagcacccgggcccggctggtgttccgggtgaacatcatgaggaaggatggcagcaccctgaccctgcagacccccagcagccccatcctgtgcacccagcctgctggggtgcctgagatcctgaagaagagcctgcacagctgcagcgtgaagggggaggaggaggtgttcctgattggcaagaacttcctgaagggcaccaaggtgatcttccaggagaatgtgtctgatgaaaattcctggaagtctgaggccgagattgacatggagctgttccaccagaaccacctgattgtgaaggtgcccccctaccatgaccagcacatcaccctgcctgtgtctgtgggcatctacgtggtgaccaatgccggccgcagccatgatgtgcagcccttcacctacaccccagaccctgctgctgctggggccctgaatgtgaatgtgaagaaggagatcagcagccctgcccggccctgcagctttgaggaggccatgaaggccatgaagaccaccggctgcaacctggacaaggtgaacatcatccccaatgccctgatgacccccctcatccccagctccatgatcaagtcagaagatgtgacccccatggaggtgacagctgagaagaggagcagcaccatcttcaagaccaccaagtctgtgggcagcacccagcagaccctggagaacatcagcaacattgctggaaatggcagcttcagcagccccagcagcagccacctgcccagtgaaaatgagaagcagcagcagatccagcccaaggcctacaaccctgagaccctgaccaccatccagacccaggacatcagccagcccggcaccttccctgctgtgtctgccagcagccagctgcccaacagtgatgccctgctgcagcaggccacccagttccagacccgggagacccagagccgggagatcctgcagagtgatggcaccgtggtgaacctgagccagctgacagaggccagccagcagcagcagcagagccccctgcaggagcaggcccagaccctgcagcagcagatcagcagcaacatcttccccagccccaacagcgtgtcccagctgcagaacaccatccagcagctgcaggccggcagcttcaccggcagcacagccagcggcagcagcggctctgtggacctggtgcagcaggtgctggaggcccagcagcagctgagctctgtgctcttcagcgccccagatggaaatgaaaatgtgcaggagcagctgtctgctgacatcttccagcaggtgtcccagatccagagcggcgtgtccccaggcatgttcagcagcacagagcccaccgtgcacaccaggccagacaacctgctgcccggccgggcagagagcgtgcacccccagagcgagaacaccctgagcaaccagcagcagcagcagcagcagcagcagcaggtgatggagagcagcgctgccatggtgatggagatgcagcagagcatctgccaggccgccgcccagatccagagcgagctgttccccagcacagccagcgccaatggaaacctgcagcagagccctgtgtaccagcagaccagccacatgatgtctgccctgagcaccaatgaagacatgcagatgcagtgtgagctgttcagcagccccccagctgtgtctggaaatgagaccagcaccaccaccacccagcaggtggccaccccaggcaccaccatgttccagaccagcagcagtggagatggagaggagaccggcacccaggccaagcagatccagaacagcgtcttccagaccatggtgcagatgcagcacagcggggacaaccagccccaggtgaacctcttcagcagcaccaagtccatgatgtctgtgcagaacagcggcacccagcagcagggcaatggcctcttccagcagggcaatgagatgatgagcctgcagagcggcaacttcctgcagcagagcagccacagccaggcccagctgttccacccccagaaccccatcgcagatgcccagaacctgagccaggagacccagggcagcctcttccacagccccaaccccatcgtgcacagccagaccagcaccaccagcagcgagcagatgcagccccccatgttccacagccagagcaccatcgctgtgctgcagggcagctctgtgccccaggaccagcagagcaccaacatcttcctgagccagagccccatgaacaacctgcagaccaacacagtggcccaggaggccttctttgctgcccccaacagcatcagccccctgcagagcaccagcaacagcgagcagcaggccgccttccagcagcaggcccccatcagccacatccagacccccatgctgagccaggagcaggcccagcccccccagcagggcctcttccagccccaggtggccctgggcagcctgccccccaaccccatgccccagagccagcagggcaccatgttccagagccagcacagcatcgtggccatgcagagcaacagccccagccaggagcagcagcagcagcagcagcagcagcagcagcagcagcagcagcagcagcagagcatcctcttcagcaaccagaacaccatggccaccatggccagccccaagcagcccccacccaacatgatcttcaaccccaaccagaaccccatggccaaccaggagcagcagaaccagagcatcttccaccagcagagcaacatggcccccatgaaccaggagcagcagcccatgcagttccagagccagagcacagtgagcagcctgcagaaccctggccccacccagagcgagagcagccagacccccctcttccacagcagcccccagatccagctggtgcagggcagccccagcagccaggagcagcaggtgaccctcttcctgagccctgcctccatgtctgccctgcagaccagcatcaaccagcaggacatgcagcagagccccctgtacagcccccagaacaacatgcctggcatccagggcgccaccagcagcccccagccccaggccaccctcttccacaacacagctgggggcaccatgaaccagctgcagaacagccctggcagcagccagcagaccagcggcatgttcctgtttggcatccagaacaactgcagccagctgctgaccagcggccctgccaccctgcctgaccagctgatggccatcagccagcccggccagccccagaatgaaggccagccccctgtgaccaccctgctgagccagcagatgcctgagaacagccccctggccagcagcatcaacaccaaccagaacatcgagaagattgacctgctggtgtccctgcagaaccagggcaacaacctgaccggcagcttctag

SEQ ID NO: 166495 - DNA, 4596 bp, Artificial Sequence
  derived and/or modified sequence
atgcccagcgacttcatcagcctgctgagcgccgacctggacctggagagccccaagtccctgtattcacgagagtccgtgtatgacctacttcccaaagagctccagctgccaccttctagagagaccagcgtggcatctatgtcccagacaagtgggggagaggctggcagtcctcctcccgcggtggtcgccgccgatgcaagcagcgccccctctagtagctccatgggaggggcttgtagttcctttaccacctcctcttctccgaccatttattcaacctctgttacagattcaaaagcaatgcaggtagaatcttgctccagcgcagtgggcgtttctaacaggggggtcagcgagaagcagcttacttctaacacagtgcagcaacaccccagcacccccaagcgccacacggtgctgtatatctcacccccgcccgaggacttgctggataattcacgcatgagttgtcaggatgagggatgtggactggagagcgaacagtcttgctccatgtggatggaggattctccctctaattttagcaacatgtctacttcgagttacaatgacaacacagaggtgcccaggaagtcccgtaagcgaaatccaaagcagcggccgggtgtcaagaggcgagactgcgaggagagtaacatggatatcttcgacgctgattcagccaaagctccccattatgtcttaagccagctgaccacggataataaagggaattcaaaagccggcaacggcacattggaaaatcagaaaggtaccggcgtgaagaaaagtccaatgctctgcggacagtaccctgtcaagtctgagggtaaggaacttaagatcgtggtccagcccgaaacacaacaccgcgcaagatacctcactgaagggagccgcggatctgttaaggatagaacccaacagggctttcccaccgtgaaactggaaggacacaatgagcccgtagtgcttcaggtgttcgtgggcaatgactctgggcgggttaaaccacacgggttctatcaggcgtgtagggtgaccggacggaacactacaccttgcaaggaggtggacatcgaggggaccactgtgatagaagtggggctcgaccctagtaacaatatgacactcgctgtcgactgtgtcggcatcttgaagctaaggaacgcagacgtggaagcaagaattggtatagccgggtcaaagaaaaagtcgacccgcgcacggttagtgtttcgggtcaatattatgaggaaagacgggagcacgctgactcttcagacaccgtcgagtccaatcctgtgcactcagcccgctggggtgcccgagatccttaaaaagtctttgcactcgtgctcagttaaaggcgaagaagaagtctttttgatcgggaaaaacttcctgaagggcacgaaagtcatattccaggaaaacgtgtccgacgagaacagttggaaaagtgaagcagagatagacatggaattgtttcaccagaaccacctgatcgtgaaagtccccccctaccacgatcagcatatcacgctccccgtcagtgtgggcatctacgtggtcaccaatgcgggcagatcacacgacgtacagccatttacgtatacacccgacccggcagcggcaggggccctcaacgtcaatgtcaagaaggaaatctccagtccggctaggccatgcagcttcgaggaagccatgaaggctatgaaaactaccggctgcaacttggataaggtcaatattataccaaatgcacttatgaccccacttattcccagctctatgatcaaaagcgaggatgtcacccctatggaagtcactgccgaaaagaggtcttccaccatatttaagacaactaaaagtgttggctctacccaacagacattggaaaatatctctaacatagccggcaacggatccttttcaagtcccagcagttcacatttaccctccgagaacgaaaaacaacagcagatccagccgaaggcttataatccagaaactcttacaacaattcagacacaggacattagccagcccggaacctttcctgcagtcagtgcctctagtcaactgcccaacagcgatgcacttttacagcaagccacccagttccagactcgcgaaacgcaaagtcgggaaatcttacagagcgatggcacggtggtcaatctgtcgcaactgacagaggcctctcagcagcaacagcagagtcctctccaagaacaggcccagaccctgcagcagcagataagctcgaatattttcccctcaccaaatagcgtcagtcagctgcaaaacactatccaacaactgcaggctggctcttttaccggatcaaccgcctctggaagcagcggttcggttgacctggtgcagcaggtgctggaagctcaacagcaactctcttccgtgctgtttagcgcacctgacggtaacgagaatgtgcaagagcagctgtcagccgatattttccagcaggtgagtcagattcaatcaggggtgtcacccggaatgttttcatccacggagcccaccgtccacactcgtcccgataaccttctgcctggtcgcgcagagtccgtgcatccacagtccgagaatacactatctaaccagcagcagcagcagcaacaacaacagcaagtgatggaatcttcggccgcgatggtgatggagatgcagcagtcaatttgccaggccgcagcccaaattcagagcgagttgttccctagcaccgcttctgcaaacggcaatctccagcagtccccggtctaccagcaaacgtctcacatgatgagcgctctttcgaccaacgaggatatgcagatgcaatgtgagctctttagcagcccaccagcggtgtctggtaacgagacctccactacaacaacccagcaagtagctactcctggcacgacaatgtttcagacttcctctagcggagacggcgaggagacaggcacccaagccaagcagattcagaattccgtgttccagacaatggttcagatgcagcacagtggtgataatcagccacaggtgaatctgttttccagcacaaaatcaatgatgtcagtgcagaattcggggacccagcagcagggcaatggtctgtttcagcaaggcaacgagatgatgagcttacagtccggaaatttcctacaacagtctagtcatagccaggctcagctctttcacccccaaaatcctattgccgacgcccagaatcttagccaggagactcagggaagtctttttcacagccctaatcctatcgtgcactcccagacttcaaccaccagttcagagcagatgcaacccccgatgtttcactctcagtcgaccatcgcggttttgcaaggctcttcagtgccccaggatcagcaatccacaaacattttcctttcccagagtcctatgaataatctccagaccaatacggttgcccaggaggcctttttcgctgcaccaaacagtattagtcccctccaaagcacttccaactcagagcagcaggctgctttccagcaacaggctcccatttcacacattcaaacaccaatgcttagtcaagagcaggctcagccccctcaacagggtctgtttcagccacaagtggccctaggttcactgccaccgaacccaatgcctcagtctcaacagggaactatgttccagtcacagcatagcatcgtggcgatgcagtctaactccccatcccaagagcagcagcaacaacaacaacagcagcagcagcagcagcagcagcagcagcaaagtattttgttctccaaccagaacaccatggctaccatggccagccctaaacagcctcccccaaatatgatcttcaaccccaatcagaaccccatggcaaaccaagagcagcagaaccaatccatttttcatcaacagagcaacatggctccaatgaaccaggaacaacagcctatgcagtttcagtcccagtccacagtcagcagcctgcaaaaccccggccctacccagtcagagtctagtcagactcccctgttccactcatctccgcagatccaactggtacaaggatctccatccagtcaggaacaacaggtgacactgttcctgtctcccgcctcaatgtctgccttgcagacttccatcaaccagcaggacatgcaacagagccccctgtattctcctcagaacaacatgcccggcatccagggagccacatcctcaccccaaccacaggccaccttattccacaacacggcgggcggaacaatgaatcagctgcaaaactcccccgggagtagccagcaaacgtcaggcatgtttttgttcggcatacaaaacaattgtagccagctgcttacttccggtccagcgaccctgcccgaccagcttatggccattagtcaacccggtcaaccccagaacgaaggacaaccccctgttactaccctgttaagccagcagatgcctgaaaattcaccactggcatctagcatcaatacgaatcagaacatagagaaaattgacctgcttgtgagcctgcagaatcaaggcaataatcttacagggtcattctag

SEQ ID NO: 166496 - DNA, 13229 bp, Artificial Sequence
  derived and/or modified sequence
gcggcggtggcggcgaccgtcagttttcgctgaggagaaacacgaaacggaccctttggctctcccccttccccttccccgtcctgaacccctctcctggtcaccgagaatcagtccccgtggagttccccctccacctcgccatcgtttcctcggtcctcggcccagtggaagtcactaccctcgaggaggaggcagcggcagccgccctcgcgtcgccgcccccggttcggtgcccgcggtcccggagaggaggtgccgccgccaccgccgctccccccctcccgctgccctcgggccgggctgggtcgagctgcgatgccctcggacttcatctcattgctcagcgcggacctagacctggaatcgcccaagtccctctactcgcgagaatctgtctatgatcttctcccaaaggagttacagttacctccatctagagaaacatctgtagcatcaatgagtcagacaagcggtggtgaggcaggctcgcctcctccagctgttgttgctgctgatgcttcttcagctccctcctcttcctccatgggcggtgcttgcagctcctttaccacctcttccagccctaccatttattctacctcagtcaccgacagcaaggctatgcaagtggagagctgctcctcagccgtgggggtaagtaacagaggggtaagtgaaaagcagttaaccagtaacacagttcagcagcatccatcaacaccgaagaggcacacagtcttgtacatctcaccaccacctgaggacttgctggataacagtcggatgtcctgccaggatgaggggtgtggattggaatctgagcagagctgcagtatgtggatggaggattccccctccaacttcagtaacatgagcaccagttcctacaatgataacactgaggtacctcgtaaatcacgaaaacgaaatccaaagcagaggccgggggtcaaacgacgagattgtgaagaatctaatatggatatatttgatgccgacagtgccaaagcacctcactatgtgctttctcagcttaccacggacaacaaaggcaactcaaaagcgggaaatggaacattggaaaaccaaaaaggaactggagtaaagaagagccctatgttgtgtggacaatatcctgttaaaagtgagggaaaggagctgaagatagttgtacaacctgagacacagcaccgagctcggtacctgactgagggcagccgtggctcagtgaaagatagaacacagcaaggctttcctacagtaaagctggaaggccataatgaacctgtagtgttgcaagtgtttgtgggcaacgactctggacgagtgaaaccacatggattttatcaggcctgcagagtaactggacgaaatacaactccttgcaaagaagtggacattgaaggcactactgttatagaagtcggccttgatcctagcaacaacatgacactggcggtggactgcgtagggatattgaaattgaggaatgctgatgtcgaagccagaataggaattgctggttccaagaagaaaagcactcgtgccagattggtttttcgagttaatatcatgaggaaagatggctccactttgacactgcaaacaccctcttctccaattttgtgtactcagccagcaggagtgccagaaatcttaaagaaaagcttgcatagctgttcagtgaaaggagaagaagaagtgtttttaatcggcaagaactttctgaaaggaactaaagttattttccaagaaaatgtttctgatgaaaactcttggaagtcagaagctgaaattgatatggaactatttcatcagaatcatcttattgtgaaggttcctccctatcatgaccaacatataactttgcctgtgtcagtgggaatatatgtagtgacaaatgctggaagatctcatgatgttcaaccattcacttacactccagacccagcagcagctggtgctttgaatgtaaatgtgaagaaggaaatatctagtccagcaagaccttgctcttttgaagaggccatgaaagcaatgaaaactactggatgtaatttagataaggtaaatattatccctaatgccctgatgactccactcataccaagcagtatgattaagagtgaagatgttactccaatggaagtaacagcagaaaaaagatcttccactatttttaagactacaaagtctgttggatcaactcagcaaacattagaaaacatctcaaacatagcaggaaatggctctttttcatcaccatcatcttcccacctaccttctgaaaatgaaaaacagcagcagattcagcccaaggcatacaacccagagaccctgacaactattcaaacccaggacatctcacagcctggtacttttccagcagtttctgcttctagtcagctgcccaacagcgatgcactattgcagcaggctacacagtttcagacaagagaaactcagtctagagagatattacagtcagatggtacagtggttaatttgtcacaactgactgaggcatcacaacaacagcagcagtcaccactacaagaacaagcacagactttacagcagcagatttcatcaaatatttttccatcaccaaatagtgtgagtcagcttcagaatactattcagcagctgcaagcagggagtttcacaggcagtactgctagtggcagcagtggaagtgttgacttggtccaacaagttttagaggcacagcagcagttatcttcagttttattttctgctccagatggtaatgagaatgttcaagagcagcttagtgcagatatttttcaacaagtcagtcaaattcagagtggtgtaagccctggaatgttttcctcaacagagccaacagtccataccagaccagataatttattacctggaagagctgaaagtgttcatccacagtctgaaaacacgttatctaatcaacagcagcagcagcagcagcaacagcaagtgatggaatcttcagccgcaatggtgatggagatgcaacagagtatctgccaggcagctgcccagattcagtcagagttattcccttcaactgcttcagcaaatggaaaccttcagcaatcgccagtttaccagcagacttctcacatgatgagtgcattgtctaccaatgaggatatgcaaatgcagtgtgaattgttttcttctcctcctgcagtttctggaaatgaaacttctacaactaccacacagcaggttgcaacccctggcactaccatgtttcagacatcaagttcaggagatggagaagaaactggaacacaagcaaaacagattcagaacagtgtctttcagaccatggtccaaatgcaacatagtggggacaatcaacctcaagttaaccttttttcatccacaaaaagtatgatgagtgttcagaatagtggtacccaacaacaaggtaatggtttattccagcaagggaatgagatgatgtcacttcaatctggaaattttttgcagcagtcttctcattcacaggcccaactttttcatcctcaaaatcctattgccgatgctcagaacctttcccaggaaactcaaggttctctctttcatagtccaaatcctattgtccacagtcagacttctacaacctcctctgaacaaatgcagcctccaatgtttcactctcaaagtaccattgctgtgttacagggctcttcagttcctcaagaccagcagtcaaccaacatatttctttcccagagtcccatgaataatcttcagactaacacagtagcccaagaagcattttttgcagcaccgaactcaatttctccacttcagtcaacatcaaacagtgaacaacaagctgctttccaacagcaagctccaatatcacacatccagactcctatgctttcccaagaacaggcacaacccccgcagcagggtttatttcagcctcaggtggccctgggctcccttccacctaatccaatgcctcaaagccaacaaggaaccatgttccagtcacagcactcaatagttgccatgcagagtaactctccatcccaggaacagcagcagcagcagcaacagcagcagcaacagcagcagcaacaacaacagagcattttattcagtaatcagaataccatggctacaatggcgtctccaaagcaaccaccaccaaacatgatattcaacccaaatcaaaatccaatggctaatcaggagcaacagaaccagtcaatttttcaccaacaaagtaacatggccccaatgaatcaagagcaacagcccatgcaatttcagagtcagtccacagtttcctcacttcagaacccaggtcctacccagtcggaatcatcacagacccccttgttccatagctctcctcagattcagttggtacaagggtcacctagttctcaagagcagcaagtaactctcttcttatctccagcatccatgtctgccttgcagaccagtataaatcaacaagatatgcaacagtctcctctttattcccctcagaacaacatgcctggaattcaaggagccacatcttcgcctcaaccacaggctactttatttcacaacacagcaggaggcacaatgaaccaactgcagaattctcctggctcatctcagcagacatcaggaatgttcttatttggcattcaaaataactgtagtcagcttttaacctctggaccagctacattgcctgatcagttgatggccataagtcagccaggccaaccacaaaacgagggccagccacctgtgacaacacttctttctcagcaaatgccagagaattctccactggcatcctctataaacaccaaccagaacatcgaaaagattgatttgcttgtttcattgcaaaaccaagggaacaacttgactggctccttttaactggatataaattccacgaagaaaatcctgattccaagatgtcctgagatcttgtggttccatgagaattattactttaaaaacaaaacaaaatataaaaaactgtgtttgagtaaactgatagattttactctgactgcaaaagagcacacctatgctgcttgttgcagtaactaaccaccaatgttaacatcttcatattttatattcctaataacagtgatgactgagaatctatttgagtttccagctggcagaattaattgttattattttcctaggcgcaatttccttaaacgtacagtttaaattcaaggctggaccactcagttattattgctattagaaaataatatatcatgtttacttttgttcttcattattttctttcctgcattgttttagtcaagtaatggcttttgaaaaagtaaagttcaataataactaaggctgtgatttttttcaatataaaaggcacagctgttggccaaagtgaaggaatcttttttcagttttattggagaaactgaagggtaacattctaacaagtaaactgtatgtgcagataaaagtactcttgatttaacacaaaggcagatgatacacttataaaactgggaacagctggaatgcttcttgattttattttttcagagagttgttagttctctgggtttctactaaggggtttagccataactgtgcatagaaaaataattatctgtaaaaaatgaaggggataatatatgataaattatgttctgatatcctcctacagtagtttaaattgacagaaaaatttgaatgttttcttcttaacccagtcttaggctggtattccctttttatatatatctatattacttttcacctctttttcactttactttagagaactattaatatactactggcttcatgaccctgtagcatctttggccactttaatctagggtgacctagcaatcctgcagcacagggcagagagtactgtcttaggaattattaggagttgattcctgagaaacaacacatttttccccatgaacggtgctgttctgaagtcttcaaatttttccctctaataggaaacagtataaattttaattaaaaaaaaaaggcaaactaaaatttcttgaaatatcacttctccctgatctgcagtgagtataaattcacttgtcacctcagtgctttacagtttgaagtggtcacttacctgatggttcccacaagccttaggctttacagggttgtatcattgacttaaaatgaagaattaacttgtgttacatctataaagagcaaaataacacactccagaacttggcagttgtagcattagttatacagttttgggtgttcttgccacccgtgggatgcctgcttctcactaccacctgtgtctggacacatgcttatgtctcattttccttttggcatgtggaaagctgtcaatgcagtgtaaggccaacgtgtgtgtggcttctatgtgttgagataatgttttggtatccttgtccgtttcatttattttttaagtgtacaaaaaataacctgttaattgttgaaggctacttttctgttctttttttttttttttttctatcctgtacatttagttgaactgtgcggaattgtggtgttggttttgtttacacagccagatttttccttctttttgttttgtgatgatcttcctttgttctttgaatgtgctcttttgtctttttctcttttttctcatgttttcttccctccacctccacccctttctttctttctctctctgattgagaggcattgaattacgttttcagtagtacaggcttcttgccgatatgaagggaacttttcagaaagagacctactctgggtcatttaattttgaatacagttttcaatcgttcaagttttggatggtttatatctaatgtgtgtttcatttttttggaaagctatattttgtatttaggaaatggtatactattttgctatttgtactgagtgagtacattggcataaatatagaaatttatatatatacatatatataaactattcttttttgccacacatttttgtggtaaatttgtgagtttgtctgatgttctaccacaacgtggcgtctgataacagtgagggggggtggggtttgttatgtctttattgagtatttaagtatcttttgaaacaaatgacctgttcatctgtggccattccatcaggcagttagttccttgatgtcagtagtgggctaaaggcagcttactgtgtgtttgctggagctttcactcagccaagtgttagagtcaggaaacccattgaggcaatggcgtcaaatggtgtttcacaagaatgagccattcagtctttgctcactatatatttaatattttattattgttgttattgttattattaattggctttctgtattctatgccttttatttataaagacactaagaaaacccatgtttgtaattttaataacatttttcccatcttgtaatatccagagctactttataaattctctgaaccaaaagtattttcctcagtgtatctcttctcccccagcccctattgggaaaaattacccagtatagttcaggttatgaggaggatcagccacacaatccagtgcttcagtttgaaaatgtaaaattctaaccctaaagtagggttggttgaaatttcagacaaagcaaacccagcaggtataaaaagtagtataaatacaaatctgtaagttatttttgaattttctgaacttttttctaagagattacataggagactaaagaaatctatctgttcaagttctaattaggatgattgttaatactgcactgtggatgaagtggcgactggcttgtgtgctgacttctgtggtttagcaagaggtttattgttatcaaatgctaattggcaatgccaagtcactgggaccaattttctgttttataatatctaagtttagaacagaatatatacctgaactgtagtggtttgatcggatggagacagaaaacccgatttttattctcataaattttgtggttatttatacaagggctgtgctatgctaccatattcttgttcaataataataggtttgttgttttttttacattgttaaatgttccttacccctaaaggtcaatgttaagtacaacattctgaaaatacaatttggctacgaagagtattcatcttctttgaagctcagtggttgatatttgtgctaataatgcaatttcctgattactgttacaagttatagctacatatgggagagactcagtgagccagcaaaggccatagaaacaacaatttattaaatgtatttatggcagaaggacctaaataaactgtgagccaccttttcttctttatattgttacatttaagtgttcttgctttcagcaactcacattaatgcttggagcttatctctttctctctctctctctctctctctgtgtgtgtgtgtgtatgtgtgtgtgtgtgtgtgtgtgtttccttattgtcattccattatatatccacaccaacatgggtgacgataattcaaagtcatattttgcctctaagcttgatcatgttacctttatgattaaagtatcatgttatttagccaatgcaaatctgttttaaaacaaatagtttaaaaaaagaacaagtttttaagggctttattatagaagaagtattaatgaaggactttccttcctccctccctttcctcccctccctgcctcccttcttcccttccatctccccctcctccctgccttctttgtttctccttcccttattcctccctccctcctttctcccttccttcctttcttccattcatccttccttgccttttatttttattttttgtaatatcacatgtgctgtagtttggaattttattctagtgcatttcttgctcatcagaacctcagctaatctacctaggaaaaatagtatcaaaggaaatgagaaagttgtatctgagtccctccagaactaagataattctttttgaccatttaagcctttataaatgcgttttgaccatttaagcctttataaatgcttgttttaggaaagtgaatctgttagatgcatcaacaaataatgaccaggacaaaacgatttaataattaaagtctcaaatcaccatggttatacattttcaccagaaatagtaatcttacaatttttcatttttctgatgaagatttctgttccaatatctgtttcctaatagattttttaaattaattagctttcctctgctttatgaccacaggttttatccctaaccgagacagctgtcttatatctgcatgccttagactgtgtggagggactccatgaagaaagaccataggttagaaaaataactcatagtatataccctagtaagtgggttagtagaatctcataacatgtattaaaaagaggttttcttctctgcttgtttgtgtcactagagcaaaattgtagagataatgctcataatgcagtaaatatcagaataatatctacaatatcatttgtggatggtcccaggtcccagtgctctagttactttacttctttttttttttttgagatggagtcttgctctgtctctcaggctagagcagtgtgcgatctcagctcactgcagcctccacctcccaggttcaagcgattctcctgcctcagcctcccaagtagccaggattacaggcaccctccactaggcccggctaattttttttgtatttttttagtagagatggggttttgccatgttggccaggctggtttcgaactcctaacctccagtgatccacctgcctcggcgtcccaaagtgctaggattacaggcatgagccaccacatccggcctaattacttctttaatccccatttatttttatgccattctagcctcatttattaataaaattatgtttttactttctctttcaggaaattttttaaattaatattttatatctagatctaatgctatggaaaagtgcctttttatcatttataatttcatttttcactatttccaaaaacacataaacaaatagtttcagtaggtcccagcttttactttttccatttaaaccttcttttctccatttcttccctttggcttaagaataaaagaaaaggtacattgctagaattgtttctttgggagagggtaaaagattacagaattagactgttcagcctttatataaactaaatttgtcttcatctcaaccagctaatggtaggtcttatctgaatactcatgagaattttagcatctgtgaaactccatgcaccagatgtgtgtaaatttcaggaagaaagtgttgaaagcattttctctgatgttaattagatggaaataaatcactaaaacatagtttaggtaaagcctgattatgccacttttttttaactagacagggcaaagttgtttatgttagtgtacttcttgtctatcctcagttaatttacctagacaaaaagtgtcaaaggaaatgagaaaaaggttatatctgactccctccagacctaagataattccttttgatcagatacagtcagatggagtgccttggtttttgttaattttgcctctattccagctccttaccacagcggtggtgcttaaagaaaggatcatcagcaacaggtcaggatagttctacctttgggatagggctgctttccccgtgctagtatttctgtgactgttagtggcactgaggactgcaaacttttatgcaatattcttaataccctattgatattatgcactttaatcattccaaagaagccaagaatgctgtatagtgatgattccttcctaatgaattcatcttaactatttagaatgttatgtcccttttcttttggatagccaacttggtataaatgttatatggatttttctaaaatgactatataggacttaagactttgaaatgtaatttacttataaggggaaataattatgctttagcacatcattttagaaacgtcacattttagaaacattcagcttgctaacctacatgtttgggaattcattaaaaccagttgtctatatattttgtgccatgtatataagaacattacaatatatctttttctacatatgtagtatgtgcaaccagtggttctcagagtatggttctcagcccaccagctagtatcagtatcacctgggaactagttagaaatgtaaattctttggccccatcccagacatactgagtcagaaactctggaatagggcccccgcaatctgttttcacaagccctccaggtgattctgatgcacactttaaagtttaggaaccactgggctaagactctgttgagatatagagtttttcttccactcagactgatatagttatacattgttcttcatgtaaattcagcttaacctggttatctataatcttttattggcaaaagttaattctcagtactgcctatagagatacagtgtattttatgtacatacacaattagtctaattcttgataattcagttaatttagtttggcattttcctaccacttactaaaaggtttacattaaatgactgatttaaatatataggtgcaatgttctatgtttattttaattgttatgacatttaagtagctaatataattgaccggtgctaaagtctcctgtttatccataaaatgggtacattatgggcagtgtaatacaagctttcttttcattgcctagtactttaccagcagaccacagttttgccctggctagaccaaccctcagaacaaaatcatcattccttgtatttatatttgtatctgagatagtaaacaagatggctggccaggtcaacatggcaccttaacttatttttttaataggtaaaacttcttcaaaagtagcttgctttgtataagaactaagctatcagtatagatatagctatccttggagcttatgtttcagacaagaattatttactaaaataaataataaacaagataatgcattatacaatttgggcatttctcgtttctcaagtgtatgcatcatggtaaatataaactaaccacaagataggtagattgattcatttcattttaatctccttgtgtaattcagtacctccataattgttctaatcttcttcccactgtttacaaattaccagttaattaactcgtgaaagaaaaattcacatatcagaataaaaataaatgtatactcactttataaaaatcaccactgctgtctttccttaatactagcagtggaaatgtaagtggcttactctacaaattttggtgctggcaaatacataggcaaactgttgggagctgctctagttacattcctcccttcttattccctttttctcttcctcactttattgcataacatattcctgtacccaaagcattctaccacagttctatttgactcccacttgtaataactcctttaaaaaattccatgtttaaccatatgaccctgcttgcttactcatattctccctccctctccccttcctttctctctcttccagaagtcatttgcctggtttgaaatattttgtagggattgcttattatattattttagctgatgaacctcaggacaacgtctacacacacacacatacatacacgcacacaaaatctcagctgttgaagagtgggcttggaatcagacttctgtgtccagtaaaaaactcctgcactgaagtcattgtgacttgagtagttacagactgattccagtgaacttgatctaatttcttttgatctaatgaatgtgtctgcttaccttgtttccttttaattgataagctccaagtagttgctaattttttgacaactttaaatgagtttcattcacttcttttacttaatgttttaagtatagtaccaataatttcattaacctgttctcaagtggtttagctaccattctgccatttttaatttttatttaattttatttgcttgagcacactgatcaaccactgaactgccttcttccattgtcctgcaatgatataagggttacatttttgtgtatatggctttcatagttgggatttcagagcactgataccagatattttcagtttgttctctgggggaatttcatttgcatctatgtttttagctatctgtgataacttgttaaatattaaaaagatattttgcttctattggaacatttgtatactcgcaactatatttctgtaaacagctgcagtcaaaaataaaacactgaaagttttcattttgcagtgga

SEQ ID NO: 166497 - DNA, 4595 bp, Artificial Sequence
  derived and/or modified sequence
atgccatctgactttatctctctgctctccgccgacttggatctcgagagcccgaagtcgttatattccagggagtctgtgtatgacctcctaccaaaggagcttcagcttcctccttcacgcgagacgagcgttgcttcaatgtcacagacttccgggggagaagcgggaagcccacccccagctgtggtggctgctgatgcttcatccgccccaagctcttcctctatgggaggcgcttgctcgagtttcacaacttccagttcccctaccatatacagcaccagcgtcactgatagtaaggctatgcaggtggagagctgcagcagtgctgtcggtgtcagtaataggggggtgtcagaaaaacagcttacctctaataccgtgcaacagcaccctagcacacccaaacggcacaccgtcttgtacatcagcccaccccctgaggatctgctggacaatagcagaatgtcctgccaagatgaggggtgtggcctcgaaagcgagcagtcatgcagcatgtggatggaagacagcccgtctaactttagcaatatgtccacttcatcatacaacgataacactgaagtgcccagaaagtcgcgcaagagaaaccctaaacagagacccggagtgaaacgcagagattgcgaagagtcaaatatggacatcttcgacgccgattccgcgaaggctccacactacgtcttgtctcagcttacgactgataataagggcaacagcaaagcaggtaatgggacacttgagaaccagaagggtacaggcgtgaagaaaagccccatgctctgcggacagtatccagtcaagagtgagggcaaggaactcaagattgttgtgcagccagagacccagcacagggcgcgatacctgacagaaggcagtaggggcagcgtgaaagaccgaacacagcaggggttcccgaccgtcaagctggaagggcataatgaacccgtagtcttgcaggtgttcgtgggaaatgactcgggcagagtgaagccccacggattctatcaagcatgcagggtgaccgggaggaacacaaccccctgtaaagaggtggacatagagggcacaacagtgatcgaagtgggactcgacccaagtaacaacatgacactggcggttgactgcgtgggaatactcaaactgcggaacgctgacgtcgaagcacgaatcggaatagctggcagtaagaaaaaaagcaccagagccaggctggtctttcgggtcaacatcatgaggaaggatgggtccacccttacgcttcagacccctagctcccctatcctgtgcacgcagccggcaggagtgcctgaaattctaaagaaaagcctccatagctgcagcgtgaagggcgaggaagaggtcttcttaataggcaagaacttcttgaagggcaccaaggtcattttccaggaaaacgtatctgacgagaactcctggaaaagtgaagctgaaattgacatggaattgttccatcagaaccacctgatcgtgaaggttcctccttatcatgatcagcatatcacactgcccgtgagcgttggcatttatgtcgtcactaatgccggacgctctcacgatgtgcagccctttacctacacaccagatcctgccgctgctggtgcgttgaacgttaacgtgaaaaaggagattagctcccctgccaggccatgcagtttcgaggaggcaatgaaagccatgaaaactactggatgtaatttggacaaggttaatataatccccaatgccctgatgacaccccttatcccctcctcaatgataaaaagtgaggatgttactccaatggaggtcaccgcagaaaaacgaagttcaaccatttttaaaactaccaaatccgttggttctacccagcagactctggagaatatcagcaatatcgcaggaaacggctcattctcgtctccatcttcttctcatctgccatcagaaaatgagaagcagcagcagattcagcccaaagcatataaccctgaaaccctgaccacgattcagacccaggacatctcacagccaggaacatttcccgctgtgagtgccagctcgcagctccctaacagtgatgctcttttacaacaggccacacaattccagactagagagacccagagtcgcgagatactccaatccgatggcacggtggtgaacttgagtcagctcacagaagcgtcacaacaacagcagcagagtcccctccaggagcaagcccagaccctgcagcagcagatttcctcaaatatctttccatcccccaacagtgtcagtcagttacagaatactatccagcaattacaggctggttctttcaccgggtcaactgctagcggtagtagcggaagcgtcgatctcgtgcagcaagttttagaagcccagcagcagttgtcatcagtcctgttctccgcacccgatggaaacgagaacgtccaagaacagctgtctgccgacatatttcaacaggtgtcacagatccagtccggcgtttcccccggtatgtttagtagcactgagcctacggtccacaccaggccggataatctgttaccgggtagagccgagtcggtccaccctcaaagtgaaaacactcttagtaaccaacagcaacagcagcaacaacagcagcaggttatggagtcaagcgccgctatggtaatggaaatgcagcagagtatttgccaggccgctgcccagattcagtcagaactctttcctagcactgctagtgccaatggcaacttgcaacagagtccagtgtaccaacagacctctcacatgatgtccgcactctcgactaacgaggatatgcagatgcagtgtgagctgttctccagtccaccggcagtgtctggcaatgaaacctccactactaccacccaacaggtggccacccccggaacaacgatgttccaaacaagctcttctggggacggtgaagagacggggactcaagctaaacagattcagaatagcgtttttcagaccatggttcagatgcaacattcaggagacaatcagcctcaagtgaacctcttttctagcacgaagtcaatgatgtcggtgcagaatagtgggacccagcaacagggcaacggactgtttcagcaggggaacgagatgatgtcactgcagagtgggaacttcctccagcaatctagccactctcaggcacagctctttcaccctcaaaatcccatagccgacgcacagaatctttcacaggagactcagggctcattattccactcccccaaccctattgtgcactcgcagacgagcaccaccagtagtgagcaaatgcagcctcctatgtttcacagccagtccactatcgcggttctacaagggagctctgttcctcaggatcaacagtccacaaatatctttttgtcccagagtcctatgaacaatttacagacaaatactgtcgcacaggaggctttctttgcagcccctaatagcattagtcctctgcagtctacttcaaattctgagcaacaggctgcatttcagcagcaggctcccatctctcacattcagacaccgatgctctcacaagagcaggcccagccccctcaacagggcctcttccaaccacaggtcgcgctcggatctctcccccctaaccccatgccacagtcacagcaggggaccatgttccaaagccaacatagtatcgtggcgatgcagagcaacagcccttctcaggagcagcaacagcagcagcagcagcagcaacagcagcagcagcagcagcagcagtcaatcttattttcaaaccagaacaccatggccacaatggcttcccctaagcagccacctccaaatatgatctttaatccaaatcaaaacccaatggcgaatcaggaacagcaaaatcagtcaatttttcatcagcagagcaacatggccccaatgaaccaggagcaacagcctatgcagttccagtcccagtcaacggtgagtagtctccagaatcctgggccaactcagtctgagtcttctcagacacccctatttcactcatccccgcagatccagttagtacagggctcccctagttcccaagaacagcaagtgaccttattcctgtcccccgcttccatgtcagccctgcagacctcaatcaatcaacaggacatgcagcagtctcctttgtattcccctcagaacaacatgcctgggatccagggcgctacttcctcccctcagcctcaggccacactgtttcataacaccgccggtggaaccatgaaccaactgcagaactcgcccggtagctcacagcagacttcagggatgttcctatttgggattcaaaacaactgtagccaacttttgacttctggaccagccacactaccggaccagctgatggccataagccaacccggacagccccagaacgaggggcaaccccctgtgaccacgttgctgtcccagcagatgccagaaaactcccctctggcatcatctatcaacactaatcagaacattgagaagatcgatctgctggtgtctctacaaaaccagggcaacaacctaaccggcagttttta

SEQ ID NO: 166498 - protein, 160 aa, Artificial Sequence
  derived and/or modified sequence
MQPASAKWYDRRDYVFIEFCVEDSKDVNVNFEKSKLTFSCLGGSDNFKHLNEIDLFHCIDPNDSKHKRTDRSILCCLRKGESGQSWPRLTKERAKLNWLSVDFNNWKDWEDDSDEDMSNFDRFSEMMNNMGGDEDVDLPEVDGADDDSQDSDDEKMPDLE

SEQ ID NO: 166499 - DNA, 483 bp, Artificial Sequence
  derived and/or modified sequence
atgcagcccgccagcgccaagtggtacgacagaagagactacgtgttcatcgagttctgcgtggaggacagcaaggacgtgaacgtgaacttcgagaagagcaagctgaccttcagctgcctgggcggcagcgacaacttcaagcacctgaacgagatcgacctgttccactgcatcgaccccaacgacagcaagcacaagagaaccgacagaagcatcctgtgctgcctgagaaagggcgagagcggccagagctggcccagactgaccaaggagagagccaagctgaactggctgagcgtggacttcaacaactggaaggactgggaggacgacagcgacgaggacatgagcaacttcgacagattcagcgagatgatgaacaacatgggcggcgacgaggacgtggacctgcccgaggtggacggcgccgacgacgacagccaggacagcgacgacgagaagatgcccgacctggagtag

SEQ ID NO: 166500 - DNA, 483 bp, Artificial Sequence
  derived and/or modified sequence
atgcagcctgctagtgctaagtggtacgatcggcgcgattacgtctttattgaattctgcgtggaagactcaaaggatgtgaatgtgaattttgagaagagcaaactgaccttctcttgcttgggcgggtccgataactttaaacatctgaacgaaattgatctgttccactgcatcgatcccaatgactcaaagcacaaaagaacggacagatctatcctgtgttgtctgagaaaaggagaaagtgggcagtcatggcccagactgacaaaagaaagggctaaactgaattggttatctgtggacttcaataattggaaagactgggaagacgattctgacgaggacatgtccaatttcgacagattttcggaaatgatgaacaacatgggaggcgacgaagatgtggacttgccggaggttgatggagcagacgatgacagccaggattcagatgacgagaagatgcctgatttggagtag

SEQ ID NO: 166501 - DNA, 483 bp, Artificial Sequence
  derived and/or modified sequence
atgcagcctgccagcgccaagtggtatgacagaagagattatgtgttcatcgagttctgtgtggaggacagcaaggatgtgaatgtgaactttgagaagagcaagctgaccttcagctgcctgggcggcagtgacaacttcaagcacctgaatgaaattgacctcttccactgcatcgaccccaatgacagcaagcacaagaggacagacaggagcatcctgtgctgcctgaggaaaggagagagcggccagagctggccccggctgaccaaggagcgggccaagctgaactggctgtctgtggacttcaacaactggaaggactgggaggatgacagtgatgaggacatgagcaactttgaccgcttcagcgagatgatgaacaacatgggaggagatgaagatgtggacctgcctgaggtggatggagcagatgatgacagccaggacagtgatgatgagaagatgccagacctggagtag

SEQ ID NO: 166502 - DNA, 483 bp, Artificial Sequence
  derived and/or modified sequence
atgcagcccgccagcgccaagtggtacgaccggcgggactacgtgtttatcgaattttgcgtggaggattcaaaagacgtgaacgtgaacttcgagaagagcaagttgaccttctcatgcctgggcggtagcgataattttaagcatctgaatgagatcgacttgttccactgtattgatcctaatgattctaagcataagcgcacggacagaagcatcctgtgctgcctgcgtaagggagaaagtggccagtcctggcctagactgaccaaggagcgggccaagctcaactggctttccgttgatttcaataactggaaagactgggaggacgactcagacgaagatatgtccaattttgacagattcagtgagatgatgaacaacatgggcggtgacgaggacgtcgatttacctgaagtggatggcgccgacgatgattcccaggattcagacgatgagaaaatgcccgatctcgaatag

SEQ ID NO: 166503 - DNA, 483 bp, Artificial Sequence
  derived and/or modified sequence
atgcagcccgcttcagccaagtggtatgatcgcagggattacgtcttcatagagttctgcgtggaggacagcaaggacgtcaatgttaatttcgaaaaaagcaaactgacttttagttgcttgggaggcagcgacaactttaagcacctgaacgagatcgatttgttccactgcattgatcctaacgactccaaacacaagcgcactgacaggtcaatcctgtgttgccttaggaaaggggaatctgggcagtcttggcccaggcttacaaaggaaagagccaaactgaattggcttagtgtggattttaataattggaaggattgggaggatgacagcgatgaggatatgagtaactttgatcgtttctctgagatgatgaataacatggggggagacgaggacgtcgatttacctgaagttgatggagcagacgatgactctcaggactctgatgacgagaagatgcccgacctggaatag

SEQ ID NO: 166504 - DNA, 1920 bp, Artificial Sequence
  derived and/or modified sequence
ccagccgccgcccggcctcaccacccctcgtttgcacgcacgcacgttcattctccgtcctcgcgccccttttcctacactttcctcttctccccgaccggaggagccgctctttccgcgcggtgcattctggggcccgaggtcgagcccgccgctgccgccgtcgcctgagggaagcgagaagaggccgcgaccggagagaaaaagcggagtcgccaccggagagaagtcgactccctagcagcagccgccgccagagaggcccgcccaccagttcgcccgtccccctgccccgttcacaatgcagcctgcttctgcaaagtggtacgatcgaagggactatgtcttcattgaattttgtgttgaagacagtaaggatgttaatgtaaattttgaaaaatccaaacttacattcagttgtctcggaggaagtgataattttaagcatttaaatgaaattgatctttttcactgtattgatccaaatgattccaagcataaaagaacggacagatcaattttatgttgtttacgaaaaggagaatctggccagtcatggccaaggttaacaaaagaaagggcaaagcttaattggcttagtgtcgacttcaataattggaaagactgggaagatgattcagatgaagacatgtctaattttgatcgtttctctgagatgatgaacaacatgggtggtgatgaggatgtagatttaccagaagtagatggagcagatgatgattcacaagacagtgatgatgaaaaaatgccagatctggagtaaggaatattgtcatcacctggattttgagaaagaaaaataacttctctgcaagatttcataattgagagaattcctgagttgatagctctaaaggcagatatgctgtatttgcctactttaacccatttttcaacctgtttgttttttaaaaggcttcactaagggttgatatgtaccattgtatggggcaattttaagtcagctaaggcaataaccttatgcatgaacatttcccagactttcatgaagctgttgaggtcctaggcaattaatgcagcagttgcgataaataaaaacatctcacctaagtctccttttcttcataacatagatactgacatgataggaagctctcagcttagggaaagagaataaattttagattatagaacatggattcaaaagtgactggaacaaattggctgacaccttactggtaacctgctattcttctggtgttatccttcaggattgttccactaaaatttatttttcaaaaaatttacttcacattattctatgtaagtgatgacttgtcagtgttccaggtgtatcttagctaaaactagagaatgccctaacttagatggtttttgaagcctatacaattggtattgtttgacccttaagcttttacatctcttagcatggaggacgaagaaagctgtacattgttgcttgagagtctgtacatttagtccagatttgtatttgcactgtcagtatggcaaatgagtgaaaaatgtttaatacactattggattttttatttcctttttttgattcagcttatacccgggctgaaaacctcaatttatgttcatgacagtggggatttttttaaatgtctacattctttctaataaactgttggaagacttcttggctgtccttttaagtgtctggcttactgtaatttttatgtatttaccatttactggaatggagtttatttgaggaagaatttgggattattcctctgtttgaaaaaagaggcttgctgtaatgtcacaggaaaccttttaaaagtggatctgtaatagcatattgtagatgcactttgcagcagttggaaaagaaagtgttgtgtgatttgattgaaataaaactaaatgtgttgtcctcctaaatctttg

SEQ ID NO: 166505 - protein, 500 aa, Artificial Sequence
  derived and/or modified sequence
MSGPGPREPPPEAGAAGGEAAVEGAGGGDAALGEPGLSFTTTDLSLVEMTEVEYTQLQHILCSHMEAAADGELETRLNSALLAAAGPGAGAGGFAAGGQGGAAPVYPVLCPSALAADAPCLGHIDFQELRMMLLSEAGAAEKTSGGGDGARARADGAAKEGAGAAAAAAGPDGAPEARAKPAVRVRLEDRFNSIPAEPPPAPRGPEPPEPGGALNNLVTLIRHPSELMNVPLQQQNKCTALVKNKTAATTTALQFTYPLFTTNACSTSGNSNLSQTQSSSNSCSVLEAAKHQDIGLPRAFSFCYQQEIESTKQTLGSRNKVLPEQVWIKVGEAALCKQALKRNRSRMRQLDTNVERRALGEIQNVGEGATATQGAWQSSESSQANLGEQAQSGPQGGRSQRRERHNRMERDRRRRIRICCDELNLLVPFCNAETDKATTLQWTTAFLKYIQERHGDSLKKEFESVFCGKTGRRLKLTRPDSLVTCPAQGSLQSSPSMEIK

SEQ ID NO: 166506 - DNA, 2474 bp, Artificial Sequence
  derived and/or modified sequence
cgggccgggggtcgcctcccgcctcccgcctcccgcctcccgccgcccgccgcccgcgtcgccctcgccgccgttgggccgcgccgcgccgccatgtcgggccccggaccgcgggagccgccgccggaggcaggcgcggcaggcggcgaggcggccgtcgagggcgcgggcggcggggacgcggcgctgggcgagccggggctgagcttcacgaccaccgacctgagcctggtggagatgacggaggtggagtacacgcagctgcagcacatcctctgctcgcacatggaggcggcggctgacggcgagctcgagacgcgcctcaactcggcgctgctggcggcggcgggcccgggcgcaggcgcgggcggcttcgcggcgggcggtcaggggggcgcggcgcccgtgtaccccgtgctgtgcccgtccgcgctggcggccgacgcgccctgcctgggccacatcgacttccaggagctgcgcatgatgctgctaagcgaggcgggcgcggcggagaagacgtcgggcggcggggacggagcgagggcccgggccgacggcgccgccaaggagggcgcgggcgcggctgcggctgcggctggacccgacggcgcgcccgaggcccgggccaagccggccgtgcgcgtccgcctggaggaccgcttcaacagcatccccgccgagccgccgcccgcgccgcgcggccccgagccccccgagccgggcggggcgctcaacaatttggtaactctcattcgacatccatctgaactaatgaatgttcctcttcagcaacaaaacaaatgtacagcattagtgaaaaataaaactgcggctacaactactgctttgcaatttacatacccactgtttactacaaatgcttgctctactagtggaaattctaatctttcacagacacagagttctagtaactcatgttctgtacttgaagctgccaagcaccaggatattggattgcctagagcattttctttctgttatcagcaagaaattgaatccactaaacagacgttaggtagtagaaacaaagttttgcctgagcaagtttggattaaagtgggagaagcagcgctatgcaaacaagcactgaagaggaatcggagtagaatgcgtcagttggacacaaatgtagagcgaagagcccttggagagattcagaatgtgggcgaaggtgccaccgccacacaaggcgcttggcagtcctcggagtcctcacaggcaaacctgggggagcaggcccagagtgggccccagggaggaaggtctcaacgtagggagaggcataaccgaatggaaagagatagaaggcgcagaatccgcatttgctgtgatgagttgaatctcttagtgccgttctgcaatgccgagactgacaaggccacaactctgcagtggaccacagcattcctgaaatacatccaggaaagacatggagattctcttaaaaaggaatttgagagcgtattttgcggtaaaactggccgaaggctaaagctgaccagaccggactccttggtgacctgtcctgcacaggggagtttacagagcagcccctcgatggagatcaagtgatcggactgaacaggaatcctcggggggtgaacagccattccttcgtgacctgtgcacgccttctgcaaccctggagctctgctcggctagtctgactcgaaaagggcgtgactcaagctgacgggactccagtagggactttgagagcacattttgtaaaaatatttatctagacgcaaatgcttatccatgaatgtcctcttagaccatttggggatgaagccatcttaataattagtaataattaattagtaataattagtaagcattttctcaatgctctgattccatcatgttttcttaacatgataacttaaaaaattgacatcctttgtactttctttaatcttaaaaagtacacggctttttacttatttaccttttaaatatgcccctttagcaattggaacaagttaaattgttaactaaaaacagtttggaaattttatttcattcgttatatcacacccccttgtcatgactctgagtcacgtgctgctgtattgcaacgtgcaggaccattttaaacctgtgtgctaaaaattttccagatacttgctttaaagctacttttgtccacaaatgaaatactgtcacagtagacgcttaaatgccacgttttcataccaagagtcattcattacttcatgtgtcacaaactgtggtgtttggaattgggtttttcaatgagtggctttacttatcaatcacaacaggtaatagcaatagacgttagtgcaatacaaagtcaccctcaataaatactgttaattggagatgtgagtttgtacacaaaacatcagactagacctttgtatgggagagaatttactgtacattaaattctttattttttgttaaaaaaaaaaaaaaaaaaa

SEQ ID NO: 166507 - DNA, 1503 bp, Artificial Sequence
  derived and/or modified sequence
atgtctggccctggccccagagaacccccacctgaagcaggggctgcgggaggcgaggccgctgtcgagggtgcgggaggtggagacgccgccctcggtgagcctggcttgtcttttactacaacggacttatcactggttgagatgacagaggtcgagtacacccaactacagcacattctgtgtagccatatggaggctgctgctgacggggaactggagacacgcctgaatagcgcactgctggctgcagcgggaccaggggcaggggcaggtgggtttgcagctggaggacaggggggggcagcgccagtgtatccagtactatgcccatccgcattggctgccgacgcaccctgtcttggtcatatcgactttcaggaactccgtatgatgctcctgtccgaggctggtgccgctgaaaagacaagcggaggaggtgacggagctcgcgctcgtgctgatggtgctgcgaaggagggtgctggcgctgccgccgccgccgccgggcccgacggtgcacccgaggcaagagctaaacccgccgtacgtgttcgactggaggatagattcaacagcatcccggccgagccccctcccgccccaagagggccagagcctccagagcctggcggggcattgaacaacctggtaacattgatccgtcatccgagtgagctgatgaatgtgccactccaacagcagaataagtgcacagccctggtgaagaacaagactgctgccactacaacagccctgcagtttacgtatcccctattcacgactaatgcctgcagcacttcaggaaacagtaatctctcccaaacacagtcttcatccaattcatgttctgtgctggaggcagctaagcaccaggacatcggcttgccacgagcttttagcttctgttaccaacaggagattgaatctactaagcagacccttggctcccgcaacaaggtgctgcctgaacaggtgtggataaaagtgggcgaagccgcactgtgtaaacaagcccttaaaaggaaccgcagtaggatgcgccagttggataccaacgtcgagcgcagagccttgggagaaatccaaaacgttggggagggcgccacagcaacacaaggcgcttggcagagttcagagtccagtcaagctaacctgggcgagcaggcccagtctggcccccagggaggccgctcccagagacgagagcggcacaatcgaatggaacgcgaccgaagacggagaattagaatttgttgcgacgagctgaatttgctggtcccgttctgtaatgcagaaaccgacaaagcaactactctgcagtggacaaccgccttcctcaagtacatacaagagagacacggagatagcctcaaaaaggagtttgagtctgtattttgcggaaaaacgggcaggagactaaagctgacgcgccccgacagtttagtgacgtgtcctgcccagggaagcctgcagagcagcccctccatggagataaaatag

SEQ ID NO: 166508 - DNA, 1503 bp, Artificial Sequence
  derived and/or modified sequence
atgagcggccctggcccccgggagcccccacctgaggccggggccgccggcggggaggccgctgtggagggcgccggcggcggagatgctgccctgggggagcccggcctgtccttcaccaccacagacctgagcctggtggagatgacagaggtggagtacacccagctgcagcacatcctgtgcagccacatggaggccgctgctgatggagagctggagacccggctgaacagcgccctgctggccgctgctggccctggagctggagctgggggctttgctgctgggggccagggcggggccgcccctgtgtaccctgtgctgtgccccagcgccctggccgcagatgccccctgcctgggccacatcgacttccaggagctgaggatgatgctgctgtctgaggccggggctgctgagaagaccagcggcggcggagatggagcccgggcccgggcagatggagctgccaaggagggcgctggagctgctgctgctgctgctggcccagatggagcccctgaggcccgggccaagccagctgtgcgggtgcggctggaggaccgcttcaacagcatcccagctgagcccccaccagccccccggggccctgagcccccagagcccggcggggccctgaacaacctggtgaccctcatccgccaccccagcgagctgatgaatgtgcccctgcagcagcagaacaagtgcacagccctggtgaagaacaagacagctgccaccaccacagccctgcagttcacctaccccctcttcaccaccaatgcctgcagcaccagcggcaacagcaacctgagccagacccagagcagcagcaacagctgcagcgtgctggaggccgccaagcaccaggacatcggcctgccccgggccttctccttctgctaccagcaggagattgagagcaccaagcagaccctgggcagcaggaacaaggtgctgcctgagcaggtgtggatcaaggtgggggaggccgccctgtgcaagcaggccctgaagaggaacagaagcaggatgaggcagctggacaccaacgtggagcggcgggccctgggggagatccagaatgtgggggagggcgccacagccacccagggcgcctggcagagcagcgagagcagccaggccaacctgggggagcaggcccagagcggcccccagggcggccgcagccagaggcgggagcggcacaacaggatggagcgggacagaagaagacgcatccgcatctgctgtgatgagctgaacctgctggtgcccttctgcaatgctgagacagacaaggccaccaccctgcagtggaccacagccttcctgaagtacatccaggagcggcacggggacagcctgaagaaggagtttgagagcgtcttctgtgggaagacaggccggcggctgaagctgaccaggccagacagcctggtgacctgcccagcccagggcagcctgcagagcagccccagcatggagatcaagtag

SEQ ID NO: 166509 - DNA, 1503 bp, Artificial Sequence
  derived and/or modified sequence
atgagcggccccggcccccgggagcccccccccgaggccggcgccgccggaggagaagcggccgtggagggcgctggcggaggggacgccgcccttggggaaccaggactgtcttttacaacaacagatctgtctttggtggagatgacagaagtggagtatactcagttacagcatatcttatgtagccatatggaggccgccgcggatggggaactggagactcgattaaatagcgctctcctggcggcagcgggtcccggagccggcgccgggggcttcgcagccgggggacaagggggcgcagcgcccgtatacccagtgctgtgtcccagtgcgctggctgccgacgcgccatgcctcggccacatagattttcaggagctcagaatgatgctgctgtctgaagcaggagctgcagagaagacgtcaggggggggcgacggcgctcgagccagagccgatggggctgccaaagaaggcgctggagcggccgcagcagcagccggacccgacggagcacccgaggcccgcgctaaacccgctgtcagagtgcgacttgaggataggttcaatagcatcccagcagagcctcctccagctccaagaggccccgagccgccagaacccggaggcgccctaaataatctcgtgacgctgatcagacaccccagcgagctgatgaacgttcctcttcaacagcagaataaatgtaccgccctggttaagaacaagactgcagccacgacgaccgccctgcaatttacttaccctctatttacaactaatgcttgtagtactagtggaaacagtaatctaagccagacccagtcttcatccaactcatgtagcgtcctggaagcagctaagcaccaggatattggtctacctcgcgctttctccttctgttaccagcaggagatcgagtccacaaagcagaccttgggaagccgcaataaggtcctaccagaacaggtctggatcaaagtgggtgaagcagcactctgcaagcaggcactcaagagaaacagatcgaggatgagacagctggataccaacgtggaacggcgcgccctgggagagattcagaacgtcggagagggtgcaaccgctacacagggagcctggcagtcttccgagtcctcacaggcgaatctgggcgagcaggcacagtcaggtccccagggcggaagatcccagagacgggaacggcacaaccgcatggagcgggacaggcggagacgcatccggatctgctgtgatgagctgaacctccttgtccctttctgcaatgcagagacggataaggccactactctgcagtggacgactgctttcctgaagtatattcaggagcggcacggcgatagcctcaaaaaagagtttgagagtgtgttctgcgggaagacaggaagaaggttaaaactgacacgtccagacagcttggtgacctgtcccgcccagggctccctccaatcatccccgtcaatggagattaagtag

SEQ ID NO: 166510 - DNA, 1503 bp, Artificial Sequence
  derived and/or modified sequence
atgtctggccctggcccacgggaaccgccacccgaagcaggtgcggcagggggagaggcagcagtcgaaggagcaggtggaggtgacgctgctctgggagagcctgggctgtctttcacaaccacagacttgtcccttgtggaaatgaccgaagtggaatatacccaactccagcacatcctgtgctcacacatggaggccgctgccgatggcgaactggagaccagactcaatagcgcactgctggcagctgccggtccgggagccggagccggaggttttgctgcgggaggccaaggcggagccgcacccgtgtaccccgtgctgtgtccaagtgccctcgctgccgatgccccatgcctggggcatatcgatttccaggaacttcgcatgatgttactgagtgaagccggtgccgctgaaaagacttctgggggaggcgacggcgctagagcgagggccgatggcgcagccaaagagggagcaggcgcagccgctgctgcagcgggacccgacggcgctccagaggctcgggctaagcccgctgttcgtgtacggctcgaagacagatttaattccatacccgcagaaccgccacccgcacccaggggaccggaacccccagagcctgggggtgccctgaataacctcgtgaccttgatcaggcacccctccgagctcatgaatgtgccactgcagcagcagaataagtgtaccgcgctggtaaaaaataaaactgccgctaccaccaccgctttgcaatttacctatcccctgttcactactaacgcctgtagtacctcaggcaactcgaatttgagtcagacacagtcaagctctaactcctgttcagtattagaggcggcaaaacaccaagacattggcctgccccgtgcattcagtttctgctatcagcaagaaatcgaaagcaccaaacagacactgggctctcgcaataaggtgctgcctgaacaagtatggatcaaggtaggagaggctgcgctttgtaaacaggcattaaaacgaaatcgcagtcggatgagacagctagataccaatgtagaacgccgagcactgggcgaaatccaaaacgtgggcgagggcgcaacagctacccagggcgcatggcagtcttccgagagctcccaggccaacttgggcgagcaggcacagtccggaccccagggtggccgaagccaacggagggagagacacaatagaatggagagggatagacggcgtcggattagaatttgctgcgacgagctaaacctcttggtgcccttttgcaatgcagaaaccgataaggctaccacactacaatggactaccgccttcctcaaatacatccaagaacggcatggagactccctgaaaaaagagttcgaatccgtcttttgcggtaagaccggaagacggctgaagctgacacgcccagattccttggttacctgccccgcacaggggtcccttcagtcttcccctagcatggagatcaaatag

SEQ ID NO: 166511 - DNA, 2456 bp, Artificial Sequence
  derived and/or modified sequence
cgggccgggggtcgcctcccgcctcccgcctcccgcctcccgccgcccgccgcccgcgtcgccctcgccgccgttgggccgcgccgcgccgccatgtcgggccccggaccgcgggagccgccgccggaggcaggcgcggcaggcggcgaggcggccgtcgagggcgcgggcggcggggacgcggcgctgggcgagccggggctgagcttcacgaccaccgacctgagcctggtggagatgacggaggtggagtacacgcagctgcagcacatcctctgctcgcacatggaggcggcggctgacggcgagctcgagacgcgcctcaactcggcgctgctggcggcggcgggcccgggcgcaggcgcgggcggcttcgcggcgggcggtcaggggggcgcggcgcccgtgtaccccgtgctgtgcccgtccgcgctggcggccgacgcgccctgcctgggccacatcgacttccaggagctgcgcatgatgctgctaagcgaggcgggcgcggcggagaagacgtcgggcggcggggacggagcgagggcccgggccgacggcgccgccaaggagggcgcgggcgcggctgcggctgcggctggacccgacggcgcgcccgaggcccgggccaagccggccgtgcgcgtccgcctggaggaccgcttcaacagcatccccgccgagccgccgcccgcgccgcgcggccccgagccccccgagccgggcggggcgctcaacaatttggtaactctcattcgacatccatctgaactaatgaatgttcctcttcagcaacaaaacaaatgtacagcattagtgaaaaataaaactgcggctacaactactgctttgcaatttacatacccactgtttactacaaatgcttgctctactagtggaaattctaatctttcacagacacagagttctagtaactcatgttctgtacttgaagctgccaagcaccaggatattggattgcctagagcattttctttctgttatcagcaagaaattgaatccactaaacagacgttaggtagtagaaacaaagttttgcctgagcaagtttggattaaagtgggagaagcagcgctatgcaaacaagcactgaagaggaatcggagtagaatgcgtcagttggacacaaatgtagagcgaagagcccttggagagattcagaatgtgggcgaaggtgccaccgccacacaaggcgcttggcagtcctcggagtcctcacaggcaaacctgggggagcaggcccagagtgggccccagggaggaaggtctcaacgtagggagaggcataaccgaatggaaagagatagaaggcgcagaatccgcatttgctgtgatgagttgaatctcttagtgccgttctgcaatgccgagactgacaaggccacaactctgcagtggaccacagcattcctgaaatacatccaggaaagacatggagattctcttaaaaaggaatttgagagcgtattttgcggtaaaactggccgaaggctaaagctgaccagaccggactccttggtgacctgtcctgcacaggggagtttacagagcagcccctcgatggagatcaagtgatcggactgaacaggaatcctcggggggtgaacagccattccttcgtgacctgtgcacgccttctgcaaccctggagctctgctcggctagtctgactcgaaaagggcgtgactcaagctgacgggactccagtagggactttgagagcacattttgtaaaaatatttatctagacgcaaatgcttatccatgaatgtcctcttagaccatttggggatgaagccatcttaataattagtaataattaattagtaataattagtaagcattttctcaatgctctgattccatcatgttttcttaacatgataacttaaaaaattgacatcctttgtactttctttaatcttaaaaagtacacggctttttacttatttaccttttaaatatgcccctttagcaattggaacaagttaaattgttaactaaaaacagtttggaaattttatttcattcgttatatcacacccccttgtcatgactctgagtcacgtgctgctgtattgcaacgtgcaggaccattttaaacctgtgtgctaaaaattttccagatacttgctttaaagctacttttgtccacaaatgaaatactgtcacagtagacgcttaaatgccacgttttcataccaagagtcattcattacttcatgtgtcacaaactgtggtgtttggaattgggtttttcaatgagtggctttacttatcaatcacaacaggtaatagcaatagacgttagtgcaatacaaagtcaccctcaataaatactgttaattggagatgtgagtttgtacacaaaacatcagactagacctttgtatgggagagaatttactgtacattaaattctttattttttgtta

SEQ ID NO: 166512 - DNA, 1503 bp, Artificial Sequence
  derived and/or modified sequence
atgagcggccccggccccagagagcccccccccgaggccggcgccgccggcggcgaggccgccgtggagggcgccggcggcggcgacgccgccctgggcgagcccggcctgagcttcaccaccaccgacctgagcctggtggagatgaccgaggtggagtacacccagctgcagcacatcctgtgcagccacatggaggccgccgccgacggcgagctggagaccagactgaacagcgccctgctggccgccgccggccccggcgccggcgccggcggcttcgccgccggcggccagggcggcgccgcccccgtgtaccccgtgctgtgccccagcgccctggccgccgacgccccctgcctgggccacatcgacttccaggagctgagaatgatgctgctgagcgaggccggcgccgccgagaagaccagcggcggcggcgacggcgccagagccagagccgacggcgccgccaaggagggcgccggcgccgccgccgccgccgccggccccgacggcgcccccgaggccagagccaagcccgccgtgagagtgagactggaggacagattcaacagcatccccgccgagcccccccccgcccccagaggccccgagccccccgagcccggcggcgccctgaacaacctggtgaccctgatcagacaccccagcgagctgatgaacgtgcccctgcagcagcagaacaagtgcaccgccctggtgaagaacaagaccgccgccaccaccaccgccctgcagttcacctaccccctgttcaccaccaacgcctgcagcaccagcggcaacagcaacctgagccagacccagagcagcagcaacagctgcagcgtgctggaggccgccaagcaccaggacatcggcctgcccagagccttcagcttctgctaccagcaggagatcgagagcaccaagcagaccctgggcagcagaaacaaggtgctgcccgagcaggtgtggatcaaggtgggcgaggccgccctgtgcaagcaggccctgaagagaaacagaagcagaatgagacagctggacaccaacgtggagagaagagccctgggcgagatccagaacgtgggcgagggcgccaccgccacccagggcgcctggcagagcagcgagagcagccaggccaacctgggcgagcaggcccagagcggcccccagggcggcagaagccagagaagagagagacacaacagaatggagagagacagaagaagaagaatcagaatctgctgcgacgagctgaacctgctggtgcccttctgcaacgccgagaccgacaaggccaccaccctgcagtggaccaccgccttcctgaagtacatccaggagagacacggcgacagcctgaagaaggagttcgagagcgtgttctgcggcaagaccggcagaagactgaagctgaccagacccgacagcctggtgacctgccccgcccagggcagcctgcagagcagccccagcatggagatcaagtag

SEQ ID NO: 166513 - protein, 186 aa, Artificial Sequence
  derived and/or modified sequence
MASPSKAVIVPGNGGGDVTTHGWYGWVKKELEKIPGFQCLAKNMPDPITARESIWLPFMETELHCDEKTIIIGHSSGAIAAMRYAETHRVYAIVLVSAYTSDLGDENERASGYFTRPWQWEKIKANCPYIVQFGSTDDPFLPWKEQQEVADRLETKLHKFTDCGHFQNTEFHELITVVKSLLKVPA

SEQ ID NO: 166514 - protein, 172 aa, Artificial Sequence
  derived and/or modified sequence
MASPSKAVIVPGNGGGDVTTHGWYGWVKKELEKIPGFQCLAKNMPDPITARESIWLPFMETELHCDEKTIIIGHSSGAIAAMRYAETHRVYAIVLVSAYTSDLGDENERASGYFTRPWQWEKIKANCPYIVQFGSTDDPFLPWKEQQEVADWKPNCTNSLTVATFRTQSFMN

SEQ ID NO: 166515 - DNA, 3871 bp, Artificial Sequence
  derived and/or modified sequence
cgcaggctccctgcgggagcaggctgggctcagctccgctggacccgcgctggggaactctggcctcgctgcactcatggcttctcctagcaaggcagtgattgttcccgggaacggaggcggggatgtgaccacccacggctggtatggctgggtgaaaaaggagctggagaagatacctggtttccagtgtttggctaaaaacatgcccgacccaattacagcacgagagagcatctggctgcccttcatggagacagagctgcactgtgatgagaagactatcatcattggccacagttctggggccatcgcggccatgaggtatgcagaaacacatcgagtatatgctattgtattagtgtctgcgtacacatcagacttgggggatgaaaatgagcgtgcaagtggatacttcacccgcccctggcagtgggagaagatcaaggccaactgcccttacattgtgcagtttggctctactgacgacccgttccttccctggaaggaacaacaagaagtggccgataggttggaaaccaaattgcacaaattcactgactgtggccactttcagaacacagagtttcatgaactgattactgttgtaaagtctttgctgaaagtaccagcatagactgtatgatttctgctattttgcatcccaatataggagtagaataatatctactatcagctgattactagacacatagaacatccagttaagttccgtaagtgcctgaaaaacaaacacaagtttcaacattcaatctaagttacaaatagcacttccattttccatagactctaaaactccccaaattgctatgaactaccacagtattttcctcatttgataagaaacataaggacagcttaactacccttctctatccgaagtgagtcagaaacagaacccaggtttcttgattcccactcctgagtaaaattaaataggttttatgtatgttgcaggtattgcacacttttcctctttgaaatcaaacttttctatttcactggggaaagaaaacatgactgaaagtccagagtgttagcttagagctcaaaatactagctgctgtttcaagctggccccagacattaaactcagactagggccttcacctctgacacttgcccctaagtccttcagacatgttgagagagactgagacaggagtcttccggagtcaggcaggaaggagaagcacagcaatatacattcataatatacgtacaactgactagatttgtttgagacaagagtggtgggatcagagccatgtggagagctcatggcctgtctaaattgttgccatgtggaaatggggcagagtgttgccaattttctgattttttgtgtggaaaaaaatctccaaattgtagtttttaaatttggggaatgcaaatatatatatatatacacacacacacacacacatacacatacaatccatatacatatggagtatgtaagttggcaataacagtatacatcaaaaaatttacaaacactgcaagacaaataaaatccaagccatccatttgtgaccacagtcataagcattcacttagccaggggcttttagataattgtctgtgaagtctgagaaaagactaagataaccaagatgaacataatgtcaaaggacgaaatcatggggacaatttggattttgttccaaaagacaagtgtttttaaaaagaacctttccatacttcgtgttctgttctatagagttaaaccttttaacttccatggccctttagatctctttcaagcacattccattttcttctgatcatacttcctcagaaaacctttttttggctgggtgtggtggctcatgcctgtaatcccagcactgtgggaggctgaggtggttgtattgcttgaggccaggtgtttgaggccagccagggcaacacagcaagaccccatctctacaaaatattaaaacattagctaggcatggtggtgcacacctgtagtcctagcttcttgggaggctgaggcaggattgcttgagcccaggagtttgagccttcagtgagctatgatcgcgccactgtactccatcctgggtgatggagcgaagaacctgtctcttaaaaaaaaaaatttttttttaattaaaaaaacccaccctttttcatttcccaacattttttggctattatgatcgctatgtgttccttcaaataatttccagtgaatccacacttgatgttgcaaagcctaagtttgctgcagaaatacaatttcctacacttcatacctaaaggagattcagagctatcgctcaaaaccaaaagtcttggtttttaaatgtgcttagacaaaaaaaatcaggaaaggtaccctaatcgttcaacagcaatcatctttggggaatgggcattttggtaggtaaagtgtggtggacgtccttattattatttttgagacagtgtcttgctctgtctcccaggctggaggtcagtggcacaaatctcagctcactctaacctgcacctcccgggttcaagtgattctcatctcagcctcccaagtagtgtgaactaaaggcatgtgccaccacgcctggctaatttttgtatttttagtagagacagggtttcaccatgttggccaggctggtctcgaactcctggcctcaagtgatccacccacctcagccgcccaaagtgttgggattacaggcatgagccaccatgcccggccccttattttactttatcctcctgattatttgaatttgttacactaagcatgtattttataatcaaaaataattaagatttaaaacaatgtatttgactactaaaaagcaaattatataaatcagttgaataataatgttgttaaagaggctgtttagcactaatttgaccaaatctatagtcaaagtttgattctacttgaattttttggaaatttgctgttgtattacttattctttgccttgttctctgtgaagtcctttcctaaaaaagaaacttatacaatttagttcacaaaactttgttgacctctttctctgtagaaatgaaaactaaatatatataattgagaaataattctgatactcttcattcctataaaagtaattaagatagacctataggattgttgaactttgctgccaaatatagtaaccagtaaccacagctagctgtaaaattgaaaattcagttcagtcaaactagccatatttcaagtgctcaacagccactggtggctattggttaccttactgaccagccaatataggctatttccgtcattatagaaagctctattggacaacattggtctaggacatatattttgtattttcccctcacccaccatccaataatgagtaatagcacaaagtaaaagtgacttaatttgaaattacttctgtttggctagtttgcttagctgatcaccaccaacatcataggtctataaatcacccaactaagatcaggggtgtttcatgggaaaatctacacaaactattcattaaaaaccatagagccatggactgtcatttctgatttctgtttgattctttgtggtcatcattgaatatacaggggcctctatacactctggggagtatctattctcaggtgagcaaaataccgaatactgaatggaaatcaactgtaagtattaggacttcatatgcaacttgaatttttggtgctgtccggagtctagagccccacaatctgttttggttacagtttatccctgtaggataaatgatccatttaactattcatcagaggtgctgtaattttaaattgtctcttgtctccttcagttaattttcagaattaaaaacataccatgggaaaaaaaaaaaaaaaa

SEQ ID NO: 166516 - DNA, 561 bp, Artificial Sequence
  derived and/or modified sequence
atggctagtccaagcaaggccgtaatcgttccagggaacggtggaggcgacgtaactacccacggatggtacggatgggtgaagaaagagctcgaaaagattcccgggttccagtgcctggctaagaatatgcccgaccctatcacagcccgggagtcaatctggctccctttcatggaaaccgagctccactgcgacgaaaagacgattattatcggccacagtagcggagcaattgccgccatgcggtacgccgaaacccaccgggtttacgctattgtgctcgtcagcgcctatacaagtgatctgggagacgagaatgaacgagcttctggttactttacccgtccatggcagtgggagaagattaaggccaactgtccttatatcgtgcaatttggaagcaccgacgatccgttcctgccttggaaagaacagcaggaagtggctgatagactggaaaccaagttacacaagtttacagactgcggccattttcagaataccgaatttcatgagcttatcacagtggtcaagtcactgttgaaagtcccagcatag

SEQ ID NO: 166517 - DNA, 519 bp, Artificial Sequence
  derived and/or modified sequence
atggcctcccccagtaaggcggtgattgtgcccggaaatggaggaggggacgtgactacccacggctggtatggttgggtaaagaaagagcttgaaaaaattccaggatttcagtgcctggcgaagaatatgcccgacccaattactgcccgagagtccatttggttgcccttcatggagaccgagctgcattgcgatgagaaaactattattatcggacacagttcaggagctatcgctgcaatgcgctacgccgagacacacagggtgtacgctattgtgctggtatccgcctacacctcggatttgggtgatgaaaacgaacgtgctagcgggtactttactcgcccctggcagtgggaaaagataaaagctaattgcccatacatagtgcaatttgggtccaccgacgacccatttttaccttggaaggaacagcaggaagtggctgattggaaaccaaactgcacaaactcactgaccgtggccacctttcggactcaatcttttatgaattag

SEQ ID NO: 166518 - DNA, 561 bp, Artificial Sequence
  derived and/or modified sequence
atggccagccccagcaaggctgtgattgtgcctggaaatggaggaggagatgtgaccacccacggctggtacggctgggtgaagaaggagctggagaagatccctggcttccagtgcctggccaagaacatgccagaccccatcacagcccgggagagcatctggctgcccttcatggagacagagctgcactgtgatgagaagaccatcatcatcggccacagcagcggggccatcgccgccatgagatatgcagagacccaccgggtgtatgccatcgtgctggtgtctgcctacaccagtgacctgggagatgaaaatgaaagagccagcggctacttcacccggccctggcagtgggagaagatcaaggccaactgcccctacatcgtgcagtttggcagcacagatgaccccttcctgccctggaaggagcagcaggaggtggccgaccggctggagaccaagctgcacaagttcacagactgtggccacttccagaacacagagttccacgagctgatcaccgtggtgaagagcctgctgaaggtgcctgcctag

SEQ ID NO: 166519 - DNA, 519 bp, Artificial Sequence
  derived and/or modified sequence
atggccagccccagcaaggctgtgattgtgcctggaaatggaggaggagatgtgaccacccacggctggtacggctgggtgaagaaggagctggagaagatccctggcttccagtgcctggccaagaacatgccagaccccatcacagcccgggagagcatctggctgcccttcatggagacagagctgcactgtgatgagaagaccatcatcatcggccacagcagcggggccatcgccgccatgagatatgcagagacccaccgggtgtatgccatcgtgctggtgtctgcctacaccagtgacctgggagatgaaaatgaaagagccagcggctacttcacccggccctggcagtgggagaagatcaaggccaactgcccctacatcgtgcagtttggcagcacagatgaccccttcctgccctggaaggagcagcaggaggtggccgactggaagcccaactgcaccaacagcctgactgtggccaccttccgcacccagagcttcatgaactag

SEQ ID NO: 166520 - DNA, 561 bp, Artificial Sequence
  derived and/or modified sequence
atggccagccccagcaaggccgtgatcgtgcccggcaacggcggcggagatgtgactacccatggatggtacggatgggtcaaaaaggaactggagaagatccctggattccagtgcttagcaaagaacatgcccgacccgatcacagcccgcgagtccatatggctgccctttatggagacagagctgcactgtgacgaaaaaactattatcatcggccattcatccggggcaattgccgccatgcgctacgccgagacacaccgcgtctatgcaatagttctggtctctgcctacactagcgaccttggtgatgaaaatgaacgggcatcagggtactttacacgcccctggcaatgggaaaagatcaaagccaattgcccatatatcgtgcaattcgggtcaaccgatgacccattcctgccatggaaggaacaacaggaagtggcggaccggctagaaactaagctgcacaaatttaccgattgtgggcatttccagaatactgagtttcacgagttgattaccgtcgttaagtctctgttgaaggtgcctgcctag

SEQ ID NO: 166521 - DNA, 519 bp, Artificial Sequence
  derived and/or modified sequence
atggccagccccagcaaggccgtgatcgtgcccggcaacggcggcggggacgttacaacccatgggtggtacggatgggtcaaaaaagagctggagaagatccccgggtttcagtgcctggctaaaaacatgcccgaccctataacagcacgcgagagcatctggttgccatttatggaaacagagttgcattgtgacgaaaagaccattataatcggacatagcagtggagctatagctgccatgagatatgcagagacacatagagtgtatgcgattgtgcttgtgagcgcttatacctccgatctgggcgatgaaaatgaacgagcctcaggatacttcaccagaccctggcagtgggaaaagatcaaggctaactgcccatacattgtgcaatttgggtctaccgacgaccccttcctgccgtggaaggaacagcaagaggttgcagactggaagcctaactgcacgaattcgctgactgtggcaacattccgcacccagtccttcatgaactag

SEQ ID NO: 166522 - DNA, 561 bp, Artificial Sequence
  derived and/or modified sequence
atggcgtctccaagtaaggcggtgatcgtgcccggtaacggtgggggtgacgtcactacccacggttggtacgggtgggtcaagaaagaactcgaaaagatccccggttttcagtgcttggccaagaacatgcctgaccctatcaccgccagagagtctatttggctgccctttatggagacagaactgcattgtgacgagaagacgattattatcggccacagcagtggtgccattgcagctatgagatacgctgaaactcacagagtctatgctatcgtgttagtgtccgcctatacatctgacctaggagacgaaaacgagcgagcttccgggtatttcacgcggccatggcagtgggaaaaaatcaaagccaattgcccctatatcgttcaattcggcagtacagatgatccttttctgccatggaaagagcagcaggaagtcgccgaccggctggaaaccaagctgcacaagttcacagactgcggtcatttccagaacaccgagtttcacgagcttatcacagtggttaaaagtttactgaaagtaccagcatag

SEQ ID NO: 166523 - DNA, 519 bp, Artificial Sequence
  derived and/or modified sequence
atggcctctccttcaaaggcagtgattgtgcccggaaatggcggtggagacgtgacaacccatggatggtacggctgggtgaaaaaagagctggaaaaaatacctggtttccagtgcctcgcaaagaacatgcctgatcccatcacagcccgagagtccatttggctgccatttatggaaacagaactccactgtgacgaaaagacaataattattggccacagcagcggcgctattgccgctatgcgatacgctgaaacccatcgggtgtatgccattgtgttggtaagtgcctacacttctgatctcggcgatgagaatgaacgcgcttcaggctattttacccgaccctggcaatgggaaaaaataaaggccaactgcccatacattgtgcaattcggaagcacagatgaccccttcctgccatggaaggagcaacaggaggtggctgattggaagccaaactgcactaactctctgacagtggccacctttagaacgcagagctttatgaattag

SEQ ID NO: 166524 - DNA, 3861 bp, Artificial Sequence
  derived and/or modified sequence
cgcaggctccctgcgggagcaggctgggctcagctccgctggacccgcgctggggaactctggcctcgctgcactcatggcttctcctagcaaggcagtgattgttcccgggaacggaggcggggatgtgaccacccacggctggtatggctgggtgaaaaaggagctggagaagatacctggtttccagtgtttggctaaaaacatgcccgacccaattacagcacgagagagcatctggctgcccttcatggagacagagctgcactgtgatgagaagactatcatcattggccacagttctggggccatcgcggccatgaggtatgcagaaacacatcgagtatatgctattgtattagtgtctgcgtacacatcagacttgggggatgaaaatgagcgtgcaagtggatacttcacccgcccctggcagtgggagaagatcaaggccaactgcccttacattgtgcagtttggctctactgacgacccgttccttccctggaaggaacaacaagaagtggccgataggttggaaaccaaattgcacaaattcactgactgtggccactttcagaacacagagtttcatgaactgattactgttgtaaagtctttgctgaaagtaccagcatagactgtatgatttctgctattttgcatcccaatataggagtagaataatatctactatcagctgattactagacacatagaacatccagttaagttccgtaagtgcctgaaaaacaaacacaagtttcaacattcaatctaagttacaaatagcacttccattttccatagactctaaaactccccaaattgctatgaactaccacagtattttcctcatttgataagaaacataaggacagcttaactacccttctctatccgaagtgagtcagaaacagaacccaggtttcttgattcccactcctgagtaaaattaaataggttttatgtatgttgcaggtattgcacacttttcctctttgaaatcaaacttttctatttcactggggaaagaaaacatgactgaaagtccagagtgttagcttagagctcaaaatactagctgctgtttcaagctggccccagacattaaactcagactagggccttcacctctgacacttgcccctaagtccttcagacatgttgagagagactgagacaggagtcttccggagtcaggcaggaaggagaagcacagcaatatacattcataatatacgtacaactgactagatttgtttgagacaagagtggtgggatcagagccatgtggagagctcatggcctgtctaaattgttgccatgtggaaatggggcagagtgttgccaattttctgattttttgtgtggaaaaaaatctccaaattgtagtttttaaatttggggaatgcaaatatatatatatatacacacacacacacacacatacacatacaatccatatacatatggagtatgtaagttggcaataacagtatacatcaaaaaatttacaaacactgcaagacaaataaaatccaagccatccatttgtgaccacagtcataagcattcacttagccaggggcttttagataattgtctgtgaagtctgagaaaagactaagataaccaagatgaacataatgtcaaaggacgaaatcatggggacaatttggattttgttccaaaagacaagtgtttttaaaaagaacctttccatacttcgtgttctgttctatagagttaaaccttttaacttccatggccctttagatctctttcaagcacattccattttcttctgatcatacttcctcagaaaacctttttttggctgggtgtggtggctcatgcctgtaatcccagcactgtgggaggctgaggtggttgtattgcttgaggccaggtgtttgaggccagccagggcaacacagcaagaccccatctctacaaaatattaaaacattagctaggcatggtggtgcacacctgtagtcctagcttcttgggaggctgaggcaggattgcttgagcccaggagtttgagccttcagtgagctatgatcgcgccactgtactccatcctgggtgatggagcgaagaacctgtctcttaaaaaaaaaaatttttttttaattaaaaaaacccaccctttttcatttcccaacattttttggctattatgatcgctatgtgttccttcaaataatttccagtgaatccacacttgatgttgcaaagcctaagtttgctgcagaaatacaatttcctacacttcatacctaaaggagattcagagctatcgctcaaaaccaaaagtcttggtttttaaatgtgcttagacaaaaaaaatcaggaaaggtaccctaatcgttcaacagcaatcatctttggggaatgggcattttggtaggtaaagtgtggtggacgtccttattattatttttgagacagtgtcttgctctgtctcccaggctggaggtcagtggcacaaatctcagctcactctaacctgcacctcccgggttcaagtgattctcatctcagcctcccaagtagtgtgaactaaaggcatgtgccaccacgcctggctaatttttgtatttttagtagagacagggtttcaccatgttggccaggctggtctcgaactcctggcctcaagtgatccacccacctcagccgcccaaagtgttgggattacaggcatgagccaccatgcccggccccttattttactttatcctcctgattatttgaatttgttacactaagcatgtattttataatcaaaaataattaagatttaaaacaatgtatttgactactaaaaagcaaattatataaatcagttgaataataatgttgttaaagaggctgtttagcactaatttgaccaaatctatagtcaaagtttgattctacttgaattttttggaaatttgctgttgtattacttattctttgccttgttctctgtgaagtcctttcctaaaaaagaaacttatacaatttagttcacaaaactttgttgacctctttctctgtagaaatgaaaactaaatatatataattgagaaataattctgatactcttcattcctataaaagtaattaagatagacctataggattgttgaactttgctgccaaatatagtaaccagtaaccacagctagctgtaaaattgaaaattcagttcagtcaaactagccatatttcaagtgctcaacagccactggtggctattggttaccttactgaccagccaatataggctatttccgtcattatagaaagctctattggacaacattggtctaggacatatattttgtattttcccctcacccaccatccaataatgagtaatagcacaaagtaaaagtgacttaatttgaaattacttctgtttggctagtttgcttagctgatcaccaccaacatcataggtctataaatcacccaactaagatcaggggtgtttcatgggaaaatctacacaaactattcattaaaaaccatagagccatggactgtcatttctgatttctgtttgattctttgtggtcatcattgaatatacaggggcctctatacactctggggagtatctattctcaggtgagcaaaataccgaatactgaatggaaatcaactgtaagtattaggacttcatatgcaacttgaatttttggtgctgtccggagtctagagccccacaatctgttttggttacagtttatccctgtaggataaatgatccatttaactattcatcagaggtgctgtaattttaaattgtctcttgtctccttcagttaattttcagaattaaaaacataccatgggaaaaaa

SEQ ID NO: 166525 - DNA, 543 bp, Artificial Sequence
  derived and/or modified sequence
gggaactctggcctcgctgcactcatggcttctcctagcaaggcagtgattgttcccgggaacggaggcggggatgtgaccacccacggctggtatggctgggtgaaaaaggagctggagaagatacctggtttccagtgtttggctaaaaacatgcccgacccaattacagcacgagagagcatctggctgcccttcatggagacagagctgcactgtgatgagaagactatcatcattggccacagttctggggccatcgcggccatgaggtatgcagaaacacatcgagtatatgctattgtattagtgtctgcgtacacatcagacttgggggatgaaaatgagcgtgcaagtggatacttcacccgcccctggcagtgggagaagatcaaggccaactgcccttacattgtgcagtttggctctactgacgacccgttccttccctggaaggaacaacaagaagtggccgattggaaaccaaattgcacaaattcactgactgtggccactttcagaacacagagtttcatgaactga

SEQ ID NO: 166526 - DNA, 561 bp, Artificial Sequence
  derived and/or modified sequence
atggccagccccagcaaggccgtgatcgtgcccggcaacggcggcggcgacgtgaccacccacggctggtacggctgggtgaagaaggagctggagaagatccccggcttccagtgcctggccaagaacatgcccgaccccatcaccgccagagagagcatctggctgcccttcatggagaccgagctgcactgcgacgagaagaccatcatcatcggccacagcagcggcgccatcgccgccatgagatacgccgagacccacagagtgtacgccatcgtgctggtgagcgcctacaccagcgacctgggcgacgagaacgagagagccagcggctacttcaccagaccctggcagtgggagaagatcaaggccaactgcccctacatcgtgcagttcggcagcaccgacgaccccttcctgccctggaaggagcagcaggaggtggccgacagactggagaccaagctgcacaagttcaccgactgcggccacttccagaacaccgagttccacgagctgatcaccgtggtgaagagcctgctgaaggtgcccgcctag

SEQ ID NO: 166527 - DNA, 519 bp, Artificial Sequence
  derived and/or modified sequence
atggccagccccagcaaggccgtgatcgtgcccggcaacggcggcggcgacgtgaccacccacggctggtacggctgggtgaagaaggagctggagaagatccccggcttccagtgcctggccaagaacatgcccgaccccatcaccgccagagagagcatctggctgcccttcatggagaccgagctgcactgcgacgagaagaccatcatcatcggccacagcagcggcgccatcgccgccatgagatacgccgagacccacagagtgtacgccatcgtgctggtgagcgcctacaccagcgacctgggcgacgagaacgagagagccagcggctacttcaccagaccctggcagtgggagaagatcaaggccaactgcccctacatcgtgcagttcggcagcaccgacgaccccttcctgccctggaaggagcagcaggaggtggccgactggaagcccaactgcaccaacagcctgaccgtggccaccttcagaacccagagcttcatgaactag

SEQ ID NO: 166528 - protein, 191 aa, Artificial Sequence
  derived and/or modified sequence
MATLIYVDKEIGEPGTRVAAKDVLKLESRPSIKALDGISQVLTRRFGKTYDAPSALPKATRKALGTVNRATEKSVKTNGPRKQKQPSFSAKKMTEKTVKTKSSVPASDDAYPEIEKFFPFNLLDFESFDLPEERQIAHLPLSGVPLMILDEEGELEKLFQLGPPSPVKMPSPPWECNLFAVSFKHSVDPGC

SEQ ID NO: 166529 - DNA, 576 bp, Artificial Sequence
  derived and/or modified sequence
atggcaacactgatctatgtggacaaggaaatcggggaacctggcacacgggtggcagccaaggatgtgctcaaactcgagtctaggcccagcatcaaggcattggatggaatctcgcaggtgcttactcggcgtttcggaaagacctatgacgcacctagcgccctgcctaaagcaacccgaaaggccctgggcaccgtgaatcgagcaactgagaaatcagtgaagactaatgggcctcgcaaacagaaacaacccagtttttccgctaagaaaatgacagaaaagactgtcaaaactaaaagctccgtgccagcttctgacgatgcgtatcccgagatagaaaagttttttccattcaatctgttggacttcgagtcttttgatctgcccgaagagcggcagatcgcgcatctgccccttagcggcgtccctctcatgatcctcgatgaggagggtgagctggaaaagcttttccagctagggccgccatcccctgtcaaaatgccttctccaccttgggagtgcaatctgtttgccgtcagtttcaaacatagtgtcgatccaggttgctag

SEQ ID NO: 166530 - DNA, 576 bp, Artificial Sequence
  derived and/or modified sequence
atggccaccctcatctacgtggacaaggagattggagagcccggcaccagggtggccgccaaggatgtgctgaagctggagagccggcccagcatcaaggccctggatggcatcagccaggtgctgaccaggagatttgggaagacctatgatgcccccagcgccctgcccaaggccaccaggaaggccctgggcaccgtgaacagagccacagagaagtctgtgaagaccaacggccccaggaagcagaagcagcccagcttcagcgccaagaagatgacagagaagacagtgaagaccaagagctctgtgcctgccagtgatgatgcctacccagaaattgagaagttcttccccttcaacctgctggactttgagagctttgacctgcctgaggagcggcagatcgcccacctgcccctgagcggcgtgcccctgatgatcctggatgaggagggggagctggagaagctgttccagctgggcccccccagccctgtgaagatgcccagccccccctgggagtgcaacctgtttgctgtgtccttcaagcacagcgtggaccccggctgctag

SEQ ID NO: 166531 - DNA, 576 bp, Artificial Sequence
  derived and/or modified sequence
atggccaccctgatctacgtggacaaggagatcggcgagcccggcacacgggttgccgctaaggacgtgctgaagcttgaatcccggcccagcattaaggctctagacggaatatcgcaggtgctgacgcgccgctttgggaagacatacgatgccccgtccgccctgcccaaggccactaggaaggccttagggactgttaaccgtgctaccgaaaagagtgttaaaacaaatgggcctaggaagcagaaacagccgtcattctcagcaaagaagatgaccgagaaaacagtcaaaaccaagtctagtgtgcccgctagcgacgatgcttaccctgagattgagaaattttttccctttaatctgctggactttgagtccttcgaccttcccgaagagcggcaaatagcacacctgccgttatcaggcgtgccacttatgatcctcgatgaagagggggagctggaaaaactgttccagcttggtcctcccagccctgtaaaaatgccctctccgccatgggaatgcaacctatttgcggtgtcgtttaagcatagcgtggatcctggttgttag

SEQ ID NO: 166532 - DNA, 691 bp, Artificial Sequence
  derived and/or modified sequence
atggctactctgatctacgttgataaggaaattggagaaccaggcacccgtgtggctgccaaggatgtgctgaagctggagtctagaccttcaatcaaagcattagatgggatatctcaagttttaacacgacgttttggcaaaacatacgatgctccatcagccttacctaaagctaccagaaaggctttgggcactgtcaacagagctacagaaaagtcagtaaagaccaatggacccagaaaacaaaaacagccaagcttttctgccaaaaagatgaccgagaagactgttaaaacaaaaagttctgttcctgcctcagatgacgcctatccagaaatagaaaaattctttcccttcaatcttctagactttgagagttttgacctgcctgaagagcgccagattgcacacctccccttgagtggagtgcctctcatgatccttgatgaggagggagagcttgaaaagctgtttcagctgggccccccttcacctgtgaaaatgccctctccaccatgggaatgcaatctgtttgcagtctccttcaagcattctgtcgaccctggatgttgaattgccagctgtttgctatgacatagatatttaaatttcttagtgctttggagtttgtgtgtacttgtattaataaagcattatttgtttaacaacataataaatacataaatat

SEQ ID NO: 166533 - DNA, 576 bp, Artificial Sequence
  derived and/or modified sequence
atggccaccctgatttacgttgataaggaaattggagagcccggtactcgtgtggctgccaaggacgttctgaagttggagtcacggccttccattaaagcactggacggaattagccaggtgctgacacgtcggttcggaaagacctatgacgctcctagcgcattacccaaggctacacgcaaggccctggggactgtcaatagagcaaccgagaagtccgttaagacaaacggcccacgcaagcagaaacagccatcattctcagccaagaaaatgacagaaaagaccgtgaagaccaaatccagcgtgccagcaagtgatgatgcctatcctgagattgaaaaattctttccttttaaccttctagacttcgagagtttcgacttgccagaagagcgacagattgcccaccttcccctctctggcgtgcctttgatgattcttgacgaagagggcgagctcgagaagctcttccagctcggacctcccagtcctgtgaagatgccctctccaccctgggagtgtaatctcttcgccgtctcgttcaagcattcagttgatcctgggtgctag

SEQ ID NO: 166534 - DNA, 576 bp, Artificial Sequence
  derived and/or modified sequence
atggccaccctgatctacgtggacaaggagatcggcgagcccggcaccagagtggccgccaaggacgtgctgaagctggagagcagacccagcatcaaggccctggacggcatcagccaggtgctgaccagaagattcggcaagacctacgacgcccccagcgccctgcccaaggccaccagaaaggccctgggcaccgtgaacagagccaccgagaagagcgtgaagaccaacggccccagaaagcagaagcagcccagcttcagcgccaagaagatgaccgagaagaccgtgaagaccaagagcagcgtgcccgccagcgacgacgcctaccccgagatcgagaagttcttccccttcaacctgctggacttcgagagcttcgacctgcccgaggagagacagatcgcccacctgcccctgagcggcgtgcccctgatgatcctggacgaggagggcgagctggagaagctgttccagctgggcccccccagccccgtgaagatgcccagccccccctgggagtgcaacctgttcgccgtgagcttcaagcacagcgtggaccccggctgctag

SEQ ID NO: 166535 - protein, 619 aa, Artificial Sequence
  derived and/or modified sequence
MDDQQALNSIMQDLAVLHKASRPALSLQETRKAKSSSPKKQNDVRVKFEHRGEKRILQFPRPVKLEDLRSKAKIAFGQSMDLHYTNNELVIPLTTQDDLDKAVELLDRSIHMKSLKILLVINGSTQATNLEPLPSLEDLDNTVFGAERKKRLSIIGPTSRDRSSPPPGYIPDELHQVARNGSFTSINSEGEFIPESMDQMLDPLSLSSPENSGSGSCPSLDSPLDGESYPKSRMPRAQSYPDNHQEFSDYDNPIFEKFGKGGTYPRRYHVSYHHQEYNDGRKTFPRARRTQGTSLRSPVSFSPTDHSLSTSSGSSIFTPEYDDSRIRRRGSDIDNPTLTVMDISPPSRSPRAPTNWRLGKLLGQGAFGRVYLCYDVDTGRELAVKQVQFDPDSPETSKEVNALECEIQLLKNLLHERIVQYYGCLRDPQEKTLSIFMEYMPGGSIKDQLKAYGALTENVTRKYTRQILEGVHYLHSNMIVHRDIKGANILRDSTGNVKLGDFGASKRLQTICLSGTGMKSVTGTPYWMSPEVISGEGYGRKADIWSVACTVVEMLTEKPPWAEFEAMAAIFKIATQPTNPKLPPHVSDYTRDFLKRIFVEAKLRPSADELLRHMFVHYH

SEQ ID NO: 166536 - protein, 47 aa, Artificial Sequence
  derived and/or modified sequence
MDDQQALNSIMQDLAVLHKASRPALSLQETRKAKSSSPKKQNDVRVK

SEQ ID NO: 166537 - DNA, 1860 bp, Artificial Sequence
  derived and/or modified sequence
atggacgaccagcaggccctgaacagcatcatgcaggacctggccgtgctgcacaaggccagcagacccgccctgagcctgcaggagaccagaaaggccaagagcagcagccccaagaagcagaacgacgtgagagtgaagttcgagcacagaggcgagaagagaatcctgcagttccccagacccgtgaagctggaggacctgagaagcaaggccaagatcgccttcggccagagcatggacctgcactacaccaacaacgagctggtgatccccctgaccacccaggacgacctggacaaggccgtggagctgctggacagaagcatccacatgaagagcctgaagatcctgctggtgatcaacggcagcacccaggccaccaacctggagcccctgcccagcctggaggacctggacaacaccgtgttcggcgccgagagaaagaagagactgagcatcatcggccccaccagcagagacagaagcagccccccccccggctacatccccgacgagctgcaccaggtggccagaaacggcagcttcaccagcatcaacagcgagggcgagttcatccccgagagcatggaccagatgctggaccccctgagcctgagcagccccgagaacagcggcagcggcagctgccccagcctggacagccccctggacggcgagagctaccccaagagcagaatgcccagagcccagagctaccccgacaaccaccaggagttcagcgactacgacaaccccatcttcgagaagttcggcaagggcggcacctaccccagaagataccacgtgagctaccaccaccaggagtacaacgacggcagaaagaccttccccagagccagaagaacccagggcaccagcctgagaagccccgtgagcttcagccccaccgaccacagcctgagcaccagcagcggcagcagcatcttcacccccgagtacgacgacagcagaatcagaagaagaggcagcgacatcgacaaccccaccctgaccgtgatggacatcagcccccccagcagaagccccagagcccccaccaactggagactgggcaagctgctgggccagggcgccttcggcagagtgtacctgtgctacgacgtggacaccggcagagagctggccgtgaagcaggtgcagttcgaccccgacagccccgagaccagcaaggaggtgaacgccctggagtgcgagatccagctgctgaagaacctgctgcacgagagaatcgtgcagtactacggctgcctgagagacccccaggagaagaccctgagcatcttcatggagtacatgcccggcggcagcatcaaggaccagctgaaggcctacggcgccctgaccgagaacgtgaccagaaagtacaccagacagatcctggagggcgtgcactacctgcacagcaacatgatcgtgcacagagacatcaagggcgccaacatcctgagagacagcaccggcaacgtgaagctgggcgacttcggcgccagcaagagactgcagaccatctgcctgagcggcaccggcatgaagagcgtgaccggcaccccctactggatgagccccgaggtgatcagcggcgagggctacggcagaaaggccgacatctggagcgtggcctgcaccgtggtggagatgctgaccgagaagcccccctgggccgagttcgaggccatggccgccatcttcaagatcgccacccagcccaccaaccccaagctgcccccccacgtgagcgactacaccagagacttcctgaagagaatcttcgtggaggccaagctgagacccagcgccgacgagctgctgagacacatgttcgtgcactaccactag

SEQ ID NO: 166538 - DNA, 144 bp, Artificial Sequence
  derived and/or modified sequence
atggacgaccagcaggccctgaacagcatcatgcaggacctggccgtgctgcacaaggccagcagacccgccctgagcctgcaggagaccagaaaggccaagagcagcagccccaagaagcagaacgacgtgagagtgaagtag

SEQ ID NO: 166539 - DNA, 2135 bp, Artificial Sequence
  derived and/or modified sequence
ttttattaatatgctgatctgttttatcttctcaggccataaagaatgctgatgggagaaccattttcctaattttcaaattgttgagctgtttgccataatggatgatcagcaagctttgaactcaatcatgcaagatttggctgtccttcataaggccagtcgaccagcattatccttgcaggaaaccagaaaagcaaaatcttcatcaccaaaaaaacagaatgatgtccgagtcaaatttgaacatagaggagaaaaaagaatccttcagttccccagaccagttaaactggaagatctgagatctaaagctaaaattgcctttggacagtctatggatctacattataccaataacgagttggtaattccattaactactcaagatgacttggacaaagctgtggaactgctggatcgtagtattcatatgaagagcctcaagatattacttgtaataaatggaagtacacaggctactaatttagaaccattgccatcactagaagatttggataatacagtatttggagcagagaggaaaaaacggctatctataataggtcctactagtagagatagaagttctcctcccccaggttacattccagatgaattacaccaggttgcccggaatgggtcattcactagtatcaacagtgaaggagagttcattccagagagcatggaccaaatgctggatccattatctttaagcagccctgaaaattctggctcaggaagttgtccatcacttgatagtcctttggatggagagagctatccaaaatcacgaatgcctagggctcagagctacccagataatcatcaggaattttcagactatgataaccctatctttgagaaatttggaaaaggaggaacatatccaagaaggtatcatgtttcatatcatcatcaagagtataatgatggtcgtaaaacttttccaagagctagaaggacccaggggaccagcttacggtctcctgtgagtttcagtcctactgatcattccttaagcactagtagtggaagcagtatctttaccccagagtatgatgatagtcgaataagaagaaggggaagtgacatagacaatcctactttgaccgtaatggacatcagcccacccagccgttcacctcgagctccgaccaactggagattgggcaaactgcttggccaaggagcctttggaagggtctacctctgttatgatgttgatacaggaagagaattggctgttaagcaagttcaatttgaccccgatagtcctgagaccagcaaggaagtaaatgcacttgagtgtgaaattcagttgctgaaaaacttgctacatgagcgaattgttcagtattatggctgtttgagggatccccaggaaaaaacactttccatatttatggaatatatgccagggggttcaattaaggaccaattaaaagcatatggcgctcttactgagaatgtgactaggaaatacacccgtcagattctggagggtgtccattatttgcacagtaatatgattgtccatagagatatcaaaggcgcaaatatcctgcgagattcaacaggcaacgtcaaactaggagattttggggccagcaaacggcttcagaccatctgtctctcagggacaggaatgaagtctgtcacgggcacaccatactggatgagccctgaagtcatcagtggagaaggctatggaagaaaagcagacatctggagtgttgcatgtactgtggtagaaatgctaactgaaaagccgccttgggctgaatttgaagcaatggctgccatctttaaaatcgccactcagccaacaaacccaaagctgccacctcatgtctcagactatactcgagatttcctcaaacggatttttgtagaggccaaactgagaccttcagctgatgaactcttaaggcacatgtttgtgcattatcactagcagccagtaacctctcctgtgcctctacctagctcccatctattcattcaccttctctctgactgcacttttcttttttataaaaaaagagagatgggggagaaaaaagacaagagggaaagtatttctcttgattcttggttaaatttgtttaataataataatatcctaaatt

SEQ ID NO: 166540 - DNA, 1860 bp, Artificial Sequence
  derived and/or modified sequence
atggacgaccagcaggctttgaactccatcatgcaagacctcgccgtgctgcataaagccagcaggcctgctctgtcgctccaagaaacccgcaaggccaagtccagctcgcccaaaaagcagaacgacgtcagggtgaaatttgaacaccgcggcgagaaaaggatactgcagttccccaggcccgtgaaactggaggatctgcgttcgaaggctaaaatagcattcgggcagtcaatggatcttcattacaccaataatgaactggtcataccactgaccacccaggacgacctggataaggctgtggagctcctggaccgatctatccatatgaagagtttgaaaatactgctggttataaacggttcaactcaggccaccaacctcgagcccctcccctctctggaagacctcgacaacaccgtgttcggcgccgaaaggaagaagcgtctgagcattatcgggcccacgtcccgcgacaggtcttcgcctccaccaggctacatcccagatgagctgcaccaggtggccaggaacgggagtttcaccagtatcaacagcgaaggggaattcattcctgagtccatggaccagatgctggatccactgagcttatcttcccctgagaactctgggagcgggtcatgtcccagtctcgattcacccttagatggcgagagctatccaaaaagtaggatgcccagggcccaaagctatcctgacaaccatcaggagttctcagattacgataatcccatatttgagaagtttggaaaaggaggcacttatccaaggaggtaccacgtgagctaccaccaccaggaatacaacgacgggcggaagacttttccccgtgctcgtcgaacccagggcacctccctgagatcacctgtatctttctcgcccacagatcactctctatcaacctctagcggctcttcaatcttcaccccagagtacgatgactcaagaatccgacgtcgaggaagcgatatcgataaccctactctgacagtgatggatatctcacccccaagccggtctcctagagcacccactaattggagactcggcaaactgctgggccagggggctttcggcagagtctatctctgttacgatgtcgacaccggtagagagttggcggtgaagcaggttcagtttgaccccgatagcccggagaccagtaaggaagtgaacgcactcgagtgcgagatccagctgttgaagaacctgctgcacgagcgcattgtgcagtattacgggtgtttacgagacccccaggaaaagactctatcaatatttatggagtacatgcctggtgggagcattaaagaccagcttaaggcttatggggctttgactgaaaacgtgacaaggaagtacacccgccagatcctggaaggggtccattatcttcactctaatatgatcgtgcacagagatatcaagggggcaaacattctccgcgattccaccggtaacgtgaaactgggggacttcggtgctagtaaacggctgcagactatctgtctgtccgggactggtatgaagagtgtcacagggaccccctattggatgtcgcccgaggtcattagtggcgaaggttatgggcgtaaggcggatatctggtccgtcgcgtgtacagttgtagagatgctgacagagaaacctccttgggctgaattcgaagctatggccgcaatcttcaagattgctacacagcccacgaatccaaaactcccaccccacgtgagcgactatactcgtgatttcctgaagagaatttttgtagaagcgaagctgaggccatctgctgatgaattactgaggcacatgtttgtccattaccactag

SEQ ID NO: 166541 - DNA, 144 bp, Artificial Sequence
  derived and/or modified sequence
atggacgaccaacaggccctcaattccatcatgcaggatttggccgtgcttcataaggcctccagaccagctctctcgctgcaggagacacgtaaagccaaatcatcatcacccaagaaacaaaacgatgtccgcgttaaatag

SEQ ID NO: 166542 - DNA, 1860 bp, Artificial Sequence
  derived and/or modified sequence
atggacgatcagcaagccctgaactcaataatgcaggatctagcggtgctccataaggcttcgaggcccgctttgtcgttgcaggagacaagaaaggctaagagttcttcacctaagaaacagaatgatgtgcgtgttaaattcgagcatcgtggtgagaagcggatccttcaattccccagaccagttaaactggaagacctaaggagcaaggccaagattgctttcggacagagcatggacttacattacaccaataacgagctggtgatccctctcactacccaagatgatctggataaagctgtggagttactggaccggagtatccacatgaaaagtctgaagatattgctggtcattaacgggtccacgcaggcaaccaatctggagccccttccgagcctcgaggacctggataacaccgtgtttggagccgagcgtaagaagcgcttgagcataattgggcccacctctcgcgacaggtcgtctcctcctcccggctacatacccgatgaactgcaccaagtagcgcgcaatgggtcctttacatctatcaacagcgaaggcgaattcatccctgaatccatggatcagatgctggacccactgtcgctttccagcccagagaatagcgggtccggctcctgcccgtcgcttgacagcccccttgacggagagagctatcccaagtctcgcatgcctagggcccaaagttatcccgacaaccatcaggagttcagtgattacgacaatcctatcttcgaaaagttcggaaaaggcggtacatacccaaggcgataccatgtgagctatcatcaccaggagtacaacgatgggcgcaagaccttccccagggctcggaggacacaggggacatcgctgcggtccccagtgagcttcagcccaactgatcatagtctctcaactagctcaggatcatccatcttcacgcccgagtacgacgactctaggatcaggaggaggggatccgatatcgataatcctaccttgactgtgatggacatttcgccgccatcccgttcgcctagggctcctaccaactggaggctgggaaagctcctgggccagggggccttcggtcgcgtctatctctgctatgacgtcgacacaggccgtgagctggcagtgaaacaggtgcagtttgatccagacagtcccgaaacctctaaggaggttaatgctcttgagtgtgagatccagttgctgaagaacctcctacatgagagaattgtccagtattacggttgcttgcgcgatccacaagagaagacgctgtctatcttcatggagtacatgcctggaggttcaattaaggaccaactgaaagcatacggggcactgactgaaaatgttactcggaagtataccaggcagattctcgaaggagtgcattatctgcattcaaatatgattgttcacagagatattaaaggcgctaatattcttcgagactccaccggcaacgtaaaattaggagactttggggccagcaaaagattgcagaccatatgtttgtccgggactggcatgaaatcagtgaccggcacaccttactggatgtcccccgaggtgatctcaggcgagggctatggaagaaaggctgatatttggagtgtggcttgcacagtggtggaaatgctgactgaaaaacctccatgggctgagtttgaagccatggctgcaatcttcaagattgccacgcagccaactaaccccaagctgccaccccatgtctctgattacactagggatttcttaaagcgaatattcgtggaggctaaactgcgacctagtgctgatgaactcctccggcacatgtttgtccattaccactag

SEQ ID NO: 166543 - DNA, 1860 bp, Artificial Sequence
  derived and/or modified sequence
atggatgaccagcaggccctgaacagcatcatgcaggacctggccgtgctgcacaaggccagcaggcctgccctgagcctgcaggagaccaggaaggccaagagcagcagccccaagaagcagaatgatgtgcgggtgaagtttgagcacagaggagagaagaggatcctgcagttccccaggcctgtgaagctggaggacctgcggagcaaggccaagatcgccttcggccagagcatggacctgcactacaccaacaatgagctggtgatccccctgaccacccaggatgacctggacaaggctgtggagctgctggacaggagcatccacatgaagagcctgaagatcctgctggtgatcaatggcagcacccaggccaccaacctggagcccctgcccagcctggaggacctggacaacacagtgtttggagctgagaggaagaagaggctgagcatcatcggccccaccagccgggacaggagcagccccccacctggctacatcccagatgagctgcaccaggtggccagaaatggcagcttcaccagcatcaacagcgagggggagttcatccctgagagcatggaccagatgctggaccccctgagcctgagcagccctgagaacagcggcagcggcagctgccccagcctggacagccccctggatggagagagctaccccaagagcaggatgccccgggcccagagctacccagacaaccaccaggagttcagtgactatgacaaccccatctttgagaagtttgggaagggcggcacctacccccggcgctaccacgtgtcctaccaccaccaggagtacaatgatggcaggaagaccttcccccgggcccggaggacccagggcaccagcctgcggagccctgtgtccttcagccccacagaccacagcctgagcaccagcagcggcagcagcatcttcaccccagaatatgatgacagccgcatcagaagaagaggaagtgacatcgacaaccccaccctgactgtgatggacatcagcccccccagccgcagcccccgggcccccaccaactggaggctgggcaagctgctgggccagggcgccttcggccgggtgtacctgtgctatgatgtggacaccggccgggagctggccgtgaagcaggtgcagtttgatcctgacagccctgagaccagcaaggaggtgaatgccctggagtgtgagatccagctgctgaagaacctgctgcacgagcgcatcgtgcagtactacggctgcctgcgggacccccaggagaagaccctgagcatcttcatggagtacatgcctgggggcagcatcaaggaccagctgaaggcctacggggccctgacagaaaatgtgaccaggaagtacacccggcagatcctggagggcgtgcactacctgcacagcaacatgattgtgcaccgggacatcaagggggccaacatcctgcgggacagcactggaaatgtgaagctgggggactttggagccagcaagaggctgcagaccatctgcctgagcggcaccggcatgaagtctgtgacaggcaccccctactggatgagccctgaggtgatcagcggggagggctacggcaggaaggctgacatctggagcgtggcctgcaccgtggtggagatgctgacagagaagccaccctgggccgagtttgaggccatggccgccatcttcaagatcgccacccagcccaccaaccccaagctgccccctcatgtgtctgactacacccgggacttcctgaagaggatctttgtggaggccaagctgcggcccagcgcagatgagctgctgcggcacatgtttgtgcactaccactag

SEQ ID NO: 166544 - DNA, 144 bp, Artificial Sequence
  derived and/or modified sequence
atggatgaccagcaggccctgaacagcatcatgcaggacctggccgtgctgcacaaggccagcaggcctgccctgagcctgcaggagaccaggaaggccaagagcagcagccccaagaagcagaatgatgtgcgggtgaagtag

SEQ ID NO: 166545 - DNA, 1860 bp, Artificial Sequence
  derived and/or modified sequence
atggacgaccagcaggccctgaacagcatcatgcaggacctggccgtattgcataaagcatcacggccagccctgtccctacaggaaacgagaaaagctaagtcctcatcccccaaaaagcagaatgacgttagagtgaagttcgagcatcggggggagaaaaggattttgcagtttcctcggcctgtgaagttggaagatctgaggtctaaagccaaaatcgcatttgggcaaagcatggaccttcactacacaaataatgaactggtgatccccctcacgactcaggacgatctggataaagccgttgaattgcttgataggtccatccacatgaaatccctgaaaatattgctggtcattaacggttcaacgcaagctactaatctggagcctctgccctcactcgaggacctggacaacacagtcttcggtgccgagcggaaaaagcgcctgagcatcattggcccaaccagtagagaccgcagtagtccccctcctggatacataccggacgaattacaccaggtggcccgaaatgggtcattcaccagcatcaactccgaaggcgagttcatccccgagtctatggatcagatgcttgaccccctttcactgtcatcacctgagaatagcggaagcggatcatgcccatctctggattctcctctagacggagaatcatacccgaaatcccggatgccaagggctcagtcatatcccgacaatcaccaggagtttagcgattacgacaaccctatattcgagaagttcggaaaaggcggcacttaccccagaaggtaccacgtcagctatcatcatcaggagtacaacgacggcagaaagacatttcctcgagcgcgccgcacacagggcacttctcttcgctcccctgtctcttttagccccaccgatcactcactaagcacatcctcgggctctagcatctttacgccagagtacgatgattctaggattaggagacgcggctcggatatcgataatccaacactgaccgtgatggatatatcccctcccagccggtcacctagagccccaaccaactggcgtctcggaaaactgctgggacagggagcattcggtcgagtgtatctttgttatgatgttgacacaggcagggagctggccgtgaagcaggtgcagtttgaccccgacagtccggaaacttctaaagaggtaaacgccctggaatgcgagatccaattacttaaaaaccttctacatgagagaatcgtccagtactacggttgtttacgggatccacaggagaagacactgtccatttttatggagtatatgcccggagggtccatcaaggatcagctgaaggcttatggcgcgctcaccgaaaatgtgacaagaaaatacacacggcaaatcctggaaggcgttcattatttgcattccaacatgatcgtgcatcgcgatattaagggcgctaatatcttgcgcgactcaactggtaacgtgaaactcggagattttggtgccagcaaaagactgcagactatttgcttgtccgggacggggatgaagtccgttacaggtacaccatactggatgagccccgaagtgattagtggagaaggctatggcagaaaggccgatatatggtccgttgcctgtactgtggtcgaaatgctcacagagaaaccaccttgggccgagttcgaggccatggctgccatttttaagatcgccacccaacccaccaaccctaaactccctccccatgtctccgattatacgcgtgattttctcaagcgcatttttgttgaggcaaaactgcgcccgtctgcagacgagctcctccgccacatgtttgtgcattaccactag

SEQ ID NO: 166546 - DNA, 144 bp, Artificial Sequence
  derived and/or modified sequence
atggacgaccagcaggccctgaacagcatcatgcaggacctggccgtactccacaaggcttcccgccccgccctgagcctccaggaaacaaggaaagccaagtccagctctccaaagaaacagaatgacgtgagggtaaagtag

SEQ ID NO: 166547 - DNA, 1860 bp, Artificial Sequence
  derived and/or modified sequence
atggacgaccagcaggccctgaacagcatcatgcaggacctggccgttctgcataaagcatcaaggccagccctgagcttgcaagagacaaggaaggccaagtcatccagtcccaagaagcagaatgacgtgcgcgtcaaatttgagcaccggggagagaagagaatcttacaatttccacggcccgtgaagcttgaggacctgcgctcaaaagcaaagatcgcattcggccaaagcatggatctgcactatacaaataacgagctcgtgattccgctcactacacaggatgacctggataaagccgtcgagcttttggaccgatccattcatatgaaaagcctgaagattctacttgtgatcaacggctctactcaagctactaacctcgaacctctaccgtcacttgaggacctagacaatactgtgttcggcgccgaaagaaagaagaggttgtctattattggccccacgtcccgggacaggagttcgcctccaccaggctacataccagatgaactgcatcaggttgctcggaacgggtcattcaccagcattaactcagaaggagaatttatcccagaatccatggatcagatgttggatccactaagcctttcctcaccagaaaatagtgggagtggtagttgtccctccctcgacagcccgttagatggtgaatcctaccctaaatccagaatgccccgggcccaatcatatcctgacaaccatcaagagttctctgactacgacaaccctatatttgagaagttcggaaagggaggtacttacccaaggagatatcacgtgtcctaccaccaccaagagtacaatgatggaagaaagacattccctcgtgcccgacggacacagggcacctctctcagaagcccagtcagcttttccccaacagatcactctcttagcaccagctctggctcctcaatttttacccccgaatacgacgactcccgcatcaggagacgcggctctgacatagataatcccactctgaccgtaatggacatatctcccccctcccggtccccgcgggcaccaactaattggagattagggaaactgctggggcaaggtgccttcggtagagtgtatttgtgctacgacgtggatactggaagggaattagctgtgaagcaagtacagttcgacccagatagccccgaaacgtcgaaggaagtcaacgccctcgagtgtgaaatccaactcctgaaaaacctactccatgagcgtattgttcagtattatggctgcctgagggacccacaagagaaaacactgtctatctttatggaatacatgccggggggctccataaaggaccagctaaaagcgtacggcgcactgactgagaacgtcactagaaagtacactcgacagatcctggagggtgtccactatttgcactctaacatgatcgttcaccgcgacataaagggagccaacattttgagggactcgaccggaaatgtaaaactcggcgacttcggagcctcaaaaaggctgcagacaatctgcctaagcggaactgggatgaagtctgtgacaggaaccccctattggatgtcccctgaggtcataagcggtgaggggtacggcaggaaggccgacatatggtctgttgcttgtacagtggttgagatgctaacggagaagccaccctgggctgaatttgaggccatggcagcaatattcaaaattgcaacccagcccaccaatccaaagctccccccccacgtgtccgactacaccagagactttttgaaacggatctttgttgaggccaagctgaggccgagtgcagatgagctgttgcggcacatgttcgtacattaccactag

SEQ ID NO: 166548 - DNA, 10992 bp, Artificial Sequence
  derived and/or modified sequence
tttctaaagtccctcaggaaaaaaattctgaaacttgagccacaaattaagaggcagacggcttttctccttgcaaatgacctgccacacagtccgtcactgcctctgctagctctgctacccttgggccctgtccacagcccacgtgggagaccttttcacgggatctactcggatgtctgggatctggccactaccgcaggctcgagacaacccaggccataaagaatgctgatgggagaaccattttcctaattttcaaattgttgagctgtttgccataatggatgatcagcaagctttgaactcaatcatgcaagatttggctgtccttcataaggccagtcgaccagcattatccttgcaggaaaccagaaaagcaaaatcttcatcaccaaaaaaacagaatgatgtccgagtcaaatttgaacatagaggagaaaaaagaatccttcagttccccagaccagttaaactggaagatctgagatctaaagctaaaattgcctttggacagtctatggatctacattataccaataacgagttggtaattccattaactactcaagatgacttggacaaagctgtggaactgctggatcgtagtattcatatgaagagcctcaagatattacttgtaataaatggaagtacacaggctactaatttagaaccattgccatcactagaagatttggataatacagtatttggagcagagaggaaaaaacggctatctataataggtcctactagtagagatagaagttctcctcccccaggttacattccagatgaattacaccaggttgcccggaatgggtcattcactagtatcaacagtgaaggagagttcattccagagagcatggaccaaatgctggatccattatctttaagcagccctgaaaattctggctcaggaagttgtccatcacttgatagtcctttggatggagagagctatccaaaatcacgaatgcctagggctcagagctacccagataatcatcaggaattttcagactatgataaccctatctttgagaaatttggaaaaggaggaacatatccaagaaggtatcatgtttcatatcatcatcaagagtataatgatggtcgtaaaacttttccaagagctagaaggacccaggggaccagcttacggtctcctgtgagtttcagtcctactgatcattccttaagcactagtagtggaagcagtatctttaccccagagtatgatgatagtcgaataagaagaaggggaagtgacatagacaatcctactttgaccgtaatggacatcagcccacccagccgttcacctcgagctccgaccaactggagattgggcaaactgcttggccaaggagcctttggaagggtctacctctgttatgatgttgatacaggaagagaattggctgttaagcaagttcaatttgaccccgatagtcctgagaccagcaaggaagtaaatgcacttgagtgtgaaattcagttgctgaaaaacttgctacatgagcgaattgttcagtattatggctgtttgagggatccccaggaaaaaacactttccatatttatggaatatatgccagggggttcaattaaggaccaattaaaagcatatggcgctcttactgagaatgtgactaggaaatacacccgtcagattctggagggtgtccattatttgcacagtaatatgattgtccatagagatatcaaaggcgcaaatatcctgcgagattcaacaggcaacgtcaaactaggagattttggggccagcaaacggcttcagaccatctgtctctcagggacaggaatgaagtctgtcacgggcacaccatactggatgagccctgaagtcatcagtggagaaggctatggaagaaaagcagacatctggagtgttgcatgtactgtggtagaaatgctaactgaaaagccgccttgggctgaatttgaagcaatggctgccatctttaaaatcgccactcagccaacaaacccaaagctgccacctcatgtctcagactatactcgagatttcctcaaacggatttttgtagaggccaaactgagaccttcagctgatgaactcttaaggcacatgtttgtgcattatcactagcagccagtaacctctcctgtgcctctacctagctcccatctattcattcaccttctctctgactgcacttttcttttttataaaaaaagagagatgggggagaaaaaagacaagagggaaagtatttctcttgattcttggttaaatttgtttaataataataatatcctaaattttttatatttaatctttttttcccttacaagaacttgaagtttttttttttaatttttataatgtactgatgtggttcagagagataaagcactttagtacatagtcactctttttagtacaaacaaatcatttggaatacctaaagattgtagagtcattccctctatcactgacacatcagtgacgatgggaagacatggaaaacaaggagaagaaaatgatgtataatttgtagtttttagtgatagtatttaaaatatatcctcatttgtggggttgagccctaaactttagtttagggtaggtactcaacttaaagaatataggtttcttcttatatctgtattctttagatcctaacctctgtctaccaacctttttgctcagtaggagtcttgatagaagatatgaatctctgagaggtatgtttatttgttaatcctaaccagtataataagcaaatacactataatagatccacgttactggaatctgtaaaccttgagggatagctttctgcttaaaaacacacacacacacacacacacacacacggaaaacctttattttaaagtcaagttgtgagcaaatagaaataaaagacaaaaggacatcactcttatcaaatgtgtgagcagtagaagagaccacatttacagtcaatagaaataatgaaaaaaaattaggtgtttagtgtattttaaacagttttgttttgttttacttgagggggacgtcccaaaattaaaggaatggagaaataatcaaaatcatgtataccatcttctatttccagctcctgattccccataggtaacatcccttaggagcgaagagttcaattagtaatgtttatgtgttatgtcaggagatgaaacccttgttcttaggatcacagaatactaaagcacctcaaaaaaacaggtatcatgtgaaacagtggttgccaaaagtggagcgaggatgatttcactaggcatttggcaattcttagagacatttccggttgtcacaattggagggatactagtaacatgaattgggtagaggccagggatgttgctaaatagattataatacacaaggaaagcagcctcaaagaattacccctcccaaaatgtcagaagtgctgaggctgagaaaccctgatgtaaagatcagtcccagttataaactgaaaacagctatttacaaagcagtaaatgcaagaaagaaaaggaagtcgcaaagagaaagtgatgtaatgcaaattgaggattttacaagatcagatactgctgctttaagtcaagggtgaataatctcaacaaacagcaaatagcaatcactttaccagctgcatattgcacccacataggtaactcttcattttaggaacaaactgaatttgaacactgagccttttgaactcagccatctctatatattctttccttaaaattcatgattttgggcaaaaaaaaaaaaaaaagcatatcaaaacaaaattttaactactaatgggaaggttaaaaagctgccacgtatttctagtacaatgtatccaataagagcaaggacattgttaaatggaacaagacagctgggaaaggccccactatctctaatagaattgtgctactataaaacatgaagatatcagcaatttggccacttgcagtttttttcagcatgttaaagcaagtgctaagtactttattagtactttatttagtactttattttaaaggtctagaaaacaacagtcttcctggaggccccagaatccctttcatgggattcataagggactcaggtattcttattttctgccaaaaggtgtgcttatttagggactcttttacgatactttgtttctgaagttaggtagatcttggtttactgtgccaaggtcctacctagcattccctgtaggaatatttgaaattccactagctagtctaagaagtcaaagcacaaaattaattgtcaacgcttctctcatattcttaaaattgaagcagtttgcagggaagaacaagaatgaggtgtccctgccttggtaaagcaactgccaaattttgttctagaaagaatccccaagtgtgtggatctattataatttctttatcttttatgaatgagggcatcttttctacttgagcaagatcatggtccttgaccagtgggcttttccttcatatctgtcttgtgtagttgtgcttttcctttggctcgtttttggtctgtcagggtaaccagcagtgcacaatatgagacaaatgctctttagagagaaatctggtgagactgtagaacccagagcaaaactgtttttttttcagtctctgttttcttttctaaatgctatagaaaataaaggcacctgaaaagaaactactactttaacactgctgtggaaggcctttgctttataagaaaaatattattagctatgggaaagtaatgttctttatgtaaagacttaaaaatagactaatagtttacagagttattatataaaatacgatgtgaatttatttcaaacaagttgtgaaggtaccaaaaaccacaataaaagttaatatatataaaaactactagaacaaaaaagcttgaaggtgtgggggtggagggtatggaagaccaaaagtaaatttaaaaaagaaatttttgaaaggaaacagctttatcaggggaagttaaatataacactccgtttttttcttctttctaataatgatatggatcaacaaatgcaatttgaactttttaagataactctaaatgtgttttgtttcttaaatgcacaattgattcttctatactgtaatgcttctttgctgacgctggaaaatggtcagactgctgactttgtgcctttaaaatgcattctgctttgacagtggcagactttttggtgctggagaagattcactagcagtcttatatgtgcttttcaggaaatatctttctacttaaggccttgagagattcaaagtggcatgacttaggcttggaccaaatataagatcttttacattgcaaacaaaatgttgtattgaataaaagggttaaaaaaatcataatgactagtggaaattttgatgggttgttaattatttaaaatgtatttgaaagtatacagactgaaaatttcagtatgaatatcttgaaaattttcagcacttttccttgtttacaaaacatctttctaacttaaaaaaatgactattgccttagaaagttttaaaaggcacagttacccttacataacatatataaggaattaaaatattaatgcatttgctgaactgtaaaagaaaattttaaaccttgatttcagagtgaattggattggctttcacttgagagagtctttaccttattcccaaagaaactgcattaaaaagatgaaactatttctttagactaagtctctgctactccagctcatatatatgtcagatctgctctgtagtatttctgacatggagttgttataagatatgtgaaatcacttagaaaataaaatcagatgtgaatagtttagcaggatgaccaagccagatgcagactccttggcctatggcaaagttctgtgccagtgattttatttggagtctgggaactgatagcttgatataaaatcacctggtgtcaattaaatatacaaatctatcttttttaatagaatgaatcttctttgtttgttcaataattgtaacttattatgtcaggtactaaattaacatccttaaggaggtcacaatctaggaggaacatgggcaaacagttacttattttatggcatacgctaactctgaaagttcagcaatgatgttttaaaatgttattttttattaagggaaaagcaattttaggtaatcattggctgttataaacggaaatgtcactgacaacagggattagagtaaaagtatctccaaactagagggatcccctccccaaccaggtcacatagcatctctctcaggaccccctcttactgcaaaacccagcctctactcaacagttctggtgatggggagcatttattccataacagtgtttttttgttcttttttttttttttccccagtgtctcttttaaagaaaacatactttattttggtctaaattgtgaaaatacccaaaacatttgatagaaattgaactctgtcaacagtgttatttatactaagatcaggacagttccttgagatcatactgttttattactaagtttggcctttgttttacaaatgtaatgttcatatttatttgaattttaagattggttaaatgttaatgaaaagcaatccaattgttaatttttagtagtgccttttctctgtatgccttaattttattttatattaataattcaagttacccaccaaaatgaagattttttccaaaatcagtaggcttcacaagttcatttggccttagactgtgtattggtccttaaatgtttcttaatgcctgcctcctcctacccttttctacctcctttttaaaaaaataaataaataaataaataaatgttaggagagaaacattaggatttgtctgtgatagacatgctgcagcttccactagacatgaattcccaacacaagcatagaaagaggtattctcgttctaaagagacatgtaaatgttttctgggttgaatatttgattttcaatcacattggcactgtccaagttcttggcatattatagttcagttatgattttcatggtagagttacaatacttgtttttgccctaaagaagtcattcacatggtttacaaatgttaaggcaatgagataggacagtgagtaggaaatccagggatagcagattctagtccttaattctcagctaacattttgggtaatactcacagaaaagttacttttctgtgaagtgtgtgcatgtgtgcatgtatgtgtgcgtttgcatgcatgtgtgtgtgtgtgtgtgtgtggttagagttggaggcagggatgggaaggaagaaggggaaaggtatgagtgttcaattaggtcagtttctggttttggaagaacaactcaaatgtatgacctactgatgacatacagtgagtgtagtcatccttgggtaggaacaccagtacattttccagaagtagctagtacaaatgattgtataataatattgattgtaaattgccatactcttggttgctaaaggtagattaaaattcaatttgtgtatatgtaaaataatcttatatataattcttaaatagaaagtaattgattttacatagttcttcctgaactttttggaactgaaattctgccaaacattatcaaaataagcttccttagcttaccaagtattcacaaggaaattctcttgtacctctttttggttggctaggggaagcatgctgtgaagcagctattcctacttatagttgtctttggcttggctttgacttctgccatggtttggacaggatgccatggtaggtgtgggaagtatcagggcctcccatcttcccatactcaccttccagagctgttgatggaaatgagctcttgggggagcctagagattcttttttcagtggtcctgtaagcattcaaggttgagcttcagaaagatgagggaggagtcatagctacagtaaagaaaagaatagattttatctgttgcctgtatacagtctcatagaattcttatttttcataattgtgcattttaattgatagtcatatggtatttttgttaataacagcaaaggcattaaatcagtaccattgttccttctgcctgatgacttcttgtttgtaacacaatctgtattatcagaatcactttaaaccaaagcttttatattccctgtacacatagccaaaataattagcactgttacttctgtccacttgtaagctaatagtataaaaattataaagcagatactagtagaatttgtattctggtatatccttcaaggaaaaggacaggtgatcagtgcatttagacatccagaagttacttccactattgaggaactatgtagacatgaatttaagcttgtacatgtgccaatcttgttaatgtcacttgaccactgattcacatagacagacattaacgtctgatgcctcaggttgatggcgaactttcttcctagtgtcttaacatttatgaacttatgtttgacttgaggggcatttcagcaaagctgtgaggaaaagtaggttctggactgatgtctgctttgtgccatagacattttggaacataaggaagtatctgcttctactatatgtacaggacttgtccccaaataatttctgaatcccttaatgcagttgagaatcccttaatgcagttgagaacagtaaagttcatgaccataccgaaaagcacttttaagttcacttctttttaaatatttttttagaatttattttttaaaagcatatgtaactagtgatgattttagcattagctttacttggaggggagaagaaacaaaattacaccttaaactctattagatagactacaaaatggatttgatgtattcttacttttccaaagaattttttccacctggaataagaagagaggactagttgaaacatttgagctggagaggcttatgggcaatatgaagtgggccaaattcttgcaatacaccctattcaattgaaagtacagtgtctaaggataagaatacttctttaaagaccaacaattgttttaatgcaatcttaattagtaaatggtttacattttttctattgttattggttttaaaatttgctaccctgaattctgaaatattataagagttaataccaaaaatacttttaatgtctgacatctcttacatttcacatggttctttttattcattgtaaataaaagtaaacttggataaatttgagaataaactttgaattgttgcaaactatgattatcaatttgtaaatttaccctttgacataataatgtacatttttaaatgtagccattaaattctctatatttaacctattggtttctctctaaatgtttttaatctcagttgaatgctgggcagtttataattatgtacaaagggtttttttcctattaagattgacatttttgcacatttttggaaatgtttaatttgtacactgatttactactctgaccaataattgttgatgagtgtatgagcatcatgaatgcgtgcattgaactactgtctgtgtctttatgttttaacttctttcaagatgtagccatcagttactgcactgctattactgacttaaatggacctttttgcttttacaaactatacttatctatggttctttgttgaagaactcaggagttcgacattaatagaaattagaaaattttataatgtattataaaatccattactaagttgaaagtatgcttttaactgtgtatcaggggatgtatgtttgtgtggagatgtttttttctgtctgtaggcacatgtatatatcccagtaagttcttattttcatttcatttctacatttttatgaacttgttttataagggtactgtttagttgtgataattaaatatatataaaagctttctgagagattatttactatatgaatatattttcagctggctgatcaaaagtatttttaaaattttgtttttagccattcaaaatgtatttgtattttcagaattgaatgcaagtcatacttagagctcaattaaaatactcttgcaagaaaaagcattaaattctctttgagaattccgtgaaatgcaaattaagggaaaaataggttttaagcagtagcaaaaacacaccgctaaaaatggcctttgaattctcagagctatggaaaaatgtgagaaactaaattgtctcgagatgtcaagatttttctatctccagttgctattggcctgtcctactgttgtctttgaatatttcctgtattccaccccaaaagatttcaacttttagtttttctatcactgggcaaggtcagactgggtttataaaacaatatattggcatattgtgattctttgtaattgactataaattggttttgaaatgtccaaacatacgttgtgtgtctttatattgtactgtgtgttttaagtaactggcagaaaaagaattggaaatgaaatttccaatcagacaatgtagtattaaagaaaactttgttttaaatatgcggtaccatgtaaaattactcgtgttaggaataaagtccactgttgaagttgaatgtcactaagcttattatgttaaaaggaaccagtgtgattaggaaaacctaccagaagccagatacagtgtggtacgtgcaacatttcatgcacattttgattttgtttgtcattcaaaattgtgcttgtaaaaatgtatacaatttctgagttttataatttctaggtacttgttttttcttgctggtaaatagcttttttttaaaaaaaaatctaatataaaagaaaccatgtttatattttgttagtgatcaatgactttgtttatatggaaatttgtatattgttggcacacattttgttgaggtttacgtgcatgaaggcctgcaataattagcacaatgaaaactgctttttcttacatgttcatttttttgaaagattgtggtgcaaaggcttactctaataagtaaccttctggactatg

SEQ ID NO: 166549 - DNA, 1860 bp, Artificial Sequence
  derived and/or modified sequence
atggacgatcagcaggcactgaacagtattatgcaggatttggccgtgctccacaaagcttcacggccagcactgagcctgcaggaaactcgtaaggcaaaaagttcaagtcctaagaaacaaaacgacgtgagagttaagttcgaacacaggggcgagaaacgcattttgcagttccctaggccagtcaaactggaggacctgcggtctaaagcaaagattgcttttggccagtctatggacctgcattacaccaacaatgaactggttattccccttaccacgcaggacgatttagacaaagccgtggagctcctggatcgatccatccacatgaagagcttgaagattctgctggttataaacggctctacccaggccactaatcttgaacccttgccctctctggaggatctagataacacagtattcggggcagagagaaagaagaggctatccatcatcgggcctactagccgcgatagatcatcgcccccaccaggatatattccagatgagctgcatcaggtggctaggaacggctccttcacaagcattaattcagagggcgaatttattcccgagtctatggaccaaatgctcgacccactgtcattgtctagtccagagaattctggaagcgggagttgcccgagtctggactctcccctggacggcgagagctaccctaaatccaggatgcccagagcccagtcttatccagacaatcaccaagagttttctgactacgataatccgatttttgagaagttcggtaagggaggaacgtatccacgcaggtaccacgtatcataccatcatcaggagtacaacgatggcagaaagacgtttcctagggctcggcgaacccagggcacatctctacgatccccagtctctttttctcctaccgatcattccctgtctacatcctctggatcctcaatcttcacccccgaatacgatgactcccgcataaggcgacgcggatccgacatcgataacccaactctgacagtcatggacatctctccaccctccagaagcccacgcgctccgacgaactggcgactgggaaaactgctgggccagggcgctttcggccgagtctacctctgctatgatgttgacactggaagggagctcgccgtgaaacaagtgcagtttgaccccgactctcctgaaacgagcaaggaggtgaatgctctggagtgcgagatccagctactgaaaaacctccttcacgagagaattgtacagtattacgggtgtttacgggatcctcaggagaagacactctctatctttatggagtatatgccaggagggagcatcaaagatcagctgaaagcctacggcgctctcacagaaaacgtcactcgcaaatacacccgtcagattctcgagggagtacactatctacatagcaatatgatcgttcatcgggacattaagggagcaaatatcctgcgagatagcaccggcaacgtgaagctgggagactttggggcttctaaacgcctccagactatctgtctgtccggtaccggcatgaaatctgtgaccggcaccccatattggatgagcccggaggtaattagcggcgaaggatatggtcggaaggccgatatatggtcggtggcatgtacagtggtggaaatgctcacagagaaacctccatgggccgaattcgaagcaatggcagccatcttcaaaatagctacacagcctacaaacccaaaattgccccctcacgtttccgattacactcgggatttcctcaaaaggatctttgtcgaagccaagctcaggccaagcgcagatgaactgctcaggcacatgtttgtgcattatcattag

SEQ ID NO: 166550 - DNA, 144 bp, Artificial Sequence
  derived and/or modified sequence
atggatgatcaacaggccctgaactcaatcatgcaagatctcgccgtgctccataaagcctcgcgccctgccctatctctccaagaaactcggaaagctaaaagctctagtcctaagaaacagaatgacgtgcgcgttaagtag

SEQ ID NO: 166551 - DNA, 1860 bp, Artificial Sequence
  derived and/or modified sequence
atggacgatcagcaggccctgaatagtatcatgcaagatttggccgttttgcataaagcctcccggcctgctctgtcgcttcaggaaaccaggaaggccaagtctagcagcccaaaaaagcagaatgacgtaagagtcaagtttgagcacaggggggagaaacgcatcctgcagttccctagacccgtgaagctcgaagatctccgcagtaaagccaagattgcatttggccagtctatggatctacactacacgaataatgaactagtgattccattaaccactcaagacgatctagacaaagccgtggaattgctagatagatccattcacatgaagagcctgaagattctcctcgttataaacggcagtacccaggccacaaatctggagcctctgccttcacttgaggacctggacaacaccgtgttcggggcagagcgcaaaaaacggctgagcattatcggtccaacatcccgcgaccgatcctctcctccccctggttatattcccgacgagctgcatcaggtggcacgtaatggctctttcacatcaataaacagtgaaggtgagttcatccctgagtccatggaccagatgctggaccccttgtccttgagttcaccggagaactctggaagcgggagctgtcctagtctggactccccattggatggtgagagttaccctaagtccagaatgccgagagcacagtcttacccagataatcaccaggagttttccgactatgataacccaatcttcgagaagtttgggaaaggcggaacctaccccagaagataccacgtgagctaccaccaccaggagtacaacgacgggagaaagacattcccaagagcgcgaagaacacagggtaccagcctgcggtctcccgtgtctttctcacccacggaccattctttgagcacatcgagcggttcttccattttcaccccagagtatgacgattcacgaattagacggcgagggagcgacatagacaaccccacgctgaccgtgatggatatttctcccccatccagaagtccacgcgctcccaccaattggagactcggtaagcttcttgggcaaggagctttcgggagagtttatctgtgttacgatgtggatacaggcagagaacttgccgtcaaacaggtgcaattcgacccagattcacccgagacttctaaggaggtgaacgcattggaatgtgaaatccagcttctgaagaatttgctgcatgagcggattgtccaatactatggttgcctgagggatcctcaagaaaaaaccctatcaatctttatggaatacatgcccggtgggagcatcaaggaccaacttaaagcttacggtgccctgaccgaaaatgtaacaagaaagtatacccgacagattcttgagggtgtgcattacctccattccaacatgattgtgcaccgagacataaagggcgctaatatcttgcgcgacagcactggaaatgtgaagttgggggacttcggagccagcaaacgactgcagacgatctgtctgtcaggcacaggtatgaagtctgtcaccggaacaccatactggatgagtcctgaggtgatttcaggcgaaggatatggcagaaaggccgatatttggagcgtggcctgtaccgtcgtcgagatgctgactgagaaacccccatgggccgaattcgaggccatggccgctattttcaagattgccacccaacccacgaatccgaaacttcccccacatgtgagcgattacactcgtgattttttgaagagaatatttgtggaggccaaactccgcccatccgcagatgaactgctgcgccatatgtttgtccactaccattag

SEQ ID NO: 166552 - protein, 1103 aa, Artificial Sequence
  derived and/or modified sequence
MAGASVKVAVRVRPFNARETSQDAKCVVSMQGNTTSIINPKQSKDAPKSFTFDYSYWSHTSTEDPQFASQQQVYRDIGEEMLLHAFEGYNVCIFAYGQTGAGKSYTMMGRQEPGQQGIVPQLCEDLFSRVSENQSAQLSYSVEVSYMEIYCERVRDLLNPKSRGSLRVREHPILGPYVQDLSKLAVTSYADIADLMDCGNKARTVAATNMNETSSRSHAVFTIVFTQRCHDQLTGLDSEKVSKISLVDLAGSERADSSGARGMRLKEGANINKSLTTLGKVISALADMQSKKRKSDFIPYRDSVLTWLLKENLGGNSRTAMIAALSPADINYEETLSTLRYADRTKQIRCNAIINEDPNARLIRELQEEVARLRELLMAQGLSASALEGLKTEEGSVRGALPAVSSPPAPVSPSSPTTHNGELEPSFSPNTESQIGPEEAMERLQETEKIIAELNETWEEKLRKTEALRMEREALLAEMGVAVREDGGTVGVFSPKKTPHLVNLNEDPLMSECLLYHIKDGVTRVGQVDMDIKLTGQFIREQHCLFRSIPQPDGEVVVTLEPCEGAETYVNGKLVTEPLVLKSGNRIVMGKNHVFRFNHPEQARLERERGVPPPPGPPSEPVDWNFAQKELLEQQGIDIKLEMEKRLQDLENQYRKEKEEADLLLEQQRLYADSDSGDDSDKRSCEESWRLISSLREQLPPTTVQTIVKRCGLPSSGKRRAPRRVYQIPQRRRLQGKDPRWATMADLKMQAVKEICYEVALADFRHGRAEIEALAALKMRELCRTYGKPDGPGDAWRAVARDVWDTVGEEEGGGAGSGGGSEEGARGAEVEDLRAHIDKLTGILQEVKLQNSSKDRELQALRDRMLRMERVIPLAQDHEDENEEGGEVPWAPPEGSEAAEEAAPSDRMPSARPPSPPLSSWERVSRLMEEDPAFRRGRLRWLKQEQLRLQGLQGSGGRGGGLRRPPARFVPPHDCKLRFPFKSNPQHRESWPGMGSGEAPTPLQPPEEVTPHPATPARRPPSPRRSHHPRRNSLDGGGRSRGAGSAQPEPQHFQPKKHNSYPQPPQPYPAQRPPGPRYPPYTTPPRMRRQRSAPDLKESGAAV

SEQ ID NO: 166553 - protein, 152 aa, Artificial Sequence [sequence omitted]

SEQ ID NO: 166554 - DNA, 3312 bp, Artificial Sequence
  derived and/or modified sequence
atggccggtgccagcgtcaaagtggcggtgcgcgtgagaccgttcaacgcccgggaaacaagccaggatgccaaatgtgtggtgtccatgcaggggaacactacatctataatcaatcctaaacaatctaaggatgctcctaaatcctttacgttcgattacagctactggtcccacacctccactgaagacccacagttcgcgagtcaacagcaggtatatagggatatcggcgaagaaatgctgttgcatgcattcgagggatacaatgtgtgcatcttcgcgtatggtcagacaggagccgggaaaagttacactatgatgggcagacaagagccaggccagcagggaatcgtgccacagttgtgcgaggatctgttcagtcgcgtctctgagaaccaaagtgcccagctgtcatatagcgttgaggtgagttacatggagatatactgcgagagagttcgcgatttgctcaatcctaagtcccgtgggagcctgcgggttcgcgaacaccctatcctaggtccttacgtgcaggacctctcaaaactagcggttacttcatatgcggacatcgcggacctcatggattgtggaaacaaagctcgcaccgtggctgctaccaacatgaatgagacatctagcaggtctcacgcagtgttcaccatcgtattcacccagcggtgtcacgaccaactgactggtctggacagcgagaaggtgagtaaaatcagtctggtggatttggcaggcagtgagcgggccgacagctctggcgcgcgcgggatgaggttaaaagaaggcgcaaatatcaacaagagcctgactacactgggcaaggtgatttcagcgctcgccgatatgcaatctaagaagaggaagtcagatttcattccttacagagacagcgtgcttacttggctgctgaaagaaaatctgggaggcaactcaagaactgctatgatcgccgctttatcacccgcagatattaactacgaggagacactctctacactgaggtacgctgatagaaccaagcaaatcaggtgtaacgccattatcaatgaggacccgaacgcacgcctcatcagggagctgcaggaggaggttgcccgccttagagaactgttgatggctcagggtttgagcgcatcagcattggagggacttaaaaccgaagaaggttcagtaaggggggctcttcccgcagtttcatctccccccgcgcctgtttctcccagctcccccaccacccacaacggcgagctggagccaagctttagcccaaacactgaatcccaaattggacctgaggaggcaatggagagactgcaagaaaccgagaagattatcgcagagctgaacgagacgtgggaggagaagctgcggaaaacagaggctcttcgcatggaacgggaagccctgttagccgagatgggagtagccgtgcgcgaggacggcggcaccgtgggggtcttttcacctaagaaaacaccccatctcgtgaatctgaatgaggacccactgatgagtgaatgtctgctgtatcatatcaaagacggcgttacacgagttggccaagtggatatggacatcaagctgaccggtcagttcatcagagaacagcactgtctgtttaggagcatcccacagcccgacggcgaggtagtggtgaccttggaaccttgtgaaggcgcagagacctacgtgaacggtaaactagtgacggaacctctggtgctcaaatccggcaatcgcatcgtgatgggcaagaatcatgtttttcggttcaatcatccggagcaggctcgactagagcgggagaggggcgttccacctccgcccggtcccccgtctgaacctgtggattggaattttgcacaaaaagaactcctcgagcaacagggcattgatatcaagctggagatggaaaagcgcctgcaggacctcgaaaaccaatacaggaaagagaaggaagaagcagatttattattagagcaacagcggctgtatgccgattctgactccggggacgacagtgataagcgcagctgcgaagagtcgtggaggctaatctcaagcctgagagaacaactgccccccacaacggttcagaccatcgtcaaacgatgtggtctcccaagtagtggcaaaagacgagcccctaggcgggtgtatcagattcctcagagacgcaggctgcagggaaaggatcccaggtgggcaacaatggccgatctgaagatgcaggccgtcaaggagatatgctatgaggttgctctcgcagattttcgccacggaagggctgagatagaggctctcgcggccctgaagatgcgggagctgtgcaggacctacggcaagccagacggccccggtgatgcatggcgcgctgtagcccgtgacgtttgggacactgtaggcgaagaggagggtggcggcgctgggtcaggaggtggctctgaagaaggggcaaggggtgctgaagtcgaggacctgcgtgcccatatcgacaagctgaccggcattttacaggaagttaagcttcagaactcttccaaggacagagaactgcaagcgcttagggatcggatgctgcgcatggagcgcgttattcccctcgcacaggatcacgaggacgagaacgaggagggaggagaggtgccatgggcacctcctgagggatccgaagccgctgaggaggcagcaccgagcgaccgaatgcctagtgccaggccaccttcacctcccctgtcttcatgggagcgggtgagccggcttatggaggaagatcccgctttccgccgaggccgccttaggtggctcaagcaggagcagctaagactgcaggggctgcaaggcagcggcgggcgcggaggaggcttgagacgaccccctgctagattcgtgccaccgcacgattgcaaactgcgctttccttttaagtcaaacccccagcaccgggaatcctggcccggcatgggaagtggcgaggccccaacccctttgcagccgccagaggaagtaacgccccatccggccacacctgcacggcgccctccatcacctcggagatcccaccatccccggaggaattctctggatggaggcggtaggtcaagaggcgccggatccgcccagcccgaaccacagcatttccaacctaaaaagcataattcatatcctcagccccctcagccctaccctgcccagcgaccccccgggccaagatatcccccctacactacccctcctcggatgagacgtcagcgtagcgcgccagacttgaaggagagcggggcagcagtgtag

SEQ ID NO: 166555 - DNA, 3312 bp, Artificial Sequence
  derived and/or modified sequence
atggccggggcctctgtgaaggtggccgtgcgggtgcggcccttcaatgcccgggagaccagccaggatgccaagtgtgtggtgtccatgcagggcaacaccaccagcatcatcaaccccaagcagagcaaggatgcccccaagagcttcacctttgactacagctactggagccacaccagcacagaggacccccagtttgccagccagcagcaggtgtacagagacattggagaggagatgctgctgcacgcctttgagggctacaacgtgtgcatctttgcctacggccagacaggagctgggaagagctacaccatgatgggccggcaggagcccggccagcagggcatcgtgccccagctgtgtgaggacctcttcagccgggtgtctgagaaccagagcgcccagctgagctacagcgtggaggtgtcctacatggagatctactgtgagcgggtgcgggacctgctgaaccccaagagccggggcagcctgcgggtgcgggagcaccccatcctgggcccctacgtgcaggacctgagcaagctggccgtgaccagctatgctgacattgctgacctgatggactgtggcaacaaggccaggacagtggccgccaccaacatgaatgagaccagcagccgcagccatgctgtgttcaccatcgtgttcacccagcgctgccacgaccagctgaccggcctggacagcgagaaggtgtccaagatcagcctggtggacctggccggcagcgagagagctgacagcagcggggcccggggcatgaggctgaaggagggcgccaacatcaacaagagcctgaccaccctgggcaaggtgatcagcgccctggccgacatgcagagcaagaagaggaagagtgacttcatcccctacagagattctgtgctgacctggctgctgaaggagaacctgggcggcaacagcaggacagccatgattgctgccctgagccctgctgacatcaactatgaggagaccctgagcaccctgcgctatgctgacaggaccaagcagatccgctgcaatgccatcatcaatgaagaccccaatgcccggctcatccgggagctgcaggaggaggtggcccggctgcgggagctgctgatggcccagggcctgagcgccagcgccctggagggcctgaagacagaggagggctctgtgcggggggccctgcctgctgtgagcagccccccagcccctgtgagccccagcagccccaccacccacaacggggagctggagcccagcttcagccccaacacagagagccagatcggccctgaggaggccatggagcggctgcaggagacagagaagatcatcgccgagctgaatgagacctgggaggagaagctgaggaagacagaggccctgaggatggagcgggaggccctgctggccgagatgggcgtggccgtgagagaagatggcggcaccgtgggcgtcttcagccccaagaagaccccccacctggtgaacctgaatgaagaccccctgatgtctgagtgcctgctgtaccacatcaaggatggagtgaccagggtgggccaggtggacatggacatcaagctgaccggccagttcatccgggagcagcactgcctcttccgcagcatcccccagccagatggagaggtggtggtgaccctggagccctgtgagggcgctgagacctacgtgaatggcaagctggtgacagagcccctggtgctgaagagcggcaacagaattgtgatgggcaagaaccacgtgttccgcttcaaccaccctgagcaggcccggctggagcgggagcggggcgtgcccccacctcctggccccccatctgagcctgtggactggaactttgcccagaaggagctgctggagcagcagggcatcgacatcaagctggagatggagaagaggctgcaggacctggagaaccagtacaggaaggagaaggaggaggccgacctgctgctggagcagcagaggctgtatgctgacagcgacagcggagatgacagcgacaagaggagctgtgaggagagctggaggctcatcagcagcctgcgggagcagctgccccccaccaccgtgcagaccatcgtgaagagatgtggcctgcccagcagcggcaagagaagagcccccaggagagtgtaccagatcccccagaggcggcggctgcagggcaaggacccccgctgggccaccatggctgacctgaagatgcaggccgtgaaggagatctgctatgaggtggccctggccgacttccgccacggccgggcagaaattgaggccctggccgccctgaagatgagggagctgtgcaggacctacggcaagccagatggccctggagatgcctggagggctgtggccagagatgtgtgggacacagtgggggaggaggagggcggcggggccggcagcggcggcggcagcgaggagggcgcccggggagctgaggtggaggacctgcgggcccacatcgacaagctgaccggcatcctgcaggaggtgaagctgcagaacagcagcaaggaccgggagctgcaggccctgcgggacaggatgctgaggatggagagggtcatccccctggcccaggaccatgaagatgaaaatgaggagggcggggaggtgccctgggcccctcctgagggcagcgaggccgctgaggaggccgcccccagcgacaggatgcccagcgcccggccccccagcccccccctgagctcctgggagcgggtgtcccggctgatggaggaggaccctgccttcagaagaggccgcctgcgctggctgaagcaggagcagctgcggctgcagggcctgcagggcagcggcggccggggcggcggcctgcggcggcccccagccaggtttgtgccccctcatgactgcaagctgcgcttccccttcaagagcaacccccagcaccgggagagctggccaggcatgggcagcggggaggcccccacccccctgcagcccccagaggaggtgaccccccacccagccaccccagcccggcggccccccagcccccggcgcagccaccaccccaggaggaacagcctggatggcggcggccgcagcagaggagctggcagcgcccagcctgagccccagcacttccagcccaagaagcacaacagctacccccagcccccccagccctacccagcccagaggcctcctggcccccgctacccaccctacaccaccccacccaggatgaggcggcagaggtctgccccagacctgaaggagagcggggctgctgtgtag

SEQ ID NO: 166556 - DNA, 3312 bp, Artificial Sequence
  derived and/or modified sequence
atggccggcgccagcgtgaaggtggccgtgcgggtgcggcccttcaacgcccgggagacgagccaagacgcgaaatgcgtcgtcagcatgcaaggtaacacaacatccatcattaacccaaagcaaagcaaggatgcgcccaagtcatttactttcgactactcatactggagtcatactagtaccgaagatccccaattcgcgtcgcagcaacaggtctatcgggatatcggtgaagaaatgctgctccatgcctttgaaggctataatgtttgtatctttgcatacggacagaccggcgccggcaagtcctacactatgatggggcgacaggagcccggtcagcagggaatcgtgccccaattatgtgaagatttattttccagggtgtctgaaaaccagagcgcacaactgtcatacagcgtcgaagtctcatacatggagatatattgtgagcgagtgagggacttgttgaacccgaaaagccggggcagcctgagagtccgagaacaccctatcctgggaccttacgtgcaggatctaagcaaactcgccgtaacctcctatgctgacatcgctgatctcatggattgtggcaacaaggccaggacagtagctgcgaccaatatgaacgaaacctcaagccgcagccacgcagtcttcacaatcgtgttcacccaaagatgccacgatcagctgaccggcctggacagcgagaaggtgtctaagatctctctggtagatctggcagggtcagagcgggcagatagctccggagctaggggcatgaggcttaaagaaggagctaatatcaataagtccctcacaacacttggtaaagtaatcagcgccctggcagacatgcagtccaaaaagcgcaaaagcgattttatcccctacagggattctgtgctgacctggctcttgaaggagaatctgggcgggaattcaagaactgctatgatagccgctctgtctcctgcagatattaattacgaagagactttgagcacacttagatacgctgacaggactaagcagatacggtgcaacgcgatcatcaatgaggatccaaatgcccgcctaataagggagctacaagaagaggttgcgagacttcgggagctgctgatggcccaaggcttatcagcatcagcactagaaggcttaaaaacagaagaggggtctgttcgcggagccctccccgccgtgtcctctcctcccgctccagtatcgccaagtagcccaacaacccacaatggcgaactcgagccctccttctcgcctaacacagagtctcagattggcccagaggaggcaatggagcgtctgcaagagacagaaaagattatcgccgagctaaatgagacttgggaagagaagctgcgtaagacggaggctctgcgaatggagcgcgaagcattgctcgcagagatgggcgttgctgttagggaggacggaggtacagtgggagtgtttagccccaagaagacaccccatctggtgaaccttaacgaagaccctctgatgtctgagtgtctgttataccacatcaaggacggcgtaaccagagtgggacaggtcgacatggacattaagctgaccggacagttcattagggaacagcattgcctcttccgctcaataccccaacctgatggggaagtagtggtgaccctggaaccttgcgaaggcgccgagacttatgtgaatggcaaattagttactgagccactagtgctcaaaagtggcaaccggatcgtgatgggcaaaaaccatgtgtttaggttcaatcacccagaacaagcgcggttggagcgggaaagaggcgtccctcctcctccagggccccccagcgagcccgtggactggaacttcgcccagaaagagctgctcgaacaacagggcatcgacataaaacttgagatggaaaaacggttgcaagacctcgaaaaccaatatcgaaaagagaaagaggaagctgacctgttgcttgagcagcagcgcctctacgccgattcagacagcggcgatgacagcgataaaaggtcttgcgaggaatcttggcgacttatatcctcactaagggaacaactgccccctaccacagtgcagactattgtgaaaaggtgcggactgcctagctctggaaagaggcgcgcgccgagaagggtgtaccagattccacagcgacgacgcctgcagggtaaggatcctcgctgggccactatggcggacctcaaaatgcaggctgtgaaagagatctgttatgaggtggcccttgccgactttaggcatggtcgagcggagatcgaggcgctcgctgctctaaaaatgcgggaactgtgccggacttacggcaaacccgacggacctggagacgcctggagggctgtggctagggatgtatgggacacagtgggggaggaggagggcgggggcgcaggctcaggtggtggatctgaggagggcgctcgaggcgctgaggtggaagatctgcgggctcatatcgataagctgacaggtatattgcaggaagtgaagttgcagaattccagcaaagatcgggaacttcaggccctgagggataggatgctcaggatggaaagagtcataccactcgcacaggatcatgaagacgagaacgaagaaggcggagaagtgccttgggccccacctgaaggcagcgaagccgcagaagaagccgcgccgtccgatcgcatgccatctgcccgcccccccagccctcctctatcttcctgggaacgggtctcccggctaatggaggaagatccagccttcaggagggggagactccggtggcttaagcaagaacagttaagactccagggcttgcaggggtctggtgggcggggcgggggccttagacgcccgccagcccgcttcgtccccccccatgattgcaaactccgcttcccttttaaatctaatcctcagcaccgggagtcatggcccgggatgggaagtggtgaggccccaactcccctccagccccctgaagaagtgaccccccaccctgcaacgcctgcgcgccgaccgccgtctcccaggcggagccaccacccccggcggaattctctcgacggaggtggtcgctcccgcggcgcagggtcagcacagccagagccacaacacttccagccaaagaaacataatagctatccacaacccccccaaccgtatccagcccaacgtccaccgggaccccggtaccctccatacacgacgccccctcggatgaggaggcagagaagtgcccccgatctaaaggagagcggggccgctgtgtag

SEQ ID NO: 166557 - DNA, 3312 bp, Artificial Sequence
  derived and/or modified sequence
atggccggagcctctgtgaaagtggcagtgcgcgttagacctttcaatgcaagagagacgtcgcaggatgctaagtgtgtcgtcagcatgcaaggcaatactacatctataataaatcccaaacagtcaaaggatgcgccaaaaagttttacctttgattacagctattggtctcatacctcaacagaggacccgcagttcgcctcccagcagcaggtgtatagggacatcggagaggagatgttgttgcacgcctttgaaggatataatgtctgcatctttgcttatggacaaaccggtgctggcaagagctacacgatgatgggacgacaggagccaggacagcaaggcatcgtgcctcagctctgcgaagacctgttctcccgggtgagcgaaaaccagtccgcacaactctcttatagcgtggaggtaagctacatggaaatttactgcgagagagtccgtgacctgcttaacccaaaatcccggggtagcctgcgcgtccgggagcatccgattcttggcccttacgtccaggacctctctaagttggccgttacatcctatgccgacatagccgatttgatggattgcgggaataaggcacggactgtggccgcaacgaacatgaacgagacatcttctcggtcccacgccgtgttcacaattgttttcacgcagcgttgccacgatcagctgaccggcctggacagcgaaaaggtgagtaagatatcgctcgtggacctcgcaggatctgaacgggctgatagctctggtgcacgcggaatgcggttgaaagagggtgctaacatcaataagagcttgacaaccctcggcaaagtcattagcgcactcgcggacatgcagtctaaaaaacgcaagtcagacttcatcccttacagagacagtgttctgacctggttgctgaaggagaacctgggaggcaacagcagaactgccatgatcgctgcattaagtcccgctgatattaattatgaagagactttgtccacactaaggtacgccgatcggacgaaacagatacgctgcaatgccatcatcaatgaagacccgaacgcacgattaatcagggagctccaggaagaggtagcgagactgcgggagctgctgatggcccaaggtcttagtgcctcggcattagagggcttgaaaactgaagaaggaagtgtcagaggcgctctccccgctgtgagctctcccccagccccagtgagcccatcttcaccaaccacccataatggcgaactggaaccctctttcagccccaatactgagagtcagatcgggcctgaagaggccatggaacggctacaggagaccgaaaagataattgctgaactgaatgaaacttgggaggaaaagctccgtaagaccgaagcactcaggatggagagggaagctttactggcagagatgggggttgccgttcgtgaagacggcggaacggtgggtgtgttttctcctaaaaaaacaccacacctggttaacttgaacgaagaccccctgatgtctgaatgcttactttatcacatcaaggacggcgtgacgagagtcggacaggttgacatggacatcaaactgaccggccaattcatacgggagcagcactgcttattcagatcgatccctcagccggatggcgaggtcgtggtaactctggagccgtgtgaaggagccgaaacatacgttaatggaaagctggttacggagcctctggtattgaaaagtggtaataggatcgtcatggggaaaaatcacgtattccggtttaatcatccagaacaggcaaggctggagcgggagagaggtgtgccgccaccaccgggacccccttccgagccggtggattggaacttcgcacagaaggaactgttagaacagcagggcatcgacatcaaactggagatggaaaaacggcttcaggacttggagaaccaatatagaaaagagaaagaagaagccgatctgctccttgagcagcaacgcctctatgcagattccgacagtggagacgactccgataagcgctcatgcgaggagagctggcggctcatttctagcctgcgcgaacagctgcctcctacaacggtacagacgatcgtcaaacgctgcggcctgcctagctcaggcaagcgcagagcgcctagacgggtgtatcagattccgcagagacggcgactacagggcaaggaccctaggtgggctacgatggctgacctgaaaatgcaagcggtgaaggaaatttgttatgaggtggccctggccgactttaggcacggtagagccgagattgaggccctggccgcacttaaaatgcgagaactgtgcagaacctatgggaagcctgacggaccaggagatgcctggcgggctgtcgcaagagatgtatgggatacggtgggcgaagaggaaggcggaggcgcaggatccggaggtggtagtgaggagggcgctcggggagctgaggttgaagacttacgggcacacatcgacaaattaaccggtatcctccaagaggtcaaacttcagaacagttctaaagaccgcgaattgcaggccttgagagaccggatgctgagaatggaacgtgtgatcccactcgcccaggatcacgaggatgaaaacgaggagggcggagaagtgccctgggctcctcctgagggcagcgaggcagccgaagaggctgctccttccgatcgtatgcccagcgctcgccctccctctccccctctttcttcctgggagcgggtctccagactgatggaggaggatcctgcctttaggcgcggtcggctgcggtggttaaaacaggaacagctgcgtcttcagggcctgcagggcagtggcggacgaggcggaggccttagaaggcccccagcccgttttgtccctccacatgactgcaagctgcgtttcccattcaagagcaacccccagcaccgtgagtcatggcctgggatgggtagtggggaggcccctactccattgcaaccccctgaagaagttactcctcacccggctacacccgctaggagaccgccaagtccccgacggtcccaccacccacgtaggaattctcttgatggtggcggaagatcccgcggagccggatccgcccagcctgaacctcagcattttcagcccaagaagcataactcatatcctcagcctcctcaaccctacccggctcagagaccacctgggccaaggtaccccccatataccactccacccaggatgcgcagacaacgaagcgcacccgacctgaaagaatcaggcgcagccgtgtag

SEQ ID NO: 166558 - DNA, 7919 bp, Artificial Sequence
  derived and/or modified sequence
ccagctcgcgctgcccgggcgggcgccggccgctggcgccgctactgctgccgcccccggggcgcgagtccgccgcccgccgcccgggcacccggcgaggggcgggggcagctccgaaccggccccagatccttcccgcttccgcctcacgcttcccggaaagcttgtccctctccgccgagctgctccgggagccccgccgcgccgagggtatctcccagagccccagctggtgtggccaggccccaggagtaggatggggctccccctacgagggccggtggcagccagaactgatacagcccccctggtctggggccaggacgccagctgaggagggcaggagtgtctggagctatggctggtgcctcggtgaaagtggcagtgagggttcggccctttaacgcccgtgagaccagccaggatgccaagtgtgtggtcagcatgcagggcaacaccacctccatcatcaatcctaaacagagcaaggatgcccccaaaagcttcacctttgactactcctactggtcacacacttcgacggaggacccccagtttgcatctcagcagcaagtgtatcgggacattggagaagagatgctgctccacgcctttgaaggctacaacgtgtgcatctttgcctatgggcagaccggggctgggaaatcctataccatgatggggcgacaggagccagggcagcagggcatcgtgccccagctctgtgaggacctcttctctcgcgttagtgagaaccagagtgctcagctatcctactctgtggaggtgagctatatggagatctactgtgagcgggtacgagacctcttgaaccccaagagtcggggttctctgcgggtccgggagcaccccatcctgggcccgtacgtgcaggacctgtccaaattggctgtgacctcctacgcagacattgctgacctcatggactgtggaaataaagcacggactgtggctgccaccaacatgaatgagaccagcagccgttcccatgccgtctttaccatcgtcttcacacagcgctgccatgaccagctcacggggctggactcggagaaggtcagtaagatcagtttggtggaccttgctgggagtgagcgagccgactcctcaggggcccggggcatgcgcctgaaggaaggagccaacatcaataagtccctgactacactagggaaagtgatctcggcccttgcagatatgcaatcaaagaagcgaaagtcggattttatcccctacagggactctgtgctcacctggctgctcaaggaaaatttgggggggaactcacgcacagccatgattgcagccctgagccctgctgacatcaattacgaggagactctcagcaccctcaggtatgctgaccgcaccaagcaaatccgctgcaatgccatcatcaacgaggaccctaatgcccggctgattagagagctgcaggaggaagtagcccggctgcgggaactgctgatggctcagggactgtcagcctctgctctggaaggcctgaagacggaagaagggagtgtcagaggcgccctgccagctgtgtcatctcccccagctccagtttcaccctcatcacccaccacacataatggggagctggagccgtcattctcccccaacacggagtcccagattgggcctgaggaagccatggagaggctgcaggagacagagaagattatagctgagctgaacgagacatgggaggagaagctacgcaagacagaagccctgaggatggagagagaagcattgctggctgagatgggggtggccgtccgggaggatgggggaactgtgggcgtcttctctccaaagaagactccccacctggtgaacctgaacgaagaccctctgatgtctgagtgtctgctctaccacatcaaagatggcgtcaccagggtcggccaagtagatatggacatcaagctgaccggacagttcattcgggagcaacactgtctgttccggagcatcccccagccagatggagaagtggtggtcactctggagccttgtgaaggagctgagacatatgtgaatgggaagcttgtgacggagccgctggtgctgaagtcagggaataggattgtgatgggcaagaaccacgttttccgcttcaaccacccggagcaggcaaggctggaacgggaacgaggggtccccccacccccaggaccgccctctgagccagtcgactggaactttgcccagaaggaactgctggagcagcaaggcatcgacataaagctggaaatggagaagaggctgcaggatctggagaatcagtaccggaaagaaaaggaagaagccgatcttctgctggagcagcagcgactgtatgcagactcggacagcggggatgactctgacaagcgctcttgtgaagagagctggaggctcatctcctccttgcgggagcagctgccgcccaccacggtccagaccattgtcaaacgctgtggtctgcccagcagtggcaagcgcagggcccctcgcagggtttatcagatcccccagcgacgcaggctgcagggcaaagacccccgctgggccaccatggctgacctgaagatgcaggcggtgaaggagatctgctacgaggtggccctggctgacttccgccacgggcgggctgagattgaggccctggccgccctcaagatgcgggagctgtgtcgcacctatggcaagccagacggccccggagacgcctggagggctgtggcccgggatgtctgggacactgtaggcgaggaggaaggaggtggagctggcagtggtggtggcagtgaggagggagcccgaggggcggaggtggaggacctccgggcccacatcgacaagctgacggggattctgcaggaggtgaagctgcagaacagcagcaaggaccgggagctgcaggccctgcgggaccgcatgctccgcatggagagggtcatccccctggcccaggatcatgaggatgagaatgaagaaggtggtgaggtcccctgggccccgcctgaaggatcagaggcagcagaggaggcagcccccagtgaccgcatgccgtcagcccggcccccctcgccaccactgtcaagctgggagcgggtgtcacggctcatggaggaggaccctgccttccgtcgtggtcgtcttcgctggctcaagcaggagcagctacggctgcagggactgcagggctctgggggccggggcggggggctgcgcaggcccccagcccgctttgtgccccctcacgactgcaagctacgcttccccttcaagagcaacccccagcaccgggagtcttggccagggatggggagcggggaggctccaactccgctccaaccccctgaggaggtcactccccatccagccacccctgcccgccggcctccgagtccccgaaggtcccaccatccccgcaggaactccctggatggagggggccgatcccggggagcgggttctgcacagcctgaaccccagcacttccagcccaaaaagcacaactcttatccccagccaccccaaccctacccagcccagcggcccccagggccccgctaccccccatacactactcccccacgaatgagacggcagcgttctgcccctgacctcaaggagagtggggcagctgtgtgagtcccacatcctgggcagagggcctggtggggccccttgctaggagaagggaagacgcccgagacgctgcttccccagaagtgctggggcagggaggcccaggagatgagagagaaggtccgagtaggtgatagaagacaagggggagaccgagccggaggctgaggaaaggaagagggcacggagttgccaggagcaaaccaaagtgaagagagagataggaagctgcctcggggccaccccttgcaaagggggtgtgtcccacaaacgctgctatgggtggggtggggggctggggtgctgcgtagccagtgtttgactttcttttcaagtgggggaaagtgggagaggactgagagtgaggcaagttctccccagcccctgtccgtctgtctgtctgtctgtggtggtttctgtttcttgggaggcatggtaggatcataagtcattcccctccccttccaggcctcctgctatatttgggggacctgactggtttggctggagtcccatgaggatgtgggccctttaataaaggatagcaaacagggagcttgtggcctgtttgttttgggttttcatggaggtgtaggttatataaggcaatggcacaggtcttaagcatacttatcagtgaagtattgtatgtgtgctctgtgcaggcaccacccagatctggatataagaatgtttccatcttgtcttcctgaacttcaccctcctgtctcttccttcagggtgcgcagcccgatcttttccccgctttttttttttgggagacagggtcttgctttgttgcccaggctggaggtacagtcttggctcactgcagcctccgcctcctgagtagctgggattacaggcatgtgccaccacgcccggctcattactgttttttttgtagtgacgaggtttcaccatattggccaggctggtctcgaactcctgatgacctcaagtgatccgcccaccttggcctcccaaagtggtgggattacaggtgtgagccaccgcgcccggcctcccctgctttcatgtttgcttacccagtgtctcagtctgtgccagcagcaccactgtctgttatggacaaagcacagaagcggggatgcgaggggaggtagagggaccgccagcctgtcaatgcttaactggctgttgctgacagatacagaaggatttgtggggtacagaggagttctgctttaagtcacctaacttacttgaaaggtctcccaagcagccagtttctcttgatagtgaatgggttgggcaagcatactgcgcttacctgattgttttcatcctggttgtgttacctgccttctggcaggctacatcattgttcccagtcgttattttatttgtgttaagactgtttgttggccaggcgcagtggttcacgcctgtaatgccagcactgggaggccgaggcaggtggatcacgaggtcaggagatcgagaccatcctggctatcatggtgaaaccccatctctactaaaaataaaaataaaaaaattagccgggcatggtggcgggggcctgtagtcccagctactcaggaggctgaggcaggagaatggcatgaacctgggaggcggagcttgcagtgagctgagattgcgccactgcactccagcctgggcgacagagcgagactccatttcaagaaaaattaaaaaactgtttgttgcctgcttgttttaatgttctggcttgaggcagcgagcccttgactatgccacattgccaggattttgcaggttagattgtactacagcactgcctttggcttgccagactctggagtccccacattttcatcctgttctcaggaaaacactttgacccacttgaagctctgagctactgcttcacagcttcctggggtcagtctccagccaaaaccatagatatcccaactgcagccaaaccacggctctgggcgaaggaacgattaggtttactctaggtttccacaccctgatgctcctgcctttactttgacacctctgactgccaggttttcacagacctgttgacagtgactcaagatctggaatgtaatggatggtttggcaacagtgtttgcttgagcagtttaaaatctggccagggagactcaatgtgagcaagaaaatgatagaataccaagttttctggaggtcagagggagctgagttgagtgttaccgagaatgctgtggggtttgagatgagaaaaatagcttgctaatttaaaagacggattatttttccctaaagaccttgacttatgtaaatgtatattatccataattttaaaaatccacttatggctgggcacagaagctcacacctgtaatcccagcactttgggaggctgaggcaggaggatcagttgagtccaggagttcgagaccagcctgggcaacatagtgaaaccctgtatctacaaaacatagaaaaactagttgggtgtggtggtgtgtacctgtagttccagctactagggaggtaggaagatcacctgagcccatggagattgaggctgtggtgagctgtgaaggcaccacagcactctggcctgggcaagagtgggactctctcaaaaaaaaaaaaaaaaaaaaatccacatatccagccttccaagtcagtctttaataatgtgcacgggccaggcacagtggctcacacccgtaatcccaacactttggaatattagggtgggagcatcacttgaggccaggaatttgagaccagcctgggcaacatagtgagactgccccccccatctctacaaaaaataaaaatcaaaaataatactgtgggcaaactttacttagattttattcagagtagtgcctgtttatttttcatctgtgctacctgtgccggcattccatatgcatttgatttagtctttaaagtaccccggtaaaataggtcttttgtctgcatttttcagatgggaagactgaggttttgtttatttatttttatttatttattttttgagacggagtctcgctctgttgcctaggctggagtgcgatggcacaatcttggctcactacaacctccgcttcctgggttcaagcgattctcctgcctcagcctcctgagtagctaggattacaggcgcccacaaccgcacccggctaattttttgtatctttagtagagacagggtttcactatgttgtccaagctggtttcgaattcctgacctcaggtgatccacccgcctctgcctcccaaaatgttgggattacaggcgtgagccaccacgcccagcctatttatttatttttttagaatcaagatcttgctatgttgcccaggctgaactcgaactcctgggctcaagcaatcctgcctcccaagccaagcagctggtactgcaagcatgtgccaccgtgcctggctcctgaagactgaggttggtttagattaatgagttgcccaaattcagacagttcttaagtggcaaagttaggattccaacccaggtcaacataactaaagcccaaaccccatctcacccctctaggccatcaagtattggctgggtgcggtggtttatgtctgtaatcccagcactttgggaggcggaggcgggaggactgtttgagctcaggagtttgagaccagcctgggcaacataacaagaccctgtctctacaaaaatatataaattagccgggtgtactggctcacacctgtagctacttgggaggctgaggtgggaggatcgcttgagcctgggaggtcaaggctgcggtgacctgtgattgcaccaccaggagaccctgtcttaaaaatgtatatataaaaataaaaagaacatcagacatcaccatcacctcgcttagaatccatggggccttctcctcaaattcaatcttcccaggcatttcatgaacttgcgtctagtttctgttccctctcaaattgcccaggctgtcctgtgagtgacagcagctatttcgtgggcctcctctggaatcatgagaagtcacccaaacaatctcagttttctagctcactccgtcttgacatttctacactgtcatccttggttttcttggaaattaatttgcttttcttcattgtctttctttggagctgctttccttttgttggttactattttatttttagcttctcacaccataccgacatatgttggttattcttttagacatgttttttgttgttgttgtcacctggaacttttgtatcttgaataaatttggggatcaaataca

SEQ ID NO: 166559 - DNA, 3312 bp, Artificial Sequence
  derived and/or modified sequence
atggccggcgccagcgtgaaggtggccgtgagagtgagacccttcaacgccagagagaccagccaggacgccaagtgcgtggtgagcatgcagggcaacaccaccagcatcatcaaccccaagcagagcaaggacgcccccaagagcttcaccttcgactacagctactggagccacaccagcaccgaggacccccagttcgccagccagcagcaggtgtacagagacatcggcgaggagatgctgctgcacgccttcgagggctacaacgtgtgcatcttcgcctacggccagaccggcgccggcaagagctacaccatgatgggcagacaggagcccggccagcagggcatcgtgccccagctgtgcgaggacctgttcagcagagtgagcgagaaccagagcgcccagctgagctacagcgtggaggtgagctacatggagatctactgcgagagagtgagagacctgctgaaccccaagagcagaggcagcctgagagtgagagagcaccccatcctgggcccctacgtgcaggacctgagcaagctggccgtgaccagctacgccgacatcgccgacctgatggactgcggcaacaaggccagaaccgtggccgccaccaacatgaacgagaccagcagcagaagccacgccgtgttcaccatcgtgttcacccagagatgccacgaccagctgaccggcctggacagcgagaaggtgagcaagatcagcctggtggacctggccggcagcgagagagccgacagcagcggcgccagaggcatgagactgaaggagggcgccaacatcaacaagagcctgaccaccctgggcaaggtgatcagcgccctggccgacatgcagagcaagaagagaaagagcgacttcatcccctacagagacagcgtgctgacctggctgctgaaggagaacctgggcggcaacagcagaaccgccatgatcgccgccctgagccccgccgacatcaactacgaggagaccctgagcaccctgagatacgccgacagaaccaagcagatcagatgcaacgccatcatcaacgaggaccccaacgccagactgatcagagagctgcaggaggaggtggccagactgagagagctgctgatggcccagggcctgagcgccagcgccctggagggcctgaagaccgaggagggcagcgtgagaggcgccctgcccgccgtgagcagcccccccgcccccgtgagccccagcagccccaccacccacaacggcgagctggagcccagcttcagccccaacaccgagagccagatcggccccgaggaggccatggagagactgcaggagaccgagaagatcatcgccgagctgaacgagacctgggaggagaagctgagaaagaccgaggccctgagaatggagagagaggccctgctggccgagatgggcgtggccgtgagagaggacggcggcaccgtgggcgtgttcagccccaagaagaccccccacctggtgaacctgaacgaggaccccctgatgagcgagtgcctgctgtaccacatcaaggacggcgtgaccagagtgggccaggtggacatggacatcaagctgaccggccagttcatcagagagcagcactgcctgttcagaagcatcccccagcccgacggcgaggtggtggtgaccctggagccctgcgagggcgccgagacctacgtgaacggcaagctggtgaccgagcccctggtgctgaagagcggcaacagaatcgtgatgggcaagaaccacgtgttcagattcaaccaccccgagcaggccagactggagagagagagaggcgtgccccccccccccggcccccccagcgagcccgtggactggaacttcgcccagaaggagctgctggagcagcagggcatcgacatcaagctggagatggagaagagactgcaggacctggagaaccagtacagaaaggagaaggaggaggccgacctgctgctggagcagcagagactgtacgccgacagcgacagcggcgacgacagcgacaagagaagctgcgaggagagctggagactgatcagcagcctgagagagcagctgccccccaccaccgtgcagaccatcgtgaagagatgcggcctgcccagcagcggcaagagaagagcccccagaagagtgtaccagatcccccagagaagaagactgcagggcaaggaccccagatgggccaccatggccgacctgaagatgcaggccgtgaaggagatctgctacgaggtggccctggccgacttcagacacggcagagccgagatcgaggccctggccgccctgaagatgagagagctgtgcagaacctacggcaagcccgacggccccggcgacgcctggagagccgtggccagagacgtgtgggacaccgtgggcgaggaggagggcggcggcgccggcagcggcggcggcagcgaggagggcgccagaggcgccgaggtggaggacctgagagcccacatcgacaagctgaccggcatcctgcaggaggtgaagctgcagaacagcagcaaggacagagagctgcaggccctgagagacagaatgctgagaatggagagagtgatccccctggcccaggaccacgaggacgagaacgaggagggcggcgaggtgccctgggccccccccgagggcagcgaggccgccgaggaggccgcccccagcgacagaatgcccagcgccagaccccccagcccccccctgagcagctgggagagagtgagcagactgatggaggaggaccccgccttcagaagaggcagactgagatggctgaagcaggagcagctgagactgcagggcctgcagggcagcggcggcagaggcggcggcctgagaagaccccccgccagattcgtgcccccccacgactgcaagctgagattccccttcaagagcaacccccagcacagagagagctggcccggcatgggcagcggcgaggcccccacccccctgcagccccccgaggaggtgaccccccaccccgccacccccgccagaagaccccccagccccagaagaagccaccaccccagaagaaacagcctggacggcggcggcagaagcagaggcgccggcagcgcccagcccgagccccagcacttccagcccaagaagcacaacagctacccccagcccccccagccctaccccgcccagagaccccccggccccagataccccccctacaccaccccccccagaatgagaagacagagaagcgcccccgacctgaaggagagcggcgccgccgtgtag

SEQ ID NO: 166560 - DNA, 459 bp, Artificial Sequence
  derived and/or modified sequence
atgcccgacctgaagatgcaggaggtgaagaagatctgctacgagctggccctggcctacttccaccacggccaggccgagatcgaggccctggccaccctgaaggtgtgggagctgtgccacacctacggcaagcccgagggccccagagacgcctggagagccgtggccagagacttctgggacaccgtgggcgaggaggagggcggcggcgccggcagcggcggcggcagcgaggagggcaccagaggcgtggaggtggaggacctgcaggcccacatctgcaagctgatgggcatcctgcagcaggtgaagctgcagaacagcagcaaggactgggagctgcaggccctgcaggacagaatggtgtgcatggagagaatcatccccctggcccaggaccacgaggacgagaacgaggagggcggcgagttccactgggccccccccgagggctag

SEQ ID NO: 166561 - DNA, 459 bp, Artificial Sequence
  derived and/or modified sequence
atgcccgacctaaagatgcaggaagtgaagaaaatttgttatgagctagctctggcctactttcaccatggtcaggcggagatagaggccctcgccaccctgaaggtctgggaactatgccatacctacggcaaaccagagggtccacgagatgcgtggcgcgcagtggcacgtgatttttgggatactgtgggagaggaggagggcggcggggctggttctggtgggggatcagaggaaggaacacggggcgtcgaggtcgaagacctgcaggcacatatttgcaagttgatgggcatcctccagcaggtgaaactgcagaactcttctaaggactgggaactccaagccttgcaggatcgcatggtgtgtatggagaggatcattcccttagctcaggaccatgaggacgagaacgaggaaggcggcgagttccattgggcccccccagaggggtag

SEQ ID NO: 166562 - DNA, 375 bp, Artificial Sequence
  derived and/or modified sequence
atgctgccttctaaggcatttgagttcgctaccgtaaagtcgatgcatggtatttttgggtgtgggctggccttgccgcccgtgtttgcagcggaactgctatacctgactagagcctgtgcgtccgatgagcagccctttattactgcactgaggcctcccccacgtcctcctcctagtgcactccagttcatctcacgtctggttcctattgccacttgcgggctcggcggccctcctgacatcctgtcattcggatcaccagtgacaccggagctgctccccttttggggcgcccatatttgtgacacccttgtatgtccggtccactttttgcatctggagttcctctcgtgcagccacataagcatctag

SEQ ID NO: 166563 - DNA, 459 bp, Artificial Sequence
  derived and/or modified sequence
atgccagacctgaagatgcaggaggtgaagaagatctgctatgagctggccctggcctacttccaccacggccaggccgagattgaggccctggccaccctgaaggtgtgggagctgtgccacacctacggcaagccagagggccccagagatgcctggagggctgtggcccgggacttctgggacacagtgggggaggaggagggcggcggggccggcagcggcggcggcagcgaggagggcacccggggcgtggaggtggaggacctgcaggcccacatctgcaagctgatgggcatcctgcagcaggtgaagctgcagaacagcagcaaggactgggagctgcaggccctgcaggacaggatggtgtgcatggagcgcatcatccccctggcccaggaccatgaagatgaaaatgaggagggcggggagttccactgggcccctcctgagggctag

SEQ ID NO: 166564 - DNA, 459 bp, Artificial Sequence
  derived and/or modified sequence
atgcccgacctgaagatgcaggaggtgaagaagatctgctacgagctggctctggcctactttcatcacggccaggccgagattgaagccctcgccacgttaaaggtgtgggagctttgccacacatatggaaagcccgaggggccacgtgacgcctggcgtgccgtggccagggacttttgggacacagtcggtgaggaggagggtggaggagcaggcagcgggggaggatcagaagagggaaccaggggtgtggaggtcgaggatctgcaggcccatatctgcaaattaatgggaatactgcagcaggtgaagctgcagaactcatctaaagattgggagctgcaggcattgcaggatcgtatggtttgtatggagagaattatccccttggctcaggatcacgaggacgagaacgaggaaggtggcgagttccattgggctccaccggaaggatag

SEQ ID NO: 166565 - DNA, 459 bp, Artificial Sequence
  derived and/or modified sequence
atgccagacctgaaaatgcaagaagtgaaaaaaatctgctatgagctcgcgctggcctatttccatcacggccaagcggagatcgaggccttagcgacccttaaggtgtgggagctatgtcacacttacggaaaacccgagggaccacgcgatgcttggagagccgtagctcgcgacttctgggacacagttggtgaggaggagggcggaggtgcagggagcggtggtggaagcgaggaagggaccaggggagtcgaagtggaggacctacaggctcacatatgtaaactgatgggtatcctgcagcaagtgaaactgcagaatagttccaaggattgggagcttcaagcgttacaggaccggatggtctgtatggagaggatcatcccattggctcaggatcatgaggacgagaacgaagagggcggtgaattccattgggctcccccagaagggtag

SEQ ID NO: 166566 - DNA, 1143 bp, Artificial Sequence
  derived and/or modified sequence
cgcagcgccccttgcagagtttatcagatcccccattgacgaaggctgcaaggcaaagacccccgctgggccaccatgcctgacctgaagatgcaggaggtgaagaagatctgctatgagttggccctggcttacttccaccacgggcaggctgagattgaggccctggccaccctcaaggtgtgggagttgtgtcacacctatggcaagccagagggccccagagatgcctggagggctgtggcccgggatttctgggacaccgtgggcgaggaggaaggaggtggagctggcagtggtggtggcagcgaggagggaacccgaggggtggaggtggaggacctccaggcccacatctgcaagctcatggggattctgcagcaggtgaagctgcagaacagcagcaaggactgggagctgcaggcgctgcaggaccgcatggtctgcatggagaggatcatccccctggcccaggatcatgaggatgagaatgaagaaggtggtgagttccactgggccccacctgaaggatgagaggaggcagcccccagtgaccacatgccctcagcctggtccccctcaccaccactgtcaagctgggagtgggtgtcgcggctcatagaggaggaccctgccttccatcgaggtcacctttgctggcttaagcaggagcagctacagctgcagggactgcagcgctgtgagggctggagcgggggtgctgcacaggcccccaacccgctttgtaacccctcacgatgcaagctgcgcttccccttcaagagcaatgcccagcactggagtcctggccagggatggggagcggggaggctccagctccaccccttccccctgaggaggtcactccccctccagccacccctgcccgcaggcctccaagtccccgaaggtcccaccatctccgcaggaactccctggaggaagggggccaatcctggggagcgggttctgcacagcctgaaccccagcacttctaggccaaaaagcacaacttacattcagcagccccaactgtacccagcccagcggcccccaagaccccgctactccccatacactactcccccacaaatgagatggcagcgctctgcccctgacctcaaggagagtggggcggctgtg

SEQ ID NO: 166567 - protein, 217 aa, Artificial Sequence
  derived and/or modified sequence
MESVALYSFQATESDELAFNKGDTLKILNMEDDQNWYKAELRGVEGFIPKNYIRVKPHPWYSGRISRQLAEEILMKRNHLGAFLIRESESSPGEFSVSVNYGDQVQHFKVLREASGKYFLWEEKFNSLNELVDFYRTTTIAKKRQIFLRDEEPLLKSPGACFAQAQFDFSAQDPSQLSFRRGDIIEVLERPDPHWWRGRSCGRVGFFPRSYVQPVHL

SEQ ID NO: 166568 - protein, 188 aa, Artificial Sequence
  derived and/or modified sequence
MEDDQNWYKAELRGVEGFIPKNYIRVKPHPWYSGRISRQLAEEILMKRNHLGAFLIRESESSPGEFSVSVNYGDQVQHFKVLREASGKYFLWEEKFNSLNELVDFYRTTTIAKKRQIFLRDEEPLLKSPGACFAQAQFDFSAQDPSQLSFRRGDIIEVLERPDPHWWRGRSCGRVGFFPRSYVQPVHL

SEQ ID NO: 166569 - DNA, 654 bp, Artificial Sequence
  derived and/or modified sequence
atggagagcgttgctttgtatagctttcaagctaccgagagtgatgaactcgccttcaacaaaggcgataccttgaaaatcttgaacatggaagacgaccagaattggtataaggccgaactccgtggggtggaaggtttcatcccaaagaactacatacgcgtgaaaccccacccatggtattccggccgtataagcaggcagttggcggaggaaatccttatgaagaggaatcatctcggcgcgttcttaattagagagagtgagtcctctccgggcgagttttccgtttccgtcaactatggagaccaagtacagcatttcaaggtcctgagagaggccagcgggaaatacttcctctgggaggagaagttcaatagcctgaacgaacttgtagacttctaccgaaccacaactatcgccaagaagagacagatattcctgagggacgaggagcccctactgaaaagccctggcgcttgttttgctcaggcgcagttcgacttcagcgcgcaggacccaagccaactcagcttcaggagaggtgatattattgaggtgctggagaggcctgatccgcattggtggagaggacgttcatgtggaagagtggggttttttcctcggtcctacgtgcaacccgtccatctctag

SEQ ID NO: 166570 - DNA, 654 bp, Artificial Sequence
  derived and/or modified sequence
atggagagcgtggccctgtacagcttccaggccacagaaagtgatgagctggccttcaacaagggggacaccctgaagatcctgaacatggaggatgaccagaactggtacaaggccgagctgcggggcgtggagggcttcatccccaagaactacatccgggtgaagccccacccctggtacagcggccgcatcagccggcagctggccgaggagatcctgatgaagaggaaccacctgggcgccttcctgatccgggagagcgagagcagccctggagagttctctgtgtctgtgaactatggagaccaggtgcagcacttcaaggtgctgcgggaggccagcggcaagtacttcctgtgggaggagaagttcaacagcctgaatgagctggtggacttctaccgcaccaccaccatcgccaagaagaggcagatcttcctgagagatgaggagcccctgctgaagagccctggggcctgctttgcccaggcccagtttgacttcagcgcccaggaccccagccagctgtccttccggcggggggacatcatcgaggtgctggagaggccagacccccactggtggaggggccgcagctgtggccgggtgggcttcttccccaggagctatgtgcagcctgtgcacctgtag

SEQ ID NO: 166571 - DNA, 654 bp, Artificial Sequence
  derived and/or modified sequence
atggagagcgtggccctgtacagcttccaggccaccgagagcgacgaattggcttttaacaaaggcgatacccttaaaatcctgaacatggaagacgaccagaattggtacaaggccgagctgcgcggcgtggagggcttcatccccaagaactacattcgagtgaagccccacccctggtatagcggaaggatcagccggcagttagccgaggagattctgatgaaaaggaaccatctgggtgcgttcctgatccgtgagagtgagagttctcccggtgaattcagcgtcagtgtgaattacggggaccaagtccaacacttcaaggtacttcgggaagcctcagggaaatatttcctgtgggaggagaagttcaattcgttgaatgagctcgtggatttttaccgcaccacaacaatcgcaaagaagcgacagattttcttacgtgatgaggaacctttgctcaagtcaccgggggcttgcttcgcacaggctcagttcgatttctccgcccaggacccatcacagctgagtttcagacgcggagatattattgaggtcctggagcgacccgatccgcattggtggcgcggtaggtcctgtggacgggtggggttttttcctcgtagctacgtgcagccggtgcatttgtag

SEQ ID NO: 166572 - DNA, 654 bp, Artificial Sequence
  derived and/or modified sequence
atggagtcagtggctctgtactcttttcaggccaccgagtccgacgaacttgccttcaacaagggagataccctcaaaatactgaacatggaggacgatcagaattggtacaaggctgaactacggggtgtcgagggtttcattccgaagaactacattcgcgtaaagcctcacccatggtacagtggtagaattagccgccagctggccgaggaaatcctgatgaagaggaaccatttgggcgcttttctcattagagagtccgagtcttccccaggcgagttctctgtgagcgtgaactatggtgaccaagtacagcatttcaaggtgctaagagaagcatctggcaaatattttctctgggaagaaaagttcaatagcctgaatgaattggtggatttttaccggactactaccatcgctaagaagcggcaaatcttccttcgtgatgaggaacctctactgaaaagccctggagcctgcttcgctcaggcccaattcgacttttccgctcaagaccccagtcagctcagttttagaagaggagacatcattgaagtcctcgagaggcctgatcctcactggtggcgtggcaggagttgtggtcgggtaggcttttttcctcgatcatatgtgcagcctgtgcatttgtag

SEQ ID NO: 166573 - DNA, 2129 bp, Artificial Sequence
  derived and/or modified sequence
gggacagagctggctcacaagccctccctgctctgtgacatgtctgtttcctgtttctcccccatcaggagcagtttcagtctcaacttcaaaagaacaaacgcgcactcaaaacaaaggaagaccgtcctcgactgcagaggaagcaggaagctgtcggcccagctctgagcccagctgctggagccccgagcagcggcatggagtccgtggccctgtacagctttcaggctacagagagcgacgagctggccttcaacaagggagacacactcaagatcctgaacatggaggatgaccagaactggtacaaggccgagctccggggtgtcgagggatttattcccaagaactacatccgcgtcaagccccatccgtggtactcgggcaggatttcccggcagctggccgaagagattctgatgaagcggaaccatctgggagccttcctgatccgggagagtgagagctccccaggggagttctctgtgtctgtgaactatggagaccaggtgcagcacttcaaggtgctgcgtgaggcctcggggaagtacttcctgtgggaggagaagttcaactccctcaacgagctggtcgacttctaccgcaccaccaccatcgccaagaagcggcagatcttcctgcgcgacgaggagcccttgctcaagtcacctggggcctgctttgcccaggcccagtttgacttctcagcccaggacccctcgcagctcagcttccgccgtggcgacatcattgaggtcctggagcgcccagacccccactggtggcggggccggtcctgcgggcgcgttggcttcttcccacggagttacgtgcagcccgtgcacctgtgagcagcccggcggccgatctggccaacgggcctttttacaggaactgaggtccagagaggacatggacacccccagctctgtcagagtcacacggggctcagtggacggccttggactgaacgtgggctcctaactgcctccggccgctctgcacaaactgggatggcccaggtcccccagcaagggtacccagcaagggtagctccggggcttcctggctggttgctttccattggctgccagctgtgtgacaccacagggcggagtctgtggaggccccgcccacctcctcttgtcaatggccccatctgccaggaaggttgaggactcccaggtttcacccactggaggctcaacctaaggaaccctggccatggtgggtgggttcaccttgggctgaccacccactgggcctgcctgcccctccctcaaaaggcccctggagttgttcaggctgttgggaggtggctcagcctcgaaggacagactgcacacctgttgacctaaactcactggacagactccaggtggacaccaactcctcaacagccccatgacttcagctccacctggggcacccagcaccccaccacagggctagaggccctaagaccctgaaaaaggggcgggcagtagggaaggtggaggcacactcctcttctgttggacaggtgagctctgagggcaagccctgggcccagccacgcagagaccctggctgccctggctcttgtttgtttaggcccaggttctgcccagaccggggcccagcagagctctcaggaggctgagaaacctccagggcagacagaaagttggggccagagctaggttttagagatcctacaggatcccacatgggacggctacctaggtggggcacggcccctacccgagaacaggagggtcctccagagaatgtgccatgatcagggatatgagcagggcctgcccagagcctgggcacctttgggagagggaaaagtgaggtgggacttggaaaggctttgaacgccaggctgatggttgagggatggtgggcagggagggagggcgaagaggctccctctggcatttgggagccggtgggtggagggaggagcccttggaggtggctgcagtcccttaatggggggccttgctctgggcatgtggggctcttcctccatccagagctggcccaagacccttagaaccctgagtgctggcaaatctcactgctcctgacccagcctgtgtattcaaaacgaaaacagtaaaaccaacatcaggatg

SEQ ID NO: 166574 - DNA, 654 bp, Artificial Sequence
  derived and/or modified sequence
atggagagcgtggccctgtacagcttccaggccaccgagagcgacgagctggccttcaacaagggcgacaccctgaagatcctgaacatggaggacgaccagaactggtacaaggccgagctgagaggcgtggagggcttcatccccaagaactacatcagagtgaagccccacccctggtacagcggcagaatcagcagacagctggccgaggagatcctgatgaagagaaaccacctgggcgccttcctgatcagagagagcgagagcagccccggcgagttcagcgtgagcgtgaactacggcgaccaggtgcagcacttcaaggtgctgagagaggccagcggcaagtacttcctgtgggaggagaagttcaacagcctgaacgagctggtggacttctacagaaccaccaccatcgccaagaagagacagatcttcctgagagacgaggagcccctgctgaagagccccggcgcctgcttcgcccaggcccagttcgacttcagcgcccaggaccccagccagctgagcttcagaagaggcgacatcatcgaggtgctggagagacccgacccccactggtggagaggcagaagctgcggcagagtgggcttcttccccagaagctacgtgcagcccgtgcacctgtag

SEQ ID NO: 166575 - DNA, 567 bp, Artificial Sequence
  derived and/or modified sequence
atggaggacgaccagaactggtacaaggccgagctgagaggcgtggagggcttcatccccaagaactacatcagagtgaagccccacccctggtacagcggcagaatcagcagacagctggccgaggagatcctgatgaagagaaaccacctgggcgccttcctgatcagagagagcgagagcagccccggcgagttcagcgtgagcgtgaactacggcgaccaggtgcagcacttcaaggtgctgagagaggccagcggcaagtacttcctgtgggaggagaagttcaacagcctgaacgagctggtggacttctacagaaccaccaccatcgccaagaagagacagatcttcctgagagacgaggagcccctgctgaagagccccggcgcctgcttcgcccaggcccagttcgacttcagcgcccaggaccccagccagctgagcttcagaagaggcgacatcatcgaggtgctggagagacccgacccccactggtggagaggcagaagctgcggcagagtgggcttcttccccagaagctacgtgcagcccgtgcacctgtag

SEQ ID NO: 166576 - DNA, 567 bp, Artificial Sequence
  derived and/or modified sequence
atggaggacgatcagaattggtacaaggctgaattacgcggtgtcgaggggtttatacccaagaactacattagggtgaaaccacatccatggtacagtggtagaatttcgaggcagctggccgaagagattctgatgaaacgaaaccatcttggtgcattccttattagggagagcgagtccagcccgggtgagttttcagtgtcggtgaattatggagaccaagtgcagcactttaaagtcctgcgagaagcctcgggaaagtattttctttgggaagagaagtttaactcattaaatgagctggtcgatttttacagaacaacgactatcgccaagaagcggcaaatctttttgcgggatgaagagccgctgttgaagtcccctggtgcctgttttgcccaagctcaatttgatttcagcgcccaagacccgagccaactgtcctttagaagaggagatataattgaggtgctagaaaggccggaccctcactggtggcgcgggcggtcatgcggcagggtcggatttttcccacgctcatacgtgcagccagtgcacctatag

SEQ ID NO: 166577 - DNA, 567 bp, Artificial Sequence
  derived and/or modified sequence
atggaggatgaccagaactggtacaaggccgagctgcggggcgtggagggcttcatccccaagaactacatccgggtgaagccccacccctggtacagcggccgcatcagccggcagctggccgaggagatcctgatgaagaggaaccacctgggcgccttcctgatccgggagagcgagagcagccctggagagttctctgtgtctgtgaactacggggaccaggtgcagcacttcaaggtgctgcgggaggccagcggcaagtacttcctgtgggaggagaagttcaacagcctgaatgagctggtggacttctaccgcaccaccaccatcgccaagaagaggcagatcttcctgagagatgaggagcccctgctgaagagccctggggcctgctttgcccaggcccagtttgacttcagcgcccaggaccccagccagctgtccttcagaagaggagacatcatcgaggtgctggagaggccagacccccactggtggaggggccgcagctgtggccgggtgggcttcttccccaggagctatgtgcagcctgtgcacctgtag

SEQ ID NO: 166578 - DNA, 834 bp, Artificial Sequence
  derived and/or modified sequence
gtctcagaccaaaggcccccttatctgctccccagagcctgacgtccccccactgaattgtcacccctgagctgtctaaatgcgagggaccctaggtgaccactggtggctgtgctcaggccgggtcccccgaccttcaccccaaggctcagtgcgtggcatatcctgaacatggaggatgaccagaactggtacaaggccgagctccggggtgtcgagggatttattcccaagaactacatccgcgtcaagccccatccgtggtactcgggcaggatttcccggcagctggccgaagagattctgatgaagcggaaccatctgggagccttcctgatccgggagagtgagagctccccaggggagttctctgtgtctgtgaactatggagaccaggtgcagcacttcaaggtgctgcgtgaggcctcggggaagtacttcctgtgggaggagaagttcaactccctcaacgagctggtcgacttctaccgcaccaccaccatcgccaagaagcggcagatcttcctgcgcgacgaggagcccttgctcaagtcacctggggcctgctttgcccaggcccagtttgacttctcagcccaggacccctcgcagctcagcttccgccgtggcgacatcattgaggtcctggagcgcccagacccccactggtggcggggccggtcctgcgggcgcgttggcttcttcccacggagttacgtgcagcccgtgcacctgtgagcagcccggcggccgatctggccaacgggcctttttacaggaactgaggtccagagaggacatggacacccccagctctgtcagagtcacacgggg

SEQ ID NO: 166579 - DNA, 567 bp, Artificial Sequence
  derived and/or modified sequence
atggaggacgaccagaactggtacaaggccgagctgcggggcgtggaaggatttattccaaaaaattacattagagtgaaacctcacccttggtactctggcagaattagccgtcagctcgcggaggagatccttatgaagaggaatcatctcggggcattcctcatcagagagtcggagtcatcaccaggggagttttccgtgtctgttaattatggcgatcaagtgcaacatttcaaggtacttcgtgaggctagtggaaaatactttctgtgggaagagaagttcaacagcctgaatgaattggtggatttttataggactaccacaattgccaaaaagcggcaaatcttcctaagggatgaggaaccgctgctgaagtcccctggggcttgctttgcacaggcccagttcgatttctcagcacaagaccccagccaactgagctttcgcaggggtgatattatcgaagtacttgaaaggcccgatcctcattggtggcggggccgcagctgcggccgcgttggtttttttccaagaagctatgttcagcccgtccatctctag

SEQ ID NO: 166580 - DNA, 567 bp, Artificial Sequence
  derived and/or modified sequence
atggaagatgaccaaaactggtataaagcagagttacgcggtgtcgaaggttttattccaaaaaactacatccgggttaagcctcacccttggtattcaggtcggatcagccgccagctggcagaggaaatccttatgaagaggaatcatctcggcgcatttctgattcgggaatcggagagttcgcctggcgagttcagtgtgtctgtcaattacggcgatcaagtgcagcactttaaggttttaagggaagcttcaggaaagtatttcctatgggaggagaagttcaactcattgaacgagctagtggatttttacaggactactaccatcgcaaaaaagagacagatcttcctgcgagatgaggagccgcttctgaagagccccggagcatgttttgcacaggcccagtttgatttctctgcgcaggacccctcccagctgtcctttagacggggagatattattgaggtgctcgaacgtcctgacccacactggtggaggggaaggagctgtggcagagtcgggttcttcccacgatcctacgttcagccagtccatctgtag

SEQ ID NO: 166581 - protein, 690 aa, Artificial Sequence
  derived and/or modified sequence
MPYLYRAPGPQAHPVPKDARITHSSGQSFEQMRQECLQRGTLFEDADFPASNSSLFYSERPQIPFVWKRPGEIVKNPEFILGGATRTDICQGELGDCWLLAAIASLTLNQKALARVIPQDQSFGPGYAGIFHFQFWQHSEWLDVVIDDRLPTFRDRLVFLHSADHNEFWSALLEKAYAKLNGSYEALKGGSAIEAMEDFTGGVAETFQTKEAPENFYEILEKALKRGSLLGCFIDTRSAAESEARTPFGLIKGHAYSVTGIDQVSFRGQRIELIRIRNPWGQVEWNGSWSDSSPEWRSVGPAEQKRLCHTALDDGEFWMAFKDFKAHFDKVEICNLTPDALEEDAIHKWEVTVHQGSWVRGSTAGGCRNFLDTFWTNPQIKLSLTEKDEGQEECSFLVALMQKDRRKLKRFGANVLTIGYAIYECPDKDEHLNKDFFRYHASRARSKTFINLREVSDRFKLPPGEYILIPSTFEPHQEADFCLRIFSEKKAITRDMDGNVDIDLPEPPKPTPPDQETEEEQRFRALFEQVAGEDMEVTAEELEYVLNAVLQKKKDIKFKKLSLISCKNIISLMDTSGNGKLEFDEFKVFWDKLKQWINLFLRFDADKSGTMSTYELRTALKAAGFQLSSHLLQLIVLRYADEELQLDFDDFLNCLVRLENASRVFQALSTKNKEFIHLNINEFIHLTMNI

SEQ ID NO: 166582 - DNA, 2073 bp, Artificial Sequence
  derived and/or modified sequence
atgccttatctctaccgagcgcctggacctcaggcccacccagtacccaaggacgcacgtattacccactcaagcgggcagtcattcgagcagatgcgccaagagtgcctgcagcgtggcacactttttgaggacgcggatttcccggcgagcaatagttcactattttattcagagcggccccaaatcccattcgtttggaaacgcccaggcgagatcgtgaaaaatcccgaatttatcttggggggtgccactcggactgacatttgccaaggagagcttggcgactgctggctgctggccgcaatcgcaagcctgaccctcaatcagaaggcgctggctagggttatcccccaggaccagtcatttggaccaggctacgctggcatcttccattttcagttttggcagcactctgaatggctggacgtcgtgattgacgacagactgcccaccttccgcgataggcttgttttcttacactctgctgatcacaatgaattctggagcgcactcctggagaaggcgtacgctaaactgaacggtagctatgaggcactgaagggagggtccgccattgaggccatggaggactttacagggggcgtggcagaaactttccagactaaggaggcgccagaaaacttctatgagatcctggaaaaggcgcttaaaagagggtctctcctggggtgctttattgacactaggtcggccgcagagtcggaggcgagaaccccatttggcctaatcaaaggacatgcctactccgttacaggtattgaccaagtgagttttcgaggccaaagaatcgaactgattaggatacggaatccctggggacaggtggaatggaacggcagttggtccgactcctccccagagtggcggtcggtgggtcctgcggaacagaagaggctgtgtcacacagcattagatgatggagaattttggatggcctttaaagacttcaaggcccatttcgacaaggttgagatctgtaatttaacacctgacgcccttgaagaggatgcaattcacaaatgggaggtcaccgtacaccaaggctcttgggtgagaggctctaccgccgggggctgtaggaattttctcgatacattttggaccaacccacagattaagctttcactcactgaaaaggatgagggacaagaggagtgctcttttctggtagcactcatgcaaaaagataggagaaaactaaagcggtttggagccaacgtcctcacaatcgggtacgcaatatacgagtgtcctgataaggatgagcacctgaacaaagatttttttcgataccatgcttctcgtgcaaggtcgaagacttttattaatttaagggaggttagcgatcgcttcaagttaccacccggagaatacatcctgattccatctacattcgaacctcaccaggaggctgacttctgccttcgaatcttttctgaaaaaaaggccattacaagggacatggacggaaacgtagacatagacctccccgaacccccgaagcctaccccccccgaccaggagacagaggaggagcagcggtttcgagccttgttcgaacaggttgccggagaggacatggaggtcacagctgaggagctggaatacgtgttgaatgcagttcttcagaaaaaaaaagacattaaatttaagaagcttagcctgataagctgcaagaacattatatctctgatggacaccagtgggaacggcaagcttgaatttgatgaatttaaggtgttctgggacaaattgaaacagtggatcaatcttttcctcaggtttgatgcagataaatcaggcaccatgagcacttacgagctccgaactgctctcaaggcggccggtttccagctctcctcacacttgctacagctcatagttctcagatatgcagacgaagagttacaactggacttcgacgatttcctcaactgcttggttaggctagagaacgcctctagggtatttcaggctctgagcacaaaaaataaagaattcattcatctgaacataaatgagttcatccacctgacaatgaatatttag

SEQ ID NO: 166583 - DNA, 2073 bp, Artificial Sequence
  derived and/or modified sequence
atgccctacctgtaccgggcccctggcccccaggcccaccctgtgcccaaggatgcccgcatcacccacagcagcggccagagctttgagcagatgaggcaggagtgcctgcagaggggcaccctgtttgaagatgctgacttccctgccagcaacagcagcctcttctacagcgagcggccccagatcccctttgtgtggaagaggcctggagaaattgtgaagaaccctgagttcatcctgggcggggccaccaggacagacatctgccagggcgagctgggggactgctggctgctggccgccatcgccagcctgaccctgaaccagaaggccctggcccgggtcatcccccaggaccagagctttggacctggctacgccggcatcttccacttccagttctggcagcacagcgagtggctggatgtggtgattgatgaccggctgcccaccttccgggaccggctggtgttcctgcacagcgctgaccacaatgagttctggagcgccctgctggagaaggcctatgccaagctgaatggcagctatgaggccctgaagggcggcagcgccatcgaggccatggaggacttcaccggcggcgtggccgagaccttccagaccaaggaggcccctgagaacttctatgagatcctggagaaggccctgaagaggggcagcctgctgggctgcttcatcgacaccaggtctgctgctgagagcgaggcccggacccccttcggcctcatcaagggccacgcctacagcgtgactggaattgaccaggtgtccttccggggccagagaattgagctgatccgcatccggaacccctggggccaggtggagtggaatggctcctggagcgacagcagccctgagtggaggtctgtgggccctgctgagcagaagaggctgtgccacacagccctggatgatggagagttctggatggccttcaaggacttcaaggcccactttgacaaggtggagatctgcaacctgaccccagatgccctggaggaggatgccatccacaagtgggaggtgacagtgcaccagggctcctgggtgcggggcagcacagctgggggctgcaggaacttcctggacaccttctggaccaacccccagatcaagctgagcctgacagagaaggatgagggccaggaggagtgcagcttcctggtggccctgatgcagaaggacaggaggaagctgaagagatttggagccaacgtgctgaccatcggctacgccatctatgagtgcccagacaaggatgagcacctgaacaaggacttcttccgctaccacgccagccgggcccggagcaagaccttcatcaacctgcgggaggtgtctgaccgcttcaagctgcccccaggagagtacatcctgatccccagcacctttgagccccaccaggaggccgacttctgcctgcgcatcttcagcgagaagaaggccatcacccgggacatggatggaaatgtggacatcgacctgcctgagccccccaagcccaccccaccagaccaggagacagaggaggagcagcgcttccgggccctgtttgagcaggtggccggggaggacatggaggtgacagctgaggagctggagtatgtgctgaatgctgtgctgcagaagaagaaggacatcaagttcaagaagctgagcctcatcagctgcaagaacatcatcagcctgatggacaccagcggaaatggcaagctggagtttgatgagttcaaggtgttctgggacaagctgaagcagtggatcaacctcttcctgcgctttgatgctgacaagagcggcaccatgagcacctatgagctgaggacagccctgaaggctgctggcttccagctgagcagccacctgctgcagctgattgtgctgcgctatgcagatgaggagctgcagctggactttgatgacttcctgaactgcctggtgcggctggagaatgccagcagggtcttccaggccctgagcaccaagaacaaggagttcatccacctgaacatcaatgagttcatccacctgaccatgaacatctag

SEQ ID NO: 166584 - DNA, 2073 bp, Artificial Sequence
  derived and/or modified sequence
atgccctacctgtaccgggcccccggcccccaggcccaccccgtgccgaaagatgctagaattactcacagcagtggacaaagcttcgagcagatgcgtcaggagtgtcttcagcgaggtactctgtttgaggacgcagattttcccgccagcaacagtagtctgttctactcagaaaggccacagattccctttgtttggaagagaccgggtgaaattgttaaaaacccagagttcatcctgggtggagctacccggaccgatatctgtcagggtgaactgggggattgctggctccttgctgcaatcgcctctctaacattgaatcagaaagcactcgcccgcgtgattccacaggaccaaagctttggacctggatacgccggtatcttccattttcagttttggcagcatagtgaatggctggatgtggttattgacgaccggcttcccacattccgggatagactggtcttcctccattcagctgaccataacgaattttggtctgcccttctggagaaagcttacgccaagctgaacggcagctacgaagcgttgaagggtgggagtgccattgaggcaatggaagattttactggtggagtggctgagactttccagactaaagaagcacccgaaaatttttatgaaattcttgagaaggccttaaagcgaggaagtttactgggctgctttattgacactagatcagctgccgagtcggaggccagaactccattcggccttattaaaggccacgcatatagcgtaacaggcatcgaccaggtgtccttcagggggcagaggattgaattgatcagaatcaggaacccgtggggccaagtggagtggaatggatcctggagcgacagctccccggagtggaggagcgttggcccagctgagcagaagcgcctttgccacaccgccctggacgatggcgaattctggatggcattcaaggacttcaaggcgcacttcgataaggtggagatctgtaatctcactccagacgctctcgaggaggatgccattcacaaatgggaagtaacagtccaccagggctcttgggtgaggggatccaccgctggtggttgtcgcaacttcctcgacactttttggaccaacccacagattaagctgtctctgaccgaaaaggatgaaggacaggaagaatgctcttttctggtcgctcttatgcaaaaagacagaagaaagctgaagagatttggcgctaacgtgttaactataggatacgccatctacgaatgcccggataaagatgagcatctgaacaaagatttcttccggtatcacgcgagcagggcgcgttctaagactttcataaacctccgggaagtgtctgataggttcaaactgcctcccggcgaatatattctaatcccaagtaccttcgagcctcaccaggaggcagacttctgtctccggatcttcagcgagaagaaggctatcaccagggacatggacggcaacgtggacatagacctgcctgaacctcctaaaccgacgccccccgaccaggaaaccgaagaggagcagagattccgggcgttgttcgaacaggtggccggagaggacatggaagtaacagcagaggaactagaatacgtcctgaacgcagttctgcagaagaagaaggacattaaatttaaaaagttgagcctgatatcatgcaaaaatatcattagccttatggacacttccggcaacgggaaacttgagttcgatgaatttaaggtgttctgggacaagctgaagcagtggataaatctgtttttacggttcgacgctgataagagcggcactatgtctacgtacgagctgcggacagctctgaaggctgcagggttccaactgagctcgcacttacttcagctaattgtgctgagatatgccgacgaggagctgcagctcgatttcgatgatttccttaactgcttggtaagacttgagaatgcgagtcgggtttttcaggccctgagcacaaaaaataaggagtttattcacctgaacatcaacgaatttatccacctcactatgaacatctag

SEQ ID NO: 166585 - DNA, 2073 bp, Artificial Sequence
  derived and/or modified sequence
atgccatatctgtaccgggcacctggcccacaggcccatcctgtgcctaaagacgcaagaatcacgcattcaagtggacaatcctttgagcagatgagacaggaatgcctgcagcgcggaaccctcttcgaggatgctgatttccccgcttccaattcctctctcttctatagtgagaggccccagattccgttcgtttggaaaagaccaggcgagatcgtcaaaaatcctgaattcattctagggggagctacccgaacagacatttgccaaggcgagctgggcgactgttggttgctcgccgcaattgctagtctgacacttaatcagaaagcattggcccgagttattccccaggaccaaagcttcggcccaggctacgccggaattttccattttcaattctggcagcactccgagtggctggacgtggtaattgatgaccgattacccacgtttcgggataggttggtatttctgcacagcgccgaccataacgaattttggagtgcactgctcgaaaaagcctatgccaagttgaatggatcatatgaggcattgaagggagggtctgctatcgaggccatggaggacttcactggtggagtggcagagacctttcagactaaggaggcccctgagaatttctatgagatcttagaaaaggccctcaaacggggatctctgttaggatgctttatagacacgcggagtgcagcagagagcgaagccagaacacctttcggattaataaaggggcacgcatacagtgtgaccggtatcgatcaggtgagttttagaggtcagaggattgagctaatccgcattcgaaacccttggggtcaggtggagtggaacgggtcctggtctgacagttccccagagtggaggtcagtgggaccagccgagcagaaaagactctgccacaccgccttagatgatggcgagttctggatggctttcaaggacttcaaagcccattttgataaagtggagatctgtaatttgacccctgacgctcttgaagaggatgccattcataagtgggaggttactgtgcatcagggaagctgggtccgagggtctaccgctggaggctgcagaaactttttggacacattctggacgaatcctcagatcaaactgtccctgacagaaaaagatgaggggcaagaagaatgctcctttctggtagcgctgatgcagaaagacaggcgtaagctgaaacggttcggagctaatgtccttacaataggatatgccatctacgagtgtccggataaagacgaacacttaaataaagatttcttcaggtaccatgcttctagagcgaggagcaagacatttataaacctacgtgaggtcagcgatcggttcaagcttccaccaggagaatatatcctcataccgtctacctttgagcctcatcaggaagcagatttctgcctccggatcttcagcgaaaagaaagcgattacgcgggacatggacggaaatgttgacattgatttgcctgagccacccaaacccacacctcccgatcaagagaccgaagaagaacagaggttcagggcgctgttcgaacaggtggctggcgaagatatggaagtcacagcggaagagttagagtacgtcttgaacgctgtgttacagaagaaaaaggacatcaaatttaagaagctctcccttatcagctgtaaaaacattatctcgctgatggatacgtctggcaacggaaagctcgagttcgacgagttcaaagttttttgggataagcttaaacaatggataaacctgtttcttcgcttcgatgcagacaagtctggaaccatgtccacctacgagctgcggaccgcgctcaaagccgcagggtttcagctgtcatcccacctccttcagctgattgtgctccgctacgcagatgaggaattgcagctagatttcgatgactttttgaattgcttggtaaggctggaaaatgcatccagagtgttccaggccctgagcactaagaacaaagagttcatccacctaaacatcaatgagttcattcacctgaccatgaacatctag

SEQ ID NO: 166586 - DNA, 2362 bp, Artificial Sequence
  derived and/or modified sequence
actcagcccagtggccctctgagctgttccttcttgaccggcacacacagctcgcttcttcactttcttttccatccactgccggacccaagccagccttccagggagcagccatgccttacctctaccgggccccagggcctcaggcacacccggttcccaaggacgcccggatcacccactcctcaggccagagctttgagcaaatgaggcaggagtgcctgcagagaggcaccctgtttgaggatgcagacttcccagccagcaattcctccctgttctacagtgagaggccgcagatcccctttgtgtggaaacgaccaggggaaatcgtgaaaaacccagaattcattcttggaggggccaccaggactgatatctgccagggagagctgggagactgctggctattagccgccatcgcctcccttacgcttaatcaaaaagcactggccagagtcatcccccaggaccaaagctttggccctggttatgccgggatattccatttccagttctggcagcacagtgagtggctggacgtggtgatcgatgaccgcctgcccaccttcagggaccgcttggttttcctccactctgccgaccacaacgagttctggagcgccttgctggaaaaagcctacgccaagctaaatgggagctatgaagctctgaagggaggcagcgccatcgaggccatggaagacttcactgggggtgtggcagagaccttccaaactaaagaggcccccgagaacttctatgagattctagagaaggctttgaagagaggctccctgctgggctgcttcattgataccagaagtgctgcagaatctgaggcccggacgccgtttggtcttattaagggtcatgcctacagtgtaacgggaattgaccaggtaagcttccgaggccagagaatcgagctcatccgaatccggaacccttggggccaggttgagtggaacgggtcgtggagcgacagttctccggagtggcgttctgttggtccagctgagcagaagcgtctgtgtcacactgctctggatgatggggaattctggatggcatttaaggacttcaaggcccactttgataaagtggagatctgcaacctcactcccgatgccctggaggaagacgcgatccacaaatgggaggtgacggtccatcagggaagctgggttcgcggctccacggctgggggctgccgcaatttcctggataccttttggaccaatccacaaataaaattgtctctgactgagaaagatgaggggcaggaggagtgtagtttccttgtagccctgatgcagaaagatagaaggaaactcaagagatttggtgccaatgtgctgacaatcggctatgccatttatgagtgccctgacaaagacgaacacctgaacaaagacttcttcagataccacgcttctcgggccagaagcaagacgttcatcaacctgagagaagtctccgaccggttcaagctgccccctggggagtacatcctgattcccagcacttttgagccccaccaggaagctgatttctgtctgagaatcttttcagagaaaaaagccattacccgggatatggatggaaatgtagacattgaccttcctgagcctccaaagccaactccacctgaccaggagacagaggaggagcagcggtttcgggctctgtttgaacaagtcgctggtgaggacatggaggtgacagcagaggaacttgagtatgttttaaatgctgtgctgcaaaagaaaaaggacatcaaattcaagaagctaagcctgatctcctgtaaaaacatcatttccctgatggacaccagcggcaatgggaagctggagtttgatgaattcaaagtgttctgggacaagctgaagcagtggattaaccttttccttcggtttgatgctgacaagtccggcaccatgtctacctatgaactacggactgcactgaaagctgcaggctttcagctgagcagccacctcctgcagctgattgtgctcaggtatgcggatgaggagctccagctggacttcgatgacttcctcaactgcctggtccggctggagaatgcgagccgggtgttccaggctctcagtacaaagaacaaggagttcattcatctcaatataaatgagttcatccatttgacaatgaacatctgaggctgccttgtagagatgcagcctgcccagctgaatcttggcttctggaccttgaccttcagaacttctcttggtgtggaaccattacgcccagggttcactcccctctcatcgtccggccttctcccttcatcttgatctgggaagaatgaaatgaactcagctacactctctga

SEQ ID NO: 166587 - DNA, 2073 bp, Artificial Sequence
  derived and/or modified sequence
atgccctacctgtacagagcccccggcccccaggcccaccccgtgcccaaggacgccagaatcacccacagcagcggccagagcttcgagcagatgagacaggagtgcctgcagagaggcaccctgttcgaggacgccgacttccccgccagcaacagcagcctgttctacagcgagagaccccagatccccttcgtgtggaagagacccggcgagatcgtgaagaaccccgagttcatcctgggcggcgccaccagaaccgacatctgccagggcgagctgggcgactgctggctgctggccgccatcgccagcctgaccctgaaccagaaggccctggccagagtgatcccccaggaccagagcttcggccccggctacgccggcatcttccacttccagttctggcagcacagcgagtggctggacgtggtgatcgacgacagactgcccaccttcagagacagactggtgttcctgcacagcgccgaccacaacgagttctggagcgccctgctggagaaggcctacgccaagctgaacggcagctacgaggccctgaagggcggcagcgccatcgaggccatggaggacttcaccggcggcgtggccgagaccttccagaccaaggaggcccccgagaacttctacgagatcctggagaaggccctgaagagaggcagcctgctgggctgcttcatcgacaccagaagcgccgccgagagcgaggccagaacccccttcggcctgatcaagggccacgcctacagcgtgaccggcatcgaccaggtgagcttcagaggccagagaatcgagctgatcagaatcagaaacccctggggccaggtggagtggaacggcagctggagcgacagcagccccgagtggagaagcgtgggccccgccgagcagaagagactgtgccacaccgccctggacgacggcgagttctggatggccttcaaggacttcaaggcccacttcgacaaggtggagatctgcaacctgacccccgacgccctggaggaggacgccatccacaagtgggaggtgaccgtgcaccagggcagctgggtgagaggcagcaccgccggcggctgcagaaacttcctggacaccttctggaccaacccccagatcaagctgagcctgaccgagaaggacgagggccaggaggagtgcagcttcctggtggccctgatgcagaaggacagaagaaagctgaagagattcggcgccaacgtgctgaccatcggctacgccatctacgagtgccccgacaaggacgagcacctgaacaaggacttcttcagataccacgccagcagagccagaagcaagaccttcatcaacctgagagaggtgagcgacagattcaagctgccccccggcgagtacatcctgatccccagcaccttcgagccccaccaggaggccgacttctgcctgagaatcttcagcgagaagaaggccatcaccagagacatggacggcaacgtggacatcgacctgcccgagccccccaagcccaccccccccgaccaggagaccgaggaggagcagagattcagagccctgttcgagcaggtggccggcgaggacatggaggtgaccgccgaggagctggagtacgtgctgaacgccgtgctgcagaagaagaaggacatcaagttcaagaagctgagcctgatcagctgcaagaacatcatcagcctgatggacaccagcggcaacggcaagctggagttcgacgagttcaaggtgttctgggacaagctgaagcagtggatcaacctgttcctgagattcgacgccgacaagagcggcaccatgagcacctacgagctgagaaccgccctgaaggccgccggcttccagctgagcagccacctgctgcagctgatcgtgctgagatacgccgacgaggagctgcagctggacttcgacgacttcctgaactgcctggtgagactggagaacgccagcagagtgttccaggccctgagcaccaagaacaaggagttcatccacctgaacatcaacgagttcatccacctgaccatgaacatctag

SEQ ID NO: 166588 - protein, 593 aa, Artificial Sequence
  derived and/or modified sequence
MEGCMGEESFQMWELNRRLEAYLARVKALEEQNELLSAELGGLRAQSADTSWRAHADDELAALRALVDQRWREKHAAEVARDNLAEELEGVAGRCQQLRLARERTTEEVARNRRAVEAEKCARAWLSSQVAELERELEALRVAHEEERVGLNAQAACAPRCPAPPRGPPAPAPEVEELARRLGEAWRGAVRGYQERVAHMETSLGQARERLGRAVQGAREGRLELQQLQAERGGLLERRAALEQRLEGRWQERLRATEKFQLAVEALEQEKQGLQSQIAQVLEGRQQLAHLKMSLSLEVATYRTLLEAENSRLQTPGGGSKTSLSFQDPKLELQFPRTPEGRRLGSLLPVLSPTSLPSPLPATLETPVPAFLKNQEFLQARTPTLASTPIPPTPQAPSPAVDAEIRAQDAPLSLLQTQGGRKQAPEPLRAEARVAIPASVLPGPEEPGGQRQEASTGQSPEDHASLAPPLSPDHSSLEAKDGESGGSRVFSICRGEGEGQIWGLVEKETAIEGKVVSSLQQEIWEEEDLNRKEIQDSQVPLEKETLKSLGEEIQESLKTLENQSHETLERENQECPRSLEEDLETLKSLEKKK

SEQ ID NO: 166589 - protein, 1621 aa, Artificial Sequence
  derived and/or modified sequence
MEGCMGEESFQMWELNRRLEAYLARVKALEEQNELLSAELGGLRAQSADTSWRAHADDELAALRALVDQRWREKHAAEVARDNLAEELEGVAGRCQQLRLARERTTEEVARNRRAVEAEKCARAWLSSQVAELERELEALRVAHEEERVGLNAQAACAPRCPAPPRGPPAPAPEVEELARRLGEAWRGAVRGYQERVAHMETSLGQARERLGRAVQGAREGRLELQQLQAERGGLLERRAALEQRLEGRWQERLRATEKFQLAVEALEQEKQGLQSQIAQVLEGRQQLAHLKMSLSLEVATYRTLLEAENSRLQTPGGGSKTSLSFQDPKLELQFPRTPEGRRLGSLLPVLSPTSLPSPLPATLETPVPAFLKNQEFLQARTPTLASTPIPPTPQAPSPAVDAEIRAQDAPLSLLQTQGGRKQAPEPLRAEARVAIPASVLPGPEEPGGQRQEASTGQSPEDHASLAPPLSPDHSSLEAKDGESGGSRVFSICRGEGEGQIWGLVEKETAIEGKVVSSLQQEIWEEEDLNRKEIQDSQVPLEKETLKSLGEEIQESLKTLENQSHETLERENQECPRSLEEDLETLKSLEKENKELLKDVEVVRPLEKEAVGQLKPTGKEDTQTLQSLQKENQELMKSLEGNLETFLFPGTENQELVSSLQENLESLTALEKENQEPLRSPEVGDEEALRPLTKENQEPLRSLEDENKEAFRSLEKENQEPLKTLEEEDQSIVRPLETENHKSLRSLEEQDQETLRTLEKETQQRRRSLGEQDQMTLRPPEKVDLEPLKSLDQEIARPLENENQEFLKSLKEESVEAVKSLETEILESLKSAGQENLETLKSPETQAPLWTPEEINQGAMNPLEKEIQEPLESVEVNQETFRLLEEENQESLRSLGAWNLENLRSPEEVDKESQRNLEEEENLGKGEYQESLRSLEEEGQELPQSADVQRWEDTVEKDQELAQESPPGMAGVENEDEAELNLREQDGFTGKEEVVEQGELNATEEVWIPGEGHPESPEPKEQRGLVEGASVKGGAEGLQDPEGQSQQVGAPGLQAPQGLPEAIEPLVEDDVAPGGDQASPEVMLGSEPAMGESAAGAEPGPGQGVGGLGDPGHLTREEVMEPPLEEESLEAKRVQGLEGPRKDLEEAGGLGTEFSELPGKSRDPWEPPREGREESEAEAPRGAEEAFPAETLGHTGSDAPSPWPLGSEEAEEDVPPVLVSPSPTYTPILEDAPGPQPQAEGSQEASWGVQGRAEALGKVESEQEELGSGEIPEGPQEEGEESREESEEDELGETLPDSTPLGFYLRSPTSPRWDPTGEQRPPPQGETGKEGWDPAVLASEGLEAPPSEKEEGEEGEEECGRDSDLSEEFEDLGTEAPFLPGVPGEVAEPLGQVPQLLLDPAAWDRDGESDGFADEEESGEEGEEDQEEGREPGAGRWGPGSSVGSLQALSSSQRGEFLESDSVSVSVPWDDSLRGAVAGAPKTALETESQDSAEPSGSEEESDPVSLEREDKVPGPLEIPSGMEDAGPGADIIGVNGQGPNLEGKSQHVNGGVMNGLEQSEEVGQGMPLVSEGDRGSPFQEEEGSALKTSWAGAPVHLGQGQFLKFTQREGDRESWSSGED

SEQ ID NO: 166590 - DNA, 4866 bp, Artificial Sequence
  derived and/or modified sequence
atggagggctgcatgggcgaggagagcttccagatgtgggagctgaacagaagactggaggcctacctggccagagtgaaggccctggaggagcagaacgagctgctgagcgccgagctgggcggcctgagagcccagagcgccgacaccagctggagagcccacgccgacgacgagctggccgccctgagagccctggtggaccagagatggagagagaagcacgccgccgaggtggccagagacaacctggccgaggagctggagggcgtggccggcagatgccagcagctgagactggccagagagagaaccaccgaggaggtggccagaaacagaagagccgtggaggccgagaagtgcgccagagcctggctgagcagccaggtggccgagctggagagagagctggaggccctgagagtggcccacgaggaggagagagtgggcctgaacgcccaggccgcctgcgcccccagatgccccgccccccccagaggcccccccgcccccgcccccgaggtggaggagctggccagaagactgggcgaggcctggagaggcgccgtgagaggctaccaggagagagtggcccacatggagaccagcctgggccaggccagagagagactgggcagagccgtgcagggcgccagagagggcagactggagctgcagcagctgcaggccgagagaggcggcctgctggagagaagagccgccctggagcagagactggagggcagatggcaggagagactgagagccaccgagaagttccagctggccgtggaggccctggagcaggagaagcagggcctgcagagccagatcgcccaggtgctggagggcagacagcagctggcccacctgaagatgagcctgagcctggaggtggccacctacagaaccctgctggaggccgagaacagcagactgcagacccccggcggcggcagcaagaccagcctgagcttccaggaccccaagctggagctgcagttccccagaacccccgagggcagaagactgggcagcctgctgcccgtgctgagccccaccagcctgcccagccccctgcccgccaccctggagacccccgtgcccgccttcctgaagaaccaggagttcctgcaggccagaacccccaccctggccagcacccccatcccccccaccccccaggcccccagccccgccgtggacgccgagatcagagcccaggacgcccccctgagcctgctgcagacccagggcggcagaaagcaggcccccgagcccctgagagccgaggccagagtggccatccccgccagcgtgctgcccggccccgaggagcccggcggccagagacaggaggccagcaccggccagagccccgaggaccacgccagcctggccccccccctgagccccgaccacagcagcctggaggccaaggacggcgagagcggcggcagcagagtgttcagcatctgcagaggcgagggcgagggccagatctggggcctggtggagaaggagaccgccatcgagggcaaggtggtgagcagcctgcagcaggagatctgggaggaggaggacctgaacagaaaggagatccaggacagccaggtgcccctggagaaggagaccctgaagagcctgggcgaggagatccaggagagcctgaagaccctggagaaccagagccacgagaccctggagagagagaaccaggagtgccccagaagcctggaggaggacctggagaccctgaagagcctggagaaggagaacaaggagctgctgaaggacgtggaggtggtgagacccctggagaaggaggccgtgggccagctgaagcccaccggcaaggaggacacccagaccctgcagagcctgcagaaggagaaccaggagctgatgaagagcctggagggcaacctggagaccttcctgttccccggcaccgagaaccaggagctggtgagcagcctgcaggagaacctggagagcctgaccgccctggagaaggagaaccaggagcccctgagaagccccgaggtgggcgacgaggaggccctgagacccctgaccaaggagaaccaggagcccctgagaagcctggaggacgagaacaaggaggccttcagaagcctggagaaggagaaccaggagcccctgaagaccctggaggaggaggaccagagcatcgtgagacccctggagaccgagaaccacaagagcctgagaagcctggaggagcaggaccaggagaccctgagaaccctggagaaggagacccagcagagaagaagaagcctgggcgagcaggaccagatgaccctgagaccccccgagaaggtggacctggagcccctgaagagcctggaccaggagatcgccagacccctggagaacgagaaccaggagttcctgaagagcctgaaggaggagagcgtggaggccgtgaagagcctggagaccgagatcctggagagcctgaagagcgccggccaggagaacctggagaccctgaagagccccgagacccaggcccccctgtggacccccgaggagatcaaccagggcgccatgaaccccctggagaaggagatccaggagcccctggagagcgtggaggtgaaccaggagaccttcagactgctggaggaggagaaccaggagagcctgagaagcctgggcgcctggaacctggagaacctgagaagccccgaggaggtggacaaggagagccagagaaacctggaggaggaggagaacctgggcaagggcgagtaccaggagagcctgagaagcctggaggaggagggccaggagctgccccagagcgccgacgtgcagagatgggaggacaccgtggagaaggaccaggagctggcccaggagagcccccccggcatggccggcgtggagaacgaggacgaggccgagctgaacctgagagagcaggacggcttcaccggcaaggaggaggtggtggagcagggcgagctgaacgccaccgaggaggtgtggatccccggcgagggccaccccgagagccccgagcccaaggagcagagaggcctggtggagggcgccagcgtgaagggcggcgccgagggcctgcaggaccccgagggccagagccagcaggtgggcgcccccggcctgcaggccccccagggcctgcccgaggccatcgagcccctggtggaggacgacgtggcccccggcggcgaccaggccagccccgaggtgatgctgggcagcgagcccgccatgggcgagagcgccgccggcgccgagcccggccccggccagggcgtgggcggcctgggcgaccccggccacctgaccagagaggaggtgatggagccccccctggaggaggagagcctggaggccaagagagtgcagggcctggagggccccagaaaggacctggaggaggccggcggcctgggcaccgagttcagcgagctgcccggcaagagcagagacccctgggagccccccagagagggcagagaggagagcgaggccgaggcccccagaggcgccgaggaggccttccccgccgagaccctgggccacaccggcagcgacgcccccagcccctggcccctgggcagcgaggaggccgaggaggacgtgccccccgtgctggtgagccccagccccacctacacccccatcctggaggacgcccccggcccccagccccaggccgagggcagccaggaggccagctggggcgtgcagggcagagccgaggccctgggcaaggtggagagcgagcaggaggagctgggcagcggcgagatccccgagggcccccaggaggagggcgaggagagcagagaggagagcgaggaggacgagctgggcgagaccctgcccgacagcacccccctgggcttctacctgagaagccccaccagccccagatgggaccccaccggcgagcagagaccccccccccagggcgagaccggcaaggagggctgggaccccgccgtgctggccagcgagggcctggaggccccccccagcgagaaggaggagggcgaggagggcgaggaggagtgcggcagagacagcgacctgagcgaggagttcgaggacctgggcaccgaggcccccttcctgcccggcgtgcccggcgaggtggccgagcccctgggccaggtgccccagctgctgctggaccccgccgcctgggacagagacggcgagagcgacggcttcgccgacgaggaggagagcggcgaggagggcgaggaggaccaggaggagggcagagagcccggcgccggcagatggggccccggcagcagcgtgggcagcctgcaggccctgagcagcagccagagaggcgagttcctggagagcgacagcgtgagcgtgagcgtgccctgggacgacagcctgagaggcgccgtggccggcgcccccaagaccgccctggagaccgagagccaggacagcgccgagcccagcggcagcgaggaggagagcgaccccgtgagcctggagagagaggacaaggtgcccggccccctggagatccccagcggcatggaggacgccggccccggcgccgacatcatcggcgtgaacggccagggccccaacctggagggcaagagccagcacgtgaacggcggcgtgatgaacggcctggagcagagcgaggaggtgggccagggcatgcccctggtgagcgagggcgacagaggcagccccttccaggaggaggagggcagcgccctgaagaccagctgggccggcgcccccgtgcacctgggccagggccagttcctgaagttcacccagagagagggcgacagagagagctggagcagcggcgaggactag

SEQ ID NO: 166591 - DNA, 1782 bp, Artificial Sequence
  derived and/or modified sequence
atggaaggctgcatgggagaggagagcttccagatgtgggaactgaatcgaagacttgaggcatatttggctagagtaaaggctcttgaagagcaaaatgaactcctgagcgccgagcttggcggcctccgagcgcagtctgccgatacgtcttggcgagctcacgctgacgacgaactggctgctcttcgtgccctggtggaccagaggtggagagaaaaacacgcagccgaagtggcgagggataatctggcggaggaactagagggagtagcagggcgctgtcagcagctgcgactcgctagagaacgtacaacagaggaggtagccaggaaccgccgtgctgtggaggccgagaagtgtgctcgggcttggctttcctctcaggtagcagaactcgagagggaattggaggctctccgtgtggctcatgaagaggaacgcgtcggattgaacgcgcaggcagcctgcgctccaaggtgtcccgcacccccccgtggccctcctgctccagcccctgaagtcgaagagctcgcaaggcggctgggtgaagcttggcggggcgcggtcagaggctaccaggagcgggtggctcacatggagactagcctggggcaagcaagggaaaggctcggacgtgcagtgcagggcgctcgggaggggcgcctcgagctacagcagcttcaggcagaacggggagggctgttggagaggagagccgcacttgagcagagacttgagggaaggtggcaggagagactacgcgcgaccgaaaagtttcaattggcggttgaagctttagagcaggagaagcagggcctgcagtctcagatcgcacaggtcctggaagggcggcaacagttagcccacctcaagatgtcgctaagcctcgaggtggccacatatcgcactctgctggaagcagaaaactctcggcttcaaacaccagggggaggcagtaagacctctttgagctttcaggaccccaagcttgaactgcagtttcctcgtacgcccgaagggcgacgtctcgggagtcttctgcctgtcctaagccccaccagcctgccctcaccgctgcccgccaccttagagactcctgtgccagctttcctgaagaaccaagaattcttacaggctcgcacgccaacactggcgtctacaccaatcccccctactccccaggccccatcccccgcggtcgacgctgagatacgcgctcaggatgccccgctgtccttacttcagactcaaggcggtcgaaaacaggcccccgagccacttcgcgctgaggcccgggtcgccattccagcaagcgtgctccccggccccgaggaaccagggggacagcgtcaggaggcgagtaccggtcagtcccctgaagaccacgctagtcttgcgcctccactgtcaccagaccactcctccttggaggccaaagacggtgaatctggcgggagtcgggtattcagcatttgccgcggtgaaggagaaggtcaaatctgggggttggtggaaaaggagacagctatcgagggtaaagtggtgagctccttgcaacaggagatctgggaggaagaagacctcaaccgaaaagaaattcaggactcgcaggtccccctagagaaggagacactcaagtcattgggcgaggagattcaggaatccctgaagacattagaaaaccagtcccatgagacactggaacgggagaatcaggagtgtcctcgctcactcgaagaagatctggaaacactcaagtcgctggaaaagaagaagtag

SEQ ID NO: 166592 - DNA, 4866 bp, Artificial Sequence
  derived and/or modified sequence
atggaggggtgcatgggggaagaatctttccaaatgtgggaattgaaccgcaggctcgaggcctaccttgcccgcgtcaaggcgttagaggagcagaacgaactgctgagcgccgaacttgggggtctgcgtgcacagtccgctgatacgagttggcgggctcatgcagatgacgaattagcagccttgagggctttagtcgatcagaggtggcgggaaaagcacgcagcagaagtagcacgtgataacttggcggaagaactagagggagtagccgggcggtgtcagcagttgcggctggctagagaaaggacaacggaggaagttgctaggaaccggcgcgctgtcgaagcggagaaatgtgctcgcgcctggctttcctcacaggtggcagagctggagcgagaactggaagcactccgcgtcgcgcacgaggaggaacgggtagggctgaatgcacaggccgcctgtgcccctaggtgtcccgctcctcctcgcgggccacccgcccccgcgcccgaggtcgaagaactggcccgccgtctcggtgaggcctggcgcggcgcggtgagagggtatcaggaaagggtggcacatatggaaacatcgttaggccaagcccgtgaacgcctcggtcgtgcagtgcagggggcccgtgaggggaggctggaactgcagcaactccaggcggaaagaggaggcctacttgaaagaagggccgccctggaacagcggctggaaggtcgctggcaggagcgacttagagcaacagagaagtttcagctggcagttgaagcattagagcaggagaagcaaggtcttcaatcgcagattgctcaggttctcgaggggcggcaacagttggcacacctgaagatgagcctgagtctcgaggtggccacctaccgcacactgttggaagcggagaactctcggctgcaaactccgggcggaggaagcaagaccagcctgagcttccaagatccaaagttagaacttcagtttcctcgaacacctgaaggccgcagactcggtagccttctccccgtgttgagcccaaccagtcttcctagccctctccctgccacgctcgagacacccgtgcccgccttcttgaaaaatcaagagttcctccaagctaggaccccaacattagcctccaccccaatccccccaactccccaggcgccctctcccgcggtggatgccgagatccgagcccaggatgcaccgctctctctcttgcagactcagggaggccgcaaacaggccccggaacccctcagggcagaagcccgagtcgccattcccgcctctgtgctccctggaccggaggaacccggagggcagagacaggaagcttcaacaggccagtctccagaggaccacgcctcacttgccccgcccctatcacctgaccactcctctctcgaagccaaggacggtgaaagcggcgggtcccgagtgttttctatctgccggggcgagggagaggggcagatttggggtctcgtggagaaagagacagccattgagggtaaagttgtctcatcactacagcaggagatttgggaggaagaggaccttaaccgcaaagagattcaggattcacaggtaccactggaaaaagaaacactgaaaagtctcggagaagagattcaagagtctttgaaaaccctggaaaaccaatcccacgagaccctagaacgggaaaatcaggagtgcccaaggagcctcgaggaggatctagagaccctgaagagccttgagaaagaaaacaaagaactgctgaaagatgtcgaagtggtccgtccccttgaaaaagaggctgttggtcagctgaagccgacaggcaaggaggacactcaaaccctgcagagtttacaaaaagagaaccaggagcttatgaaatcacttgagggaaacctggaaaccttcctgtttccaggaacggagaatcaggaattagtttcatctctgcaggagaatctcgagtcactgaccgctctcgagaaggagaatcaggagcccctccgatcccctgaggtcggcgacgaagaggcattacggccactcacaaaggagaaccaggagccgctccggtccctcgaggacgaaaacaaagaggctttccgtagtctggagaaagaaaatcaggaaccactgaagacccttgaggaagaggatcaaagcatcgttcgtccactggaaactgagaaccataaatctctgcgctcactggaagagcaagatcaggagaccctcagaacactcgaaaaggaaacacaacagagacggcggtccctgggcgaacaggaccaaatgacactgagaccaccagagaaggtcgacctggagcccctgaaatcactcgatcaggagatcgctcggccgctggagaacgaaaatcaggaatttctcaaatcactgaaagaagagtccgtggaggctgtgaagtcacttgagactgagatcctggagagcctcaagtcggcaggtcaggaaaatctagaaacccttaagtctcccgaaacccaggccccactttggacgcccgaggaaatcaatcagggggcaatgaaccctctggagaaggaaatccaagaacccctcgagtcggtagaagtcaaccaggaaactttcaggctgttggaagaggagaatcaggaaagcctccgatctctgggggcctggaatttggagaacctgcgcagccctgaagaggttgacaaggagtcacagcggaacctagaggaagaagagaacctgggaaagggggagtatcaggagtcccttaggtcgctggaggaggagggccaggaattgccccagagcgccgacgtccagaggtgggaggataccgtcgaaaaagaccaggaactggcccaggagtctcctcccgggatggccggcgtagagaatgaggatgaggctgaacttaatctgagggagcaggacggttttaccggcaaagaggaagtggtcgaacagggtgagctgaatgcaacagaagaagtttggatccccggggagggccatcccgaaagcccagagccaaaagagcagagaggtcttgtggagggcgcttccgtcaagggcggcgccgagggccttcaagaccctgaaggacagtcccagcaggtgggggcaccaggactgcaggccccacagggactgcccgaagcaatcgagcccttagtcgaggacgatgtggcaccaggaggggaccaggcctctcctgaggtgatgttgggatccgaacccgctatgggcgaatccgccgcaggagctgaaccagggcctggacagggcgtggggggactgggcgatccagggcatctgactcgcgaagaagtgatggaacctcccctggaggaggaaagtctggaggctaagcgcgtccaaggactagaagggcctcggaaggacctagaagaggctggcggactgggaacagagttttccgagcttccagggaagtcacgggatccatgggagcctccccgggaggggcgtgaggaatccgaagccgaggcccccaggggcgccgaggaggcattccctgctgaaaccctaggtcataccggaagcgatgcaccttctccttggcctctgggctctgaggaagccgaggaggatgtgcccccggtactagtttctcccagccccacctacaccccaatactggaggatgctccaggcccacaaccacaggcagagggtagccaggaagcttcatggggagtacagggtagggccgaggcgctcgggaaggtggagtcagagcaggaggagcttggctctggtgaaattccagagggcccgcaggaggagggggaagaatcaagggaggaatctgaagaggacgaactcggggaaactctacctgatagcacccctctgggcttctacctgcgctcccccactagtcctcgttgggatcccacaggtgagcagaggccaccccctcagggcgagaccggtaaagaaggatgggatccggctgtgcttgcttcagaaggattggaggcacccccttccgagaaagaagaaggggaagaaggcgaagaggagtgcgggcgagattcggacctgtctgaggagtttgaggacctcggcacagaggccccattcctgccgggcgtgccaggcgaggtggccgaacccctgggacaggtgccccagctcctcctggacccagcggcatgggaccgcgatggcgagtctgatgggttcgccgacgaggaggaatcaggcgaagagggcgaggaagatcaagaagagggcagagaacccggtgccgggaggtgggggcctgggtcatccgttggctctctgcaggccctttcatccagtcagagaggtgagttcttggaatccgattctgtctcagtgtctgtaccctgggatgatagtctgagaggagctgtcgcaggggctccgaaaacagccctcgagaccgaatcacaggactctgctgaaccttcaggcagcgaagaggagtccgatccggtctccctggaaagggaggacaaagtgcctggtcccctggaaatcccatcaggcatggaagatgcagggccaggtgctgacatcatcggtgtgaatggccagggaccaaacttggaaggcaaatcacagcacgttaatggcggggtaatgaacggtctggagcagagtgaggaggttggccagggtatgccattggtcagcgagggcgacaggggatccccctttcaagaggaagaggggagtgctctgaaaacttcctgggccggagctcctgtgcaccttgggcagggccagttcttaaaattcacacagcgcgagggcgatcgtgaaagttggtcttccggggaagattag

SEQ ID NO: 166593 - DNA, 5558 bp, Artificial Sequence
  derived and/or modified sequence
gctactcccaccccgccccgccccgtcattgtccccgtcggtctcttttctcttccgtcctaaaagctctgcgagccgctcccttctcccggtgccccgcgtctgtccatcctcagtgggtcagacgagcaggatggagggctgcatgggggaggagtcgtttcagatgtgggagctcaatcggcgcctggaggcctacctggcccgggtcaaggcgctggaggagcagaatgagctgctcagcgcggagctcggggggctccgggcacaatccgcggacacctcctggcgggcgcatgccgacgacgagctggcggccctgcgggccctcgttgaccaacgctggcgggagaagcacgcggccgaggtggcgcgcgacaacctggctgaagagctggagggcgtggcaggccgatgccagcagctgcggctggcccgggagcggacgacggaggaggtagcccgcaaccggcgcgccgtcgaggcagagaaatgcgcccgggcctggctgagtagccaggtggcagagctggagcgcgagctagaggctctacgcgtggcgcacgaggaggagcgcgtcggcctgaacgcgcaggctgcctgtgccccccgctgccccgcgccgccccgcgggcctcccgcgccggccccggaggtagaggagctggcaaggcgactgggcgaggcgtggcgcggggcagtgcgcggctaccaggagcgcgtggcacacatggagacgtcgctgggccaggcccgcgagcggctgggccgggcggtgcagggtgcccgcgagggccgcctggagctgcagcagctccaggctgagcgcggaggcctcctggagcgcagggcagcgttggaacagaggttggagggccgctggcaggagcggctgcgggctactgaaaagttccagctggctgtggaggccctggagcaggagaaacagggcctacagagccagatcgctcaggtcctggaaggtcggcagcagctggcgcacctcaagatgtccctcagcctggaggtggccacgtacaggaccctcctggaggctgagaactcccggctgcaaacacctggcggtggctccaagacttccctcagctttcaggaccccaagctggagctgcaattccctaggaccccagagggccggcgtcttggatctttgctcccagtcctgagcccaacttccctcccctcacccttgcctgctacccttgagacacctgtgccagcctttcttaagaaccaagaattcctccaggcccgtacccctaccttggccagcacccccatcccccccacacctcaggcaccctctcctgctgtagatgcagagatcagagcccaggatgctcctctctctctgctccagacacagggtgggaggaaacaggctccagagcccctgcgggctgaagccagggtggccattcctgccagcgtcctgcctggaccagaggagcctgggggccagcggcaagaggccagtacaggccagtccccagaggaccatgcctccttggcaccacccctcagccctgaccactccagtttagaggctaaggatggagaatccggtgggtctagagtgttcagcatatgccgaggggaaggtgaagggcaaatctgggggttggtagagaaagaaacagccatagagggcaaagtggtaagcagcttgcagcaggaaatatgggaagaagaggatctaaacaggaaggaaatccaggactcccaggttcctttggaaaaagaaaccctgaagtctctgggagaggagattcaagagtcactgaagactctggaaaaccagagccatgagacactagaaagggagaatcaagaatgtccgaggtctttagaagaagacttagaaacactaaaaagtctagaaaaggaaaataaagagctattaaaggatgtggaggtagtgagacctctagaaaaagaggctgtaggccaacttaagcctacaggaaaagaggacacacagacattgcaatccctgcaaaaggagaatcaagaactaatgaaatctcttgaaggtaatctagagacatttttatttccaggaacggaaaatcaagaattagtaagttctctgcaagagaacttagagtcattgacagctctggaaaaggagaatcaagagccactgagatctccagaagtaggggatgaggaggcactgagacctctgacaaaggagaatcaggaacccctgaggtctcttgaagatgagaacaaagaggcctttagatctctagaaaaagagaaccaggagccactgaagactctagaagaagaggaccagagtattgtgagacctctagaaacagagaatcacaaatcactgaggtctttagaagaacaggaccaagagacattgagaactcttgaaaaagagactcaacagcgacggaggtctctaggggaacaggatcagatgacattaagacccccagaaaaagtggatctagaaccactgaagtctcttgaccaggagatagctagacctcttgaaaatgagaatcaagagttcttaaagtcactcaaagaagagagcgtagaggcagtaaaatctttagaaacagagatcctagaatcactgaagtctgcgggacaagagaacctggaaacactgaaatctccagaaactcaagcaccactgtggactccagaagaaataaatcagggggcaatgaatcctctagaaaaggaaattcaagaaccactggagtctgtggaagtgaaccaagagacattcagactcctggaagaggagaatcaggaatcattgagatctctgggagcatggaacctggagaatttgagatctccagaggaggtagacaaggaaagtcaaaggaatctggaagaggaagagaacctgggaaagggagagtaccaagagtcactgaggtctctggaggaggagggacaggagctgccgcagtctgcagatgtgcagaggtgggaagatacggtggagaaggaccaagaactggctcaggaaagccctcctgggatggctggagtggaaaatgaggatgaggcagagctgaatctgagggagcaggatggcttcactgggaaggaggaggtggtagagcagggagagctgaatgccacagaggaggtctggatcccaggcgaggggcacccagagagccctgagcccaaagagcagagaggcctggttgagggagccagtgtgaagggaggggctgagggcctccaggaccctgaagggcaatcacaacaggtgggggccccaggcctccaggctccccaggggctgccagaggcgatagagcccctggtggaagatgatgtggccccagggggtgaccaagcctccccagaggtcatgttggggtcagagcctgccatgggtgagtctgctgcgggagctgagccaggcccggggcagggggtgggagggctgggggacccaggccatctgaccagggaagaggtgatggaaccacccctggaagaggagagtttggaggcaaagagggttcagggcttggaagggcctagaaaggacctagaggaggcaggtggtctggggacagagttctccgagctgcctgggaagagcagagacccttgggagcctcccagggagggtagggaggagtcagaggctgaggcccccaggggagcagaggaggcgttccctgctgagaccctgggccacactggaagtgatgccccttcaccttggcctctggggtcagaggaagctgaggaggatgtaccaccagtgctggtctcccccagcccaacgtacaccccgatcctggaagatgcccctgggcctcagcctcaggctgaagggagtcaggaggctagctggggggtgcaggggagggctgaagccctggggaaagtagagagcgagcaggaggagttgggttctggggagatccccgagggcccccaggaggaaggggaggagagcagagaagagagcgaggaggatgagctcggggagacccttccagactccactcccctgggcttctacctcaggtcccccacctcccccaggtgggaccccactggagagcagaggccaccccctcaaggggagactggaaaggagggctgggatcctgctgtcctggcttccgagggccttgaggccccaccctcagaaaaggaggagggggaggagggagaagaggagtgtggccgtgactctgacctgtcagaagaatttgaggacctggggactgaggcaccttttcttcctggggtccctggggaggtggcagaacctctgggccaggtgccccagctgctactggatcctgcagcctgggatcgagatggggagtccgatgggtttgcagatgaggaagaaagtggggaggagggagaggaggatcaggaggaggggagggagccaggggctgggcggtgggggccagggtcttctgttggcagcctccaggccctgagtagctcccagagaggggaattcctggagtctgattctgtgagtgtcagtgtcccctgggatgacagcttgaggggtgcagtggctggtgcccccaagactgccctggaaacggagtcccaggacagtgctgagccttctggctcagaggaagagtctgaccctgtttccttggagagggaggacaaagtccctggccctctagagatccccagtgggatggaggatgcaggcccaggggcagacatcattggtgttaatggccagggtcccaacttggaggggaagtcacagcatgtgaatgggggagtgatgaacgggctggagcagtctgaggaagtggggcaaggaatgccgctagtctctgagggagaccgagggagcccctttcaggaggaggaggggagtgctctgaagacctcttgggcaggggctcctgttcacctgggccagggtcagttcctgaagttcactcagagggaaggagatagagagtcctggtcctcaggggaggactaggaaaagaccatctgcccggcactggggacttaggggtgcggggaggggaaggacgcctccaagcccgctccctgctcaggagcagcactcttaacttacgatctcttgacatatggtttctggctgagaggcctggcccgctaaggtgaaaaggggtgtggcaaaggagcctactccaagaatggaggctgtaggaatataacctcccaccctgcaaagggaatctcttgcctgctccatctcataggctaagtcagctgaatcccgatagtactaggtccccttccctccgcatcccgtcagctggaaaaggcctgtggcccagaggcttctccaaagggagggtgacatgctggcttttgtgcccaagctcaccagccctgcgccacctcactgcagtagtgcaccatctcactgcagtagcacgccctcctgggccgtctggcctgtggctaatggaggtgacggcactcccatgtgctgactccccccatccctgccacgctgtggccctgcctggctagtccctgcctgaataaagtaatgcctccgcttcaaa

SEQ ID NO: 166594 - DNA, 1782 bp, Artificial Sequence
  derived and/or modified sequence
atggagggctgcatgggagaggagagcttccagatgtgggagctgaacagaaggctggaggcctacctggcccgggtgaaggccctggaggagcagaatgagctgctgtctgctgagctgggcggcctgcgggcccagagcgctgacacctcctggagggcccacgcagatgatgagctggccgccctgcgggccctggtggaccagcgctggagggagaagcacgccgctgaggtggcccgggacaacctggccgaggagctggagggcgtggccggccgctgccagcagctgcggctggcccgggagaggaccacagaggaggtggccaggaacagaagagctgtggaggccgagaagtgtgcccgggcctggctgagcagccaggtggccgagctggagcgggagctggaggccctgcgggtggcccacgaggaggagcgggtgggcctgaatgcccaggccgcctgtgccccccgctgcccagccccaccccggggccccccagccccagcccctgaggtggaggagctggcccggcggctgggggaggcctggagaggagctgtgcggggctaccaggagcgggtggcccacatggagaccagcctgggccaggcccgggagcggctgggccgggctgtgcagggcgcccgggagggccgcctggagctgcagcagctgcaggccgagcggggcggcctgctggagcggcgggccgccctggagcagaggctggagggccgctggcaggagcggctgcgggccacagagaagttccagctggccgtggaggccctggagcaggagaagcagggcctgcagagccagatcgcccaggtgctggagggccggcagcagctggcccacctgaagatgagcctgagcctggaggtggccacctaccgcaccctgctggaggccgagaacagccggctgcagacccctgggggcggcagcaagaccagcctgtccttccaggaccccaagctggagctgcagttccccaggaccccagagggccggcggctgggcagcctgctgcctgtgctgagccccaccagcctgcccagccccctgcctgccaccctggagacccctgtgcctgccttcctgaagaaccaggagttcctgcaggcccggacccccaccctggccagcacccccatcccccccaccccccaggcccccagccctgctgtggatgctgagatccgggcccaggatgcccccctgagcctgctgcagacccagggcggcaggaagcaggcccctgagcccctgcgggcagaggcccgggtggccatcccagcctctgtgctgcccggccctgaggagcccggcggccagaggcaggaggccagcacaggccagagcccagaagatcatgccagcctggccccacccctgagcccagaccacagcagcctggaggccaaggatggagagagcggcggcagcagggtcttcagcatctgccgcggggagggggagggccagatctggggcctggtggagaaggagacagccatcgagggcaaggtggtgagcagcctgcagcaggagatctgggaggaggaggacctgaacaggaaggagatccaggacagccaggtgcccctggagaaggagaccctgaagagcctgggggaggagatccaggagagcctgaagaccctggagaaccagagccatgagaccctggagcgggagaaccaggagtgccccaggagcctggaggaggacctggagaccctgaagagcctggagaagaagaagtag

SEQ ID NO: 166595 - DNA, 4866 bp, Artificial Sequence
  derived and/or modified sequence
atggagggctgcatgggagaggagagcttccagatgtgggagctgaacagaaggctggaggcctacctggcccgggtgaaggccctggaggagcagaatgagctgctgtctgctgagctgggcggcctgcgggcccagagcgctgacacctcctggagggcccacgcagatgatgagctggccgccctgcgggccctggtggaccagcgctggagggagaagcacgccgctgaggtggcccgggacaacctggccgaggagctggagggcgtggccggccgctgccagcagctgcggctggcccgggagaggaccacagaggaggtggccaggaacagaagagctgtggaggccgagaagtgtgcccgggcctggctgagcagccaggtggccgagctggagcgggagctggaggccctgcgggtggcccacgaggaggagcgggtgggcctgaatgcccaggccgcctgtgccccccgctgcccagccccaccccggggccccccagccccagcccctgaggtggaggagctggcccggcggctgggggaggcctggagaggagctgtgcggggctaccaggagcgggtggcccacatggagaccagcctgggccaggcccgggagcggctgggccgggctgtgcagggcgcccgggagggccgcctggagctgcagcagctgcaggccgagcggggcggcctgctggagcggcgggccgccctggagcagaggctggagggccgctggcaggagcggctgcgggccacagagaagttccagctggccgtggaggccctggagcaggagaagcagggcctgcagagccagatcgcccaggtgctggagggccggcagcagctggcccacctgaagatgagcctgagcctggaggtggccacctaccgcaccctgctggaggccgagaacagccggctgcagacccctgggggcggcagcaagaccagcctgtccttccaggaccccaagctggagctgcagttccccaggaccccagagggccggcggctgggcagcctgctgcctgtgctgagccccaccagcctgcccagccccctgcctgccaccctggagacccctgtgcctgccttcctgaagaaccaggagttcctgcaggcccggacccccaccctggccagcacccccatcccccccaccccccaggcccccagccctgctgtggatgctgagatccgggcccaggatgcccccctgagcctgctgcagacccagggcggcaggaagcaggcccctgagcccctgcgggcagaggcccgggtggccatcccagcctctgtgctgcccggccctgaggagcccggcggccagaggcaggaggccagcacaggccagagcccagaagatcatgccagcctggccccacccctgagcccagaccacagcagcctggaggccaaggatggagagagcggcggcagcagggtcttcagcatctgccgcggggagggggagggccagatctggggcctggtggagaaggagacagccatcgagggcaaggtggtgagcagcctgcagcaggagatctgggaggaggaggacctgaacaggaaggagatccaggacagccaggtgcccctggagaaggagaccctgaagagcctgggggaggagatccaggagagcctgaagaccctggagaaccagagccatgagaccctggagcgggagaaccaggagtgccccaggagcctggaggaggacctggagaccctgaagagcctggagaaggagaacaaggagctgctgaaggatgtggaggtggtgcggcccctggagaaggaggccgtgggccagctgaagcccaccgggaaggaggacacccagaccctgcagagcctgcagaaggagaaccaggagctgatgaagagcctggagggcaacctggagaccttcctgtttcctggaacagagaaccaggagctggtgagcagcctgcaggagaacctggagagcctgacagccctggagaaggagaaccaggagcccctgcggagccctgaggtgggagatgaggaggccctgcggcccctgaccaaggagaaccaggagcccctgcggagcctggaggatgagaacaaggaggccttccgcagcctggagaaggagaaccaggagcccctgaagaccctggaggaggaggaccagagcatcgtgcggcccctggagacagagaaccacaagagcctgcggagcctggaggagcaggaccaggagaccctgcggaccctggagaaggagacccagcagaggcggcgcagcctgggggagcaggaccagatgaccctgcggcccccagagaaggtggacctggagcccctgaagagcctggaccaggagatcgcccggcccctggagaatgaaaaccaggagttcctgaagagcctgaaggaggagagcgtggaggccgtgaagagcctggagacagagatcctggagagcctgaagtctgctggccaggagaacctggagaccctgaagagccctgagacccaggcccccctgtggaccccagaggagatcaaccagggcgccatgaaccccctggagaaggagatccaggagcccctggagagcgtggaggtgaaccaggagaccttccggctgctggaggaggagaaccaggagagcctgcggagcctgggcgcctggaacctggagaacctgcggagccctgaggaggtggacaaggagagccagaggaacctggaggaggaggagaacctgggcaaaggagagtaccaggagagcctgcggagcctggaggaggagggccaggagctgccccagagcgcagatgtgcagcgctgggaggacacagtggagaaggaccaggagctggcccaggagagccccccaggcatggccggcgtggagaatgaagatgaggccgagctgaacctgcgggagcaggacggcttcaccgggaaggaggaggtggtggagcagggcgagctgaatgccacagaggaggtgtggatccctggagagggccaccctgagagccctgagcccaaggagcagaggggcctggtggagggcgcctctgtgaagggcggcgctgagggcctgcaggaccctgagggccagagccagcaggtgggcgcccctggcctgcaggccccccagggcctgcctgaggccatcgagcccctggtggaggatgatgtggcccctggaggagaccaggccagccctgaggtgatgctgggcagcgagcccgccatgggagagagcgctgctggagctgagcccggccctggccagggcgtgggcggcctgggggaccccggccacctgacccgggaggaggtgatggagccccccctggaggaggagagcctggaggccaagagggtgcagggcctggagggccccaggaaggacctggaggaggccggcggcctgggcacagagttcagcgagctgcccgggaagagccgggacccctgggagcccccccgggagggccgggaggagagcgaggccgaggcccccagaggagctgaggaggccttccctgctgagaccctgggccacactggaagtgatgcccccagcccctggcccctgggcagcgaggaggccgaggaggatgtgccccctgtgctggtgagccccagccccacctacacccccatcctggaggatgcccctggcccccagccccaggccgagggcagccaggaggcctcctggggcgtgcagggccgggcagaggccctgggcaaggtggagagcgagcaggaggagctgggcagcggggagatccctgagggcccccaggaggagggggaggagagccgggaggagagcgaggaggatgagctgggggagaccctgcctgacagcacccccctgggcttctacctgcggagccccaccagcccccgctgggaccccaccggggagcagaggcccccaccccagggcgagaccgggaaggagggctgggaccctgctgtgctggccagcgagggcctggaggcccctccttctgagaaggaggagggggaggagggggaggaggagtgtggccgggacagcgacctgtctgaggagtttgaggacctgggcacagaggcccccttcctgcccggggtgcctggagaggtggccgagcccctgggccaggtgccccagctgctgctggaccctgctgcctgggacagagatggagagagtgatggctttgctgatgaggaggagagcggggaggagggggaggaggaccaggaggagggccgggagcccggggccggccgctggggccctggcagctctgtgggcagcctgcaggccctgagcagcagccagagaggagagttcctggagagtgacagcgtgtctgtgtctgtgccctgggatgacagcctgcggggagctgtggccggggcccccaagacagccctggagacagagagccaggacagcgctgagcccagcggcagcgaggaggagagtgaccctgtgtccctggagcgggaggacaaggtgcccggccccctggagatccccagcggcatggaggatgctggccctggagctgacatcattggagtgaatggccagggccccaacctggagggcaagagccagcacgtgaatggaggagtgatgaatggcctggagcagagcgaggaggtgggccagggcatgcccctggtgtctgagggggaccggggcagccccttccaggaggaggagggcagcgccctgaagacctcctgggccggggcccctgtgcacctgggccagggccagttcctgaagttcacccagcgggagggggaccgggagagctggagcagcggggaggactag

SEQ ID NO: 166596 - DNA, 1782 bp, Artificial Sequence
  derived and/or modified sequence
atggagggctgcatgggcgaggagagcttccagatgtgggagctgaatcgacggctagaagcttacctggcccgagttaaagcactcgaggagcagaacgaactacttagcgcagaattaggcggtctcagagctcaaagcgccgacacttcttggcgggcccacgctgacgatgagcttgctgcgctgcgggctttggttgaccagcggtggcgtgagaaacatgcggcagaagtcgcccgagacaacctcgctgaagaactcgagggcgttgccggacggtgccaacaacttcggctggcaagagagcggaccacggaagaggtggcccgcaataggagagccgttgaggccgaaaagtgcgcacgggcctggcttagttcacaggtcgccgagcttgaacgagaactggaagcccttcgcgtggcccacgaagaggagcgggtcggcctgaatgctcaagcagcctgtgcaccacgctgtccagcccctccccgggggccacctgctccagcgccagaagttgaggagttggcaagaaggctcggagaagcctggcgtggagcagtccgtggctatcaggaacgcgtcgcacatatggaaacctctctgggccaggcccgggagcgactgggcagagccgtacaaggcgcccgcgaaggtagacttgagttacagcagctacaagccgaacggggtggccttttggaacggagggccgccctagagcagagacttgaaggtaggtggcaggaacggctgagagcaaccgaaaaatttcaactggctgtggaggcccttgagcaggaaaaacaggggctgcagtcacagattgctcaggtgctggaaggacggcaacaacttgcacacctgaaaatgtccctgtcgcttgaggtggccacatacagaactctgctcgaagctgagaacagtcggctgcaaacccccggcggtgggagcaaaacctcactatcttttcaggatcctaagctagaactgcagttcccccggactccagagggacggagattgggatcgctccttcctgttctgagtcccacctccttaccatccccattgcctgcgacactggagactcccgtgccggcatttttgaagaatcaggaatttctccaggctcggaccccaacactggcatccacccccattcccccaaccccgcaggctccatcaccagccgtggacgccgagatccgagcgcaggacgcccccttgtctctgctccagacacagggcgggagaaagcaggctcccgagccactgcgtgcagaggcccgggttgctatacccgcgtcagttttgccgggaccagaagagccaggaggtcaacgccaagaagcatctacaggccagtcgccagaagatcacgcttcactagcacccccactcagtcctgatcacagcagcctggaggctaaggacggggagtccggcggctctagggtcttctccatttgtcgtggggagggggaagggcagatttggggccttgtggagaaagagacggccattgaaggtaaggtcgtctcctccctccagcaggagatctgggaagaagaggacctaaataggaaagaaatacaggactcacaggtcccattggagaaggaaaccttgaagtctttaggcgaggaaattcaggagtccctaaaaactcttgaaaaccaatcacacgagactcttgagcgggaaaaccaagagtgtcctcgtagcttggaagaagaccttgagactctaaaaagtctggaaaagaaaaagtag

SEQ ID NO: 166597 - DNA, 4866 bp, Artificial Sequence
  derived and/or modified sequence
atggagggctgcatgggcgaggagagcttccagatgtgggagctgaataggcgattggaggcgtacctggcaagggtcaaagcgctggaagagcagaacgaactgttgagtgctgaactcggaggattgcgagcccagtcagcagacacaagctggagggcgcacgccgatgacgaactcgcggcactcagggccttggtggaccagcgctggcgggagaaacatgctgctgaagtcgcccgcgataatctcgcagaagagttggagggagtcgcggggaggtgtcaacagctgaggctcgccagagagagaactacagaagaggttgctaggaaccgccgggcggtggaggccgagaaatgcgccagggcatggctgtcttcacaggtcgctgagttggagcgtgagctggaggcactgcgcgtggcgcacgaggaggaacgagtgggcttgaatgcccaggctgcatgcgccccaaggtgcccggcaccgccaaggggccctccggcccctgcccctgaggtggaggagctggcacgccgcctcggcgaagcctggcggggtgctgttcgtgggtaccaggaacgcgtagcgcacatggaaaccagtctaggccaggcgcgggaacggttagggagggccgtccagggggctcgggaagggagactcgagctccagcaactccaggcagagcgaggcgggctgctggagcgtagggccgcattagagcagagactcgaaggtcgctggcaggaacgtcttcgcgccacagaaaaatttcagcttgcagtggaagctctggagcaggagaaacagggcctgcagtcacagattgcacaggtcctggaggggcggcaacagcttgcccatttgaagatgagcctttcactggaggtggccacatatagaacactgctcgaagcagagaactcccggctgcagacaccagggggaggttccaagactagtctctcattccaagatccaaaattagagctacaattcccccggacaccggaggggaggcgtctgggcagtcttctccccgtgctttctcccacatccctgccatcacctttacctgctacactcgagacgccggtcccagccttcctgaaaaatcaggaattcctgcaggccaggacgcctaccctggcatccaccccaataccaccgacgcctcaggctccaagtcccgccgtcgacgctgaaatcagggcccaggacgctccgttaagccttctacagacgcagggcggccggaagcaggcgccagaaccactcagagcggaagccagagttgcaattccggcgtccgtactgcctggccctgaagaaccaggggggcagagacaagaggcgagcacaggccagagccctgaggaccatgcctcgttggcccccccccttagcccggatcactcctctttagaggcgaaagatggagaaagtggcggctcccgtgtcttttcaatttgccggggtgagggcgagggccaaatttggggtttggttgagaaagagaccgcaatcgaggggaaggtcgtgtcctctctgcagcaagaaatatgggaggaggaagacctcaatagaaaagagatccaagattcgcaggtgcccctggagaaagagacactgaaatctctgggcgaagaaattcaggagagcctgaagactttagagaaccagtcccacgaaacacttgagagggaaaatcaagagtgcccacgtagtctggaggaggatcttgaaactctgaagtcgctcgaaaaagaaaacaaggaactgctcaaagatgtagaggtggtgagacccttggagaaggaagccgttggccaactcaagccgactggcaaagaggacactcagaccctccagtccctccagaaagagaaccaggaactgatgaagagccttgagggcaatttggagacctttctctttcctggaacagagaaccaagagttggtctcttccttgcaggagaatctcgagtctttaactgccctcgagaaggagaatcaggagccactcagaagtcctgaggtcggggatgaggaggctttacgaccgctgaccaaagagaaccaagagcccctgcggtcgcttgaggatgaaaacaaagaggcgttcagatccctggagaaggaaaaccaggaaccattaaaaacgttggaagaagaggatcagtccatcgttcggcccttggaaacggaaaaccacaagagccttcgatcactcgaggagcaggatcaggaaacactgcgtacgctggagaaagagacacaacaacgccggagatctttaggggaacaggatcagatgaccctgcggccccctgagaaggtagatttggagccgctgaaatcactcgatcaagagatcgctcgccccctggagaacgaaaatcaagagtttctgaaaagtctaaaagaggagtcagtcgaagccgtcaaatccctagaaacagagatcctcgaaagcctgaaatcagccggacaggagaatctggaaacattgaaaagtccagagacccaggctcctctctggaccccagaagagattaaccagggagctatgaacccacttgagaaggagattcaagagccccttgagtcggtggaagtgaatcaagagacattccgactcttggaagaggagaaccaggagagtctgcgatcactgggagcgtggaacctggaaaacttacggagcccggaggaggttgataaagaaagccagcgcaacttagaggaagaagagaatcttggaaagggggaatatcaggaaagtcttcgcagcctagaggaagagggccaggaacttccccagtctgccgatgtgcagcgttgggaggacaccgtggagaaagaccaggaactggctcaagagagccctcccggaatggcaggtgtcgaaaacgaggacgaggccgagcttaatttaagggaacaggatgggttcactggcaaagaggaagtggtggagcagggagaactgaacgccacagaagaggtctggattcctggtgagggccatccagaatctcctgagcctaaagaacaaagagggttggtggagggggcctcggttaaagggggtgctgagggcttgcaagatcccgaagggcagtcccagcaggtgggagcccctggtctccaagcccctcagggacttccggaggctattgagccactggtcgaggacgacgttgcacccggaggtgatcaggcttctcccgaggtcatgctcggatctgagcccgcaatgggcgagtctgcggccggagctgaacctggccccggacagggcgtgggcggactgggagaccctgggcatttgacgcgggaagaagtgatggaacctcctcttgaagaagagtctttggaggccaagagagttcaaggcttggagggtccaaggaaagatcttgaggaggccggcgggttgggcaccgaattctcagaactgcccggaaagtcccgagacccatgggagccccctagggagggaagggaagaaagcgaggccgaagctccacggggcgcggaagaggccttcccggcagagacacttggtcatacagggagcgacgcacctagcccatggccactgggaagtgaggaggccgaagaagacgtgcctccggttctcgtgtccccatcaccaacgtatacccctatccttgaagatgcgccagggccccagccccaggcagaggggagccaagaggccagctggggagtgcaggggcgcgcagaggcactgggaaaggtcgagagtgagcaggaagagctaggaagcggagaaatcccagaaggcccccaggaagaaggagaagaaagccgggaggaatctgaggaggatgaactgggtgagaccctgcctgactctaccccactgggattctatctccgatcacccactagtccacgatgggatccaacaggggaacagagacctcctcctcagggagaaacaggcaaggaagggtgggacccagccgttctggcctctgagggccttgaggccccccccagcgagaaagaggagggcgaggaaggcgaagaggaatgtggacgggactctgacctaagcgaggaattcgaggacctgggcactgaagcgcccttccttccaggcgtgccaggcgaggttgctgaaccgttagggcaggtaccccagctgctcctggaccccgccgcatgggaccgagatggggagtctgatgggttcgctgacgaggaagagtctggagaggagggcgaagaagaccaggaggagggtcgagaacccggggccggacgatgggggccaggaagctcagtgggttcactgcaggccctgagcagctctcagaggggggaattcctcgagtccgactctgtctcagtaagcgtcccctgggacgattccttacgcggcgcggttgcgggcgcgccgaagaccgctctcgagaccgagtcccaggactctgccgaaccctcaggttccgaggaggagtccgatcctgtgtcacttgaacgggaggataaggtccctgggccgttagagattccttctggtatggaggatgcaggccccggagctgatatcattggcgtgaacggacaagggcctaatcttgaagggaagtctcagcacgtgaacgggggggttatgaacggcctggagcagtcagaggaagtgggccaaggaatgcctctcgtgagtgaaggagatcgaggctccccatttcaagaggaggagggtagtgccctgaagacatcatgggccggtgccccggtgcacctggggcaagggcagttcttaaagttcacccagcgagaaggagacagggagtcttggagctccggcgaggactag

SEQ ID NO: 166598 - DNA, 1782 bp, Artificial Sequence
  derived and/or modified sequence
atggaggggtgtatgggcgaggaatcgttccagatgtgggagttgaaccgaagactggaggcttacttggccagggtaaaagcactggaggagcagaatgagctgctgtccgccgagttggggggattacgtgcccagagcgctgacacctcctggagggcccacgccgatgatgaattggccgctctgagagccttggttgatcaacggtggcgcgaaaaacacgcagccgaagtggcacgggataaccttgcagaggaacttgagggggtggccggaaggtgccagcagttgcgcctcgcacgagaaagaactacagaggaggtggccagaaataggcgggcagtggaagccgagaaatgtgccagagcatggttatctagccaggtggctgagttggaaagagaacttgaagccctccgggttgctcatgaagaagagcgagtgggtctgaacgctcaggcggcttgcgcacccaggtgcccagcaccaccgaggggcccacctgctcccgctccggaggtcgaggaactggccagacggcttggtgaggcgtggagaggcgctgtccggggataccaggaacgcgttgcgcatatggaaacatctcttgggcaagcacgcgaacggcttggtcgggctgtccagggcgcacgcgagggaaggctagagttgcagcagctccaggccgaacggggtggtctcctcgagaggcgtgcggcactggaacagaggctggaaggcagatggcaggagcggcttcgcgctacagaaaagtttcaattagcagtggaagctctggaacaagagaaacagggtttacagtctcagattgctcaggtgttagagggtcgccaacagctggcccatctgaagatgtccctgtccttggaggtggcaacataccgtaccctgcttgaagctgaaaactcaagactgcagacacccggtggtggctcaaagacaagcttatcgttccaagacccaaagctggaactgcagtttccacgcacccctgagggtcggcgattaggctcactcctgcccgtgctctccccaacgagtctgccttcccctctgccagccactctcgaaacacctgtgccagcttttctgaaaaatcaagaattcctacaagcacgtacacctactcttgctagcaccccgatccctcctacccctcaggctccaagccccgcagtcgatgcggagatcagagcccaagacgcccctctcagcctgttgcagacgcaagggggtcgcaagcaggctcctgagcccctgcgggcagaggccagggttgccatccccgctagtgtgctcccaggcccagaggagccaggaggccagcgtcaggaagcctctactgggcaaagtcctgaagatcatgccagtctggctccacctctgtctccggaccatagcagcctagaggccaaggatggtgaatctggcggttcccgggtgttttctatctgcagaggtgaaggagagggacagatttggggattagtcgaaaaggaaactgccatcgagggcaaagtagtctcttctttacagcaggagatctgggaagaggaagatttgaatcggaaggagatacaggactcccaagttccactggaaaaggagactcttaaatcgctgggcgaggagattcaggagagcctgaagactctggaaaatcaaagccacgagactttagagagggaaaaccaagagtgcccaaggagcctggaggaggacttagaaacactcaaaagcctagagaagaagaagtag

SEQ ID NO: 166599 - DNA, 4866 bp, Artificial Sequence
  derived and/or modified sequence
atggagggatgcatgggggaggagagctttcagatgtgggagctgaacagaaggctagaagcatatcttgcccgagtcaaggcattggaagaacaaaatgagctgctgtccgctgaactggggggtctacgggctcagtctgctgacacaagctggagggcccacgcggacgatgagctggcggcattgagggcgctggtagatcagcggtggcgggagaaacatgccgctgaggttgcgagagataacctggctgaagaactcgagggggtagcaggacgttgtcaacagcttagactggccagagagagaactaccgaggaggtggctcgtaatcgaagggccgttgaagccgaaaaatgcgcaagagcatggctttccagccaggtcgccgaattggagcgcgagctggaagctctgagagttgcccacgaggaggaacgcgtgggccttaatgcccaggctgcctgtgctccccgatgtccagctcctccccgtggacctcctgctcctgcccctgaggtggaggagctggcacgaagactgggagaagcctggcgcggagctgtcagaggctaccaggaacgtgtggcccatatggagacatcactgggacaagctagggagcggcttggacgggctgtgcaaggggcaagggaaggcaggttggaattacagcagttgcaggccgagcgtgggggattactagaacggagggcggcattggagcaacgtttagagggtcggtggcaagaaaggctccgagctacggagaaattccaactagcggttgaggcgctggaacaggaaaaacagggccttcagagtcagatcgcccaggtccttgaagggcgtcagcagctggcacacttgaagatgagccttagtctggaggttgccacctaccgcactttattagaagcagagaattcccgtttacagacacccggaggcggaagtaagactagtttatcatttcaggacccaaagttggagcttcagttcccccgaacgcccgagggtagaaggctgggctccctgctgccagtgctttccccgacctccctcccatcccccctgcccgcaactttagagacccccgtgcccgctttcctgaaaaatcaagaattcttgcaggcaaggacgccaacacttgcttctactccaatcccacccacaccccaagcaccctctccagccgtcgatgcagaaatacgcgctcaggacgccccattgtctctgctccagacccaggggggacggaagcaggcccctgagcccttaagggccgaagcccgtgtggcaatcccagcaagcgtactacctggtcctgaagaacctggcggacagcgccaggaagcgtcaacaggccagtccccggaggatcacgcaagcttggcccctcctctgtccccagaccacagttctctcgaggccaaagacggggaatcaggaggcagtcgggtattcagcatctgtcggggtgaaggggaaggccaaatttggggtttagtggagaaggagacagccattgaggggaaagttgtcagttcactgcaacaggaaatttgggaggaagaggatttgaaccgcaaggaaattcaggactctcaagttccattggagaaggaaacccttaagtccttgggagaggaaattcaggaaagtttgaagacattggagaaccagtcgcatgagacgctcgaaagagaaaatcaggagtgtccaagaagtctggaggaagacttggagaccttgaagtcacttgaaaaagagaataaagaactgctgaaggatgtggaggtggtcaggccccttgaaaaggaagctgttgggcagctgaaacctaccggcaaagaagatacccaaaccctgcagtccttgcagaaagaaaaccaagaactcatgaagtcccttgagggcaacctggagacattcctctttcccggaacagagaatcaggaactagtcagttcacttcaggaaaaccttgaatccctcacggccctggaaaaggagaaccaggagccgcttaggagcccagaggtaggagatgaggaggctctgcggcctctcacaaaggagaatcaggaaccattacggtcattggaggatgagaataaggaggcattcaggtcacttgagaaagagaaccaggagccattaaaaaccctcgaggaagaggaccagagtatcgtgaggccacttgagactgagaatcataaaagcctcagatcattggaggagcaggatcaggagacgttgcggacactcgagaaggagactcagcagcggagacggagtctcggtgaacaggatcagatgacgctccgcccacctgagaaagtggacctagagccgcttaaaagccttgatcaagagatcgctaggccccttgaaaatgaaaatcaggaatttctcaaatctctaaaggaggagtcagtcgaggcagtaaaatctctcgagacagaaatccttgaaagtctgaaatccgccggacaggagaacttagagactcttaagagtccagaaacacaagcaccattatggaccccggaagaaataaatcagggcgcaatgaaccctcttgagaaggagattcaggaacccctggaaagtgtggaggtcaatcaggaaaccttccggttgctggaagaggaaaatcaagagagtctgcggtctctgggagcatggaacctagagaatctcagatccccagaagaggtagataaggagagtcaacgcaacctggaggaagaagaaaatctcggcaaaggagagtatcaggaatctctgcggtcattggaggaggagggtcaggagctgccacagagcgcagatgtgcagaggtgggaagatactgtagaaaaggatcaggagctcgcccaggagagtccgcctgggatggccggagtcgagaatgaggacgaagcagaactcaatttacgagagcaagatggtttcacaggaaaggaggaggtcgtggagcagggcgagctgaatgcgaccgaagaagtgtggatccctggcgaaggtcatccagaaagtcctgagcccaaagagcagcgcggtttagttgagggtgcttcggtgaaaggaggagccgaaggtttacaggaccctgagggacagagccagcaggtgggagctcccggtctccaggcacctcagggccttcccgaggcgattgagcccctagtagaagacgacgtcgcacctggtggcgaccaggcctctcccgaggtaatgctggggagcgagccagctatgggcgagtctgccgcaggagctgagcccggtcctggccagggggtggggggtctcggcgatcctggacacctgactcgagaggaggttatggaacccccactggaagaggaatccttggaagccaaaagggttcaggggctggaaggccctcggaaggatctggaggaagccggtggactcggtactgaattctccgagctacccggaaaatccagagatccgtgggagccccctcgcgaaggaagggaagaatcagaggccgaggctccaagaggcgcagaggaagcattccctgccgaaactttggggcacacaggatctgacgccccatctccgtggcccttgggctctgaggaggccgaagaagatgttccccctgtccttgtgtccccctcaccaacctacacgccgatcctcgaggacgcgccagggcctcagccacaggccgagggctctcaagaggcttcatggggcgtccaaggcagggctgaggctcttggcaaggtggagagtgaacaggaggaactgggcagcggcgagatccctgagggacctcaggaagagggagaagagtcccgggaggagagcgaggaagacgaactgggagagaccctcccggactccacccccctgggcttttacctgcggagtccaacctcaccacgatgggatccaacaggagagcaacgccctcccccacagggtgagaccggcaaagaaggatgggatccggcagtgctggcctccgagggcctggaggctcctccatctgaaaaagaagagggtgaagaaggagaggaagagtgtgggagagactcggacctgtctgaagagttcgaagacctgggaaccgaagccccatttctgccaggcgtgcctggggaggtcgccgagccactcggtcaggtcccccagctgttgctggacccagccgcttgggatcgtgatggcgagtcggacgggtttgccgatgaagaggagtctggtgaagaaggagaggaagatcaggaggagggccgagaacctggtgctggcagatgggggccagggagtagcgtcggctcgctgcaggcccttagctcatcgcagagaggcgagttcctcgaatccgattccgtgtctgtctccgtcccttgggatgacagcctacgcggtgccgttgccggagcacccaaaacagctctggagaccgagagccaggatagcgctgagccgagcggttcagaagaagaaagcgaccctgtttcactggagagggaggataaggtgccgggacccttagagatcccttccggcatggaagacgcaggaccaggggctgatatcattggagtgaacgggcaagggccaaaccttgaagggaagtctcagcacgtcaatggcggtgtcatgaatggattggagcagtccgaggaggtaggacagggcatgcccctcgtctctgaaggggatcgtggatcaccttttcaggaggaagaaggcagtgcactgaaaacgagctgggctggggcaccggtgcacctggggcaggggcagttcttgaaattcactcagcgtgaaggcgacagggagtcttggagctctggtgaagactag

SEQ ID NO: 166600 - DNA, 1912 bp, Artificial Sequence
  derived and/or modified sequence
gctactcccaccccgccccgccccgtcattgtccccgtcggtctcttttctcttccgtcctaaaagctctgcgagccgctcccttctcccggtgccccgcgtctgtccatcctcagtgggtcagacgagcaggatggagggctgcatgggggaggagtcgtttcagatgtgggagctcaatcggcgcctggaggcctacctggcccgggtcaaggcgctggaggagcagaatgagctgctcagcgcggagctcggggggctccgggcacaatccgcggacacctcctggcgggcgcatgccgacgacgagctggcggccctgcgggccctcgttgaccaacgctggcgggagaagcacgcggccgaggtggcgcgcgacaacctggctgaagagctggagggcgtggcaggccgatgccagcagctgcggctggcccgggagcggacgacggaggaggtagcccgcaaccggcgcgccgtcgaggcagagaaatgcgcccgggcctggctgagtagccaggtggcagagctggagcgcgagctagaggctctacgcgtggcgcacgaggaggagcgcgtcggcctgaacgcgcaggctgcctgtgccccccgctgccccgcgccgccccgcgggcctcccgcgccggccccggaggtagaggagctggcaaggcgactgggcgaggcgtggcgcggggcagtgcgcggctaccaggagcgcgtggcacacatggagacgtcgctgggccaggcccgcgagcggctgggccgggcggtgcagggtgcccgcgagggccgcctggagctgcagcagctccaggctgagcgcggaggcctcctggagcgcagggcagcgttggaacagaggttggagggccgctggcaggagcggctgcgggctactgaaaagttccagctggctgtggaggccctggagcaggagaaacagggcctacagagccagatcgctcaggtcctggaaggtcggcagcagctggcgcacctcaagatgtccctcagcctggaggtggccacgtacaggaccctcctggaggctgagaactcccggctgcaaacacctggcggtggctccaagacttccctcagctttcaggaccccaagctggagctgcaattccctaggaccccagagggccggcgtcttggatctttgctcccagtcctgagcccaacttccctcccctcacccttgcctgctacccttgagacacctgtgccagcctttcttaagaaccaagaattcctccaggcccgtacccctaccttggccagcacccccatcccccccacacctcaggcaccctctcctgctgtagatgcagagatcagagcccaggatgctcctctctctctgctccagacacagggtgggaggaaacaggctccagagcccctgcgggctgaagccagggtggccattcctgccagcgtcctgcctggaccagaggagcctgggggccagcggcaagaggccagtacaggccagtccccagaggaccatgcctccttggcaccacccctcagccctgaccactccagtttagaggctaaggatggagaatccggtgggtctagagtgttcagcatatgccgaggggaaggtgaagggcaaatctgggggttggtagagaaagaaacagccatagagggcaaagtggtaagcagcttgcagcaggaaatatgggaagaagaggatctaaacaggaaggaaatccaggactcccaggttcctttggaaaaagaaaccctgaagtctctgggagaggagattcaagagtcactgaagactctggaaaaccagagccatgagacactagaaagggagaatcaagaatgtccgaggtctttagaagaagacttagaaacactaaaaagtctagaaaagaaaaag

SEQ ID NO: 166601 - DNA, 1782 bp, Artificial Sequence
  derived and/or modified sequence
atggagggctgcatgggcgaggagagcttccagatgtgggagctgaacagaagactggaggcctacctggccagagtgaaggccctggaggagcagaacgagctgctgagcgccgagctgggcggcctgagagcccagagcgccgacaccagctggagagcccacgccgacgacgagctggccgccctgagagccctggtggaccagagatggagagagaagcacgccgccgaggtggccagagacaacctggccgaggagctggagggcgtggccggcagatgccagcagctgagactggccagagagagaaccaccgaggaggtggccagaaacagaagagccgtggaggccgagaagtgcgccagagcctggctgagcagccaggtggccgagctggagagagagctggaggccctgagagtggcccacgaggaggagagagtgggcctgaacgcccaggccgcctgcgcccccagatgccccgccccccccagaggcccccccgcccccgcccccgaggtggaggagctggccagaagactgggcgaggcctggagaggcgccgtgagaggctaccaggagagagtggcccacatggagaccagcctgggccaggccagagagagactgggcagagccgtgcagggcgccagagagggcagactggagctgcagcagctgcaggccgagagaggcggcctgctggagagaagagccgccctggagcagagactggagggcagatggcaggagagactgagagccaccgagaagttccagctggccgtggaggccctggagcaggagaagcagggcctgcagagccagatcgcccaggtgctggagggcagacagcagctggcccacctgaagatgagcctgagcctggaggtggccacctacagaaccctgctggaggccgagaacagcagactgcagacccccggcggcggcagcaagaccagcctgagcttccaggaccccaagctggagctgcagttccccagaacccccgagggcagaagactgggcagcctgctgcccgtgctgagccccaccagcctgcccagccccctgcccgccaccctggagacccccgtgcccgccttcctgaagaaccaggagttcctgcaggccagaacccccaccctggccagcacccccatcccccccaccccccaggcccccagccccgccgtggacgccgagatcagagcccaggacgcccccctgagcctgctgcagacccagggcggcagaaagcaggcccccgagcccctgagagccgaggccagagtggccatccccgccagcgtgctgcccggccccgaggagcccggcggccagagacaggaggccagcaccggccagagccccgaggaccacgccagcctggccccccccctgagccccgaccacagcagcctggaggccaaggacggcgagagcggcggcagcagagtgttcagcatctgcagaggcgagggcgagggccagatctggggcctggtggagaaggagaccgccatcgagggcaaggtggtgagcagcctgcagcaggagatctgggaggaggaggacctgaacagaaaggagatccaggacagccaggtgcccctggagaaggagaccctgaagagcctgggcgaggagatccaggagagcctgaagaccctggagaaccagagccacgagaccctggagagagagaaccaggagtgccccagaagcctggaggaggacctggagaccctgaagagcctggagaagaagaagtag

SEQ ID NO: 166602 - protein, 1544 aa, Artificial Sequence
  derived and/or modified sequence
MEAATTLHPGPRPALPLGGPGPLGEFLPPPECPVFEPSWEEFADPFAFIHKIRPIAEQTGICKVRPPPDWQPPFACDVDKLHFTPRIQRLNELEAQTRVKLNFLDQIAKYWELQGSTLKIPHVERKILDLFQLNKLVAEEGGFAVVCKDRKWTKIATKMGFAPGKAVGSHIRGHYERILNPYNLFLSGDSLRCLQKPNLTTDTKDKEYKPHDIPQRQSVQPSETCPPARRAKRMRAEAMNIKIEPEETTEARTHNLRRRMGCPTPKCENEKEMKSSIKQEPIERKDYIVENEKEKPKSRSKKATNAVDLYVCLLCGSGNDEDRLLLCDGCDDSYHTFCLIPPLHDVPKGDWRCPKCLAQECSKPQEAFGFEQAARDYTLRTFGEMADAFKSDYFNMPVHMVPTELVEKEFWRLVSTIEEDVTVEYGADIASKEFGSGFPVRDGKIKLSPEEEEYLDSGWNLNNMPVMEQSVLAHITADICGMKLPWLYVGMCFSSFCWHIEDHWSYSINYLHWGEPKTWYGVPGYAAEQLENVMKKLAPELFVSQPDLLHQLVTIMNPNTLMTHEVPVYRTNQCAGEFVITFPRAYHSGFNQGFNFAEAVNFCTVDWLPLGRQCVEHYRLLHRYCVFSHDEMICKMASKADVLDVVVASTVQKDMAIMIEDEKALRETVRKLGVIDSERMDFELLPDDERQCVKCKTTCFMSAISCSCKPGLLVCLHHVKELCSCPPYKYKLRYRYTLDDLYPMMNALKLRAESYNEWALNVNEALEAKINKKKSLVSFKALIEESEMKKFPDNDLLRHLRLVTQDAEKCASVAQQLLNGKRQTRYRSGGGKSQNQLTVNELRQFVTQLYALPCVLSQTPLLKDLLNRVEDFQQHSQKLLSEETPSAAELQDLLDVSFEFDVELPQLAEMRIRLEQARWLEEVQQACLDPSSLTLDDMRRLIDLGVGLAPYSAVEKAMARLQELLTVSEHWDDKAKSLLKARPRHSLNSLATAVKEIEEIPAYLPNGAALKDSVQRARDWLQDVEGLQAGGRVPVLDTLIELVTRGRSIPVHLNSLPRLETLVAEVQAWKECAVNTFLTENSPYSLLEVLCPRCDIGLLGLKRKQRKLKEPLPNGKKKSTKLESLSDLERALTESKETASAMATLGEARLREMEALQSLRLANEGKLLSPLQDVDIKICLCQKAPAAPMIQCELCRDAFHTSCVAVPSISQGLRIWLCPHCRRSEKPPLEKILPLLASLQRIRVRLPEGDALRYMIERTVNWQHRAQQLLSSGNLKFVQDRVGSGLLYSRWQASAGQVSDTNKVSQPPGTTSFSLPDDWDNRTSYLHSPFSTGRSCIPLHGVSPEVNELLMEAQLLQVSLPEIQELYQTLLAKPSPAQQTDRSSPVRPSSEKNDCCRGKRDGINSLERKLKRRLEREGLSSERWERVKKMRTPKKKKIKLSHPKDMNNFKLERERSYELVRSAETHSLPSDTSYSEQEDSEDEDAICPAVSCLQPEGDEVDWVQCDGSCNQWFHQVCVGVSPEMAEKEDYICVRCTVKDAPSRK

SEQ ID NO: 166603 - DNA, 6393 bp, Artificial Sequence
  derived and/or modified sequence
gtacaactcggacttgctgttgctcgagccgcgtctgcacgggtctcggaccgagcggagctcgcagcctcggtcccggagcccaccttcgcctcgcccttgcccagcctgcggtgatggaggcggccaccacactgcacccaggcccgcgcccggcgctgcccctcgggggcccgggcccgctgggcgagttcctgcctccacccgagtgcccggtcttcgaacccagctgggaagagttcgcggaccccttcgctttcatccacaagatccggcccatagccgagcagactggcatctgtaaggtgcggccgccgccggattggcagccaccatttgcatgtgatgttgataaacttcattttacgccacgtatccagagactgaatgaattggaggcccaaactcgtgtaaaattgaatttcttggaccagattgcaaagtactgggagttacagggaagtactctgaaaattccacatgtggagaggaagatcttggacttatttcagcttaataagttagttgcagaagaaggtggatttgcagttgtttgcaaggatagaaaatggaccaaaattgctaccaagatggggtttgctcctggcaaagcagtgggctcacatatcagagggcattatgaacgaattctcaacccctacaacttattcctgtccggagacagcctaaggtgtttgcagaagccaaacctgaccacagacactaaggacaaggagtacaaaccccatgatattccccagaggcagtctgtgcagccttcggaaacgtgccccccagcccgacgagcaaaacgcatgagagcagaggccatgaatattaaaatagaacccgaggagacaacggaagccagaactcataatctgagacgtcgaatgggttgtccaactccaaaatgtgaaaatgagaaagaaatgaagagtagcatcaagcaagaacctattgagaggaaagattatattgtagaaaatgagaaggaaaagcccaagagtcgatctaaaaaagccaccaatgctgtggacctgtatgtctgtcttttatgtggcagtggcaatgatgaagaccggctactgttgtgtgatggctgtgatgacagttaccataccttttgcttgatcccacctctccatgatgttcccaagggagactggaggtgtcctaagtgtttggctcaggaatgtagtaagccacaagaagcatttggctttgaacaagcagccagggactataccctccgtacttttggggaaatggcagatgcgttcaaatctgattacttcaacatgccagtccatatggtccccacagagcttgttgagaaagaattttggagactagtaagcactattgaggaggatgtcacagtggaatatggagctgacattgcctcaaaggaatttggcagtggctttcctgtccgagatgggaaaatcaaactctcacctgaggaagaggagtatcttgatagtggctggaatttgaacaacatgccagtgatggagcagtctgtccttgcacatattactgctgatatatgtggcatgaaacttccttggttgtatgtgggaatgtgcttttcttcattctgttggcacattgaagaccactggagctattcaattaactacttgcactggggtgagccaaaaacctggtatggagtcccagggtatgctgctgagcagctagaaaatgtaatgaagaaactagctccagaactctttgtgtcccagccggatctcctccatcagcttgtgaccatcatgaaccccaataccctgatgactcatgaagtgcctgtttaccgaactaatcagtgtgctggggagtttgtgattacatttccaagagcctaccacagtggttttaaccagggttttaattttgctgaggctgttaacttctgcactgttgattggctgccattaggccgacagtgtgtggagcattatcgcttgcttcatcgatattgtgtgttttcccacgatgagatgatctgcaagatggcttccaaggctgatgtattagatgttgtagtggcttcaactgttcagaaagacatggccattatgattgaggatgagaaagctttaagagaaactgtccgtaaattgggagtgattgattcggaaagaatggattttgagctgttgccagatgatgaacgtcagtgtgtaaaatgcaaaactacatgcttcatgtctgccatctcctgttcttgtaaacctggccttcttgtttgcctgcatcatgtaaaagaattgtgttcctgtcctccttacaaatataaattgcggtataggtacacgctggatgatctctaccctatgatgaatgcattgaagcttcgagcagaatcttacaacgaatgggccttgaatgtgaatgaagctttggaggcaaagatcaacaagaagaaaagccttgtcagcttcaaggctttaattgaagaatctgaaatgaagaaattcccagacaatgatcttttgcgacaccttcgcctagtcacacaggatgcagagaagtgtgcctctgttgcgcagcagttgcttaatggcaaaaggcaaactagatatcgatctggtggagggaaatcccaaaatcagttgacagtgaatgagctccggcagtttgtaacacagctgtatgctcttccatgtgtcctcagtcagacaccattactaaaggatctcttgaatcgtgtagaagattttcaacagcatagtcagaaactactctctgaggaaacgcctagtgctgcggagctgcaggacttgctagatgtcagctttgaatttgatgttgaacttccacagcttgctgagatgcgtatccgtttggaacaagcccgttggctagaagaggtgcagcaagcttgcctagaccccagctcccttactttagatgatatgagacgtctcatagacctaggggtagggctggccccgtattcagcagtggagaaagctatggcccggctgcaggaactgctcacagtgtcagagcactgggacgacaaagccaagagtctcctcaaggccaggccacgacattcattgaatagccttgctacggcagtaaaggaaatcgaagagatccctgcatatctgcccaatggtgcggctctgaaagactcagtgcagagagccagagactggcttcaggatgtagagggcctgcaggctggaggacgtgtgccagtgttagacacactcatagaacttgttacacgaggccgatctatccccgtacatctgaattctttgccaagactggaaaccctagtagctgaggttcaggcttggaaagaatgtgctgttaatacattcttgactgagaattctccatattctctcttagaggtgctgtgtcctcgatgtgatattggccttttgggattgaaaaggaagcagagaaagttaaaggagcccttgccaaatggaaagaaaaaaagcaccaaattagagagtctgagtgacctggagagagctttaactgaaagcaaggagactgcttcagctatggcaactcttggggaagctcgcctaagggaaatggaagccttgcagtctctcagactcgccaatgaagggaaattgctgtcgcctctccaagatgtggatataaaaatctgcctatgtcagaaggccccagctgcccctatgattcaatgtgaactctgcagggatgctttccacaccagttgtgtggcggtacccagtatttcacagggcctgcgaatctggctttgtccccattgtcggaggtcagagaaacctccattagagaaaattctgcccctgctcgcctcccttcagcgtatccgagttcgccttcctgagggagatgcacttcgatatatgattgaaagaaccgtgaactggcagcacagagcccagcaactgctttcgtcagggaatcttaaatttgtgcaagatcgagtgggctcaggactgttatatagcagatggcaagcctcagcaggacaggtgtcagacacaaacaaggtatctcaacctcctggcacaacatcattttctttgcctgatgactgggacaacagaacctcatatttgcactcccccttctcaactggacgaagttgtatccccctccatggtgttagtccagaagtgaatgaactattgatggaagcccagctgctccaggtatcccttcctgaaattcaggaactttaccagactttacttgcaaagccaagccctgctcagcagactgaccgaagctcaccagtgagacccagcagtgagaagaatgactgttgccgagggaagcgagatggaattaacagtcttgagagaaaactgaagagacgcctggaaagagagggcctctccagtgagcggtgggaacgagttaagaaaatgcggacccccaaaaagaagaaaatcaaactgagccaccccaaggacatgaacaatttcaagttagagagagagcgtagctatgaattagttcgttctgctgaaactcattccctgccctcagacacatcctattccgaacaggaagactctgaggatgaagatgccatctgcccagctgtgagctgcctgcagccagaaggagatgaggtggactgggtccagtgtgatggcagctgcaatcagtggtttcatcaggtctgtgttggtgtctccccagagatggcagagaaagaagactacatctgtgtgcgctgtactgtgaaggacgcaccaagccgaaagtaaaaacacaaaaacagatacccccctacttaatgtaattcaggactccaaccaagaggatttcttcaaatctcagcaaagctacaggactggtactcaagccagcctgtaaacggtgctatttctattccttatgggatcatttttccaggactctttgaagaaaagaaaaaacaactaaaaaaatttttgacactttttgtattttttccttaagagctatttgtggttgttgaggtttgaaaagctgactgttttttttgcaggggttcccaccaatttggaaggcattgaagcttgcaccttttcatgtacagcattaaaattttacctctctctgggatttaccagcttaagagtccaactcacttccagtgcccaaaagggcacccaccagaaattccagtaaatcctcatttgaggaagctctcccttgtttactctgttaccacattggggaaatttttaagtttttcactttgggagtttttgtttgtttcttcttttcctttatccacttttcttcttcctggtagactaggtttatttatctgagcaataacttctatgttggtttcagtggctggaattaaaacaaaacaaaacaaacttccaaacagtgtgttggtgctttagcgattgattgatgtacagaacacaaatgtctagtttctagtgtcactgatgaactagtgatgtagaaaagagacttctctgtaagtaattgccacagctgtattttggctttctccctgtcccttcctttctcccctattttttggtagcttgtatcaaatgttacagtttatattgtggaataaatccttcgtcctaacataacactaaatgctgattatttagagccattagagcacagcttcttctgcccctctactgttgcacagccagaaggggctgcttgcttttgcctctgcccaaccaggttgcagtagcagtggatgttagcctgcaaacaacattaggggattcttcttttgtgtcctgctctgtttggtgggccatatgcctacagccctcactaacaaagaacccctctgtcttcaaggactagaacctatctttaaagccgtgctcttttaaaataagctttctcagaatgttggcaaatcacttcaatcctcaaatcagtcttccttgtggaatgctgcctttattatatttgaattgacaggggaacttggtttagggttaagacgttggaaggaaatctaaggaaaattaatcctcacagaggtccgggtttagtatatgtcttgagaggagacttgtgaattcccagactctgcctcctggtttcctttctcatttctttctaactgtagctatcattactggctgtggatagcccatagctattttccttgcttttcttttttaaaggggtctgttctgcagtggagaagacattctggtgaccagacttttgcttaccttttcctattctgttgccaatttttgttttccccacattctatagccataaacctgaagatgagtaaaactggtgggtctttaataaaacaacaacaaaaacagcagtttgtgatatagcagaggtttaaatgtaccctccccttttatgcacttcaaataattaaatctctttaagaatgaaaaaaaaaaa

SEQ ID NO: 166604 - DNA, 3828 bp, Artificial Sequence
  derived and/or modified sequence
atggggtttgctcctggcaaggctgtagggagccacatcaggggccattatgaaaggatactgaatccatacaatcttttcctcagcggggatagcctcagatgtttacaaaaacctaacctcacaaccgataccaaggataaggagtataagccccatgatatcccacagcggcagagcgtccagccgtccgagacctgcccccctgcacgacgtgccaaaaggatgcgtgccgaggccatgaatatcaaaatagaaccagaagagaccacggaagccaggacccacaaccttcgaaggaggatgggctgtccaactcctaagtgcgaaaacgaaaaggagatgaaatcctctatcaagcaagagcccattgagaggaaggactatatcgttgaaaacgagaaagagaaaccaaagtcccgctcgaaaaaagctactaatgctgtggatctatacgtgtgcctgctgtgtggtagcggcaatgacgaagatcggctgctactttgtgacggctgcgacgacagctaccacacgttttgcttgattcctccactccatgacgtgcctaagggggattggcgatgccccaaatgcttggctcaagagtgcagcaagcctcaagaggccttcggctttgagcaggctgctagagactataccctcaggacattcggcgaaatggcggatgcattcaagagcgattactttaatatgccagtgcatatggtcccaacagagctcgtagagaaagagttttggcgtctcgtctctactattgaggaagatgtcaccgttgagtacggagcagatattgcctccaaagagtttggctctggatttcctgtaagggacggtaaaatcaagctatcaccagaagaagaagagtatttggactcagggtggaacctgaataacatgcctgttatggaacaatcggttctggcccacattactgccgatatctgcggaatgaagctgccttggctgtatgtgggaatgtgtttcagttccttctgctggcacatcgaggatcattggtcgtactccattaattatttacactggggggagcctaagacctggtatggggttccagggtatgcagctgaacaattggaaaatgttatgaagaagctggctcccgagctgttcgttagccagccagatctactgcaccaattggtgaccataatgaaccccaacacacttatgacacacgaggtgcctgtatatagaactaatcagtgtgccggggaatttgttatcacctttcctcgcgcctaccattcaggctttaatcagggcttcaatttcgccgaggccgtgaacttctgtacggtcgattggctgcctctgggcagacagtgcgtggaacactacagattgctgcatcgctattgcgtttttagccacgatgagatgatatgcaaaatggcctccaaagcagacgtcctcgatgtggttgtcgcttctaccgtgcagaaggacatggctattatgatcgaggatgagaaggctctaagagaaacggtgcgaaagttaggagtcatcgatagcgaaagaatggatttcgagctcctccctgacgacgagaggcagtgtgttaagtgcaagacaacctgtttcatgtcagctataagctgttcatgtaagccaggcctgctggtgtgcttacatcacgtgaaggagttgtgttcatgtccaccatacaagtacaagttgcgctatcgctataccctggatgacttataccccatgatgaatgcattgaagctcagggcggaatcctataacgaatgggccctcaacgtcaacgaagctctggaggccaaaatcaacaaaaagaagagcctggtgtcctttaaggccctcatagaggagtccgagatgaaaaagttccctgataacgacttgctcaggcatctgcgactcgtgacccaagacgctgaaaagtgcgcaagcgtggctcaacagctgcttaatggcaagagacagacaaggtaccgaagtggcgggggcaaatcccagaaccaactcactgtgaatgagctgaggcagtttgttactcagctgtacgccctcccttgtgtgctctcgcagacacctttgcttaaagacctgctcaatagggtagaggactttcagcaacacagccagaaactgctgagcgaggagaccccctccgcagcagaattgcaagatcttttagacgtgtcgttcgaatttgatgtcgaactgccccagttagccgagatgagaattcgtttggagcaggctcgttggcttgaagaagtacagcaagcgtgtttagacccatcaagtttgaccctggacgacatgcgcagactgattgacctcggcgtgggtctcgcaccttactccgcagtagaaaaagccatggcccgcttacaggaactattgaccgtatcggagcactgggatgacaaggccaaatcacttctgaaggctagaccccgacattccctgaatagcctcgccaccgcagtgaaagagatcgaggagattccagcctacctcccaaatggagctgcactcaaggacagcgtgcaaagagcaagggactggctgcaggacgtggagggtctgcaggccggaggacgagtgccggtacttgatacgctaattgagttagttacccggggccgttctatcccagttcatctgaactccctgcctaggttggagaccctagtggcagaggtgcaagcatggaaggagtgtgcagttaacacatttctgaccgaaaactccccatacagcctcctggaagtgctgtgtccacgctgcgatattgggctgctgggcctgaagaggaagcaacggaagctcaaggaaccgctgccaaacggcaaaaaaaagtctaccaagctcgaatctctgtctgatcttgagagggcactcaccgagagcaaggagaccgcttcagctatggccaccctgggagaggccagactccgcgagatggaggcgctgcagtcactgaggctcgctaacgagggtaagctgctttcgccgctccaggacgtggacataaagatctgcctgtgccaaaaggccccggctgccccaatgatccagtgtgagctctgcagggacgcattccacaccagctgtgtggccgtaccctcaatttcgcaaggattgagaatatggctgtgcccccactgcaggcgatctgaaaagccccctctggagaaaattttaccattactcgccagcttacaaaggatcagggtgagacttcctgaaggagacgcactgagatacatgatcgagcggacagttaactggcagcaccgcgcacagcagcttctgtccagtgggaacttgaagttcgtgcaggatagagtggggtcaggactcctgtactcaaggtggcaagcaagtgccggccaagtaagcgatactaacaaagtttcacagccacccggtacaacttcattctccctgccagacgattgggataaccggactagctacctgcacagcccattttcaaccggccgatcctgtatcccgttgcacggagtttctcctgaggtgaatgaactgctaatggaggcgcagctgctccaggtttccctccccgaaatccaggagctatatcaaactttactcgccaagccttcaccagcgcagcagaccgacaggagcagccctgttcgaccctcttctgaaaaaaacgattgttgtcggggaaaaagggatggaatcaactccctggaacgcaagttgaagaggcgcctagaacgtgagggcctgagcagcgaaagatgggagcgcgtcaaaaagatgcggactccctag

SEQ ID NO: 166605 - DNA, 4635 bp, Artificial Sequence
  derived and/or modified sequence
atggaggctgctaccaccctgcaccctggccctagacccgccctccccctggggggaccggggccccttggagagtttctgcctccacccgagtgcccggttttcgaaccttcatgggaagagtttgccgatccattcgctttcattcacaagattaggccaatcgccgagcagacaggcatctgtaaagtgcgcccgcctcccgattggcagccgccttttgcctgtgatgtcgataaacttcactttactcccaggatccagcggctgaatgaactcgaagctcaaacccgagtgaagctcaactttcttgaccaaatcgctaagtactgggagcttcagggtagcaccctaaagataccccacgtcgagaggaaaattctcgacctgttccaactgaataaactggtggcagaagaggggggtttcgcagtggtgtgtaaggatcgtaagtggactaaaatagcaaccaagatggggttcgcacctggcaaggcagtgggttcccacatccgtggtcactatgagagaattttgaatccatataacctgtttctcagtggtgactctcttcgctgtctgcagaagccgaacttgacaaccgatacaaaggacaaagaatacaagcctcacgatatcccacagcgccagagcgtccaaccatctgagacttgcccacctgcccgacgggctaagcggatgagagctgaggcgatgaacatcaagattgaacctgaggaaaccaccgaagccagaactcacaatcttagacgccgaatgggatgccctaccccgaaatgcgaaaatgaaaaggagatgaagagcagcataaaacaagaaccaatcgagaggaaagattatattgtggaaaatgaaaaggaaaaaccgaagagccggtccaaaaaggcaacaaacgccgtagatctttacgtatgcctactctgcgggtctgggaatgacgaagataggctgttgttgtgcgatggatgtgacgactcgtatcacacattttgcctgattccaccgcttcacgatgtgcccaaaggtgactggcggtgtcctaaatgcctcgcccaagaatgtagtaagccacaggaggcatttgggttcgaacaggccgccagggattacacccttcggactttcggggagatggctgacgcgttcaagtctgattatttcaacatgccagtacatatggtgcctacagaacttgtggagaaggaattctggcgtctggtaagtaccatagaagaggatgtgaccgtggagtacggtgccgatatcgcaagtaaagagttcgggtccggctttcctgttagagacgggaaaatcaagctgagcccagaagaagaagaatatttggactcgggttggaatttgaataacatgccagtgatggagcagtccgtattggctcacatcactgctgatatctgcgggatgaagctgccttggctctatgtgggcatgtgcttcagctccttctgctggcacatagaggaccactggtcttattctattaattaccttcactggggggagcctaagacctggtacggcgtgcctggatatgccgctgagcagctagaaaacgttatgaagaagcttgcccctgagctgtttgtttcccagcctgatctgctccaccaactcgttacgattatgaatcccaatacactcatgactcacgaggtgcctgtctacaggaccaatcagtgtgctggggaattcgtcatcacattcccacgagcctaccacagtgggtttaaccagggattcaatttcgctgaggcagtgaacttttgcactgtggattggctgcctctgggtaggcagtgcgttgagcactaccgactgctgcacaggtattgcgtgttctctcatgatgagatgatttgtaaaatggcgtcaaaagctgatgtgctggatgtggtggtggcatcaaccgtgcagaaggatatggctattatgattgaggatgaaaaggccctgagagaaacagtccgtaaactcggcgtgatcgactcggaaaggatggactttgagctacttccggatgacgaaagacagtgtgtcaaatgtaaaacaacatgtttcatgagcgctatatcctgctcctgtaagcctggactgctggtctgtttacaccatgttaaggagctgtgctcttgccctccttacaagtacaaacttcgatatagatataccctggacgacttatatccaatgatgaatgcattaaaactgagggccgaaagttacaatgagtgggccctaaacgtgaatgaggctctggaggccaagatcaacaagaaaaagagcttagtgagctttaaagctcttatagaggagtcggagatgaagaagttcccagataatgatctgctccgccatctccggttggtgactcaagatgcggagaagtgtgcatctgtggcacagcaactgctaaacggaaaaagacagacccgctaccgttccggcggggggaaatcccagaatcagctgaccgtcaacgaactgagacagttcgtcactcagctgtatgcgctgccctgtgtgcttagtcagacccccttactcaaagacctgctgaatcgcgtggaagacttccagcagcactctcagaaactgttatctgaggaaaccccaagcgccgccgagctccaagacctcctagatgtgtcttttgaatttgacgtggaactgccccagctggccgaaatgaggatccgcctcgagcaagctagatggctggaagaggttcagcaggcttgcctggatcctagcagtctgaccctggatgatatgagacgattaatcgacctcggcgttggtctggcgccttactcagctgtggaaaaagctatggcccgtctccaggaattactaactgtcagcgagcactgggacgacaaggcaaagagtttgctcaaagcccggccaaggcacagccttaattccctggcaactgccgtgaaggaaatcgaggagatcccagcctatctccccaatggcgcagctcttaaagattcggtgcagcgtgcaagggactggctccaggacgtcgaggggctccaggcaggaggcagagtgccagtcctagacactctcattgagcttgttactaggggacgcagcatccccgtccatttaaactcgctgcctcggcttgaaacactagttgctgaggtgcaggcctggaaagaatgcgctgttaacactttcctgacagaaaacagcccatatagtctgctggaagtcctttgtccacgctgcgacattgggctgttgggcctcaaacgcaagcagagaaaactgaaggagcctctgcctaatggtaaaaaaaaatccacaaaactggaatctctaagcgatctggaaagagccctcacggagtcaaaagagactgcctccgctatggcaactctgggcgaggcccggctacgagagatggaagccctgcagagtctaaggctcgctaacgagggcaagctgctctccccactccaggacgtggatatcaagatttgtctatgtcaaaaggccccagcagctccaatgatccagtgcgaactgtgtcgagatgccttccacaccagctgtgttgccgtgcctagtatatcccagggcctacgcatctggctctgccctcactgcagaagaagcgaaaaacctcccctggagaagattctgccactactcgcaagcctgcagagaattagagtgcgattgcctgaaggtgacgctctgagatatatgattgagcggactgtcaactggcagcaccgcgcacagcaattgctgtcatccggcaacctgaagttcgtccaggatagagttggtagcggcctcctctattctcggtggcaagccagcgcaggccaggtatcagatactaacaaagtttctcagcccccaggtaccacaagtttctcccttcctgatgactgggacaacagaaccagctacctccattccccattcagcaccggccggtcctgtattcccctgcatggcgtgtcgcccgaagtgaatgagctgctgatggaagcccagctgcttcaggtgagtttgccggaaattcaggagttgtaccagacactgctggccaaacctagccccgcgcaacagactgaccggagttcccctgtgaggccatctagtgagaagaacgattgctgccggggaaagcgcgatggaattaactctctggagcgcaaactgaaaaggcggctcgagcgagaagggcttagctcagaaagatgggaaagggtgaaaaaaatgaggacccctaaaaagaaaaaaatcaagctatcccaccccaaggatatgaacaactttaaactggaacgcgagaggtcatatgagttggtgcgaagtgcagaaacacactctcttccaagtgatacatcctattccgagcaggaggatagtgaagatgaagatgccatttgcccagccgtctcctgcttgcagcctgaaggcgacgaggtagactgggttcaatgcgatggtagctgtaaccaatggtttcaccaggtctgcgtcggtgtttctcctgaaatggcagaaaaggaggactacatttgcgtacgatgtacagttaaagacgccccatcacgcaagtag

SEQ ID NO: 166606 - DNA, 4161 bp, Artificial Sequence
  derived and/or modified sequence
atggggttcgccccaggcaaagccgtgggctcacatattcgcggccactacgaacggatccttaatccctacaacctgttcttgagcggggattcccttaggtgcctccagaaaccgaacctgacaacagacacaaaagacaaggagtataagcctcacgatatcccacagcggcagagcgttcagccaagtgagacttgtccccctgcgcggagagccaagagaatgcgtgcagaagcgatgaatataaaaattgagcccgaggagacaaccgaagcaaggacacacaacttgagacgcagaatgggctgtcctacaccaaaatgtgagaacgaaaaagaaatgaaaagcagcatcaagcaagagccaatcgaacgcaaagactatatcgtagagaacgaaaaggaaaaaccgaaaagcaggtccaagaaggccactaacgccgtggatttgtacgtgtgcctgctctgcggctccggtaacgacgaagatcgcctgttactgtgtgacgggtgcgatgatagctaccacaccttctgtttgatcccccctctgcatgatgtgccgaagggagattggaggtgtccaaagtgcttagctcaggaatgctcgaagccacaggaagcattcggctttgaacaggctgcccgggattacaccctaaggacctttggagaaatggccgacgccttcaagtctgactacttcaatatgcctgtccatatggtacctacagaattggtggagaaggagttttggagacttgtgtcgaccatagaggaagacgtgaccgttgaatatggcgcagatattgccagcaaagagtttgggagtggctttcccgtgcgggatggaaaaatcaagctttctccagaagaggaggagtatctggatagcgggtggaaccttaacaacatgcctgtgatggagcagagcgtgctcgctcacatcacagctgatatatgtgggatgaagctaccatggctttatgtgggcatgtgcttctcatccttttgttggcatattgaggatcattggtcatattctattaactacctgcattggggtgagccaaaaacctggtacggtgttcccggatacgcagcagagcaactagagaacgtcatgaaaaagctggctcccgagcttttcgtctcccagcctgacctcttacaccagcttgttactattatgaacccgaacaccctgatgacccacgaagtgccagtttacagaacaaaccaatgcgccggggaattcgttataactttccctcgtgcataccactcggggttcaatcagggtttcaacttcgcggaggccgtgaacttttgcactgttgactggctgcctctaggccgccagtgtgtggagcactatagattgctgcaccgctactgcgtttttagtcacgatgagatgatatgcaaaatggcaagtaaggccgacgtgcttgacgttgtcgtggcatccaccgtacagaaagatatggcaattatgatagaggacgaaaaggctctgcgggaaacagtgagaaagttgggcgtgattgactctgagcgcatggacttcgagttgcttcccgatgacgagcgccagtgtgtcaaatgtaaaacaacatgttttatgtctgctatctcctgctcctgtaaacctggtctgcttgtttgcctacaccatgtgaaagaactgtgctcctgccccccatacaaatacaagcttagatatcggtataccctggacgatttgtaccccatgatgaatgcgctgaagttgcgtgccgaaagctataacgagtgggccctcaacgtcaacgaggcccttgaggctaaaatcaacaaaaagaaaagcctggtaagttttaaggctctgatagaagagagcgagatgaagaagtttccagacaatgaccttcttaggcacctgaggctggtgacccaggatgctgaaaagtgcgcatctgtcgctcagcagctgttgaatgggaagcggcagaccaggtaccgctctggaggaggcaagtctcaaaaccagctcaccgtgaatgagctgcggcagtttgtcactcaattgtatgctcttccgtgcgtgctgtcgcagacacccttattgaaagacctgctcaatcgtgtcgaggactttcagcagcacagccaaaaactgctgtcagaagagaccccgtccgcggccgagcttcaggatcttttggacgtgagctttgaattcgacgttgagttgcctcagctggctgaaatgcgcatacgtctcgagcaggctcgctggctggaagaggtgcagcaagcttgcctagacccatcctcccttacattggatgacatgaggagactcatcgatcttggagttggcctggcaccatacagtgcagtggagaaggccatggcccgcctccaagaattgctcacagtgtccgaacactgggatgacaaagctaagtcattgctgaaagcgcgcccgcgccactcattgaattccctggcaacagctgtcaaggagattgaagagatccccgcatacttgccaaacggggcagcgctgaaggattcagttcagcgcgcgcgcgactggcttcaagatgtggagggacttcaagcgggagggcgcgtacctgtgctggatactttgatagagttggttacacgcggcagaagcataccggtgcatttaaatagcctcccccgcctggagactctcgttgccgaggtgcaggcctggaaggaatgcgcagtgaacacatttttaaccgagaactccccttatagcttgcttgaagtgctgtgtccacggtgtgatattgggctgttgggtctgaagcgcaaacagcgcaagctgaaggagccgctgccgaacggaaagaagaagtccactaagctcgagagcctgtctgatttggagcgggcactaacagaatccaaggagacagcatccgccatggctactctcggcgaggcccgcctgagggagatggaagcacttcagtcacttcgcctggctaacgagggaaaactcctgagcccgctgcaggatgtcgatatcaagatctgtctatgccaaaaagccccagccgcccctatgatccagtgtgaattatgccgggatgcatttcatacaagttgcgtggcagtgccctccatttcacagggactgcgcatctggctctgtccacactgtcgccgaagcgagaaaccaccgctggaaaaaatactgccgctcctagcttcgctgcagagaatccgggtgcggctgcctgagggcgatgctttaagatacatgattgagaggacagtgaactggcagcatagagcccaacagctactgtcctccgggaatctgaaatttgtgcaggatcgcgtcggatctgggcttctgtatagccgatggcaagctagcgccggtcaggttagcgatactaataaagtgtcccaacccccgggcaccacgtcctttagcctgcccgatgactgggacaacaggacttcctacttgcacagccctttctccacaggcaggtcttgtatcccactgcacggggtgtctccggaagtgaatgagcttctaatggaggctcaactcttacaggtgtcgttgcctgagatccaagagttgtaccagaccctgttggccaaaccatcccccgctcagcagactgatagaagttcacctgtacgcccaagctcagagaaaaatgattgttgtcgaggcaaacgagacggtatcaacagccttgaaagaaaactgaagcggaggctggagcgagagggcctgtcttctgaaagatgggagagggtgaaaaaaatgcgaacccctaagaaaaaaaaaattaagctgtctcatcccaaggatatgaacaatttcaagctggaacgcgaacgaagttatgagctggtccgttctgcagagactcacagtctgccctctgatacatcctattctgaacaggaggacagtgaggacgaagatgcaatttgccccgccgttagctgcctacagcctgagggggacgaagtcgattgggttcaatgtgatggaagctgtaatcagtggtttcatcaggtgtgtgtcggggtgagccccgaaatggccgagaaagaagactatatatgtgtccggtgcacagtgaaggacgcaccctcccgaaagtag

SEQ ID NO: 166607 - DNA, 3828 bp, Artificial Sequence
  derived and/or modified sequence
atgggctttgcccctgggaaggctgtgggcagccacatccggggccactatgagcgcatcctgaacccctacaacctcttcctgagcggggacagcctgcgctgcctgcagaagcccaacctgaccacagacaccaaggacaaggagtacaagccccatgacatcccccagaggcagagcgtgcagcccagcgagacctgccccccagcccggcgggccaagaggatgagagctgaggccatgaacatcaagattgagcctgaggagaccacagaggcccggacccacaacctgcggcggaggatgggctgccccacccccaagtgtgaaaatgagaaggagatgaagagcagcatcaagcaggagcccatcgagaggaaggactacatcgtggagaatgagaaggagaagcccaagagccgcagcaagaaggccaccaatgctgtggacctgtatgtgtgcctgctgtgtggcagcggaaatgatgaagatcggctgctgctgtgtgatggctgtgatgacagctaccacaccttctgcctgatcccccccctgcatgatgtgcccaagggggactggcgctgccccaagtgcctggcccaggagtgcagcaagccccaggaggccttcggctttgagcaggccgcccgggactacaccctgcggaccttcggggagatggctgatgccttcaagagtgactacttcaacatgcctgtgcacatggtgcccacagagctggtggagaaggagttctggaggctggtgtccaccattgaagaagatgtgacagtggagtatggagctgacatcgccagcaaggagtttggcagcggcttccctgtgagagatggcaagatcaagctgagccctgaggaggaggagtacctggacagcggctggaacctgaacaacatgcctgtgatggagcagagcgtgctggcccacatcacagctgacatctgtggcatgaagctgccctggctgtatgtgggcatgtgcttcagcagcttctgctggcacatcgaggaccactggagctacagcatcaactacctgcactggggcgagcccaagacctggtacggcgtgcccggctacgccgctgagcagctggagaatgtgatgaagaagctggcccctgagctgtttgtgtcccagcctgacctgctgcaccagctggtgaccatcatgaaccccaacaccctgatgacccatgaggtgcctgtgtaccgcaccaaccagtgtgccggggagtttgtgatcaccttcccccgggcctaccacagcggcttcaaccagggcttcaactttgctgaggccgtgaacttctgcaccgtggactggctgcccctgggccggcagtgtgtggagcactaccgcctgctgcaccgctactgtgtgttcagccatgatgagatgatctgcaagatggccagcaaggcagatgtgctggatgtggtggtggccagcacagtgcagaaggacatggccatcatgattgaagatgagaaggccctgcgggagaccgtgaggaagctgggcgtgattgattctgagaggatggactttgagctgctgcctgatgatgagcggcagtgtgtgaagtgcaagaccacctgcttcatgtctgccatcagctgcagctgcaagccaggcctgctggtgtgcctgcaccacgtgaaggagctgtgcagctgccccccctacaagtacaagctgcgctaccgctacaccctggatgacctgtaccccatgatgaatgccctgaagctgcgggcagagagctacaatgagtgggccctgaatgtgaatgaggccctggaggccaagatcaacaagaagaagagcctggtgtccttcaaggccctgattgaggagagcgagatgaagaagttcccagacaatgacctgctgcggcacctgcggctggtgacccaggatgctgagaagtgtgcctctgtggcccagcagctgctgaatggcaagaggcagacccgctaccgcagcggcggcggcaagagccagaaccagctgactgtgaatgagctgcggcagtttgtgacccagctgtatgccctgccctgtgtgctgagccagacccccctgctgaaggacctgctgaacagagtggaggacttccagcagcacagccagaagctgctgtctgaggagacccccagcgctgctgagctgcaggacctgctggatgtgtcctttgaatttgatgtggagctgccccagctggccgagatgaggatccggctggagcaggcccgctggctggaggaggtgcagcaggcctgcctggaccccagcagcctgaccctggatgacatgaggcggctgattgacctgggcgtgggcctggccccctacagcgctgtggagaaggccatggcccggctgcaggagctgctgactgtgtctgagcactgggatgacaaggccaagagcctgctgaaggcccggcccaggcacagcctgaacagcctggccacagctgtgaaggagattgaggagatcccagcctacctgcccaacggggccgccctgaaggacagcgtgcagagggcccgggactggctgcaggatgtggagggcctgcaggccggcggccgggtgcctgtgctggacaccctcatcgagctggtgacccggggccgcagcatccctgtgcacctgaacagcctgccccggctggagaccctggtggccgaggtgcaggcctggaaggaatgtgctgtgaacaccttcctgacagagaacagcccctacagcctgctggaggtgctgtgcccccgctgtgacatcggcctgctgggcctgaagaggaagcagaggaagctgaaggagcccctgcccaacgggaagaagaagagcaccaagctggagagcctgagtgacctggagcgggccctgacagagagcaaggagacagccagcgccatggccaccctgggggaggcccggctgcgggagatggaggccctgcagagcctgcggctggccaatgaaggcaagctgctgagccccctgcaggatgtggacatcaagatctgcctgtgccagaaggccccagctgcccccatgatccagtgtgagctgtgcagagatgccttccacaccagctgtgtggccgtgcccagcatcagccagggcctgcgcatctggctgtgcccccactgccgccgctctgagaagccacccctggagaagatcctgcccctgctggccagcctgcagaggatccgggtgcggctgcctgaaggagatgccctgcgctacatgattgaaagaacagtgaactggcagcaccgggcccagcagctgctgagcagcggcaacctgaagtttgtgcaggacagagtgggcagcggcctgctgtacagccgctggcaggccagcgctggccaggtgtctgacaccaacaaggtgtcccagcccccaggcaccaccagcttcagcctgcctgatgactgggacaacagaaccagctacctgcacagccccttcagcacaggccgcagctgcatccccctgcacggcgtgtccccagaggtgaatgagctgctgatggaggcccagctgctgcaggtgtccctgcctgagatccaggagctgtaccagaccctgctggccaagcccagccctgcccagcagacagacaggagcagccctgtgcggcccagcagcgagaagaatgactgctgccggggcaagagagatggcatcaacagcctggagaggaagctgaagaggcggctggagcgggagggcctgagcagcgagcgctgggagcgggtgaagaagatgaggaccccctag

SEQ ID NO: 166608 - DNA, 4635 bp, Artificial Sequence
  derived and/or modified sequence
atggaggccgccaccaccctgcaccctggccccaggcctgccctgcccctgggcggccctggccccctgggggagttcctgcccccaccagaatgtcctgtgtttgagcccagctgggaggagtttgctgacccctttgccttcatccacaagatccggcccatcgccgagcagacaggcatctgcaaggtgcggcccccaccagactggcagcccccatttgcctgtgatgtggacaagctgcacttcaccccccgcatccagaggctgaatgagctggaggcccagaccagggtgaagctgaacttcctggaccagatcgccaagtactgggagctgcagggcagcaccctgaagatcccccacgtggagaggaagatcctggacctcttccagctgaacaagctggtggccgaggagggcggctttgctgtggtgtgcaaggacaggaagtggaccaagatcgccaccaagatgggctttgcccctgggaaggctgtgggcagccacatccggggccactatgagcgcatcctgaacccctacaacctcttcctgagcggggacagcctgcgctgcctgcagaagcccaacctgaccacagacaccaaggacaaggagtacaagccccatgacatcccccagaggcagagcgtgcagcccagcgagacctgccccccagcccggcgggccaagaggatgagagctgaggccatgaacatcaagattgagcctgaggagaccacagaggcccggacccacaacctgcggcggaggatgggctgccccacccccaagtgtgaaaatgagaaggagatgaagagcagcatcaagcaggagcccatcgagaggaaggactacatcgtggagaatgagaaggagaagcccaagagccgcagcaagaaggccaccaatgctgtggacctgtatgtgtgcctgctgtgtggcagcggaaatgatgaagatcggctgctgctgtgtgatggctgtgatgacagctaccacaccttctgcctgatcccccccctgcatgatgtgcccaagggggactggcgctgccccaagtgcctggcccaggagtgcagcaagccccaggaggccttcggctttgagcaggccgcccgggactacaccctgcggaccttcggggagatggctgatgccttcaagagtgactacttcaacatgcctgtgcacatggtgcccacagagctggtggagaaggagttctggaggctggtgtccaccattgaagaagatgtgacagtggagtatggagctgacatcgccagcaaggagtttggcagcggcttccctgtgagagatggcaagatcaagctgagccctgaggaggaggagtacctggacagcggctggaacctgaacaacatgcctgtgatggagcagagcgtgctggcccacatcacagctgacatctgtggcatgaagctgccctggctgtatgtgggcatgtgcttcagcagcttctgctggcacatcgaggaccactggagctacagcatcaactacctgcactggggcgagcccaagacctggtacggcgtgcccggctacgccgctgagcagctggagaatgtgatgaagaagctggcccctgagctgtttgtgtcccagcctgacctgctgcaccagctggtgaccatcatgaaccccaacaccctgatgacccatgaggtgcctgtgtaccgcaccaaccagtgtgccggggagtttgtgatcaccttcccccgggcctaccacagcggcttcaaccagggcttcaactttgctgaggccgtgaacttctgcaccgtggactggctgcccctgggccggcagtgtgtggagcactaccgcctgctgcaccgctactgtgtgttcagccatgatgagatgatctgcaagatggccagcaaggcagatgtgctggatgtggtggtggccagcacagtgcagaaggacatggccatcatgattgaagatgagaaggccctgcgggagaccgtgaggaagctgggcgtgattgattctgagaggatggactttgagctgctgcctgatgatgagcggcagtgtgtgaagtgcaagaccacctgcttcatgtctgccatcagctgcagctgcaagccaggcctgctggtgtgcctgcaccacgtgaaggagctgtgcagctgccccccctacaagtacaagctgcgctaccgctacaccctggatgacctgtaccccatgatgaatgccctgaagctgcgggcagagagctacaatgagtgggccctgaatgtgaatgaggccctggaggccaagatcaacaagaagaagagcctggtgtccttcaaggccctgattgaggagagcgagatgaagaagttcccagacaatgacctgctgcggcacctgcggctggtgacccaggatgctgagaagtgtgcctctgtggcccagcagctgctgaatggcaagaggcagacccgctaccgcagcggcggcggcaagagccagaaccagctgactgtgaatgagctgcggcagtttgtgacccagctgtatgccctgccctgtgtgctgagccagacccccctgctgaaggacctgctgaacagagtggaggacttccagcagcacagccagaagctgctgtctgaggagacccccagcgctgctgagctgcaggacctgctggatgtgtcctttgaatttgatgtggagctgccccagctggccgagatgaggatccggctggagcaggcccgctggctggaggaggtgcagcaggcctgcctggaccccagcagcctgaccctggatgacatgaggcggctgattgacctgggcgtgggcctggccccctacagcgctgtggagaaggccatggcccggctgcaggagctgctgactgtgtctgagcactgggatgacaaggccaagagcctgctgaaggcccggcccaggcacagcctgaacagcctggccacagctgtgaaggagattgaggagatcccagcctacctgcccaacggggccgccctgaaggacagcgtgcagagggcccgggactggctgcaggatgtggagggcctgcaggccggcggccgggtgcctgtgctggacaccctcatcgagctggtgacccggggccgcagcatccctgtgcacctgaacagcctgccccggctggagaccctggtggccgaggtgcaggcctggaaggaatgtgctgtgaacaccttcctgacagagaacagcccctacagcctgctggaggtgctgtgcccccgctgtgacatcggcctgctgggcctgaagaggaagcagaggaagctgaaggagcccctgcccaacgggaagaagaagagcaccaagctggagagcctgagtgacctggagcgggccctgacagagagcaaggagacagccagcgccatggccaccctgggggaggcccggctgcgggagatggaggccctgcagagcctgcggctggccaatgaaggcaagctgctgagccccctgcaggatgtggacatcaagatctgcctgtgccagaaggccccagctgcccccatgatccagtgtgagctgtgcagagatgccttccacaccagctgtgtggccgtgcccagcatcagccagggcctgcgcatctggctgtgcccccactgccgccgctctgagaagccacccctggagaagatcctgcccctgctggccagcctgcagaggatccgggtgcggctgcctgaaggagatgccctgcgctacatgattgaaagaacagtgaactggcagcaccgggcccagcagctgctgagcagcggcaacctgaagtttgtgcaggacagagtgggcagcggcctgctgtacagccgctggcaggccagcgctggccaggtgtctgacaccaacaaggtgtcccagcccccaggcaccaccagcttcagcctgcctgatgactgggacaacagaaccagctacctgcacagccccttcagcacaggccgcagctgcatccccctgcacggcgtgtccccagaggtgaatgagctgctgatggaggcccagctgctgcaggtgtccctgcctgagatccaggagctgtaccagaccctgctggccaagcccagccctgcccagcagacagacaggagcagccctgtgcggcccagcagcgagaagaatgactgctgccggggcaagagagatggcatcaacagcctggagaggaagctgaagaggcggctggagcgggagggcctgagcagcgagcgctgggagcgggtgaagaagatgaggacccccaagaagaagaagatcaagctgagccaccccaaggacatgaacaacttcaagctggagcgggagaggagctatgagctggtgcgctctgctgagacccacagcctgcccagcgacaccagctacagcgagcaggaggacagtgaagatgaagatgccatctgcccagctgtgtcctgcctgcagccagaaggagatgaggtggactgggtgcagtgtgatggcagctgcaaccagtggttccaccaggtgtgtgtgggcgtgtccccagagatggccgagaaggaggactacatctgtgtgcgctgcaccgtgaaggatgcccccagcaggaagtag

SEQ ID NO: 166609 - DNA, 4161 bp, Artificial Sequence
  derived and/or modified sequence
atgggctttgcccctgggaaggctgtgggcagccacatccggggccactatgagcgcatcctgaacccctacaacctcttcctgagcggggacagcctgcgctgcctgcagaagcccaacctgaccacagacaccaaggacaaggagtacaagccccatgacatcccccagaggcagagcgtgcagcccagcgagacctgccccccagcccggcgggccaagaggatgagagctgaggccatgaacatcaagattgagcctgaggagaccacagaggcccggacccacaacctgcggcggaggatgggctgccccacccccaagtgtgaaaatgagaaggagatgaagagcagcatcaagcaggagcccatcgagaggaaggactacatcgtggagaatgagaaggagaagcccaagagccgcagcaagaaggccaccaatgctgtggacctgtatgtgtgcctgctgtgtggcagcggaaatgatgaagatcggctgctgctgtgtgatggctgtgatgacagctaccacaccttctgcctgatcccccccctgcatgatgtgcccaagggggactggcgctgccccaagtgcctggcccaggagtgcagcaagccccaggaggccttcggctttgagcaggccgcccgggactacaccctgcggaccttcggggagatggctgatgccttcaagagtgactacttcaacatgcctgtgcacatggtgcccacagagctggtggagaaggagttctggaggctggtgtccaccattgaagaagatgtgacagtggagtatggagctgacatcgccagcaaggagtttggcagcggcttccctgtgagagatggcaagatcaagctgagccctgaggaggaggagtacctggacagcggctggaacctgaacaacatgcctgtgatggagcagagcgtgctggcccacatcacagctgacatctgtggcatgaagctgccctggctgtatgtgggcatgtgcttcagcagcttctgctggcacatcgaggaccactggagctacagcatcaactacctgcactggggcgagcccaagacctggtacggcgtgcccggctacgccgctgagcagctggagaatgtgatgaagaagctggcccctgagctgtttgtgtcccagcctgacctgctgcaccagctggtgaccatcatgaaccccaacaccctgatgacccatgaggtgcctgtgtaccgcaccaaccagtgtgccggggagtttgtgatcaccttcccccgggcctaccacagcggcttcaaccagggcttcaactttgctgaggccgtgaacttctgcaccgtggactggctgcccctgggccggcagtgtgtggagcactaccgcctgctgcaccgctactgtgtgttcagccatgatgagatgatctgcaagatggccagcaaggcagatgtgctggatgtggtggtggccagcacagtgcagaaggacatggccatcatgattgaagatgagaaggccctgcgggagaccgtgaggaagctgggcgtgattgattctgagaggatggactttgagctgctgcctgatgatgagcggcagtgtgtgaagtgcaagaccacctgcttcatgtctgccatcagctgcagctgcaagccaggcctgctggtgtgcctgcaccacgtgaaggagctgtgcagctgccccccctacaagtacaagctgcgctaccgctacaccctggatgacctgtaccccatgatgaatgccctgaagctgcgggcagagagctacaatgagtgggccctgaatgtgaatgaggccctggaggccaagatcaacaagaagaagagcctggtgtccttcaaggccctgattgaggagagcgagatgaagaagttcccagacaatgacctgctgcggcacctgcggctggtgacccaggatgctgagaagtgtgcctctgtggcccagcagctgctgaatggcaagaggcagacccgctaccgcagcggcggcggcaagagccagaaccagctgactgtgaatgagctgcggcagtttgtgacccagctgtatgccctgccctgtgtgctgagccagacccccctgctgaaggacctgctgaacagagtggaggacttccagcagcacagccagaagctgctgtctgaggagacccccagcgctgctgagctgcaggacctgctggatgtgtcctttgaatttgatgtggagctgccccagctggccgagatgaggatccggctggagcaggcccgctggctggaggaggtgcagcaggcctgcctggaccccagcagcctgaccctggatgacatgaggcggctgattgacctgggcgtgggcctggccccctacagcgctgtggagaaggccatggcccggctgcaggagctgctgactgtgtctgagcactgggatgacaaggccaagagcctgctgaaggcccggcccaggcacagcctgaacagcctggccacagctgtgaaggagattgaggagatcccagcctacctgcccaacggggccgccctgaaggacagcgtgcagagggcccgggactggctgcaggatgtggagggcctgcaggccggcggccgggtgcctgtgctggacaccctcatcgagctggtgacccggggccgcagcatccctgtgcacctgaacagcctgccccggctggagaccctggtggccgaggtgcaggcctggaaggaatgtgctgtgaacaccttcctgacagagaacagcccctacagcctgctggaggtgctgtgcccccgctgtgacatcggcctgctgggcctgaagaggaagcagaggaagctgaaggagcccctgcccaacgggaagaagaagagcaccaagctggagagcctgagtgacctggagcgggccctgacagagagcaaggagacagccagcgccatggccaccctgggggaggcccggctgcgggagatggaggccctgcagagcctgcggctggccaatgaaggcaagctgctgagccccctgcaggatgtggacatcaagatctgcctgtgccagaaggccccagctgcccccatgatccagtgtgagctgtgcagagatgccttccacaccagctgtgtggccgtgcccagcatcagccagggcctgcgcatctggctgtgcccccactgccgccgctctgagaagccacccctggagaagatcctgcccctgctggccagcctgcagaggatccgggtgcggctgcctgaaggagatgccctgcgctacatgattgaaagaacagtgaactggcagcaccgggcccagcagctgctgagcagcggcaacctgaagtttgtgcaggacagagtgggcagcggcctgctgtacagccgctggcaggccagcgctggccaggtgtctgacaccaacaaggtgtcccagcccccaggcaccaccagcttcagcctgcctgatgactgggacaacagaaccagctacctgcacagccccttcagcacaggccgcagctgcatccccctgcacggcgtgtccccagaggtgaatgagctgctgatggaggcccagctgctgcaggtgtccctgcctgagatccaggagctgtaccagaccctgctggccaagcccagccctgcccagcagacagacaggagcagccctgtgcggcccagcagcgagaagaatgactgctgccggggcaagagagatggcatcaacagcctggagaggaagctgaagaggcggctggagcgggagggcctgagcagcgagcgctgggagcgggtgaagaagatgaggacccccaagaagaagaagatcaagctgagccaccccaaggacatgaacaacttcaagctggagcgggagaggagctatgagctggtgcgctctgctgagacccacagcctgcccagcgacaccagctacagcgagcaggaggacagtgaagatgaagatgccatctgcccagctgtgtcctgcctgcagccagaaggagatgaggtggactgggtgcagtgtgatggcagctgcaaccagtggttccaccaggtgtgtgtgggcgtgtccccagagatggccgagaaggaggactacatctgtgtgcgctgcaccgtgaaggatgcccccagcaggaagtag

SEQ ID NO: 166610 - DNA, 4418 bp, Artificial Sequence
  derived and/or modified sequence
acactcccggcttcttctggctcagccgctcggctccccggggaggcctgggctgtgctggtggggatggggtccgggcgaggccgtgtttgtaggggaacgtcagacggagagacctccgaagatttcgtgctcgtttcccccggccctcaggctccgggcactgaaaggcagtcacccaccgcagcccttccagccctgtctacagcgcctcgggcctgggggcagtgagtgaggggtgggtgttgctgaaaccatccgtaacggctccaacgttcgctgaggagagcccggccaactccttcctccgtggccggaactgggattggcagccaccatttgcatgtgatgttgataaacttcattttacgccacgtatccagagactgaatgaattggaggcccaaactcgtgtaaaattgaatttcttggaccagattgcaaagtactgggagttacagggaagtactctgaaaattccacatgtggagaggaagatcttggacttatttcagcttaataagttagttgcagaagaaggtggatttgcagttgtttgcaaggatagaaaatggaccaaaattgctaccaagatggggtttgctcctggcaaagcagtgggctcacatatcagagggcattatgaacgaattctcaacccctacaacttattcctgtccggagacagcctaaggtgtttgcagaagccaaacctgaccacagacactaaggacaaggagtacaaaccccatgatattccccagaggcagtctgtgcagccttcggaaacgtgccccccagcccgacgagcaaaacgcatgagagcagaggccatgaatattaaaatagaacccgaggagacaacggaagccagaactcataatctgagacgtcgaatgggttgtccaactccaaaatgtgaaaatgagaaagaaatgaagagtagcatcaagcaagaacctattgagaggaaagattatattgtagaaaatgagaaggaaaagcccaagagtcgatctaaaaaagccaccaatgctgtggacctgtatgtctgtcttttatgtggcagtggcaatgatgaagaccggctactgttgtgtgatggctgtgatgacagttaccataccttttgcttgatcccacctctccatgatgttcccaagggagactggaggtgtcctaagtgtttggctcaggaatgtagtaagccacaagaagcatttggctttgaacaagcagccagggactataccctccgtacttttggggaaatggcagatgcgttcaaatctgattacttcaacatgccagtccatatggtccccacagagcttgttgagaaagaattttggagactagtaagcactattgaggaggatgtcacagtggaatatggagctgacattgcctcaaaggaatttggcagtggctttcctgtccgagatgggaaaatcaaactctcacctgaggaagaggagtatcttgatagtggctggaatttgaacaacatgccagtgatggagcagtctgtccttgcacatattactgctgatatatgtggcatgaaacttccttggttgtatgtgggaatgtgcttttcttcattctgttggcacattgaagaccactggagctattcaattaactacttgcactggggtgagccaaaaacctggtatggagtcccagggtatgctgctgagcagctagaaaatgtaatgaagaaactagctccagaactctttgtgtcccagccggatctcctccatcagcttgtgaccatcatgaaccccaataccctgatgactcatgaagtgcctgtttaccgaactaatcagtgtgctggggagtttgtgattacatttccaagagcctaccacagtggttttaaccagggttttaattttgctgaggctgttaacttctgcactgttgattggctgccattaggccgacagtgtgtggagcattatcgcttgcttcatcgatattgtgtgttttcccacgatgagatgatctgcaagatggcttccaaggctgatgtattagatgttgtagtggcttcaactgttcagaaagacatggccattatgattgaggatgagaaagctttaagagaaactgtccgtaaattgggagtgattgattcggaaagaatggattttgagctgttgccagatgatgaacgtcagtgtgtaaaatgcaaaactacatgcttcatgtctgccatctcctgttcttgtaaacctggccttcttgtttgcctgcatcatgtaaaagaattgtgttcctgtcctccttacaaatataaattgcggtataggtacacgctggatgatctctaccctatgatgaatgcattgaagcttcgagcagaatcttacaacgaatgggccttgaatgtgaatgaagctttggaggcaaagatcaacaagaagaaaagccttgtcagcttcaaggctttaattgaagaatctgaaatgaagaaattcccagacaatgatcttttgcgacaccttcgcctagtcacacaggatgcagagaagtgtgcctctgttgcgcagcagttgcttaatggcaaaaggcaaactagatatcgatctggtggagggaaatcccaaaatcagttgacagtgaatgagctccggcagtttgtaacacagctgtatgctcttccatgtgtcctcagtcagacaccattactaaaggatctcttgaatcgtgtagaagattttcaacagcatagtcagaaactactctctgaggaaacgcctagtgctgcggagctgcaggacttgctagatgtcagctttgaatttgatgttgaacttccacagcttgctgagatgcgtatccgtttggaacaagcccgttggctagaagaggtgcagcaagcttgcctagaccccagctcccttactttagatgatatgagacgtctcatagacctaggggtagggctggccccgtattcagcagtggagaaagctatggcccggctgcaggaactgctcacagtgtcagagcactgggacgacaaagccaagagtctcctcaaggccaggccacgacattcattgaatagccttgctacggcagtaaaggaaatcgaagagatccctgcatatctgcccaatggtgcggctctgaaagactcagtgcagagagccagagactggcttcaggatgtagagggcctgcaggctggaggacgtgtgccagtgttagacacactcatagaacttgttacacgaggccgatctatccccgtacatctgaattctttgccaagactggaaaccctagtagctgaggttcaggcttggaaagaatgtgctgttaatacattcttgactgagaattctccatattctctcttagaggtgctgtgtcctcgatgtgatattggccttttgggattgaaaaggaagcagagaaagttaaaggagcccttgccaaatggaaagaaaaaaagcaccaaattagagagtctgagtgacctggagagagctttaactgaaagcaaggagactgcttcagctatggcaactcttggggaagctcgcctaagggaaatggaagccttgcagtctctcagactcgccaatgaagggaaattgctgtcgcctctccaagatgtggatataaaaatctgcctatgtcagaaggccccagctgcccctatgattcaatgtgaactctgcagggatgctttccacaccagttgtgtggcggtacccagtatttcacagggcctgcgaatctggctttgtccccattgtcggaggtcagagaaacctccattagagaaaattctgcccctgctcgcctcccttcagcgtatccgagttcgccttcctgagggagatgcacttcgatatatgattgaaagaaccgtgaactggcagcacagagcccagcaactgctttcgtcagggaatcttaaatttgtgcaagatcgagtgggctcaggactgttatatagcagatggcaagcctcagcaggacaggtgtcagacacaaacaaggtatctcaacctcctggcacaacatcattttctttgcctgatgactgggacaacagaacctcatatttgcactcccccttctcaactggacgaagttgtatccccctccatggtgttagtccagaagtgaatgaactattgatggaagcccagctgctccaggtatcccttcctgaaattcaggaactttaccagactttacttgcaaagccaagccctgctcagcagactgaccgaagctcaccagtgagacccagcagtgagaagaatgactgttgccgagggaagcgagatggaattaacagtcttgagagaaaactgaagagacgcctggaaagagagggcctctccagtgagcggtgggaacgagttaagaaaatgcggaccccc

SEQ ID NO: 166611 - DNA, 7438 bp, Artificial Sequence
  derived and/or modified sequence
ttcagtctgttgaaggataccccgttgtgtatttctacctgtatgtaccagagacacctcaaattcaaaatgtccagaaatgaacacagtatcttcttcccttgagtaactcgccttctgtatataattggggtgaatgttccagcaatgccaacgggctagcatctactcaggcaggtacgccagacatctgaatcttaatacctcgtcgtcccccctcaatctgtcactatgtcctaattttatttcctacctttgcatcccttcctcataattatcagcaccactgccttaatttagatcctatcattccttgtctggattatttcaagtctttcgcccctctcaagtctgacctcgtcatagactgtttgtggatgattattttccctgcaacatctccacctcccaatagtctccatcacttattagccatgtgaattatggcaaattgcttaacctacctatgcctcactttccttattgtaaagtggaaataagagtacctatctcatagggttgtgtgattaatcatgcgatgcaattagaacagtgcctaggatatgaaagtgccccaaaatgttacgttattattattattactactattgccttctcatgaacatgctatgtgtatgttcaagctgttatctctactggaaaatccttctccgtttccaatactctttccaaaaccccctcctgggttttactgcacctaccattgtgtactgacgtgattgaatgattggcttatgggactgatcctttctaccagacttaacttcttcagggcaggaactctgatacatagtaaatggtcaataaaagttggctcaactgaaaccctaaggataaactccatccacagcggaaggcgcggccccgcccgattcgggggcggggcggggagccgcgcgcggagggtgggtcgatgggggtggggtgggactctttttcctcgccgtggcggcggaggcgcacggcgtgggcttgcggcgagacgtcgtcgtcggaggctgaaaaagcccaaggtgctgccgttgcccgtacaactcggacttgctgttgctcgagccgcgtctgcacgggtctcggaccgagcggagctcgcagcctcggtcccggagcccaccttcgcctcgcccttgcccagcctgcggtgatggaggcggccaccacactgcacccaggcccgcgcccggcgctgcccctcgggggcccgggcccgctgggcgagttcctgcctccacccgagtgcccggtcttcgaacccagctgggaagagttcgcggaccccttcgctttcatccacaagatccggcccatagccgagcagactggcatctgtaaggtgcggccgccgccggattggcagccaccatttgcatgtgatgttgataaacttcattttacgccacgtatccagagactgaatgaattggaggcccaaactcgtgtaaaattgaatttcttggaccagattgcaaagtactgggagttacagggaagtactctgaaaattccacatgtggagaggaagatcttggacttatttcagcttaataagttagttgcagaagaaggtggatttgcagttgtttgcaaggatagaaaatggaccaaaattgctaccaagatggggtttgctcctggcaaagcagtgggctcacatatcagagggcattatgaacgaattctcaacccctacaacttattcctgtccggagacagcctaaggtgtttgcagaagccaaacctgaccacagacactaaggacaaggagtacaaaccccatgatattccccagaggcagtctgtgcagccttcggaaacgtgccccccagcccgacgagcaaaacgcatgagagcagaggccatgaatattaaaatagaacccgaggagacaacggaagccagaactcataatctgagacgtcgaatgggttgtccaactccaaaatgtgaaaatgagaaagaaatgaagagtagcatcaagcaagaacctattgagaggaaagattatattgtagaaaatgagaaggaaaagcccaagagtcgatctaaaaaagccaccaatgctgtggacctgtatgtctgtcttttatgtggcagtggcaatgatgaagaccggctactgttgtgtgatggctgtgatgacagttaccataccttttgcttgatcccacctctccatgatgttcccaagggagactggaggtgtcctaagtgtttggctcaggaatgtagtaagccacaagaagcatttggctttgaacaagcagccagggactataccctccgtacttttggggaaatggcagatgcgttcaaatctgattacttcaacatgccagtccatatggtccccacagagcttgttgagaaagaattttggagactagtaagcactattgaggaggatgtcacagtggaatatggagctgacattgcctcaaaggaatttggcagtggctttcctgtccgagatgggaaaatcaaactctcacctgaggaagaggagtatcttgatagtggctggaatttgaacaacatgccagtgatggagcagtctgtccttgcacatattactgctgatatatgtggcatgaaacttccttggttgtatgtgggaatgtgcttttcttcattctgttggcacattgaagaccactggagctattcaattaactacttgcactggggtgagccaaaaacctggtatggagtcccagggtatgctgctgagcagctagaaaatgtaatgaagaaactagctccagaactctttgtgtcccagccggatctcctccatcagcttgtgaccatcatgaaccccaataccctgatgactcatgaagtgcctgtttaccgaactaatcagtgtgctggggagtttgtgattacatttccaagagcctaccacagtggttttaaccagggttttaattttgctgaggctgttaacttctgcactgttgattggctgccattaggccgacagtgtgtggagcattatcgcttgcttcatcgatattgtgtgttttcccacgatgagatgatctgcaagatggcttccaaggctgatgtattagatgttgtagtggcttcaactgttcagaaagacatggccattatgattgaggatgagaaagctttaagagaaactgtccgtaaattgggagtgattgattcggaaagaatggattttgagctgttgccagatgatgaacgtcagtgtgtaaaatgcaaaactacatgcttcatgtctgccatctcctgttcttgtaaacctggccttcttgtttgcctgcatcatgtaaaagaattgtgttcctgtcctccttacaaatataaattgcggtataggtacacgctggatgatctctaccctatgatgaatgcattgaagcttcgagcagaatcttacaacgaatgggccttgaatgtgaatgaagctttggaggcaaagatcaacaagaagaaaagccttgtcagcttcaaggctttaattgaagaatctgaaatgaagaaattcccagacaatgatcttttgcgacaccttcgcctagtcacacaggatgcagagaagtgtgcctctgttgcgcagcagttgcttaatggcaaaaggcaaactagatatcgatctggtggagggaaatcccaaaatcagttgacagtgaatgagctccggcagtttgtaacacagctgtatgctcttccatgtgtcctcagtcagacaccattactaaaggatctcttgaatcgtgtagaagattttcaacagcatagtcagaaactactctctgaggaaacgcctagtgctgcggagctgcaggacttgctagatgtcagctttgaatttgatgttgaacttccacagcttgctgagatgcgtatccgtttggaacaagcccgttggctagaagaggtgcagcaagcttgcctagaccccagctcccttactttagatgatatgagacgtctcatagacctaggggtagggctggccccgtattcagcagtggagaaagctatggcccggctgcaggaactgctcacagtgtcagagcactgggacgacaaagccaagagtctcctcaaggccaggccacgacattcattgaatagccttgctacggcagtaaaggaaatcgaagagatccctgcatatctgcccaatggtgcggctctgaaagactcagtgcagagagccagagactggcttcaggatgtagagggcctgcaggctggaggacgtgtgccagtgttagacacactcatagaacttgttacacgaggccgatctatccccgtacatctgaattctttgccaagactggaaaccctagtagctgaggttcaggcttggaaagaatgtgctgttaatacattcttgactgagaattctccatattctctcttagaggtgctgtgtcctcgatgtgatattggccttttgggattgaaaaggaagcagagaaagttaaaggagcccttgccaaatggaaagaaaaaaagcaccaaattagagagtctgagtgacctggagagagctttaactgaaagcaaggagactgcttcagctatggcaactcttggggaagctcgcctaagggaaatggaagccttgcagtctctcagactcgccaatgaagggaaattgctgtcgcctctccaagatgtggatataaaaatctgcctatgtcagaaggccccagctgcccctatgattcaatgtgaactctgcagggatgctttccacaccagttgtgtggcggtacccagtatttcacagggcctgcgaatctggctttgtccccattgtcggaggtcagagaaacctccattagagaaaattctgcccctgctcgcctcccttcagcgtatccgagttcgccttcctgagggagatgcacttcgatatatgattgaaagaaccgtgaactggcagcacagagcccagcaactgctttcgtcagggaatcttaaatttgtgcaagatcgagtgggctcaggactgttatatagcagatggcaagcctcagcaggacaggtgtcagacacaaacaaggtatctcaacctcctggcacaacatcattttctttgcctgatgactgggacaacagaacctcatatttgcactcccccttctcaactggacgaagttgtatccccctccatggtgttagtccagaagtgaatgaactattgatggaagcccagctgctccaggtatcccttcctgaaattcaggaactttaccagactttacttgcaaagccaagccctgctcagcagactgaccgaagctcaccagtgagacccagcagtgagaagaatgactgttgccgagggaagcgagatggaattaacagtcttgagagaaaactgaagagacgcctggaaagagagggcctctccagtgagcggtgggaacgagttaagaaaatgcggacccccaaaaagaagaaaatcaaactgagccaccccaaggacatgaacaatttcaagttagagagagagcgtagctatgaattagttcgttctgctgaaactcattccctgccctcagacacatcctattccgaacaggaagactctgaggatgaagatgccatctgcccagctgtgagctgcctgcagccagaaggagatgaggtggactgggtccagtgtgatggcagctgcaatcagtggtttcatcaggtctgtgttggtgtctccccagagatggcagagaaagaagactacatctgtgtgcgctgtactgtgaaggacgcaccaagccgaaagtaaaaacacaaaaacagatacccccctacttaatgtaattcaggactccaaccaagaggatttcttcaaatctcagcaaagctacaggactggtactcaagccagcctgtaaacggtgctatttctattccttatgggatcatttttccaggactctttgaagaaaagaaaaaacaactaaaaaaatttttgacactttttgtattttttccttaagagctatttgtggttgttgaggtttgaaaagctgactgttttttttgcaggggttcccaccaatttggaaggcattgaagcttgcaccttttcatgtacagcattaaaattttacctctctctgggatttaccagcttaagagtccaactcacttccagtgcccaaaagggcacccaccagaaattccagtaaatcctcatttgaggaagctctcccttgtttactctgttaccacattggggaaatttttaagtttttcactttgggagtttttgtttgtttcttcttttcctttatccacttttcttcttcctggtagactaggtttatttatctgagcaataacttctatgttggtttcagtggctggaattaaaacaaaacaaaacaaacttccaaacagtgtgttggtgctttagcgattgattgatgtacagaacacaaatgtctagtttctagtgtcactgatgaactagtgatgtagaaaagagacttctctgtaagtaattgccacagctgtattttggctttctccctgtcccttcctttctcccctattttttggtagcttgtatcaaatgttacagtttatattgtggaataaatccttcgtcctaacataacactaaatgctgattatttagagccattagagcacagcttcttctgcccctctactgttgcacagccagaaggggctgcttgcttttgcctctgcccaaccaggttgcagtagcagtggatgttagcctgcaaacaacattaggggattcttcttttgtgtcctgctctgtttggtgggccatatgcctacagccctcactaacaaagaacccctctgtcttcaaggactagaacctatctttaaagccgtgctcttttaaaataagctttctcagaatgttggcaaatcacttcaatcctcaaatcagtcttccttgtggaatgctgcctttattatatttgaattgacaggggaacttggtttagggttaagacgttggaaggaaatctaaggaaaattaatcctcacagaggtccgggtttagtatatgtcttgagaggagacttgtgaattcccagactctgcctcctggtttcctttctcatttctttctaactgtagctatcattactggctgtggatagcccatagctattttccttgcttttcttttttaaaggggtctgttctgcagtggagaagacattctggtgaccagacttttgcttaccttttcctattctgttgccaatttttgttttccccacattctatagccataaacctgaagatgagtaaaactggtgggtctttaataaaacaacaacaaaaacagcagtttgtgatatagcagaggtttaaatgtaccctccccttttatgcacttcaaataattaaatctctttaagaatgacttcta

SEQ ID NO: 166612 - DNA, 7396 bp, Artificial Sequence
  derived and/or modified sequence
tacctgtatgtaccagagacacctcaaattcaaaatgtccagaaatgaacacagtatcttcttcccttgagtaactcgccttctgtatataattggggtgaatgttccagcaatgccaacgggctagcatctactcaggcaggtacgccagacatctgaatcttaatacctcgtcgtcccccctcaatctgtcactatgtcctaattttatttcctacctttgcatcccttcctcataattatcagcaccactgccttaatttagatcctatcattccttgtctggattatttcaagtctttcgcccctctcaagtctgacctcgtcatagactgtttgtggatgattattttccctgcaacatctccacctcccaatagtctccatcacttattagccatgtgaattatggcaaattgcttaacctacctatgcctcactttccttattgtaaagtggaaataagagtacctatctcatagggttgtgtgattaatcatgcgatgcaattagaacagtgcctaggatatgaaagtgccccaaaatgttacgttattattattattactactattgccttctcatgaacatgctatgtgtatgttcaagctgttatctctactggaaaatccttctccgtttccaatactctttccaaaaccccctcctgggttttactgcacctaccattgtgtactgacgtgattgaatgattggcttatgggactgatcctttctaccagacttaacttcttcagggcaggaactctgatacatagtaaatggtcaataaaagttggctcaactgaaaccctaaggataaactccatccacagcggaaggcgcggccccgcccgattcgggggcggggcggggagccgcgcgcggagggtgggtcgatgggggtggggtgggactctttttcctcgccgtggcggcggaggcgcacggcgtgggcttgcggcgagacgtcgtcgtcggaggctgaaaaagcccaaggtgctgccgttgcccgtacaactcggacttgctgttgctcgagccgcgtctgcacgggtctcggaccgagcggagctcgcagcctcggtcccggagcccaccttcgcctcgcccttgcccagcctgcggtgatggaggcggccaccacactgcacccaggcccgcgcccggcgctgcccctcgggggcccgggcccgctgggcgagttcctgcctccacccgagtgcccggtcttcgaacccagctgggaagagttcgcggaccccttcgctttcatccacaagatccggcccatagccgagcagactggcatctgtaaggtgcggccgccgccggattggcagccaccatttgcatgtgatgttgataaacttcattttacgccacgtatccagagactgaatgaattggaggcccaaactcgtgtaaaattgaatttcttggaccagattgcaaagtactgggagttacagggaagtactctgaaaattccacatgtggagaggaagatcttggacttatttcagcttaataagttagttgcagaagaaggtggatttgcagttgtttgcaaggatagaaaatggaccaaaattgctaccaagatggggtttgctcctggcaaagcagtgggctcacatatcagagggcattatgaacgaattctcaacccctacaacttattcctgtccggagacagcctaaggtgtttgcagaagccaaacctgaccacagacactaaggacaaggagtacaaaccccatgatattccccagaggcagtctgtgcagccttcggaaacgtgccccccagcccgacgagcaaaacgcatgagagcagaggccatgaatattaaaatagaacccgaggagacaacggaagccagaactcataatctgagacgtcgaatgggttgtccaactccaaaatgtgaaaatgagaaagaaatgaagagtagcatcaagcaagaacctattgagaggaaagattatattgtagaaaatgagaaggaaaagcccaagagtcgatctaaaaaagccaccaatgctgtggacctgtatgtctgtcttttatgtggcagtggcaatgatgaagaccggctactgttgtgtgatggctgtgatgacagttaccataccttttgcttgatcccacctctccatgatgttcccaagggagactggaggtgtcctaagtgtttggctcaggaatgtagtaagccacaagaagcatttggctttgaacaagcagccagggactataccctccgtacttttggggaaatggcagatgcgttcaaatctgattacttcaacatgccagtccatatggtccccacagagcttgttgagaaagaattttggagactagtaagcactattgaggaggatgtcacagtggaatatggagctgacattgcctcaaaggaatttggcagtggctttcctgtccgagatgggaaaatcaaactctcacctgaggaagaggagtatcttgatagtggctggaatttgaacaacatgccagtgatggagcagtctgtccttgcacatattactgctgatatatgtggcatgaaacttccttggttgtatgtgggaatgtgcttttcttcattctgttggcacattgaagaccactggagctattcaattaactacttgcactggggtgagccaaaaacctggtatggagtcccagggtatgctgctgagcagctagaaaatgtaatgaagaaactagctccagaactctttgtgtcccagccggatctcctccatcagcttgtgaccatcatgaaccccaataccctgatgactcatgaagtgcctgtttaccgaactaatcagtgtgctggggagtttgtgattacatttccaagagcctaccacagtggttttaaccagggttttaattttgctgaggctgttaacttctgcactgttgattggctgccattaggccgacagtgtgtggagcattatcgcttgcttcatcgatattgtgtgttttcccacgatgagatgatctgcaagatggcttccaaggctgatgtattagatgttgtagtggcttcaactgttcagaaagacatggccattatgattgaggatgagaaagctttaagagaaactgtccgtaaattgggagtgattgattcggaaagaatggattttgagctgttgccagatgatgaacgtcagtgtgtaaaatgcaaaactacatgcttcatgtctgccatctcctgttcttgtaaacctggccttcttgtttgcctgcatcatgtaaaagaattgtgttcctgtcctccttacaaatataaattgcggtataggtacacgctggatgatctctaccctatgatgaatgcattgaagcttcgagcagaatcttacaacgaatgggccttgaatgtgaatgaagctttggaggcaaagatcaacaagaagaaaagccttgtcagcttcaaggctttaattgaagaatctgaaatgaagaaattcccagacaatgatcttttgcgacaccttcgcctagtcacacaggatgcagagaagtgtgcctctgttgcgcagcagttgcttaatggcaaaaggcaaactagatatcgatctggtggagggaaatcccaaaatcagttgacagtgaatgagctccggcagtttgtaacacagctgtatgctcttccatgtgtcctcagtcagacaccattactaaaggatctcttgaatcgtgtagaagattttcaacagcatagtcagaaactactctctgaggaaacgcctagtgctgcggagctgcaggacttgctagatgtcagctttgaatttgatgttgaacttccacagcttgctgagatgcgtatccgtttggaacaagcccgttggctagaagaggtgcagcaagcttgcctagaccccagctcccttactttagatgatatgagacgtctcatagacctaggggtagggctggccccgtattcagcagtggagaaagctatggcccggctgcaggaactgctcacagtgtcagagcactgggacgacaaagccaagagtctcctcaaggccaggccacgacattcattgaatagccttgctacggcagtaaaggaaatcgaagagatccctgcatatctgcccaatggtgcggctctgaaagactcagtgcagagagccagagactggcttcaggatgtagagggcctgcaggctggaggacgtgtgccagtgttagacacactcatagaacttgttacacgaggccgatctatccccgtacatctgaattctttgccaagactggaaaccctagtagctgaggttcaggcttggaaagaatgtgctgttaatacattcttgactgagaattctccatattctctcttagaggtgctgtgtcctcgatgtgatattggccttttgggattgaaaaggaagcagagaaagttaaaggagcccttgccaaatggaaagaaaaaaagcaccaaattagagagtctgagtgacctggagagagctttaactgaaagcaaggagactgcttcagctatggcaactcttggggaagctcgcctaagggaaatggaagccttgcagtctctcagactcgccaatgaagggaaattgctgtcgcctctccaagatgtggatataaaaatctgcctatgtcagaaggccccagctgcccctatgattcaatgtgaactctgcagggatgctttccacaccagttgtgtggcggtacccagtatttcacagggcctgcgaatctggctttgtccccattgtcggaggtcagagaaacctccattagagaaaattctgcccctgctcgcctcccttcagcgtatccgagttcgccttcctgagggagatgcacttcgatatatgattgaaagaaccgtgaactggcagcacagagcccagcaactgctttcgtcagggaatcttaaatttgtgcaagatcgagtgggctcaggactgttatatagcagatggcaagcctcagcaggacaggtgtcagacacaaacaaggtatctcaacctcctggcacaacatcattttctttgcctgatgactgggacaacagaacctcatatttgcactcccccttctcaactggacgaagttgtatccccctccatggtgttagtccagaagtgaatgaactattgatggaagcccagctgctccaggtatcccttcctgaaattcaggaactttaccagactttacttgcaaagccaagccctgctcagcagactgaccgaagctcaccagtgagacccagcagtgagaagaatgactgttgccgagggaagcgagatggaattaacagtcttgagagaaaactgaagagacgcctggaaagagagggcctctccagtgagcggtgggaacgagttaagaaaatgcggacccccaaaaagaagaaaatcaaactgagccaccccaaggacatgaacaatttcaagttagagagagagcgtagctatgaattagttcgttctgctgaaactcattccctgccctcagacacatcctattccgaacaggaagactctgaggatgaagatgccatctgcccagctgtgagctgcctgcagccagaaggagatgaggtggactgggtccagtgtgatggcagctgcaatcagtggtttcatcaggtctgtgttggtgtctccccagagatggcagagaaagaagactacatctgtgtgcgctgtactgtgaaggacgcaccaagccgaaagtaaaaacacaaaaacagatacccccctacttaatgtaattcaggactccaaccaagaggatttcttcaaatctcagcaaagctacaggactggtactcaagccagcctgtaaacggtgctatttctattccttatgggatcatttttccaggactctttgaagaaaagaaaaaacaactaaaaaaatttttgacactttttgtattttttccttaagagctatttgtggttgttgaggtttgaaaagctgactgttttttttgcaggggttcccaccaatttggaaggcattgaagcttgcaccttttcatgtacagcattaaaattttacctctctctgggatttaccagcttaagagtccaactcacttccagtgcccaaaagggcacccaccagaaattccagtaaatcctcatttgaggaagctctcccttgtttactctgttaccacattggggaaatttttaagtttttcactttgggagtttttgtttgtttcttcttttcctttatccacttttcttcttcctggtagactaggtttatttatctgagcaataacttctatgttggtttcagtggctggaattaaaacaaaacaaaacaaacttccaaacagtgtgttggtgctttagcgattgattgatgtacagaacacaaatgtctagtttctagtgtcactgatgaactagtgatgtagaaaagagacttctctgtaagtaattgccacagctgtattttggctttctccctgtcccttcctttctcccctattttttggtagcttgtatcaaatgttacagtttatattgtggaataaatccttcgtcctaacataacactaaatgctgattatttagagccattagagcacagcttcttctgcccctctactgttgcacagccagaaggggctgcttgcttttgcctctgcccaaccaggttgcagtagcagtggatgttagcctgcaaacaacattaggggattcttcttttgtgtcctgctctgtttggtgggccatatgcctacagccctcactaacaaagaacccctctgtcttcaaggactagaacctatctttaaagccgtgctcttttaaaataagctttctcagaatgttggcaaatcacttcaatcctcaaatcagtcttccttgtggaatgctgcctttattatatttgaattgacaggggaacttggtttagggttaagacgttggaaggaaatctaaggaaaattaatcctcacagaggtccgggtttagtatatgtcttgagaggagacttgtgaattcccagactctgcctcctggtttcctttctcatttctttctaactgtagctatcattactggctgtggatagcccatagctattttccttgcttttcttttttaaaggggtctgttctgcagtggagaagacattctggtgaccagacttttgcttaccttttcctattctgttgccaatttttgttttccccacattctatagccataaacctgaagatgagtaaaactggtgggtctttaataaaacaacaacaaaaacagcagtttgtgatatagcagaggtttaaatgtaccctccccttttatgcacttcaaataattaaatctctttaagaatg

SEQ ID NO: 166613 - DNA, 2513 bp, Artificial Sequence
  derived and/or modified sequence
tttgctgaggctgttaacttctgcactgttgattggctgccattaggccgacagtgtgtggagcattatcgcttgcttcatcgatattgtgtgttttcccacgatgagatgatctgcaagatggcttccaaggctgatgtattagatgttgtagtggcttcaactgttcagaaagacatggccattatgattgaggatgagaaagctttaagagaaactgtccgtaaattgggagtgattgattcggaaagaatggattttgagctgttgccagatgatgaacgtcagtgtgtaaaatgcaaaactacatgcttcatgtctgccatctcctgttcttgtaaacctggccttcttgtttgcctgcatcatgtaaaagaattgtgttcctgtcctccttacaaatataaattgcggtataggtacacgctggatgatctctaccctatgatgaatgcattgaagcttcgagcagaatcttacaacgaatgggccttgaatgtgaatgaagctttggaggcaaagatcaacaagaagaaaagccttgtcagcttcaaggctttaattgaagaatctgaaatgaagaaattcccagacaatgatcttttgcgacaccttcgcctagtcacacaggatgcagagaagtgtgcctctgttgcgcagcagttgcttaatggcaaaaggcaaactagatatcgatctggtggagggaaatcccaaaatcagttgacagtgaatgagctccggcagtttgtaacacagctgtatgctcttccatgtgtcctcagtcagacaccattactaaaggatctcttgaatcgtgtagaagattttcaacagcatagtcagaaactactctctgaggaaacgcctagtgctgcggagctgcaggacttgctagatgtcagctttgaatttgatgttgaacttccacagcttgctgagatgcgtatccgtttggaacaagcccgttggctagaagaggtgcagcaagcttgcctagaccccagctcccttactttagatgatatgagagtctcatagacctaggggtagggctggccccgtattcagcagtggagaaagctatggcccggctgcaggaactgctcacagtgtcagagcactgggacgacaaagccaagagtctcctcaaggccaggccacgacattcattgaatagccttgctacggcagtaaaggaaatcgaagagatccctgcatatctgcccaatggtgcggctctgaaagactcagtgcagagagccagagactggcttcaggatgtagagggcctgcaggctggaggacgtgtgccagtgttagacacactcatagaacttgttacacgaggccgatctatccccgtacatctgaattctttgccaagactggaaaccctagtagctgaggttcaggcttggaaagaatgtgctgttaatacattcttgactgagaattctccatattctctcttagaggtgctgtgtcctcgatgtgatattggccttttgggattgaaaaggaagcagagaaagttaaaggagcccttgccaaatggaaagaaaaaaagcaccaaattagagagtctgagtgacctggagagagctttaactgaaagcaaggagactgcttcagctatggcaactcttggggaagctcgcctaagggaaatggaagccttgcagtctctcagactcgccaatgaagggaaattgctgtcgcctctccaagatgtggatataaaaatctgcctatgtcagaaggccccagctgcccctatgattcaatgtgaactctgcagggatgctttccacaccagttgtgtggcggtacccagtatttcacagggcctgcgaatctggctttgtccccattgtcggaggtcagagaaacctccattagagaaaattctgcccctgctcgcctcccttcagcgtatccgagttcgccttcctgagggagatgcacttcgatatatgattgaaagaaccgtgaactggcagcacagagcccagcaactgctttcgtcagggaatcttaaatttgtgcaagatcgagtgggctcaggactgttatatagcagatggcaagcctcagcaggacaggtgtcagacacaaacaaggtatctcaacctcctggcacaacatcattttctttgcctgatgactgggacaacagaacctcatatttgcactcccccttctcaactggacgaagttgtatccccctccatggtgttagtccagaagtgaatgaactattgatggaagcccagctgctccaggtatcccttcctgaaattcaggaactttaccagactttacttgcaaagccaagccctgctcagcagactgaccgaagctcaccagtgagacccagcagtgagaagaatgactgttgccgagggaagcgagatggaattaacagtcttgagagaaaactgaagagacgcctggaaagagagggcctctccagtgagcggtgggaacgagttaagaaaatgcggaccccc

SEQ ID NO: 166614 - DNA, 3828 bp, Artificial Sequence
  derived and/or modified sequence
atgggcttcgcccccggcaaggccgtgggcagccacatccggggccattatgagaggatcttgaatccatacaatctgttcctgtcaggagatagtctgaggtgtttacagaaacccaacctcaccaccgatactaaggacaaggaatataaaccacacgacatacctcaacgccagtccgtgcagcctagcgaaacctgtccaccggcacgaagggctaagagaatgcgggccgaggcgatgaatatcaagatcgagcctgaggagacaacggaagcccggactcacaatctgcgacgccgtatgggatgccccacccccaagtgtgagaacgagaaggaaatgaagtcttcaatcaaacaagagccaatcgagcggaaggactatatcgttgagaacgaaaaggaaaaaccgaagtcgaggagcaaaaaagccactaatgcagtggatctttatgtttgtctgctgtgcggctccggaaacgatgaggatagattgcttctgtgtgatggctgcgatgattcttatcacacattttgccttattcctcctttgcatgacgtccccaaaggcgattggagatgcccgaaatgcttggcacaggagtgttctaaacctcaggaagcgtttgggttcgaacaggctgccagagattacacccttcgcaccttcggcgagatggcggacgccttcaagtctgactatttcaacatgcctgtgcatatggtgcctactgaactggtagagaaagagttctggaggctggtcagtactatcgaggaagacgttaccgtggaatatggggctgatatcgcctcaaaggagttcggaagtggcttccccgtccgtgacggaaaaatcaagttatcacctgaggaagaagagtatcttgatagcggatggaatcttaataacatgcccgtgatggagcagtctgtcctcgcccacatcaccgcggatatttgtgggatgaaactgccttggctctatgtgggcatgtgtttcagcagtttttgttggcacatagaggatcattggagctacagtataaattatctgcattggggcgagccaaagacttggtacggagtgccgggctacgccgccgagcaattagagaatgtcatgaagaagttggcccccgagctgttcgtctctcagccagatctgctccatcaactggttacaatcatgaaccctaacactctgatgacccacgaggttcctgtgtatagaacgaatcagtgcgccggcgagttcgtgatcacattcccaagagcctaccactctggttttaaccagggcttcaacttcgctgaggcagttaacttttgtacagtcgattggctgccactgggaaggcagtgcgtggagcattatagactgctgcaccgatactgtgttttcagccacgatgagatgatttgtaagatggcatctaaagcggatgtgctggatgtggtggtggctagcaccgtccagaaggatatggccattatgatcgaagatgaaaaggcacttagagagactgtgcgtaaactaggcgttatagatagcgagcgaatggactttgaattactccctgatgatgagaggcagtgcgttaaatgtaagaccacctgttttatgagtgccatcagctgcagctgcaagcccggcctcctcgtatgcttgcaccatgtaaaggagctctgctcctgccctccctataagtacaagctgcggtatcgttatacattggacgacctgtatccaatgatgaatgcattgaagctgcgcgcagagagctacaatgaatgggctttgaacgttaatgaggccctggaggccaaaattaacaagaagaagtccctcgtgagcttcaaggccctgattgaagagtccgaaatgaagaagttccctgacaacgacctgctgcgtcacctcagacttgtcacacaggatgctgagaaatgtgctagcgtcgcacagcaactgctcaacggcaagcgtcagacaagatatcgatctgggggtggaaagtcccagaatcagctgaccgttaatgagctacgacagttcgtcacccagctgtacgctctgccctgcgtgctcagccaaaccccgttactgaaggacttgttgaaccgagtggaggactttcagcaacactctcaaaaacttctttcagaggaaacaccgtcagccgctgaacttcaggatctgctggacgtgtctttcgagttcgatgtcgaacttccacaactcgcagagatgcgcattcggcttgaacaggctaggtggctggaggaggtccagcaagcctgcctagatcctagctccctcacacttgacgacatgaggcggttgattgatctcggtgtcggactggccccttacagcgccgtagagaaggcgatggctcgtctgcaggagctgctcactgtgagcgaacattgggatgacaaggccaaaagtcttctcaaagctagacctaggcattccctaaatagtttggccaccgccgtgaaagagatcgaagagattccagcgtacttgccaaacggagccgcacttaaggacagcgtccagagggctcgcgactggttacaagatgttgaaggcctacaggcgggtggacgcgtcccagtgttggacactctaattgaactcgtgacgaggggcaggagtatcccagtgcatctgaacagccttcctcggctagagaccctggttgccgaagtccaggcatggaaggagtgtgccgttaacacctttctcacagaaaactcaccgtattccctgctggaggtcttatgccctcggtgcgatataggcctgctgggcctgaaacggaaacagaggaagctcaaggagccactgcccaacgggaaaaaaaagtctactaaactggagtctctgtctgacttggaaagggcacttactgagagcaaggaaaccgcctctgcaatggcaacgctcggcgaggcccgactcagggaaatggaggccctgcagtccctccgcttggcaaacgagggcaagctcttgtcccctctccaggatgtagatatcaagatatgtttgtgccagaaggcaccggccgccccgatgattcagtgtgaactgtgccgagacgcattccacaccagttgcgtcgccgtcccaagcatctcccagggcctaagaatctggctctgcccacactgtcggcgctcggagaaacccccactcgagaaaattttaccgttgctcgcctcattgcagagaatcagggtcagattgccagaaggagatgccctgaggtacatgatcgagcggacagtaaactggcagcatagggcccagcagcttctgtccagcgggaatcttaagtttgtacaagatcgcgtggggagtgggctcctgtactccaggtggcaagccagcgcagggcaggtcagcgatacgaacaaagtcagccagccccccggaacaacttctttctcactgcccgatgattgggataatcgaaccagttacctgcactcccccttttcgacaggtagaagctgcattcccctgcacggggtttccccagaagtcaatgagttactgatggaggcccagctcctgcaggtatcactgccagaaatccaggagctctaccagaccttactggccaagccttcccccgcccagcaaaccgaccgaagctcacctgtacgcccatctagtgagaaaaacgattgctgtcgtggcaagcgcgacggtattaattcattagagaggaagctgaagagaagattggagcgcgagggcttgagctctgaacgctgggaaagagtgaagaaaatgcgtactccctag

SEQ ID NO: 166615 - DNA, 4635 bp, Artificial Sequence
  derived and/or modified sequence
atggaggccgccaccaccctgcaccccggcccccggcccgccctgccattaggaggccctggcccactaggagagtttctaccgccacctgagtgtcccgtctttgaaccttcttgggaggaattcgcagatccctttgcatttattcataagatcagaccaattgctgagcagacaggtatatgcaaagtgcgtccgcctccggattggcagccccccttcgcatgcgacgtcgacaaactgcattttaccccccgcattcagcggcttaacgagctggaagcgcagactcgcgttaaattgaatttccttgaccagattgcaaagtattgggaactgcagggaagtaccctcaaaatcccacacgtggagcgcaagatcctggacctgttccagctcaacaaattagtggcggaggaagggggtttcgctgtcgtgtgcaaagaccgcaaatggaccaagattgctaccaagatggggtttgcccccgggaaggccgtcggatcacacatccggggtcattatgagcgcattctgaacccctacaacttgtttctgtcaggggacagcctgcggtgcctacagaagccaaatctaacaacagacaccaaagacaaagagtataaacctcacgacatccctcagaggcagtcagttcagccaagcgagacctgcccgccagctaggagagcaaagcggatgagggctgaggcaatgaacatcaaaattgaaccggaggaaaccaccgaggccagaacgcataacctccgccggaggatgggctgtccaactccaaaatgcgaaaatgagaaagagatgaaatctagcattaaacaggaacccatagaacgtaaagattatatcgtggaaaacgagaaggagaagcccaagtcgaggagcaagaaagctacaaatgcagtggacctttacgtatgcctcctttgcggcagtggcaatgatgaagacaggctgctgctgtgcgatgggtgtgacgatagttatcacactttctgcctgattcccccgttacacgatgtgccgaagggcgactggcggtgccccaagtgtctcgcacaggagtgtagtaaaccgcaagaagccttcggctttgaacaggctgcacgggattatactctgagaacttttggggagatggccgacgcctttaagagtgactacttcaatatgcccgtgcatatggtgcccaccgagctcgttgaaaaagagttctggagactggtgtctacaatagaggaagatgtaaccgttgagtatggtgcggacatcgcttcgaaggaatttggctccggctttccggtgcgggatggcaaaatcaagctatcccctgaggaggaagagtatctggattctggctggaacctgaacaacatgccagtgatggaacagtccgttctcgcccacattacagcggacatttgcggcatgaaactcccctggctgtatgtcgggatgtgcttctcctcattttgctggcatatcgaggatcattggtcttattccattaattatctgcattggggtgaaccaaagacctggtacggggtcccgggttacgcggccgagcaactggaaaacgtgatgaaaaagttggcacccgaactttttgtgtcccagccggatcttttacaccagttagtaaccattatgaacccaaacaccctgatgacccatgaggtgccagtctataggacaaaccagtgcgctggagagtttgttatcacctttccccgggcctatcactctgggtttaaccaaggttttaattttgctgaggcagttaatttttgtaccgttgactggctgccactagggcgccaatgtgttgagcattaccgactcctacacagatattgtgttttttctcacgacgaaatgatttgcaagatggcatctaaggccgacgtcctcgacgtggtcgtggcctccactgtgcagaaggatatggccattatgattgaagacgagaaagccctgcgcgagaccgtgagaaagttgggggtaatcgattccgagcgaatggacttcgagttactccccgatgatgaacgtcagtgcgtcaagtgcaaaacgacgtgctttatgtctgcaatctcctgttcctgtaagcctggtttgctggtctgcctgcaccacgtaaaggagctatgttcctgtccaccttacaagtacaaactacgttacaggtatactcttgacgacttatacccgatgatgaacgcgctgaagttgcgtgcggaatcctataatgaatgggctctcaacgtgaatgaggccctcgaagctaagataaacaagaagaagtcactcgtgtcattcaaggcgcttattgaggaatcggagatgaagaaatttccagataacgacctgcttagacacctcagattggtaactcaagatgctgagaagtgcgcgagcgtggcccagcagttgctgaatggcaagcgccagacaagatatcgaagcggcggcgggaagtcccagaaccagctcactgttaacgaactgaggcaatttgtcacacagttatatgcgctcccatgtgtacttagccagactcccctccttaaggacctcctgaacagagtggaagacttccaacagcactcacaaaagttgcttagcgaagagactccttctgctgctgagctgcaggatctactcgatgtctccttcgagttcgacgtggagctccctcagctggccgaaatgcggatccgcctcgagcaggcccggtggcttgaggaagtccaacaagcatgtctggatccctcaagcttgacattggatgatatgcgtaggttaatcgacctgggtgttggtcttgctccctatagtgccgtagaaaaggctatggcccggctccaggaactgctaacagtgagcgagcattgggatgacaaggcgaaatctctacttaaagcaagaccccggcattctctcaacagtctggcaacagctgtaaaggaaattgaggagatcccggcatacttacccaatggcgcagcactgaaagacagcgttcagagagctcgggactggttgcaggacgtagagggcctgcaggccggtggccgggtacctgtgctggataccctcattgagcttgtgacgaggggccggtccattcctgtgcatcttaactctctacctaggttggaaaccctggtggctgaggtccaagcgtggaaagaatgtgccgtgaatacctttttaactgaaaactctccatattcactgctcgaagtgctgtgtcctaggtgcgatattgggcttctcggactcaaaagaaagcaaaggaaactgaaagagccactccccaatggtaaaaagaaatccaccaaactcgagtctctgagcgatcttgagagggcgttaacagaatcaaaagaaaccgcctctgccatggcaaccctaggagaggctagactgagagaaatggaagccttgcagtctctccggctggccaatgaagggaagctgctctccccgctccaggacgtggatatcaagatttgtctctgtcagaaagccccggccgctccaatgatccagtgtgagctgtgccgcgacgcatttcacacttcttgcgtcgccgtacctagcatatcccagggcttgagaatatggctgtgcccacactgcagacgctctgagaaaccccctcttgaaaagatcctacctctgttggcatcactccagcggatccgggtcagactcccggagggcgacgcactccggtacatgatagagcgcacagtcaattggcagcacagagctcaacagcttctttccagcggaaacctcaagtttgtgcaggaccgggtgggatctggcctgctgtactccagatggcaagctagtgctgggcaggtcagtgatacgaataaagtgtcccaacccccagggactaccagctttagtctgcccgacgactgggataaccgcacgagctacttgcattcccccttctcaacgggaaggagctgcatccctctgcacggcgtgagccccgaagtgaatgaactgctgatggaggcccagctgctgcaggtgtccttaccagagatacaggagctctatcaaactctgttggcaaagccatcaccggctcaacagaccgatcgctcttcacccgtcagaccctcttccgagaagaacgattgttgtcgcggtaagcgggacggcatcaattctctggaacggaaactcaagcgccggctggagagagaggggctttcaagcgagcgatgggaacgtgtcaaaaagatgcggacccccaagaagaaaaagatcaagctatcccaccctaaggacatgaacaacttcaaacttgaacgggaaaggagctacgaactggtgcgctccgctgaaacccacagtctcccatctgatacgagctacagcgaacaggaggacagcgaggatgaggacgcaatctgccctgctgtgagctgtctacaacctgaaggcgacgaagtggattgggtgcagtgcgacggatcctgcaaccaatggtttcaccaggtgtgcgtgggcgtgagtcccgaaatggccgagaaggaagactatatttgcgtgcggtgcaccgttaaggatgcaccctccagaaagtag

SEQ ID NO: 166616 - DNA, 4161 bp, Artificial Sequence
  derived and/or modified sequence
atgggcttcgcccccggcaaggccgtgggcagccacatccggggccactatgagcgcatactgaatccatataacttatttctgtctggggattccctcaggtgcctgcagaagccaaatcttactacagacaccaaggataaggaatataagccgcacgatattcctcaacgccagtccgttcagccatccgaaacatgtccacccgcccgtcgggccaagcgaatgcgcgcggaagccatgaacattaaaatcgagcctgaggagaccacggaggcgaggacccataacctccggcgaagaatgggttgccccacccctaagtgcgaaaatgagaaggaaatgaaatcctcaataaagcaagagccaatcgagcgcaaagactacatcgtggagaacgagaaggagaaacccaaatccagatcaaaaaaggccacaaacgcggtggatctctacgtgtgcctactgtgcggatcaggcaatgacgaagatcgtctgctgctctgcgacggttgcgacgacagctatcatacgttttgtcttattcctcccctgcacgatgtgcctaagggggactggcgatgccctaagtgcctcgcccaagaatgtagtaaaccccaagaggcatttggatttgagcaggctgcaagagattacaccctcagaacgttcggagagatggcggacgcttttaagagcgactactttaacatgcccgtgcatatggtccccactgagcttgtggaaaaggagttctggagactggtgagcacaatcgaggaagacgtcacagtggagtatggagcggacatcgcctcaaaagagtttggatccgggtttcctgtgcgagacggcaaaatcaaactaagtccggaggaagaggagtatctggattctggctggaaccttaataacatgccggtgatggagcaaagtgttttggcgcacattacagctgatatctgtggcatgaagctcccttggctgtatgtgggcatgtgtttctcctcgttctgttggcacatcgaagaccactggtcctattccataaactacctgcactggggcgaacctaaaacgtggtacggcgtcccagggtatgctgccgagcaactggagaatgttatgaaaaaactcgcccctgagctgtttgtgtcacaacccgatctgctgcatcagctggttacaatcatgaacccaaatactctcatgacacatgaggtgcctgtgtaccggaccaaccagtgcgcgggagagttcgtaatcacatttccaagagcctaccattctgggtttaaccagggctttaatttcgccgaagctgtcaacttctgcaccgtggactggctgcccctgggcaggcagtgtgtggaacattatagacttctgcatagatactgcgttttcagccacgacgagatgatctgcaagatggctagtaaagcagatgtgctggatgtggtcgttgcctcgaccgtccagaaagatatggccatcatgatcgaagacgagaaagcgctccgagagacagttcggaaattgggagtcattgattcggaaaggatggattttgagcttctaccggacgatgagcggcagtgcgttaaatgcaagaccacgtgttttatgagcgctatttcttgttcttgtaaaccaggactgctcgtctgcttgcatcacgtgaaagaactttgcagttgccctccatacaagtataagctgcggtatcggtatacgcttgacgatctgtatcccatgatgaatgccctcaagctgcgcgcagagtcctacaacgagtgggctcttaatgtgaacgaggcattggaggcaaagatcaacaagaagaagtctttggtctctttcaaggccctcattgaggaatcagagatgaagaagtttccagacaatgatctgctgcgccacctcaggctggttacccaagatgctgagaaatgtgcgagtgtcgcccaacagctgctcaacggtaaaaggcagaccaggtacagaagcggtggaggaaagtcacagaaccagctgacagtgaacgaactacgccagtttgtgacacagctctacgccctcccatgcgtcttatcccagaccccactgttgaaggatctactcaatcgtgtcgaggatttccagcaacactcacagaaactgctgtcggaagagactccttccgcggccgagctccaagatctgctggatgtcagcttcgagttcgatgtggagctccctcagctagcagagatgagaatcagactcgagcaggccagatggctcgaggaggtacaacaggcatgtctcgatccatcgtctctcacccttgatgacatgagacggctcattgacttgggagtaggcttagcaccatactctgccgtggagaaagcgatggctcggctccaggaactgctgacagtttcggagcattgggacgataaggccaagtccctgctgaaagcccggccccggcattcccttaattctcttgcgacagccgttaaagagattgaagagatccccgcctacctgcctaatggcgcagctctcaaggacagcgtgcagcgggcccgagattggctgcaggacgttgaaggccttcaggccggcggacgggtgcctgtcttggacacactgatcgagctcgtgacacggggacggagtattcctgtacacttgaatagcctgccgcgtctcgagaccttggtggccgaagttcaagcttggaaggaatgtgccgtgaacacatttctaacagaaaatagcccctatagcctgttggaagtcctttgcccacgctgcgatattgggcttctgggactgaaaaggaaacagcggaaactcaaagaaccactgccaaatggtaaaaaaaaaagcacaaagctggaatcattgtccgatctggaacgtgcgctgaccgagtctaaagagaccgcctccgctatggctacactgggtgaggcccgcctacgggagatggaagcattgcagtccctgaggctcgcgaacgaaggcaagctcctatcccctctccaggacgtggacatcaaaatctgcttatgtcagaaggccccagctgcacctatgattcagtgcgaattgtgcagagacgctttccatacatcctgcgtagcagttcccagtatttcccaggggctccgaatctggctgtgtccacattgccgtcgtagcgagaagccaccactcgagaaaatacttcctctgctggcgagccttcagagaataagagtaaggcttcccgaaggagacgctctacgctacatgattgaacggacagtgaactggcaacaccgggcccaacagctgctctcttccggcaatctgaagttcgtgcaagaccgcgtgggttccgggctactctacagccggtggcaggccagcgctggccaggtcagtgatacaaataaggtttctcagccgccaggaacaacatcatttagcctccctgacgattgggataacaggactagttacctacattctcccttttccacaggacgaagttgtatacccctccacggagtgagcccggaagtgaatgaactgctgatggaagcccagcttttgcaagtgtctcttcccgaaattcaggagctataccagaccttactcgcgaaaccaagtcccgctcagcagacagataggagctcgccagtgcgcccctcatcagagaaaaatgactgttgccgcgggaagagggatggcattaattcactcgaacgaaaactgaaaaggcggctggagcgagagggcctcagtagcgaacggtgggaacgggtgaagaagatgaggactccaaagaaaaagaaaataaagctgtcccaccccaaagacatgaacaatttcaagcttgaacgcgagaggagttatgagctagtgcgatctgctgagacccacagtctcccaagtgacacgtcatactccgaacaggaggactccgaggacgaggatgctatatgtccggcggtaagctgcctgcagcctgaaggcgacgaggttgattgggtgcagtgtgacgggagctgcaatcagtggttccaccaggtgtgcgtgggtgtgtcacctgagatggccgagaaagaggactatatttgtgtcagatgcacggtgaaggacgccccatccaggaagtag

SEQ ID NO: 166617 - DNA, 3828 bp, Artificial Sequence
  derived and/or modified sequence
atgggcttcgcccctggcaaagctgtcggctctcacattcgcggacactacgaacgtatactgaacccttataatctgtttctgagcggtgatagtctaaggtgcctgcaaaaaccaaatcttactactgacaccaaagacaaggagtataagcctcatgacataccccagcgacagagtgtgcagcctagcgagacatgcccacctgcccgtcgcgcaaagcgcatgcgggcagaggcaatgaatattaagattgagcccgaagagactactgaagccaggactcataacctgcgtaggcggatgggctgcccgacaccgaagtgcgagaacgagaaagagatgaaatcatcaataaagcaagaacctatagagcgtaaagattacatagtggagaacgaaaaagaaaagcctaagtctcgctccaagaaagcaacaaacgccgtggacctatacgtgtgtctgctatgcgggagcggaaatgatgaggacagactgctgctgtgtgatggatgtgatgacagttaccacaccttttgcctcatcccgcctctgcatgacgtgcccaagggggattggcggtgtccaaaatgcctggctcaggaatgtagtaaaccccaggaggccttcggattcgagcaagccgcacgggattatactctccgaacctttggagaaatggccgacgccttcaagagtgattatttcaatatgcctgtacacatggtacccaccgagcttgtagagaaggagttttggagactggtaagtactatcgaggaggacgtgactgttgaatacggagccgatatcgcgagtaaagagttcggcagcggcttccctgtgagggatggcaaaatcaaactgagcccagaagaagaggaatacctggattcaggatggaaccttaataacatgcctgtcatggagcagtctgttttggctcacattacagccgatatttgcgggatgaagttgccatggctctacgtgggcatgtgtttctcttccttctgttggcatatcgaggatcactggtcttatagtatcaactatctccactggggcgagcccaagacatggtacggcgtgcctggctatgcggcagaacaactggaaaacgtcatgaaaaagctggccccagagcttttcgtgtctcaacctgacttgttacaccagctagtcactatcatgaatcctaacaccctcatgactcatgaggtgcccgtgtatagaacgaaccagtgtgctggtgaatttgttattactttccccagggcatatcattccggtttcaaccagggctttaacttcgccgaggctgtgaacttctgcactgtcgattggctccccctcggccgtcagtgtgtggagcactatcggcttttacacaggtactgcgtgttttcgcacgatgaaatgatctgcaagatggcttcgaaggccgatgtgctcgacgtggtggtggcgagcactgtccagaaggatatggccatcatgatcgaggacgaaaaggcactccgtgaaacagtgcggaagctcggggttatagattccgaaaggatggacttcgagctgcttcccgacgatgagcggcagtgcgtcaaatgcaaaacaacatgctttatgtctgccattagttgcagttgcaaacccggactcttggtgtgcctgcaccacgtgaaagagctgtgcagctgccccccttacaagtataaactaagatacagatatacactggacgatctgtacccgatgatgaacgccctgaagctgagagcagagagctataatgagtgggctctgaatgtaaacgaggccctggaggcaaagattaataagaagaagtctttggtgagttttaaagcacttatcgaggagtccgaaatgaaaaaattccccgacaacgacctgctcaggcatttaaggctggttacccaagacgccgagaagtgcgcgtcggtcgctcagcagctcttgaatggaaagcggcagaccaggtatagatctgggggtggcaaaagtcaaaaccagctgacagtgaacgaactgagacaatttgtgacgcagctgtacgctctgccgtgtgtcctgagtcaaacaccactcttgaaggacctgctgaatagagttgaggattttcagcaacacagccaaaagctgctttctgaggagaccccatccgccgctgaactgcaggatctgctggatgtgagttttgaatttgatgtggaactgccacaactcgccgagatgaggattcgcctggaacaggctcgatggctggaggaagtccagcaggcttgcttggacccttcttccctaaccctcgatgacatgcggcgtcttatagacctcggagtcggactcgccccttattctgccgtggaaaaagccatggcccgtctgcaggagctgctcacagtcagtgaacattgggacgacaaagccaagagtcttctaaaggccaggcctaggcatagcctcaattctctcgcgacggccgtgaaagagatcgaggagattcctgcttatctgcctaatggggctgctttaaaggatagcgtccagcgagctcgtgattggttgcaggacgttgagggattacaggctggtggaagggtccctgtcctcgatactctgattgagctggtgacccgcggacggtccattcccgtgcatcttaactccttgccccgactcgaaaccctggtagcagaggtccaggcctggaaagagtgtgctgtgaacaccttcctgaccgaaaatagtccctattcactcctggaagtgctatgccctcgatgtgacatcggactgttgggcctgaagagaaaacaaagaaaactcaaggaacccctgcccaacggcaagaagaaatctacaaagctggaatccctgagcgatctggagcgcgctctcacagaatctaaagagacagcatctgccatggccactctgggggaggctaggctacgggagatggaggcactacaaagtctacgacttgccaatgaaggcaagcttcttagccccctccaggacgtggacatcaagatctgtctgtgccaaaaagcgcctgctgccccaatgatccaatgtgaactctgccgagacgcgtttcacacgtcctgcgtggccgttccctcaatttcccagggattaagaatttggctatgccctcactgccggcgatcagagaagccaccactggagaaaattttaccattgttggccagcctgcagaggattcgggtgaggttaccagagggtgatgccctgcgttatatgatcgaacgtactgtgaattggcagcatcgagcccagcagctgctttcttccggaaatctcaagtttgttcaggaccgcgtcggttctggattactgtattcacgctggcaagcctccgctggtcaggtttctgataccaacaaggtttcccagcccccaggcaccacaagttttagcctgcccgacgattgggataacaggacatcatatctccactccccctttagcaccgggaggtcctgcatccctctgcatggagtctctccagaggtgaacgaactgctgatggaagcacaactgttgcaggtgagcctccctgaaatccaggaactgtaccagacactactggccaagccctcccccgcacagcagactgatcgctctagtccagtgcgacccagctctgagaagaacgactgctgccgcggtaagcgggacggcattaactccctggaaaggaaactaaaaaggcggttggagagagaaggactgtcttcagaaagatgggagcgggtcaaaaagatgcgcactccttag

SEQ ID NO: 166618 - DNA, 4635 bp, Artificial Sequence
  derived and/or modified sequence
atggaagcagccaccaccttgcaccctggcccacgacccgcactgccattaggaggcccaggtccactgggagaattcctgccgccacccgaatgccccgttttcgagccatcatgggaggagtttgccgatccgttcgctttcattcacaagatcagacctatcgccgaacagaccgggatttgtaaggtacgtccgccacccgactggcaaccaccctttgcttgcgacgttgataagctccactttacccccaggatccagaggctgaacgagcttgaggctcaaactcgggtaaaattgaactttctagaccagatcgctaagtattgggaactgcagggatctactttaaaaatcccacatgtagagaggaaaattttggatctgttccagctgaacaagctggtcgcggaagaaggcggattcgctgtggtctgcaaagatagaaagtggacaaagatcgcaactaagatgggcttcgctccaggcaaggcagttggctcacatatccgcggtcactatgagcgcatactgaatccatacaacctgtttctatctggagacagcctgcggtgcctccagaaacctaatctgacaaccgacacaaaagataaggagtacaagcctcacgacattcctcagagacagagcgtgcaaccaagtgagacatgtccacctgcccgacgagccaagcggatgcgcgcagaggccatgaatattaagatcgagcccgaagagacaacagaggcacgtacacataatctgaggagaaggatgggatgccctactcccaagtgcgaaaatgaaaaagaaatgaagtcctctatcaagcaagaaccgattgagagaaaagattatatagtcgagaacgaaaaggaaaaaccgaagtctaggtccaaaaaagctactaacgccgtggatctttatgtttgtctcttgtgcggaagtgggaacgacgaagatcggttgttactctgtgatgggtgtgatgactcataccacacattttgtcttatacccccactacatgacgtccccaaaggggactggcgttgtccaaaatgtctggcacaagaatgcagtaagcctcaggaggctttcggcttcgagcaggcggctcgtgactataccttgagaacatttggggagatggccgacgcctttaaatccgactatttcaacatgccagtgcatatggtccccactgagttggtggagaaagaattttggcgtttagtgtccaccattgaagaagacgtgactgtggaatacggcgcagatattgcgtcgaaggagttcggatctggattcccagtgagagatgggaaaatcaagctgtctcctgaagaagaggaataccttgactcaggctggaacctgaataacatgcccgtgatggagcagagtgttttggcccacatcaccgctgacatttgcgggatgaaactgccgtggctttatgtggggatgtgtttttctagcttctgctggcacatcgaggatcactggtcctattctatcaactatctccactggggtgagcccaagacctggtatggcgtcccagggtatgcagccgagcaactggagaatgttatgaaaaagctggctccagagctgtttgtgagtcagccggatctgttacaccagctggtaaccattatgaaccccaatactctgatgacccacgaggtgccagtgtatcggactaaccaatgcgcgggagagttcgtgattacctttccaagagcatatcacagcggattcaatcagggctttaacttcgctgaagccgtaaacttttgtaccgtcgactggctgcctttgggccgtcagtgtgtggagcactacagactgcttcaccgctattgcgtattctcccacgacgagatgatctgcaagatggcttccaaggccgacgttctagatgtggtggtcgcctctactgtccaaaaggatatggcaatcatgattgaggatgaaaaagctctgagggaaactgtgagaaaattgggtgtgattgatagcgaaagaatggattttgagctgctgccagatgacgaacggcaatgtgtgaagtgcaaaacgacttgctttatgtctgctatctcctgctcttgtaaaccgggactgctggtctgtctccaccacgtcaaagaactctgttcctgccctccatataagtacaagctgagatatcggtacacacttgatgatctttatcctatgatgaatgcccttaagctgagggccgagagctacaatgagtgggccctgaacgtaaacgaagcactggaagccaagatcaacaagaaaaagtcgttggtgagtttcaaagctttaattgaggagagtgaaatgaaaaagttcccagataatgaccttctgcgccatcttcgactggtgacccaggacgcagaaaagtgcgcttcagttgcacagcagcttctaaatggcaaaaggcagacaagatatcgctccggaggcggaaagtctcagaaccaactgaccgtcaatgagctgcgacagttcgtgacccagctgtacgcactgccgtgcgtgctgtcccagactcctcttttaaaggaccttctgaaccgagtagaggacttccagcagcacagccaaaagctgttaagcgaggagactcctagcgccgcagaattacaagatctgctagatgtgagttttgagttcgatgtagagctgccacagctggctgagatgaggattcgcctggaacaggctaggtggctagaagaagtgcagcaagcctgcctggacccctcgagccttacactagacgacatgcggcgactcatcgacttgggagtagggctggcaccctactccgcggtggagaaggccatggcacgcctccaagaactgctcaccgtaagtgagcattgggatgacaaggctaaatcactcttgaaggcccgtccacgacattctctcaatagcctggccacagccgtcaaagagattgaagagatccccgcataccttcccaacggggctgccctcaaggattccgtgcagcgagccagagattggctccaggatgtggaagggctgcaggccggtggtagagtgcctgtgctggacacactaatagagttggtcactcgcggtcgctccattccagtgcatttgaacagccttcccaggctggagactcttgttgccgaggttcaagcctggaaagagtgtgccgtgaatacctttctgacagagaactccccttactccctcctggaagttctatgtcctcgatgcgacattgggctcctgggactgaaacgaaagcagagaaagctgaaagagcctcttcccaacggtaagaagaaatcaactaaattagaatccctgtcggatctcgaacgggctctcactgaatccaaagaaaccgccagtgccatggctacactgggagaggcgcgactgcgtgaaatggaagcactgcaatccctgcgcctggcaaatgagggaaaattgctgtcacctctgcaggatgtggacattaaaatctgcctttgtcaaaaggcacctgccgctcccatgattcaatgtgagctgtgtcgcgacgccttccacacttcgtgtgtggctgtcccgtccattagccaggggcttcgcatttggctgtgccctcattgtcggaggtccgagaaacctccactggagaagatcctccctctcctggcttccctgcagaggattcgtgtgaggctccccgaaggggacgcgctccgctacatgatcgagcgcaccgtgaattggcagcacagggctcagcagctcctgtcctccgggaacctcaagttcgtccaagacagagtcggctcaggactgctttactcacggtggcaggccagcgccggacaggtgtctgacacaaacaaggtcagccagccgccaggaaccactagtttcagtctacctgacgattgggataaccgcacgtcttatttacattcacccttttctacaggtaggtcatgtatacctttgcatggagtgtctcctgaagtcaacgaattactcatggaagctcagttgctgcaggtttccctgccagagatccaagaactgtaccagaccctgctggctaagcccagtccagcgcaacaaaccgatcggtcatcacctgtgcgccctagctccgagaagaacgattgctgcagggggaagcgcgacggaattaattctctggaacggaagctgaagaggcggctggagagggaagggctctccagtgaaagatgggagcgtgtgaagaagatgcggacaccgaaaaaaaagaagataaagctgagccaccccaaggacatgaataactttaagctggagcgtgagaggtcttatgaacttgtccgctcagccgagactcactccctgccttccgataccagttattccgaacaggaggacagtgaggatgaagacgcaatttgccctgcagtgtcctgcttgcagcctgagggcgacgaagtggattgggttcagtgcgatggttcgtgtaaccagtggtttcaccaggtgtgtgtcggagtttcaccagagatggctgaaaaagaggattacatctgcgtacgctgtactgtgaaagacgctcctagccggaaatag

SEQ ID NO: 166619 - DNA, 4161 bp, Artificial Sequence
  derived and/or modified sequence
atgggcttcgctcccggaaaagccgtgggctcacatatacggggacactacgaacggattttgaatccttataatctgtttctgtcaggagactccctgagatgcctccaaaaacctaatctgacgactgatacgaaggacaaagagtacaaacctcacgacattccacagagacaatcagtgcagccatcagagacttgtcctccggctcggagagccaagaggatgagggccgaggccatgaatatcaaaatcgagccagaagaaaccaccgaggctagaactcacaacttgcggaggcggatgggctgccccaccccgaaatgcgaaaatgagaaggagatgaagtcaagcattaaacaggaacctattgaaagaaaggactacattgtggagaatgagaaagagaagcctaagagcagatctaagaaggccaccaatgccgtagatctctatgtgtgtctactgtgcggttctggtaatgacgaggaccgactcttgctgtgcgacggatgtgacgacagctatcacactttctgcctgattccccctcttcacgatgtacctaaaggcgactggcgctgtccaaagtgtctcgcccaggagtgttcaaaacctcaagaagcgtttgggtttgagcaagcagcgagggattatactctacgaaccttcggcgaaatggcggacgcatttaagtcagactacttcaatatgcctgtccacatggttccaactgagctagtggagaaggaattctggaggttagtctccaccatcgaggaagatgtgacggtggagtatggagcagatatagcttctaaggaattcggctccggatttccagtgcgcgacggaaaaatcaagctgtctccggaagaggaagaatacctcgattctggctggaatttaaataacatgcctgttatggaacaaagtgtcctagcacacattacggccgacatatgcggaatgaaactcccctggctgtacgttggcatgtgcttttccagtttttgttggcacatcgaggaccactggtcctattctatcaattatctgcattggggagaacctaaaacctggtatggcgtcccaggctacgcagcagaacagctcgaaaatgtgatgaaaaagcttgctccagagctttttgtttcgcaacctgatctgctccaccagctggttacaatcatgaatcccaacaccttgatgactcatgaggttcctgtgtatcggactaaccagtgtgcgggagagttcgtgatcacattcccacgagcctatcactcaggctttaatcagggattcaacttcgcggaggctgtgaacttttgtacagttgactggcttcccctaggtaggcagtgcgtggaacactatcgcctgctgcaccgatactgcgtgtttagccacgacgaaatgatctgcaaaatggcgtcaaaggccgacgtcttggacgtcgtggtggcatccaccgtgcaaaaagacatggccatcatgattgaggacgagaaggctctcagggagacagtacgcaagttgggagtaattgattcggaaaggatggattttgaactgctacccgacgacgaaaggcagtgcgttaagtgcaagaccacctgctttatgtccgccatatcctgttcatgtaagccgggactactcgtgtgtctgcaccacgtgaaagaattgtgttcctgccccccatacaagtacaagctgaggtacagatatactcttgacgatctgtatcccatgatgaacgcattgaaactgagagctgaatcctacaatgaatgggccctcaatgtaaatgaagcactggaggccaaaattaacaagaagaagagcttagtatcttttaaggccctgatcgaggaatcagagatgaaaaagttcccagacaacgatcttctgcgtcatcttagactggtaacccaggatgccgagaaatgtgccagcgttgcgcagcagttgctaaacggcaaacgccagacccgctatagatctggcggaggaaagtcacagaatcaactcactgtgaacgagttgaggcaatttgtaacacaactgtatgcactaccgtgcgtcctgtcccaaaccccactgctgaaagatctactcaatagggtcgaagattttcaacagcactctcagaaactgttgagcgaggagacaccatcagctgcagaattgcaggacttattggacgttagttttgaattcgacgttgagctccctcagttagccgaaatgcggatcagactcgagcaggccaggtggctggaggaggtgcagcaggcttgcctagatcctagcagtctgacattggatgacatgcgtcggctgatcgatttgggagtgggccttgctccctactcggctgtggaaaaggctatggctcggttacaagagctgctgaccgttagtgagcactgggatgacaaggccaaaagtctactgaaggctcgccctcgacactcgttgaacagccttgccaccgctgtcaaagagattgaggagatccctgcctatctgccaaacggagctgcccttaaagattcagttcagcgagcaagggattggcttcaggatgttgaggggttgcaggccggtgggagagtgcccgtcctggacacgctcatcgagcttgtgacaagggggaggagcatacccgttcacctgaacagtctgcctaggctagaaactctggtcgctgaagttcaggcttggaaggagtgcgccgtcaatacatttctaacagaaaattccccctacagtttactggaggttctttgtccgagatgtgacatcggactgttagggttaaagcggaaacaacgcaagctcaaggagccgttgccgaacggcaagaagaagtccactaaactagagtcactgagcgacctggaacgagcattgacagagtcaaaggagaccgcttctgcaatggctacattgggcgaggccagactccgggagatggaagccctgcagtccctccggctggccaatgagggtaaactgttaagtccactccaagacgtggacatcaaaatctgcctctgtcagaaggccccagctgcccctatgatacaatgcgagctgtgccgggacgcttttcacacctcctgcgtggctgtcccctcgatctcccaaggccttagaatttggctctgcccgcattgtcggcgaagtgaaaagcctcctctggagaagatcttacccctgctcgctagtctccagagaattagggtccggttgcctgagggtgacgcccttcgctatatgattgagcgcacagtgaattggcaacaccgagctcaacagctgctgtcaagtggcaatctgaagttcgtgcaagacagggtgggctccggtctcctctatagtcgatggcaggctagtgctggtcaggtctccgatactaacaaagtgagtcaacccccaggaacaacatcattttccctgccagacgactgggacaatcgaaccagctatctgcatagtccgttttctaccggcaggtcctgtatccctcttcacggggtatcaccagaggtgaacgagcttctcatggaggcacagctgctccaggtaagcttacccgaaatacaagaactgtatcagaccctcctagcaaaacccagccccgcacagcaaacagaccggagctcaccggttcggcctagctcagaaaagaacgactgttgtcggggaaagcgcgatggcatcaattccctggagcgcaagctcaagagaaggctggaaagggagggactgagcagcgagcgctgggaacgggtcaaaaagatgagaactcccaaaaagaagaaaataaaactgagccatcccaaggatatgaataactttaagttagaaagagagaggtcttacgagctggtaagaagcgccgagacgcacagcctgccaagcgataccagttatagcgaacaggaggatagtgaggatgaagatgccatctgccccgctgtttcctgccttcaaccagaaggagacgaagtcgactgggtccaatgtgacgggagctgcaaccagtggtttcaccaagtatgcgtgggagtctcccctgagatggcagaaaaggaggattatatctgcgttagatgcactgtgaaggacgctcctagtcgtaagtag

SEQ ID NO: 166620 - DNA, 3828 bp, Artificial Sequence
  derived and/or modified sequence
atgggcttcgcccccggcaaggccgtgggcagccacatcagaggccactacgagagaatcctgaacccctacaacctgttcctgagcggcgacagcctgagatgcctgcagaagcccaacctgaccaccgacaccaaggacaaggagtacaagccccacgacatcccccagagacagagcgtgcagcccagcgagacctgcccccccgccagaagagccaagagaatgagagccgaggccatgaacatcaagatcgagcccgaggagaccaccgaggccagaacccacaacctgagaagaagaatgggctgccccacccccaagtgcgagaacgagaaggagatgaagagcagcatcaagcaggagcccatcgagagaaaggactacatcgtggagaacgagaaggagaagcccaagagcagaagcaagaaggccaccaacgccgtggacctgtacgtgtgcctgctgtgcggcagcggcaacgacgaggacagactgctgctgtgcgacggctgcgacgacagctaccacaccttctgcctgatcccccccctgcacgacgtgcccaagggcgactggagatgccccaagtgcctggcccaggagtgcagcaagccccaggaggccttcggcttcgagcaggccgccagagactacaccctgagaaccttcggcgagatggccgacgccttcaagagcgactacttcaacatgcccgtgcacatggtgcccaccgagctggtggagaaggagttctggagactggtgagcaccatcgaggaggacgtgaccgtggagtacggcgccgacatcgccagcaaggagttcggcagcggcttccccgtgagagacggcaagatcaagctgagccccgaggaggaggagtacctggacagcggctggaacctgaacaacatgcccgtgatggagcagagcgtgctggcccacatcaccgccgacatctgcggcatgaagctgccctggctgtacgtgggcatgtgcttcagcagcttctgctggcacatcgaggaccactggagctacagcatcaactacctgcactggggcgagcccaagacctggtacggcgtgcccggctacgccgccgagcagctggagaacgtgatgaagaagctggcccccgagctgttcgtgagccagcccgacctgctgcaccagctggtgaccatcatgaaccccaacaccctgatgacccacgaggtgcccgtgtacagaaccaaccagtgcgccggcgagttcgtgatcaccttccccagagcctaccacagcggcttcaaccagggcttcaacttcgccgaggccgtgaacttctgcaccgtggactggctgcccctgggcagacagtgcgtggagcactacagactgctgcacagatactgcgtgttcagccacgacgagatgatctgcaagatggccagcaaggccgacgtgctggacgtggtggtggccagcaccgtgcagaaggacatggccatcatgatcgaggacgagaaggccctgagagagaccgtgagaaagctgggcgtgatcgacagcgagagaatggacttcgagctgctgcccgacgacgagagacagtgcgtgaagtgcaagaccacctgcttcatgagcgccatcagctgcagctgcaagcccggcctgctggtgtgcctgcaccacgtgaaggagctgtgcagctgccccccctacaagtacaagctgagatacagatacaccctggacgacctgtaccccatgatgaacgccctgaagctgagagccgagagctacaacgagtgggccctgaacgtgaacgaggccctggaggccaagatcaacaagaagaagagcctggtgagcttcaaggccctgatcgaggagagcgagatgaagaagttccccgacaacgacctgctgagacacctgagactggtgacccaggacgccgagaagtgcgccagcgtggcccagcagctgctgaacggcaagagacagaccagatacagaagcggcggcggcaagagccagaaccagctgaccgtgaacgagctgagacagttcgtgacccagctgtacgccctgccctgcgtgctgagccagacccccctgctgaaggacctgctgaacagagtggaggacttccagcagcacagccagaagctgctgagcgaggagacccccagcgccgccgagctgcaggacctgctggacgtgagcttcgagttcgacgtggagctgccccagctggccgagatgagaatcagactggagcaggccagatggctggaggaggtgcagcaggcctgcctggaccccagcagcctgaccctggacgacatgagaagactgatcgacctgggcgtgggcctggccccctacagcgccgtggagaaggccatggccagactgcaggagctgctgaccgtgagcgagcactgggacgacaaggccaagagcctgctgaaggccagacccagacacagcctgaacagcctggccaccgccgtgaaggagatcgaggagatccccgcctacctgcccaacggcgccgccctgaaggacagcgtgcagagagccagagactggctgcaggacgtggagggcctgcaggccggcggcagagtgcccgtgctggacaccctgatcgagctggtgaccagaggcagaagcatccccgtgcacctgaacagcctgcccagactggagaccctggtggccgaggtgcaggcctggaaggagtgcgccgtgaacaccttcctgaccgagaacagcccctacagcctgctggaggtgctgtgccccagatgcgacatcggcctgctgggcctgaagagaaagcagagaaagctgaaggagcccctgcccaacggcaagaagaagagcaccaagctggagagcctgagcgacctggagagagccctgaccgagagcaaggagaccgccagcgccatggccaccctgggcgaggccagactgagagagatggaggccctgcagagcctgagactggccaacgagggcaagctgctgagccccctgcaggacgtggacatcaagatctgcctgtgccagaaggcccccgccgcccccatgatccagtgcgagctgtgcagagacgccttccacaccagctgcgtggccgtgcccagcatcagccagggcctgagaatctggctgtgcccccactgcagaagaagcgagaagccccccctggagaagatcctgcccctgctggccagcctgcagagaatcagagtgagactgcccgagggcgacgccctgagatacatgatcgagagaaccgtgaactggcagcacagagcccagcagctgctgagcagcggcaacctgaagttcgtgcaggacagagtgggcagcggcctgctgtacagcagatggcaggccagcgccggccaggtgagcgacaccaacaaggtgagccagccccccggcaccaccagcttcagcctgcccgacgactgggacaacagaaccagctacctgcacagccccttcagcaccggcagaagctgcatccccctgcacggcgtgagccccgaggtgaacgagctgctgatggaggcccagctgctgcaggtgagcctgcccgagatccaggagctgtaccagaccctgctggccaagcccagccccgcccagcagaccgacagaagcagccccgtgagacccagcagcgagaagaacgactgctgcagaggcaagagagacggcatcaacagcctggagagaaagctgaagagaagactggagagagagggcctgagcagcgagagatgggagagagtgaagaagatgagaaccccctag

SEQ ID NO: 166621 - DNA, 4635 bp, Artificial Sequence
  derived and/or modified sequence
atggaggccgccaccaccctgcaccccggccccagacccgccctgcccctgggcggccccggccccctgggcgagttcctgcccccccccgagtgccccgtgttcgagcccagctgggaggagttcgccgaccccttcgccttcatccacaagatcagacccatcgccgagcagaccggcatctgcaaggtgagacccccccccgactggcagccccccttcgcctgcgacgtggacaagctgcacttcacccccagaatccagagactgaacgagctggaggcccagaccagagtgaagctgaacttcctggaccagatcgccaagtactgggagctgcagggcagcaccctgaagatcccccacgtggagagaaagatcctggacctgttccagctgaacaagctggtggccgaggagggcggcttcgccgtggtgtgcaaggacagaaagtggaccaagatcgccaccaagatgggcttcgcccccggcaaggccgtgggcagccacatcagaggccactacgagagaatcctgaacccctacaacctgttcctgagcggcgacagcctgagatgcctgcagaagcccaacctgaccaccgacaccaaggacaaggagtacaagccccacgacatcccccagagacagagcgtgcagcccagcgagacctgcccccccgccagaagagccaagagaatgagagccgaggccatgaacatcaagatcgagcccgaggagaccaccgaggccagaacccacaacctgagaagaagaatgggctgccccacccccaagtgcgagaacgagaaggagatgaagagcagcatcaagcaggagcccatcgagagaaaggactacatcgtggagaacgagaaggagaagcccaagagcagaagcaagaaggccaccaacgccgtggacctgtacgtgtgcctgctgtgcggcagcggcaacgacgaggacagactgctgctgtgcgacggctgcgacgacagctaccacaccttctgcctgatcccccccctgcacgacgtgcccaagggcgactggagatgccccaagtgcctggcccaggagtgcagcaagccccaggaggccttcggcttcgagcaggccgccagagactacaccctgagaaccttcggcgagatggccgacgccttcaagagcgactacttcaacatgcccgtgcacatggtgcccaccgagctggtggagaaggagttctggagactggtgagcaccatcgaggaggacgtgaccgtggagtacggcgccgacatcgccagcaaggagttcggcagcggcttccccgtgagagacggcaagatcaagctgagccccgaggaggaggagtacctggacagcggctggaacctgaacaacatgcccgtgatggagcagagcgtgctggcccacatcaccgccgacatctgcggcatgaagctgccctggctgtacgtgggcatgtgcttcagcagcttctgctggcacatcgaggaccactggagctacagcatcaactacctgcactggggcgagcccaagacctggtacggcgtgcccggctacgccgccgagcagctggagaacgtgatgaagaagctggcccccgagctgttcgtgagccagcccgacctgctgcaccagctggtgaccatcatgaaccccaacaccctgatgacccacgaggtgcccgtgtacagaaccaaccagtgcgccggcgagttcgtgatcaccttccccagagcctaccacagcggcttcaaccagggcttcaacttcgccgaggccgtgaacttctgcaccgtggactggctgcccctgggcagacagtgcgtggagcactacagactgctgcacagatactgcgtgttcagccacgacgagatgatctgcaagatggccagcaaggccgacgtgctggacgtggtggtggccagcaccgtgcagaaggacatggccatcatgatcgaggacgagaaggccctgagagagaccgtgagaaagctgggcgtgatcgacagcgagagaatggacttcgagctgctgcccgacgacgagagacagtgcgtgaagtgcaagaccacctgcttcatgagcgccatcagctgcagctgcaagcccggcctgctggtgtgcctgcaccacgtgaaggagctgtgcagctgccccccctacaagtacaagctgagatacagatacaccctggacgacctgtaccccatgatgaacgccctgaagctgagagccgagagctacaacgagtgggccctgaacgtgaacgaggccctggaggccaagatcaacaagaagaagagcctggtgagcttcaaggccctgatcgaggagagcgagatgaagaagttccccgacaacgacctgctgagacacctgagactggtgacccaggacgccgagaagtgcgccagcgtggcccagcagctgctgaacggcaagagacagaccagatacagaagcggcggcggcaagagccagaaccagctgaccgtgaacgagctgagacagttcgtgacccagctgtacgccctgccctgcgtgctgagccagacccccctgctgaaggacctgctgaacagagtggaggacttccagcagcacagccagaagctgctgagcgaggagacccccagcgccgccgagctgcaggacctgctggacgtgagcttcgagttcgacgtggagctgccccagctggccgagatgagaatcagactggagcaggccagatggctggaggaggtgcagcaggcctgcctggaccccagcagcctgaccctggacgacatgagaagactgatcgacctgggcgtgggcctggccccctacagcgccgtggagaaggccatggccagactgcaggagctgctgaccgtgagcgagcactgggacgacaaggccaagagcctgctgaaggccagacccagacacagcctgaacagcctggccaccgccgtgaaggagatcgaggagatccccgcctacctgcccaacggcgccgccctgaaggacagcgtgcagagagccagagactggctgcaggacgtggagggcctgcaggccggcggcagagtgcccgtgctggacaccctgatcgagctggtgaccagaggcagaagcatccccgtgcacctgaacagcctgcccagactggagaccctggtggccgaggtgcaggcctggaaggagtgcgccgtgaacaccttcctgaccgagaacagcccctacagcctgctggaggtgctgtgccccagatgcgacatcggcctgctgggcctgaagagaaagcagagaaagctgaaggagcccctgcccaacggcaagaagaagagcaccaagctggagagcctgagcgacctggagagagccctgaccgagagcaaggagaccgccagcgccatggccaccctgggcgaggccagactgagagagatggaggccctgcagagcctgagactggccaacgagggcaagctgctgagccccctgcaggacgtggacatcaagatctgcctgtgccagaaggcccccgccgcccccatgatccagtgcgagctgtgcagagacgccttccacaccagctgcgtggccgtgcccagcatcagccagggcctgagaatctggctgtgcccccactgcagaagaagcgagaagccccccctggagaagatcctgcccctgctggccagcctgcagagaatcagagtgagactgcccgagggcgacgccctgagatacatgatcgagagaaccgtgaactggcagcacagagcccagcagctgctgagcagcggcaacctgaagttcgtgcaggacagagtgggcagcggcctgctgtacagcagatggcaggccagcgccggccaggtgagcgacaccaacaaggtgagccagccccccggcaccaccagcttcagcctgcccgacgactgggacaacagaaccagctacctgcacagccccttcagcaccggcagaagctgcatccccctgcacggcgtgagccccgaggtgaacgagctgctgatggaggcccagctgctgcaggtgagcctgcccgagatccaggagctgtaccagaccctgctggccaagcccagccccgcccagcagaccgacagaagcagccccgtgagacccagcagcgagaagaacgactgctgcagaggcaagagagacggcatcaacagcctggagagaaagctgaagagaagactggagagagagggcctgagcagcgagagatgggagagagtgaagaagatgagaacccccaagaagaagaagatcaagctgagccaccccaaggacatgaacaacttcaagctggagagagagagaagctacgagctggtgagaagcgccgagacccacagcctgcccagcgacaccagctacagcgagcaggaggacagcgaggacgaggacgccatctgccccgccgtgagctgcctgcagcccgagggcgacgaggtggactgggtgcagtgcgacggcagctgcaaccagtggttccaccaggtgtgcgtgggcgtgagccccgagatggccgagaaggaggactacatctgcgtgagatgcaccgtgaaggacgcccccagcagaaagtag

SEQ ID NO: 166622 - DNA, 4161 bp, Artificial Sequence
  derived and/or modified sequence
atgggcttcgcccccggcaaggccgtgggcagccacatcagaggccactacgagagaatcctgaacccctacaacctgttcctgagcggcgacagcctgagatgcctgcagaagcccaacctgaccaccgacaccaaggacaaggagtacaagccccacgacatcccccagagacagagcgtgcagcccagcgagacctgcccccccgccagaagagccaagagaatgagagccgaggccatgaacatcaagatcgagcccgaggagaccaccgaggccagaacccacaacctgagaagaagaatgggctgccccacccccaagtgcgagaacgagaaggagatgaagagcagcatcaagcaggagcccatcgagagaaaggactacatcgtggagaacgagaaggagaagcccaagagcagaagcaagaaggccaccaacgccgtggacctgtacgtgtgcctgctgtgcggcagcggcaacgacgaggacagactgctgctgtgcgacggctgcgacgacagctaccacaccttctgcctgatcccccccctgcacgacgtgcccaagggcgactggagatgccccaagtgcctggcccaggagtgcagcaagccccaggaggccttcggcttcgagcaggccgccagagactacaccctgagaaccttcggcgagatggccgacgccttcaagagcgactacttcaacatgcccgtgcacatggtgcccaccgagctggtggagaaggagttctggagactggtgagcaccatcgaggaggacgtgaccgtggagtacggcgccgacatcgccagcaaggagttcggcagcggcttccccgtgagagacggcaagatcaagctgagccccgaggaggaggagtacctggacagcggctggaacctgaacaacatgcccgtgatggagcagagcgtgctggcccacatcaccgccgacatctgcggcatgaagctgccctggctgtacgtgggcatgtgcttcagcagcttctgctggcacatcgaggaccactggagctacagcatcaactacctgcactggggcgagcccaagacctggtacggcgtgcccggctacgccgccgagcagctggagaacgtgatgaagaagctggcccccgagctgttcgtgagccagcccgacctgctgcaccagctggtgaccatcatgaaccccaacaccctgatgacccacgaggtgcccgtgtacagaaccaaccagtgcgccggcgagttcgtgatcaccttccccagagcctaccacagcggcttcaaccagggcttcaacttcgccgaggccgtgaacttctgcaccgtggactggctgcccctgggcagacagtgcgtggagcactacagactgctgcacagatactgcgtgttcagccacgacgagatgatctgcaagatggccagcaaggccgacgtgctggacgtggtggtggccagcaccgtgcagaaggacatggccatcatgatcgaggacgagaaggccctgagagagaccgtgagaaagctgggcgtgatcgacagcgagagaatggacttcgagctgctgcccgacgacgagagacagtgcgtgaagtgcaagaccacctgcttcatgagcgccatcagctgcagctgcaagcccggcctgctggtgtgcctgcaccacgtgaaggagctgtgcagctgccccccctacaagtacaagctgagatacagatacaccctggacgacctgtaccccatgatgaacgccctgaagctgagagccgagagctacaacgagtgggccctgaacgtgaacgaggccctggaggccaagatcaacaagaagaagagcctggtgagcttcaaggccctgatcgaggagagcgagatgaagaagttccccgacaacgacctgctgagacacctgagactggtgacccaggacgccgagaagtgcgccagcgtggcccagcagctgctgaacggcaagagacagaccagatacagaagcggcggcggcaagagccagaaccagctgaccgtgaacgagctgagacagttcgtgacccagctgtacgccctgccctgcgtgctgagccagacccccctgctgaaggacctgctgaacagagtggaggacttccagcagcacagccagaagctgctgagcgaggagacccccagcgccgccgagctgcaggacctgctggacgtgagcttcgagttcgacgtggagctgccccagctggccgagatgagaatcagactggagcaggccagatggctggaggaggtgcagcaggcctgcctggaccccagcagcctgaccctggacgacatgagaagactgatcgacctgggcgtgggcctggccccctacagcgccgtggagaaggccatggccagactgcaggagctgctgaccgtgagcgagcactgggacgacaaggccaagagcctgctgaaggccagacccagacacagcctgaacagcctggccaccgccgtgaaggagatcgaggagatccccgcctacctgcccaacggcgccgccctgaaggacagcgtgcagagagccagagactggctgcaggacgtggagggcctgcaggccggcggcagagtgcccgtgctggacaccctgatcgagctggtgaccagaggcagaagcatccccgtgcacctgaacagcctgcccagactggagaccctggtggccgaggtgcaggcctggaaggagtgcgccgtgaacaccttcctgaccgagaacagcccctacagcctgctggaggtgctgtgccccagatgcgacatcggcctgctgggcctgaagagaaagcagagaaagctgaaggagcccctgcccaacggcaagaagaagagcaccaagctggagagcctgagcgacctggagagagccctgaccgagagcaaggagaccgccagcgccatggccaccctgggcgaggccagactgagagagatggaggccctgcagagcctgagactggccaacgagggcaagctgctgagccccctgcaggacgtggacatcaagatctgcctgtgccagaaggcccccgccgcccccatgatccagtgcgagctgtgcagagacgccttccacaccagctgcgtggccgtgcccagcatcagccagggcctgagaatctggctgtgcccccactgcagaagaagcgagaagccccccctggagaagatcctgcccctgctggccagcctgcagagaatcagagtgagactgcccgagggcgacgccctgagatacatgatcgagagaaccgtgaactggcagcacagagcccagcagctgctgagcagcggcaacctgaagttcgtgcaggacagagtgggcagcggcctgctgtacagcagatggcaggccagcgccggccaggtgagcgacaccaacaaggtgagccagccccccggcaccaccagcttcagcctgcccgacgactgggacaacagaaccagctacctgcacagccccttcagcaccggcagaagctgcatccccctgcacggcgtgagccccgaggtgaacgagctgctgatggaggcccagctgctgcaggtgagcctgcccgagatccaggagctgtaccagaccctgctggccaagcccagccccgcccagcagaccgacagaagcagccccgtgagacccagcagcgagaagaacgactgctgcagaggcaagagagacggcatcaacagcctggagagaaagctgaagagaagactggagagagagggcctgagcagcgagagatgggagagagtgaagaagatgagaacccccaagaagaagaagatcaagctgagccaccccaaggacatgaacaacttcaagctggagagagagagaagctacgagctggtgagaagcgccgagacccacagcctgcccagcgacaccagctacagcgagcaggaggacagcgaggacgaggacgccatctgccccgccgtgagctgcctgcagcccgagggcgacgaggtggactgggtgcagtgcgacggcagctgcaaccagtggttccaccaggtgtgcgtgggcgtgagccccgagatggccgagaaggaggactacatctgcgtgagatgcaccgtgaaggacgcccccagcagaaagtag

SEQ ID NO: 166623 - protein, 520 aa, Artificial Sequence
  derived and/or modified sequence
MTVSGKKQTMGFEVPGVSSEENGHSFHTPQKGPPIEDAIASSDVLETASKSANPPHTIQASEEQSSTPAPVKKSGKLRQQIDVKAELEKRQGGKQLLNLVVIGHVDAGKSTLMGHMLYLLGNINKRTMHKYEQESKKAGKASFAYAWVLDETGEERERGVTMDVGMTKFETTTKVITLMDAPGHKDFIPNMITGAAQADVAVLVVDASRGEFEAGFETGGQTREHGLLVRSLGVTQLAVAVNKMDQVNWQQERFQEITGKLGHFLKQAGFKESDVGFIPTSGLSGENLITRSQSSELTKWYKGLCLLEQIDSFKPPQRSIDKPFRLCVSDVFKDQGSGFCITGKIEAGYIQTGDRLLAMPPNETCTVKGITLHDEPVDWAAAGDHVSLTLVGMDIIKINVGCIFCGPKVPIKACTRFRARILIFNIEIPITKGFPVLLHYQTVSEPAVIKRLISVLNKSTGEVTKKKPKFLTKGQNALVELQTQRPIALELYKDFKELGRFMLRYGGSTIAAGVVTEIKE

SEQ ID NO: 166624 - protein, 684 aa, Artificial Sequence
  derived and/or modified sequence
MARHRNVRGYNYDEDFEDDDLYGQSVEDDYCISPSTAAQFIYSRRDKPSVEPVEEYDYEDLKESSNSVSNHQLSGFDQARLYSCLDHMREVLGDAVPDEILIEAVLKNKFDVQKALSGVLEQDRVQSLKDKNEATVSTGKIAKGKPVDSQTSRSESEIVPKVAKMTVSGKKQTMGFEVPGVSSEENGHSFHTPQKGPPIEDAIASSDVLETASKSANPPHTIQASEEQSSTPAPVKKSGKLRQQIDVKAELEKRQGGKQLLNLVVIGHVDAGKSTLMGHMLYLLGNINKRTMHKYEQESKKAGKASFAYAWVLDETGEERERGVTMDVGMTKFETTTKVITLMDAPGHKDFIPNMITGAAQADVAVLVVDASRGEFEAGFETGGQTREHGLLVRSLGVTQLAVAVNKMDQVNWQQERFQEITGKLGHFLKQAGFKESDVGFIPTSGLSGENLITRSQSSELTKWYKGLCLLEQIDSFKPPQRSIDKPFRLCVSDVFKDQGSGFCITGKIEAGYIQTGDRLLAMPPNETCTVKGITLHDEPVDWAAAGDHVSLTLVGMDIIKINVGCIFCGPKVPIKACTRFRARILIFNIEIPITKGFPVLLHYQTVSEPAVIKRLISVLNKSTGEVTKKKPKFLTKGQNALVELQTQRPIALELYKDFKELGRFMLRYGGSTIAAGVVTEIKE

SEQ ID NO: 166625 - protein, 408 aa, Artificial Sequence
  derived and/or modified sequence
MGHMLYLLGNINKRTMHKYEQESKKAGKASFAYAWVLDETGEERERGVTMDVGMTKFETTTKVITLMDAPGHKDFIPNMITGAAQADVAVLVVDASRGEFEAGFETGGQTREHGLLVRSLGVTQLAVAVNKMDQVNWQQERFQEITGKLGHFLKQAGFKESDVGFIPTSGLSGENLITRSQSSELTKWYKGLCLLEQIDSFKPPQRSIDKPFRLCVSDVFKDQGSGFCITGKIEAGYIQTGDRLLAMPPNETCTVKGITLHDEPVDWAAAGDHVSLTLVGMDIIKINVGCIFCGPKVPIKACTRFRARILIFNIEIPITKGFPVLLHYQTVSEPAVIKRLISVLNKSTGEVTKKKPKFLTKGQNALVELQTQRPIALELYKDFKELGRFMLRYGGSTIAAGVVTEIKE

SEQ ID NO: 166626 - DNA, 1563 bp, Artificial Sequence
  derived and/or modified sequence
atgacagtctccggcaaaaaacagacaatggggtttgaagtacccggcgtgagttctgaggaaaatggccactctttccacacaccccagaagggaccccccattgaggatgctatcgcaagcagcgacgtgctcgagacggcttccaaatctgcgaacccacctcatacaatacaggctagcgaagaacagtcgagcacgccagcccccgttaaaaaatctggaaagctaaggcagcaaatcgacgttaaggcggaattggaaaaaaggcaaggaggaaagcagctgctgaatctggttgtgatcggccacgtggatgcaggaaagagcactttgatgggtcatatgttgtatctcttgggaaacatcaataaacgtactatgcacaagtatgagcaggagagtaaaaaagcgggcaaagctagcttcgcctatgcttgggttcttgacgaaactggagaggaaagagaacgcggcgttactatggatgtcggcatgactaaatttgaaactaccaccaaagtcatcacccttatggatgcaccaggtcacaaggacttcatccccaacatgattaccggcgctgcgcaggcagacgtcgctgtactcgtggtcgatgcctctagaggggagtttgaagcaggattcgaaactggtggacaaacccgcgagcatgggctcctcgtgcgctcgctgggcgtgacccagctagccgtggctgtgaataaaatggatcaggtcaattggcagcaagaacgcttccaagagattaccggtaagctgggacactttctgaagcaggctggttttaaggagagcgatgtgggctttatcccaacatccggcttatccggcgagaacctgataactcgcagccagagcagtgaactcaccaagtggtataaaggcctgtgtctgctggagcagatcgattcgttcaaacccccgcaacgttccatcgacaagccatttcggctttgtgtctcggacgtgtttaaggaccagggttcagggttctgcattacagggaagattgaggccggctacattcagaccggggatcggttactggccatgccccctaacgaaacctgtacagtcaaggggatcaccctgcatgacgaacccgtggactgggcagccgcaggagatcatgtctccctcacacttgtgggcatggacataatcaagattaacgttggctgcatattctgcgggcccaaagtacccatcaaggcttgcacgaggttcagagctagaatattaatcttcaacattgagatccctattacaaaaggcttcccagtgctgctgcattatcagacagtctctgaaccagccgtaataaaaaggctgatctccgtgctgaacaaaagcaccggtgaggtgaccaagaagaaaccgaaattcctcactaagggccagaatgccttagtggagcttcaaactcaacgcccaatcgccctagagctatacaaggattttaaggaactcggccggttcatgctccggtatgggggcagcaccattgctgccggggttgtaaccgagattaaggaatag

SEQ ID NO: 166627 - DNA, 2055 bp, Artificial Sequence
  derived and/or modified sequence
atggcccgccacagaaacgtgcgaggctacaattatgacgaggattttgaggacgacgatctgtatggccaatccgttgaggatgattattgtatctccccaagcacggcggcgcagtttatctattcacgacgagataaaccatctgtcgaacctgtagaagaatatgactacgaagacttgaaggagtcttcaaattccgtctctaatcatcagctgtccggattcgaccaggcacgactgtattcctgcctagaccacatgcgcgaagtcctaggcgatgctgtcccagacgagattctgattgaagcggtactcaagaacaagttcgatgtccagaaggctctgtccggggttctggagcaggatcgggtgcagagcctgaaggacaagaatgaagctaccgtgtctacaggtaaaatcgctaaaggtaagcccgtggatagccaaacgtctaggtccgaatcggagattgtccccaaggtcgccaaaatgaccgtttccggcaagaaacagacaatgggctttgaggtccctggcgtgagtagtgaggagaacggccattcctttcacacaccccaaaagggaccccccatcgaggacgctattgcatctagcgacgttctggagacagcgagcaaaagtgcgaaccctcctcacaccattcaagccagtgaagagcagtcttcaaccccagccccagtaaagaagagtgggaagctccgccaacaaattgatgtcaaagccgagctggagaaacgccagggaggcaaacagctgttaaatctagtcgttatcggacacgtagatgctggtaagtctacgctgatgggacatatgctgtacctcctgggaaacatcaacaaaaggactatgcacaagtacgagcaggaatccaagaaggccgggaaggcgtcatttgcatatgcttgggtgctggacgaaactggcgaggaaagggaacgtggtgtgaccatggatgtgggaatgaccaagttcgaaaccaccactaaggtcatcacacttatggacgcaccaggccataaggattttatcccaaatatgatcacaggggcagcgcaggccgatgtggccgtgctcgtggtggacgcctctcgaggagaattcgaagccggttttgagacagggggtcaaactcgcgagcacggcctgttagtgagaagtctcggcgttacacaattagccgtggccgttaacaagatggaccaggtgaactggcagcaagagcgtttccaagaaattactggaaaactggggcactttctgaagcaggccggcttcaaggagagcgatgtcggattcataccaacctccggcctcagtggagaaaatttaattactcgcagtcagagttccgagcttaccaaatggtataaagggctgtgtctcctcgaacaaatcgattcatttaaaccacctcagcggagtattgacaagcccttccggctgtgcgtgtcagacgtgttcaaggatcagggctctggattttgtataacaggtaaaatcgaagctggctacattcagactggtgatcggttattagctatgcctcctaacgagacatgcacagttaaaggcattacgttacacgatgaacctgttgactgggccgccgctggcgatcacgtgtccttaaccctcgttggaatggacataatcaagataaacgttggatgcattttctgcggtcccaaggtgcccattaaggcctgcactaggtttagagctcgcatcctgatcttcaatatcgagatccccataaccaaggggttccctgttctgttgcattaccagacagtaagtgagccagcggtgattaaacggctgatatcggtattgaacaagtccaccggcgaggtgaccaagaagaagccgaagtttctcaccaagggccagaacgccctcgtggaactgcaaacacaacgccccatcgcgctggagttgtataaggactttaaggaactgggaagatttatgctgaggtacggaggttccacaatcgctgcaggagtggtgacagagattaaagagtag

SEQ ID NO: 166628 - DNA, 2102 bp, Artificial Sequence
  derived and/or modified sequence
cagtctgtagaggatgattattgtatttcgccgtcaacaggaaaaccagtagattcccagacatcgcgaagtgaatctgaaattgtgccaaaagttgctaaaatgactgtatctggaaagaagcaaactatgggatttgaagtgcctggagtatcttctgaagaaaatggtcatagtttccacacacctcaaaaaggaccgcccattgaagatgccattgcttcttccgatgttcttgagactgcttctaaatctgctaatccaccccacacgattcaagcatcagaagagcagagttcaaccccagcaccggtgaaaaagtctggcaagctgaggcagcaaatagatgtgaaggcggaactggagaagcggcaaggagggaagcagctactcaacttagtggtcattggtcatgttgatgctgggaaaagtactctgatgggccatatgctttatcttctgggtaatataaacaaaagaactatgcataagtatgaacaggagtctaaaaaggctggcaaagcttcgtttgcatatgcatgggtcttggatgaaactggcgaagaaagggaaaggggagtaaccatggatgttggtatgacaaagtttgaaaccacaaccaaagttattacattaatggatgctccaggccataaggacttcattccaaatatgattacaggagcagcccaggcggatgtagctgttttagttgtagatgccagcaggggagagtttgaagctggatttgagactggaggacaaacacgagagcatggactcttggtccgttctctgggagtgacgcagcttgcagttgcagttaataaaatggatcaggttaattggcaacaagaaaggtttcaagagattactggaaaacttgggcactttcttaagcaagcaggttttaaggagagtgatgtaggttttattcctacaagtggtctcagtggtgaaaatctaatcacaagatctcagtcaagtgaactcacaaaatggtataaaggactatgtttattagaacaaattgattcctttaagcctccccagcgatctattgacaaaccttttagattatgtgtgtccgatgttttcaaagatcaaggatctggattttgcataactggtaaaatagaagctggttatatccaaactggtgaccgactactggcaatgcctcctaatgaaacttgtaccgtgaaaggaatcactctgcatgatgaacctgtcgactgggcggcagcaggcgatcatgttagtcttactttggttgggatggatatcatcaaaatcaatgttggctgcatattttgtggccccaaagtacccattaaagcttgcactcgtttcagagcccgaatcctcatctttaatattgaaattcctatcactaaaggatttcctgtgctgttacactaccaaactgtcagtgaacccgccgttattaaacgattgattagtgtcttaaacaaaagcacgggtgaagtcacaaagaaaaagcctaagtttttgactaaaggccagaatgcattggtagagctacagacacaaagaccaatagctcttgagctatataaagactttaaagagctggggaggttcatgctacgttacggtggttctacaatagctgctggtgttgtcactgagataaaagaatgatgggtcagaatttctaccacgtttctggatacagtgaaatagctaacctctgtttcaagaatgcagttattaagtcaaaggaacaatgtgcaattgatatgtttttagatgagagagaaaaattaaagctaaaattagctgcaaagaagtattaataatcacctctgcaaaaattctaagttgccaactggcaaagaaagtctaatgttaaaaacaactttgcctttgaaacgttaataaatggatttactttgctaagatttatggcaagtgtcaaaaatagtatctgaagatactgaatcatcatgaaatgaactctacttctggccaaagcacaatgtatttgcagttttctcttttgattcaattatactgcacatgttttaaggaaaagtaacttaattgggtttttcaggcagttgatatttgacctaagc

SEQ ID NO: 166629 - DNA, 7163 bp, Artificial Sequence
  derived and/or modified sequence
agggaggcggacagtgaccctgaggcattgccgtcgcgcggtgcacagctaagacgtcgcgcttgcgcaggcgctcggcgcagaggcctgcgggaagccaagatggcgcataggggttctccaggctgcagttggcgccttatcagtatctaagcggagtgttttggaaggagttaaggggctgtggcaaacgccctctccgccgtcatggcccggcatcggaatgttcgaggctataactacgatgaagattttgaagatgatgatctctacggccagtctgtagaggatgattattgtatttcgccgtcaacagctgctcagtttatttattcacggcgtgacaaaccttccgttgagcctgtggaagaatatgattatgaagatctgaaagaatcttccaattctgtttcaaaccatcagctcagtggatttgatcaagctcgtctttattcatgccttgatcacatgagagaggtacttggagatgctgtgccagatgaaatattaattgaagcagttctgaagaacaagtttgatgtgcagaaggctttgtcaggggttctggaacaagatagagtgcagagtttgaaggacaagaatgaggcaacagtatctacaggaaagatagcaaaaggaaaaccagtagattcccagacatcgcgaagtgaatctgaaattgtgccaaaagttgctaaaatgactgtatctggaaagaagcaaactatgggatttgaagtgcctggagtatcttctgaagaaaatggtcatagtttccacacacctcaaaaaggaccgcccattgaagatgccattgcttcttccgatgttcttgagactgcttctaaatctgctaatccaccccacacgattcaagcatcagaagagcagagttcaaccccagcaccggtgaaaaagtctggcaagctgaggcagcaaatagatgtgaaggcggaactggagaagcggcaaggagggaagcagctactcaacttagtggtcattggtcatgttgatgctgggaaaagtactctgatgggccatatgctttatcttctgggtaatataaacaaaagaactatgcataagtatgaacaggagtctaaaaaggctggcaaagcttcgtttgcatatgcatgggtcttggatgaaactggcgaagaaagggaaaggggagtaaccatggatgttggtatgacaaagtttgaaaccacaaccaaagttattacattaatggatgctccaggccataaggacttcattccaaatatgattacaggagcagcccaggcggatgtagctgttttagttgtagatgccagcaggggagagtttgaagctggatttgagactggaggacaaacacgagagcatggactcttggtccgttctctgggagtgacgcagcttgcagttgcagttaataaaatggatcaggttaattggcaacaagaaaggtttcaagagattactggaaaacttgggcactttcttaagcaagcaggttttaaggagagtgatgtaggttttattcctacaagtggtctcagtggtgaaaatctaatcacaagatctcagtcaagtgaactcacaaaatggtataaaggactatgtttattagaacaaattgattcctttaagcctccccagcgatctattgacaaaccttttagattatgtgtgtccgatgttttcaaagatcaaggatctggattttgcataactggtaaaatagaagctggttatatccaaactggtgaccgactactggcaatgcctcctaatgaaacttgtaccgtgaaaggaatcactctgcatgatgaacctgtcgactgggcggcagcaggcgatcatgttagtcttactttggttgggatggatatcatcaaaatcaatgttggctgcatattttgtggccccaaagtacccattaaagcttgcactcgtttcagagcccgaatcctcatctttaatattgaaattcctatcactaaaggatttcctgtgctgttacactaccaaactgtcagtgaacccgccgttattaaacgattgattagtgtcttaaacaaaagcacgggtgaagtcacaaagaaaaagcctaagtttttgactaaaggccagaatgcattggtagagctacagacacaaagaccaatagctcttgagctatataaagactttaaagagctggggaggttcatgctacgttacggtggttctacaatagctgctggtgttgtcactgagataaaagaatgatgggtcagaatttctaccacgtttctggatacagtgaaatagctaacctctgtttcaagaatgcagttattaagtcaaaggaacaatgtgcaattgatatgtttttagatgagagagaaaaattaaagctaaaattagctgcaaagaagtattaataatcacctctgcaaaaattctaagttgccaactggcaaagaaagtctaatgttaaaaacaactttgcctttgaaacgttaataaatggatttactttgctaagatttatggcaagtgtcaaaaatagtatctgaagatactgaatcatcatgaaatgaactctacttctggccaaagcacaatgtatttgcagttttctcttttgattcaattatactgcacatgttttaaggaaaagtaacttaattgggtttttcaggcagttgatatttgacctaagctttttttttttttttttttccagttaatgctaagaaaagatttggggaaggttataataaaagtattttgtggtgaccataagaatgtccctccccaaacaagtaaacttgtgaaagtttaatttggaattagtggaagctgttcctttgaaagccaagatattatttaagttgtaaagccagctaataaaatgccttagtttgagcataatacaaactgtgttttgttctttagacatttatgagattctctgccactaacagtaaatatgatttaggggttttgtgggatctttttcacctaagagtttcctagctctgtcacatgaattcttttttatcctaatggcagatccaatttcatctcattcatttttttaaccataacttgcttttcccattctcacttttagaattatacctatgatggccctttctttatcttgcttaccttatagattataagtcccctgtgagtaagtaagagtcatgtttttctttaaagtttcaacaacaaaccccaaggtttatttatttaacaacaggtattcgttgaggtgccttctgggtgcaaggagctttagagtagattttgacctcagctgaacctggaactctgatctgatagactgtttatgataagcttttttttttattagcagcgtgatttgtatatcgatggcttaacatatacaacagcatttcttctccctgcaccttttcgtgaacctgacattttgaacataagcaataacatctgtatggtaaagtaggcagattatacatgtgttgcttagtgaatgattaccaagtgaacacacttggtatattgctttaccaaaatacatgtgtagttgtcacttcagattcactgagttaagaaagttttatttaaatattaatattaatcaagaatttaacagatatatgtgacagaaatctaacttcaagtgactgaagcagaaagaaaaatttttgaatgacataactgagaaaattagaggtagctctagctttgattccatttagatcgagcagctcacacaatgttagcaaggactcatctccactctgccttccctggtgctggttttgctctcaaactctatatagaactctcggccgggcgcggtggctcacacctgtaatcaaaacactttgggaggctgagtcgggaggatagcgtgagcccaggagtttgagaccagctaaggcaatatagtgagaccatgtctctacagaaaaaatttaaaaacagatcagctgggtgtggtgccacatgcctgtagtcccagcttctcaggaggctggggtgggaagatcacttgagcccaggaggtcgaggctgcagtgagccatgatcacatcactgcagtccagcctgggtgacagagcaagacctgtcaccctgccacccataaaaaacctcttctgtaatgccaggttcttgacaagatgtgataattccacacttacatcctcagatctcccatccagggcaaggacagactaaaagagcatatcttctccagaagtcctagaaacatctcatcattgactatgattgaattttatttattaatacttccctaggatatcctgtgtttgagtgtgaagttaatatcacacaaagcatgtagctaacagttgtgtgagggttggaaattcagggtgctgttaggaaggggaaatggattggggtttaaggtagggggagtaaaaacaagaaaccatccactctgtatattatataagactgtgatcgaattaagaattttagtttacagtttagcataaacaaatagtagtagaaatgaatgcatttattcattccttccttctccaatagtgtttaagtacaatctttttatttgcattttattgatgattgattgtggttgaaaggagtggtgatattatttcgaggatccactgtgtaagaagactgttggcagtggaaggctcgagttgattaagtgacaaagaggtaaagcagacatgcccaagcttggttatgctctgatttcctaccctgttactttcatccataatttatagtacatccattttgtgtcattttgcttcaggtatttcttgtcctgactgtcttcttttttatgattttactgtttcttcacactaatggctttgtcctctgactttgactctttgtgagattcttctgagcagttaacctctaggataatgtggcttgaacacattacagaactatgttttgacttgttagtattattcacacattcatgacaattgagcctctctactgtgagaaatgttttagaggccagtttctaggcatagctgtttttctcccatgagtatgcaaatcaatagttttaaccattgttaaaatgcaatcatagtgacttcagaaaatttggaaaatacagaaaatatagggaagaataaaattaacccacagttctgtcacctaaaggtaactgctgccaatgttttcatgtatttcttttctgtctctccaatgcatttttttacatagttgtgagcgttagccaagttattttcatgttgttatgtaatcaatatttttcaatagaagtattagaggttttttttattgatataaaaataacaattacagatcctgatatatagaagttattcaaaattatacagttttcaaaaaatcaagacaagtaggcccaatacaaactactgaatcatcttctaatttccctctaaaatatttatagaaatatgtaagtagaaaaacattcatcctttcctcgtctaattatgatcctgccatattccaggcacaagagaaagctctggggcttgagtcttaatagggctgatagtccaaccaggggacagggtatcataaagagataattcaaaactttaagattggagggtaggtgatggtagaaaattctgcggcaaacatttgttgatgctcatcatttgttgatgtcatcaaagatcaccagggcataattataatcaaaattagttttattgatgcttgctgcagcaagagagactgcacaccactggggtctatgggtgcttctcagtgggaaggtgtaaggaggggcttgctaagaatttgagcacatgtagctaattttaaggagggctcaagtgagcaagggtttcttctggattgagtgctgtcagaaagtggattgagtgctgtcagaaagtgggagtgattttgcaactgggtatcttaatttttatgttgtgggtgggaggaaaggaaagaagcaacagtcacccatgttagccacaagaagaggttggctgtttatggtttgcacagtgactttgtttttatctgtgctcaggcatgattacagtatctcattttatccggattacagtgacctcatctgatgttagagatttgagaattgttaaatgttcagcaggagaacgccaccgcctagtgtgaatgctaggtcagaagctgctttttcacactgaaaccatttaagtatgtacaaataagttaatagtgtaaatgtaggtgtaaaatacaatgcaaaacaaaataatgaagtaagtgaattaaattattgcaccaaatatggggatatgaaatagggaaagaaaagcattaagttacttatagtccataaagggactacattattttgttactctgataatcccataaaacaaagttttaagaatgtttacagtaaccatgaatggaattagtgaaactattcatatcaatgcaaaaaaaaaaaaaaaaaaagcaaagaaactaagtctgtacagcaaaagatggaaaggaaacaagaaaattaaatgaagacaaaggttgtgattattacagtaaatgaaaataggtttttatctttaaaatgtagactcaaactgcaaagctaatgatatgctatctgcaaaatattcctattttgtaaataaataaaaccatagatttaaagaagaaagggcacagatgtactggggagacaaaaataactgatccgttgggtgtataccatgtgccaagcaattttcatatactcatttaacatgacatatctataattatatgaggcagatattattaacctcagtctatagatgagaagactaaagctcagagggattgctaaaaactagtaaataaattatggaaccatgatttgaatttagatttaagtctgactgaggcatgttcagagacactacactgcctctccagaaatcaggagtagcaatattaacactggacaaagaatttaaagcaagtaaaaaaaaattaagagaatttcatattaataacaagtataatgcacaataaaactgtaccaaatgacataaaaatgcataatgaaatttattagaaattaaaaattaaagggcatagttacaattattgaggaattctcatagctctgccttatagatcatgtaaacaaacaaggtcatagaggacttaaatagcaaagcagaaaaaaa

SEQ ID NO: 166630 - DNA, 1563 bp, Artificial Sequence
  derived and/or modified sequence
atgacagtgtctgggaagaagcagaccatgggctttgaggtgcctggggtgtccagtgaagaaaatggccacagcttccacaccccccagaagggcccccccattgaagatgccatcgccagcagtgatgtgctggagacagccagcaagagcgccaaccccccccacaccatccaggccagcgaggagcagagcagcaccccagcccctgtgaagaagagcggcaagctgcggcagcagattgatgtgaaggccgagctggagaagaggcagggcggcaagcagctgctgaacctggtggtgattggccacgtggatgctgggaagagcaccctgatgggccacatgctgtacctgctgggcaacatcaacaagaggaccatgcacaagtatgagcaggagagcaagaaggccggcaaggccagctttgcctatgcctgggtgctggatgagaccggggaggagcgggagcggggcgtgaccatggatgtgggcatgaccaagtttgagaccaccaccaaggtgatcaccctgatggatgcccctggccacaaggacttcatccccaacatgatcactggagctgcccaggctgatgtggccgtgctggtggtggatgccagcagaggagaatttgaggccggctttgagaccggcggccagacccgggagcacggcctgctggtgcgcagcctgggcgtgacccagctggccgtggccgtgaacaagatggaccaggtgaactggcagcaggagcgcttccaggagatcaccgggaagctgggccacttcctgaagcaggccggcttcaaggagagtgatgtgggcttcatccccaccagcggcctgagcggggagaacctgatcaccaggagccagagcagcgagctgaccaagtggtacaagggcctgtgcctgctggagcagattgacagcttcaagccaccccagaggagcattgacaagcccttccggctgtgtgtgtctgatgtgttcaaggaccagggcagcggcttctgcatcaccgggaagattgaagctggctacatccagacaggagaccggctgctggccatgcccccaaatgagacctgcaccgtgaagggcatcaccctgcatgatgagcctgtggactgggccgccgccggggaccacgtgtccctgaccctggtgggcatggacatcatcaagatcaacgtgggctgcatcttctgtggccccaaggtgcccatcaaggcctgcacccgcttccgggcccgcatcctgatcttcaacatcgagatccccatcaccaagggcttccctgtgctgctgcactaccagacagtgtctgagcctgctgtgatcaagaggctcatctctgtgctgaacaagagcactggagaggtgaccaagaagaagcccaagttcctgaccaagggccagaatgccctggtggagctgcagacccagaggcccatcgccctggagctgtacaaggacttcaaggagctgggccgcttcatgctgcgctatggaggcagcaccatcgccgccggcgtggtgacagagatcaaggagtag

SEQ ID NO: 166631 - DNA, 2055 bp, Artificial Sequence
  derived and/or modified sequence
atggcccggcacagaaatgtgcggggctacaactatgatgaggactttgaagatgatgacctgtatggccagagcgtggaggatgactactgcatcagccccagcacagctgcccagttcatctacagccggcgggacaagcccagcgtggagcctgtggaggagtatgactatgaggacctgaaggagagcagcaacagcgtgagcaaccaccagctgagcggctttgaccaggcccggctgtacagctgcctggaccacatgagggaggtgctgggagatgctgtgcctgatgagatcctgattgaggccgtgctgaagaacaagtttgatgtgcagaaggccctgtctggagtgctggagcaggacagagtgcagagcctgaaggacaagaatgaggccaccgtgtccacaggcaagatcgccaagggcaagcctgtggacagccagaccagccgctctgagagcgagatcgtgcccaaggtggccaagatgacagtgtctgggaagaagcagaccatgggctttgaggtgcctggggtgtccagtgaagaaaatggccacagcttccacaccccccagaagggcccccccattgaagatgccatcgccagcagtgatgtgctggagacagccagcaagagcgccaaccccccccacaccatccaggccagcgaggagcagagcagcaccccagcccctgtgaagaagagcggcaagctgcggcagcagattgatgtgaaggccgagctggagaagaggcagggcggcaagcagctgctgaacctggtggtgattggccacgtggatgctgggaagagcaccctgatgggccacatgctgtacctgctgggcaacatcaacaagaggaccatgcacaagtatgagcaggagagcaagaaggccggcaaggccagctttgcctatgcctgggtgctggatgagaccggggaggagcgggagcggggcgtgaccatggatgtgggcatgaccaagtttgagaccaccaccaaggtgatcaccctgatggatgcccctggccacaaggacttcatccccaacatgatcactggagctgcccaggctgatgtggccgtgctggtggtggatgccagcagaggagaatttgaggccggctttgagaccggcggccagacccgggagcacggcctgctggtgcgcagcctgggcgtgacccagctggccgtggccgtgaacaagatggaccaggtgaactggcagcaggagcgcttccaggagatcaccgggaagctgggccacttcctgaagcaggccggcttcaaggagagtgatgtgggcttcatccccaccagcggcctgagcggggagaacctgatcaccaggagccagagcagcgagctgaccaagtggtacaagggcctgtgcctgctggagcagattgacagcttcaagccaccccagaggagcattgacaagcccttccggctgtgtgtgtctgatgtgttcaaggaccagggcagcggcttctgcatcaccgggaagattgaagctggctacatccagacaggagaccggctgctggccatgcccccaaatgagacctgcaccgtgaagggcatcaccctgcatgatgagcctgtggactgggccgccgccggggaccacgtgtccctgaccctggtgggcatggacatcatcaagatcaacgtgggctgcatcttctgtggccccaaggtgcccatcaaggcctgcacccgcttccgggcccgcatcctgatcttcaacatcgagatccccatcaccaagggcttccctgtgctgctgcactaccagacagtgtctgagcctgctgtgatcaagaggctcatctctgtgctgaacaagagcactggagaggtgaccaagaagaagcccaagttcctgaccaagggccagaatgccctggtggagctgcagacccagaggcccatcgccctggagctgtacaaggacttcaaggagctgggccgcttcatgctgcgctatggaggcagcaccatcgccgccggcgtggtgacagagatcaaggagtag

SEQ ID NO: 166632 - DNA, 1563 bp, Artificial Sequence
  derived and/or modified sequence
atgaccgtgagcggcaagaagcagaccatgggcttcgaggtgcccggtgtgagcagcgaggaaaacgggcatagcttccatactccacagaagggaccccccattgaggacgcgattgcctcctccgacgttctggagacagcttccaagagcgctaatccgccacatacgattcaggccagtgaggagcagagcagcacccccgcacctgtaaaaaaatccgggaagctgcgtcaacagatagatgttaaagctgaactggagaagcggcagggcggaaaacaactactgaacctggtggtgatcggtcacgtggacgctggaaagagcaccctgatgggacatatgctgtacctgctcgggaacattaacaagagaacgatgcacaaatatgagcaggaatcaaagaaggccggcaaggcttcgtttgcctatgcctgggtgctcgacgagactggggaggaacgtgaaaggggtgtgactatggacgttggaatgactaagttcgaaaccactacgaaggtaattacactcatggatgctccaggccataaggatttcatcccaaatatgattaccggcgccgctcaggctgatgtcgctgtgctggttgtggacgcaagcaggggtgagtttgaagcaggatttgaaactggtggccagacacgagaacacggcctcctggttcggtctctcggagttacccagctggctgtagctgtaaataaaatggaccaggtaaattggcagcaggaaaggttccaggaaatcacaggcaaactcggccacttcttaaaacaagccggattcaaggaatcggatgtaggcttcatccctacgagtggcttgtcaggcgagaacctcataacacgaagccaaagttccgagctgactaaatggtacaagggtctctgcctgcttgaacagatcgactctttcaaacctcctcagagatcaatcgacaagcccttcagactctgtgtttcagacgtatttaaagatcaagggtcaggattttgcataactgggaagattgaggcaggatacattcagactggcgaccggttgctggccatgcctccaaatgaaacttgcaccgtgaaaggcatcacgctgcacgatgaaccagtagactgggcagcggctggagatcacgtatctctgactcttgtggggatggatatcattaaaatcaatgtcggatgtatcttttgtgggcccaaagtaccaattaaagcctgcacacgattccgagcacgtattcttatatttaatatcgagatcccaatcaccaagggattccctgtactactgcactatcagaccgtcagtgaacctgccgttatcaaacggctaattagcgtgttaaataaatccactggcgaagtcacaaaaaagaagcccaagtttttgactaagggacagaacgctctagtcgaattgcagactcagcgcccgatagctctggaactatataaggactttaaagagctggggaggttcatgctgaggtacgggggatctactatagccgccggcgtggtcaccgagattaaggaatag

SEQ ID NO: 166633 - DNA, 2055 bp, Artificial Sequence
  derived and/or modified sequence
atggcccggcaccggaacgtgcggggctacaactacgacgaggacttcgaggatgacgatctgtacggacagtcggtcgaagatgattactgcatcagcccttcaaccgccgctcagtttatctactcccgcagggacaagccgagcgttgagcctgttgaggagtatgattacgaggatttaaaggagagcagcaattccgtatccaatcatcagctgtcaggcttcgatcaagctagattgtactcatgtcttgatcatatgcgggaggtcctgggcgacgccgtgcccgacgaaatcctgatcgaggcagtcttaaaaaataagttcgatgtacagaaagctctcagcggagtgctcgaacaagaccgcgtgcaatcactgaaagataaaaatgaggctacagtgagcaccggaaaaatcgcgaaggggaaaccggtcgacagtcagacgagccgaagtgaaagcgaaatagttccaaaggtggctaagatgaccgtgtccggcaaaaagcagaccatggggttcgaagtgcctggcgtctcttccgaagagaacggacactctttccatacgccacaaaagggccccccaatcgaagacgctatcgcaagcagtgacgtgctcgagacagcctcaaagtctgccaacccaccacacacaatccaggcatctgaggaacagagttcaaccccagccccagtgaagaagtccggtaagctccggcagcagattgacgtcaaagctgaactagagaaacggcaaggagggaagcagctgttgaatctggtggtgattggtcatgttgacgcaggcaaatccaccctcatgggacatatgctgtacctgttggggaacataaataaaaggaccatgcacaagtatgagcaggaaagtaagaaggccgggaaggcctcattcgcttacgcctgggtcctggacgagactggagaggagagggagcgcggcgtaactatggacgtaggaatgaccaaatttgagaccacaacaaaggtgatcacactcatggacgccccagggcacaaggactttatccctaacatgattacaggggccgcacaagcggatgtcgcggttctggtggtggacgcttccagaggggagtttgaggcgggatttgagaccggcggccagacgcgagaacacggattacttgtccgttcacttggagtgactcagttggctgtcgccgttaataagatggatcaggtgaactggcagcaagaaaggttccaggaaatcactggcaaactcggacactttttaaagcaggccggcttcaaagagagcgatgtcgggtttattcctacttcgggactgagtggggagaatctgataacccggagccaatctagcgaacttaccaagtggtataaaggactatgcctgcttgagcagatcgatagtttcaaaccacctcagaggtctatagataagcctttcaggctatgcgtcagtgacgtattcaaagaccaagggtcaggcttttgcatcaccggtaagatcgaggctggctatatacaaaccggggaccgccttctggcgatgcctcccaacgagacttgtaccgtgaagggtataactctgcacgatgaacccgtggactgggctgccgccggcgatcatgtctccctgacactcgtcggtatggacatcatcaagattaacgtcgggtgcattttctgcggcccaaaggtgcctattaaagcatgcacccgctttagagcccgcattttgatcttcaacattgagatacccattacaaaaggctttcccgtgttgctccactaccagactgtatccgaacccgccgttatcaaaagactgatcagcgtgcttaacaaaagtactggcgaagtgaccaaaaagaaacccaaattcctgaccaagggccaaaatgcattagttgaactacagacgcaacgcccaatcgcattggagctctacaaggatttcaaggagctgggccgctttatgctcagatatggtggttcaacaatcgctgctggagttgttacagagattaaggagtag

SEQ ID NO: 166634 - DNA, 1563 bp, Artificial Sequence
  derived and/or modified sequence
atgacggtttccgggaagaagcagaccatggggttcgaagtgcccggagtgagcagcgaggagaatgggcacagcttccatacgcctcagaaggggcctccaatcgaagacgctatcgccagcagcgacgtgctggaaacagctagcaaatcggctaacccgccacatacaattcaggccagcgaggaacaaagtagtacccctgcaccagtgaagaagtccggtaagctgagacagcagatcgacgtcaaggctgagttggagaaacggcaggggggtaaacagctgctgaatctggtcgtcatcgggcacgtggacgccggtaaaagtacactgatggggcacatgctgtacctgcttggtaatattaataagcggacaatgcataagtatgagcaggaatcaaaaaaagcaggcaaagcctccttcgcttatgcttgggtgctggatgagacaggcgaagagagagaaaggggtgttacgatggacgtgggcatgaccaagttcgaaaccaccaccaaagtgatcacattgatggacgctccaggtcacaaggactttataccgaatatgatcaccggcgctgctcaggccgatgtcgccgtcctggttgtggatgcctctaggggcgaatttgaagcaggattcgagactggtgggcagactcgtgagcatggcttgttagttcggagcttgggcgtcacccaactcgctgtggccgtgaataaaatggatcaggttaattggcagcaggaaaggttccaggagatcacgggaaaattagggcattttctcaaacaggctggcttcaaagaatcagacgtaggcttcatccccacctcgggcctgtctggcgagaaccttattacacgaagccagtcctctgagctgacaaagtggtataagggcctctgtcttcttgagcaaatcgattcctttaagccaccccagcgtagcattgacaagccctttagactgtgtgtttccgacgtgttcaaggaccaggggtcaggattttgcatcacgggcaaaatcgaggcgggttacatacagaccggggacagattacttgcaatgccacccaacgagacttgcactgtgaagggcattacactccatgacgaacccgtcgactgggcagctgccggagatcacgtgtctctgactctcgtaggcatggatatcattaaaatcaacgtgggctgtattttttgcggcccaaaagttccaattaaggcttgcacacgctttcgcgctcggatcttaatattcaatatagagattccgatcaccaagggcttcccagtcctactccactaccagactgtcagcgaacccgctgtcatcaagagattgatctctgtgcttaacaagtcaacaggagaggttacaaagaagaagccaaaattcttgacgaaaggacaaaacgcgctggttgagttgcagactcagaggccaattgcactagaactatataaggatttcaaggaactgggccgttttatgctgagatacggtgggagcacaattgccgctggggttgttacggaaattaaggagtag

SEQ ID NO: 166635 - DNA, 2055 bp, Artificial Sequence
  derived and/or modified sequence
atggctagacacagaaacgttcggggatacaactacgatgaggatttcgaagacgacgatctatatggccagtctgttgaggacgactattgcatctctccgtcaaccgctgcccagtttatttattctcgcagagacaagccttccgtggaaccagtcgaggagtacgattatgaggacttgaaggaatcttccaattctgtgagtaaccaccagttatcgggctttgaccaggctcgcttgtattcttgtctggatcacatgagagaggtgttaggtgatgctgtgcctgatgaaattctaatcgaagctgtgctgaagaataagtttgatgtccaaaaggcactgtccggggttcttgagcaggatcgagtgcagtcactcaaggacaagaacgaagccacagtctccaccggcaagatcgctaagggaaaaccagtggattcccaaacttcacggagcgaatcagagattgtgcccaaagtcgccaagatgacagtgtccgggaagaagcagactatggggttcgaggttccaggagtgtcctcggaggagaatggtcactcattccatactcctcagaagggcccacccatagaggacgctattgccagtagtgacgtcttagagaccgcctcaaagtctgccaacccacctcacaccatccaggcgagtgaggaacaaagctccacccccgctccagtgaagaaatcaggcaaactgaggcagcagatcgatgtgaaagcagagttggaaaagagacagggcggaaagcagctgctgaacctggtggtgatcgggcacgttgacgctggcaagagcaccctaatgggacatatgctgtatcttttgggcaatattaacaagcggactatgcacaaatatgaacaggaaagcaaaaaggcaggtaaggcctcttttgcatacgcatgggtcctcgacgaaaccggagaggagagggagagaggcgtcacgatggacgttggtatgaccaagtttgagaccaccactaaggtgattaccctcatggacgcccctgggcacaaagatttcattccaaacatgataacgggtgcggcacaggcagacgtggcggtgctggtggtggacgccagtcggggtgagttcgaggcgggtttcgagactgggggtcaaacacgtgagcacggcctgttggttcggtctctaggggtcactcaactcgcggtggcggtaaataaaatggaccaggttaattggcagcaagaacggtttcaagagatcacaggcaaactggggcactttctcaaacaggccggatttaaagagtccgatgtgggcttcattcccacttctggtctttccggagagaatctgatcacccgctctcagtcttctgaactaacgaagtggtataagggcctctgtctgttagaacagatcgatagttttaagccgcctcagaggagcatcgacaaaccctttcgcctttgtgttagcgatgtgttcaaggatcaaggtagcggtttctgtataactggcaagatcgaagccggatatatccagaccggcgatcgactcctggctatgcccccaaatgaaacctgcacggtaaagggcatcactttgcacgacgaacctgttgattgggcagcagccggtgatcatgtttcattgacactggtcgggatggatattattaagatcaatgtgggctgtattttttgcggcccaaaggtgcctataaaggcttgtactcgcttccgcgctagaatactaatatttaatattgaaatcccaattaccaaaggatttcccgtcctgcttcactaccaaacagtgtcagagcccgctgtgataaagagactgatttctgtgctgaataaatcaactggcgaggtcaccaaaaaaaagcctaaatttctcaccaaagggcagaatgcactggttgaactccaaacacagagacctatcgctttggagttgtacaaggacttcaaggaactggggaggttcatgctacgctacggtggatctaccatcgccgcaggggttgtcacagagatcaaggagtag

SEQ ID NO: 166636 - DNA, 1563 bp, Artificial Sequence
  derived and/or modified sequence
atgaccgtgagcggcaagaagcagaccatgggcttcgaggtgcccggcgtgagcagcgaggagaacggccacagcttccacaccccccagaagggcccccccatcgaggacgccatcgccagcagcgacgtgctggagaccgccagcaagagcgccaaccccccccacaccatccaggccagcgaggagcagagcagcacccccgcccccgtgaagaagagcggcaagctgagacagcagatcgacgtgaaggccgagctggagaagagacagggcggcaagcagctgctgaacctggtggtgatcggccacgtggacgccggcaagagcaccctgatgggccacatgctgtacctgctgggcaacatcaacaagagaaccatgcacaagtacgagcaggagagcaagaaggccggcaaggccagcttcgcctacgcctgggtgctggacgagaccggcgaggagagagagagaggcgtgaccatggacgtgggcatgaccaagttcgagaccaccaccaaggtgatcaccctgatggacgcccccggccacaaggacttcatccccaacatgatcaccggcgccgcccaggccgacgtggccgtgctggtggtggacgccagcagaggcgagttcgaggccggcttcgagaccggcggccagaccagagagcacggcctgctggtgagaagcctgggcgtgacccagctggccgtggccgtgaacaagatggaccaggtgaactggcagcaggagagattccaggagatcaccggcaagctgggccacttcctgaagcaggccggcttcaaggagagcgacgtgggcttcatccccaccagcggcctgagcggcgagaacctgatcaccagaagccagagcagcgagctgaccaagtggtacaagggcctgtgcctgctggagcagatcgacagcttcaagcccccccagagaagcatcgacaagcccttcagactgtgcgtgagcgacgtgttcaaggaccagggcagcggcttctgcatcaccggcaagatcgaggccggctacatccagaccggcgacagactgctggccatgccccccaacgagacctgcaccgtgaagggcatcaccctgcacgacgagcccgtggactgggccgccgccggcgaccacgtgagcctgaccctggtgggcatggacatcatcaagatcaacgtgggctgcatcttctgcggccccaaggtgcccatcaaggcctgcaccagattcagagccagaatcctgatcttcaacatcgagatccccatcaccaagggcttccccgtgctgctgcactaccagaccgtgagcgagcccgccgtgatcaagagactgatcagcgtgctgaacaagagcaccggcgaggtgaccaagaagaagcccaagttcctgaccaagggccagaacgccctggtggagctgcagacccagagacccatcgccctggagctgtacaaggacttcaaggagctgggcagattcatgctgagatacggcggcagcaccatcgccgccggcgtggtgaccgagatcaaggagtag

SEQ ID NO: 166637 - DNA, 2055 bp, Artificial Sequence
  derived and/or modified sequence
atggccagacacagaaacgtgagaggctacaactacgacgaggacttcgaggacgacgacctgtacggccagagcgtggaggacgactactgcatcagccccagcaccgccgcccagttcatctacagcagaagagacaagcccagcgtggagcccgtggaggagtacgactacgaggacctgaaggagagcagcaacagcgtgagcaaccaccagctgagcggcttcgaccaggccagactgtacagctgcctggaccacatgagagaggtgctgggcgacgccgtgcccgacgagatcctgatcgaggccgtgctgaagaacaagttcgacgtgcagaaggccctgagcggcgtgctggagcaggacagagtgcagagcctgaaggacaagaacgaggccaccgtgagcaccggcaagatcgccaagggcaagcccgtggacagccagaccagcagaagcgagagcgagatcgtgcccaaggtggccaagatgaccgtgagcggcaagaagcagaccatgggcttcgaggtgcccggcgtgagcagcgaggagaacggccacagcttccacaccccccagaagggcccccccatcgaggacgccatcgccagcagcgacgtgctggagaccgccagcaagagcgccaaccccccccacaccatccaggccagcgaggagcagagcagcacccccgcccccgtgaagaagagcggcaagctgagacagcagatcgacgtgaaggccgagctggagaagagacagggcggcaagcagctgctgaacctggtggtgatcggccacgtggacgccggcaagagcaccctgatgggccacatgctgtacctgctgggcaacatcaacaagagaaccatgcacaagtacgagcaggagagcaagaaggccggcaaggccagcttcgcctacgcctgggtgctggacgagaccggcgaggagagagagagaggcgtgaccatggacgtgggcatgaccaagttcgagaccaccaccaaggtgatcaccctgatggacgcccccggccacaaggacttcatccccaacatgatcaccggcgccgcccaggccgacgtggccgtgctggtggtggacgccagcagaggcgagttcgaggccggcttcgagaccggcggccagaccagagagcacggcctgctggtgagaagcctgggcgtgacccagctggccgtggccgtgaacaagatggaccaggtgaactggcagcaggagagattccaggagatcaccggcaagctgggccacttcctgaagcaggccggcttcaaggagagcgacgtgggcttcatccccaccagcggcctgagcggcgagaacctgatcaccagaagccagagcagcgagctgaccaagtggtacaagggcctgtgcctgctggagcagatcgacagcttcaagcccccccagagaagcatcgacaagcccttcagactgtgcgtgagcgacgtgttcaaggaccagggcagcggcttctgcatcaccggcaagatcgaggccggctacatccagaccggcgacagactgctggccatgccccccaacgagacctgcaccgtgaagggcatcaccctgcacgacgagcccgtggactgggccgccgccggcgaccacgtgagcctgaccctggtgggcatggacatcatcaagatcaacgtgggctgcatcttctgcggccccaaggtgcccatcaaggcctgcaccagattcagagccagaatcctgatcttcaacatcgagatccccatcaccaagggcttccccgtgctgctgcactaccagaccgtgagcgagcccgccgtgatcaagagactgatcagcgtgctgaacaagagcaccggcgaggtgaccaagaagaagcccaagttcctgaccaagggccagaacgccctggtggagctgcagacccagagacccatcgccctggagctgtacaaggacttcaaggagctgggcagattcatgctgagatacggcggcagcaccatcgccgccggcgtggtgaccgagatcaaggagtag

SEQ ID NO: 166638 - protein, 685 aa, Artificial Sequence
  derived and/or modified sequence
MELLRTITYQPAASTKMCEQALGKGCGADSKKKRPPQPPEESQPPQSQAQVPPAAPHHHHHHSHSGPEISRIIVDPTTGKRYCRGKVLGKGGFAKCYEMTDLTNNKVYAAKIIPHSRVAKPHQREKIDKEIELHRILHHKHVVQFYHYFEDKENIYILLEYCSRRSMAHILKARKVLTEPEVRYYLRQIVSGLKYLHEQEILHRDLKLGNFFINEAMELKVGDFGLAARLEPLEHRRRTICGTPNYLSPEVLNKQGHGCESDIWALGCVMYTMLLGRPPFETTNLKETYRCIREARYTMPSSLLAPAKHLIASMLSKNPEDRPSLDDIIRHDFFLQGFTPDRLSSSCCHTVPDFHLSSPAKNFFKKAAAALFGGKKDKARYIDTHNRVSKEDEDIYKLRHDLKKTSITQQPSKHRTDEELQPPTTTVARSGTPAVENKQQIGDAIRMIVRGTLGSCSSSSECLEDSTMGSVADTVARVLRGCLENMPEADCIPKEQLSTSFQWVTKWVDYSNKYGFGYQLSDHTVGVLFNNGAHMSLLPDKKTVHYYAELGQCSVFPATDAPEQFISQVTVLKYFSHYMEENLMDGGDLPSVTDIRRPRLYLLQWLKSDKALMMLFNDGTFQVNFYHDHTKIIICSQNEEYLLTYINEDRISTTFRLTTLLMSGCSSELKNRMEYALNMLLQRCN

SEQ ID NO: 166639 - protein, 379 aa, Artificial Sequence
  derived and/or modified sequence
MELLRTITYQPAASTKMCEQALGKGCGADSKKKRPPQPPEESQPPQSQAQVPPAAPHHHHHHSHSGPEISRIIVDPTTGKRYCRGKVLGKGGFAKCYEMTDLTNNKVYAAKIIPHSRVAKPHQREKIDKEIELHRILHHKHVVQFYHYFEDKENIYILLEYCSRRSMAHILKARKVLTEPEVRYYLRQIVSGLKYLHEQEILHRDLKLGNFFINEAMELKVGDFGLAARLEPLEHRRRTICGTPNYLSPEVLNKQGHGCESDIWALGCVMYTMLLGRPPFETTNLKETYRCIREARYTMPSSLLAPAKHLIASMLSKNPEDRPSLDDIIRHDFFLQGFTPDRLSSSCCHTVPDFHLSSPAKNFFKRAAEHIISVGHQMG

SEQ ID NO: 166640 - DNA, 2058 bp, Artificial Sequence
  derived and/or modified sequence
atggagctgctgaggacgattacgtaccagcccgcagcatcaactaagatgtgcgagcaggcattagggaagggttgcggcgctgatagcaaaaagaagaggcctcctcagccgccagaagagagtcaacccccacagagccaagctcaagtccctcccgcagctccacatcaccatcatcatcacagtcattcaggcccggaaatttcgcgcattattgtggacccaactacagggaaaaggtattgtaggggtaaggttcttggtaaaggaggtttcgccaaatgttacgaaatgaccgacctgaccaataacaaagtctatgccgctaagattatcccacattctagggtcgctaaaccccatcagagggagaagatcgataaggagattgagttacatagaatcctccatcacaaacacgtcgtgcagttctaccattacttcgaggataaagagaacatatatatactccttgagtactgtagcaggaggtctatggcccatatcttaaaagccagaaaagttcttaccgagcccgaagttaggtactacctacggcagatcgtgtccggcctcaagtatctgcatgagcaggaaatcctgcaccgcgatctgaagctcggcaactttttcattaacgaggcaatggagctgaaagtgggtgactttgggctggccgcgaggctcgaacccttggagcatcgccgacgaacaatttgtggtacacccaattacctgtcccctgaggtgttaaacaaacagggacatggctgcgaaagcgacatatgggccctggggtgcgtcatgtacactatgctgctggggaggccccccttcgagactacaaacctgaaagaaacttacaggtgtatcagagaagcacggtacactatgccatcgtcgcttctcgccccagccaagcacctcatcgcttccatgttgtcaaagaatcctgaagaccgaccttcattggatgacataatcagacatgacttttttctgcaaggattcacccctgaccgcctgtccagttcttgttgtcatactgtgccagatttccacttgtcttctcccgctaaaaatttcttcaaaaaggcagccgccgccctgtttggaggaaagaaggacaaggctaggtacatagatactcacaatagggtgtctaaagaagatgaagacatctataagctacgccacgacctgaaaaagacttccattactcagcagccgagtaaacaccgaacagatgaggagttgcagccacccacaactacagtggcacgttccgggacccccgctgttgagaacaagcagcagatcggcgacgccatcagaatgattgtccggggcacactggggagctgttcatctagctcagagtgtctagaagacagtaccatgggttcagttgctgatacagtcgcacgtgtgctaagaggatgtctggagaacatgcccgaagccgattgcatccccaaagagcaattgtcaacctctttccagtgggtgactaagtgggtggattatagtaacaagtacggatttggataccagctctctgaccacactgtgggcgtgttgtttaacaacggcgcccatatgagcttactgcctgacaaaaagacagtgcactattacgcagaactgggtcagtgctccgtttttcctgcaaccgacgccccggaacagttcatctctcaagtaacggttctgaaatatttcagtcactacatggaagagaatctcatggacggaggcgacttgccttctgttactgatattcgcaggccacgtctgtatctgctgcaatggcttaaaagtgacaaggccttgatgatgctctttaacgatgggacatttcaggtgaatttctatcatgaccacacaaagatcattatctgtagtcagaacgaagaatacctgttaacctacattaacgaagaccgaatcagcactaccttccggctgactaccttgctgatgagtggctgctcctccgagctgaagaaccggatggaatatgccctaaacatgctgttgcagaggtgtaactag

SEQ ID NO: 166641 - DNA, 1140 bp, Artificial Sequence
  derived and/or modified sequence
atggaacttctaaggacaataacttaccagccagctgcctctactaaaatgtgcgaacaagctttgggtaaagggtgcggagcagactctaagaagaaacggccaccacagccccccgaggagagtcagcccccacaaagccaggctcaggtcccccccgccgccccccaccaccatcaccaccattcacattcaggccccgaaatcagtcgtataatagttgaccctacgactggtaagagatattgtcggggaaaggttctcggaaagggaggattcgccaaatgctacgagatgaccgatctgacgaataacaaagtctatgcagctaaaataattccccactctcgggttgccaaacctcaccagagggaaaagatcgataaggaaatcgaactgcacaggattttacatcacaagcacgtggtgcaattctaccactacttcgaggataaggaaaatatatacatattgttagagtactgctcgagaaggtctatggcacatatcttaaaggcacgcaaagtgctcacagaacccgaggtccgttattacctaaggcagatcgtatcgggattaaagtaccttcatgagcaagagattctgcatcgggacctgaagctgggtaatttcttcataaacgaggctatggagctgaaggtaggagattttgggcttgccgctagacttgagcctctggaacacagaagacggacaatttgcggcactccaaattacctgagtcctgaagtgctgaacaagcaaggccacggctgtgagtcagatatttgggcactgggatgcgttatgtataccatgctgctggggcgcccccccttcgaaacgacgaacctcaaggagacttatcgatgcatccgggaagctcggtatacaatgccctccagtcttctcgctcctgcaaagcatttaattgctagcatgctctctaagaatcccgaagatcgtcctagcctcgatgacattatcaggcatgacttctttctccaaggtttcactccagaccgtctgtcttcttcgtgttgccacactgttcccgattttcacctcagcagccccgccaagaatttttttaagagagccgcggagcatatcatctcagtcggacaccagatgggctag

SEQ ID NO: 166642 - DNA, 2058 bp, Artificial Sequence
  derived and/or modified sequence
atggagctgctgcggaccatcacctaccagcctgctgccagcaccaagatgtgtgagcaggccctgggcaagggctgtggggctgacagcaagaagaagaggcctccccagcccccagaggagagccagcccccccagagccaggcccaggtgcccccagctgccccccaccaccaccaccaccacagccacagcggccctgagatcagccgcatcatcgtggaccccaccaccgggaagcgctactgccggggcaaggtgctgggcaagggcggctttgccaagtgctatgagatgacagacctgaccaacaacaaggtgtatgctgccaagatcatcccccacagccgggtggccaagccccaccagcgggagaagattgacaaggagattgagctgcaccgcatcctgcaccacaagcacgtggtgcagttctaccactactttgaggacaaggagaacatctacatcctgctggagtactgcagccgccgctccatggcccacatcctgaaggccaggaaggtgctgacagagcctgaggtgcgctactacctgcggcagatcgtgtctggcctgaagtacctgcacgagcaggagatcctgcaccgggacctgaagctgggcaacttcttcatcaatgaggccatggagctgaaggtgggggactttggcctggccgcccggctggagcccctggagcacagaagaaggaccatctgtggcacccccaactacctgagccctgaggtgctgaacaagcagggccacggctgtgagagtgacatctgggccctgggctgtgtgatgtacaccatgctgctgggccggcccccatttgagaccaccaacctgaaggagacctaccgctgcatccgggaggcccgctacaccatgcccagcagcctgctggccccagccaagcacctgattgcctccatgctgagcaagaaccctgaggaccggcccagcctggatgacatcatcagacatgacttcttcctgcagggcttcaccccagaccggctgagcagcagctgctgccacacagtgcctgacttccacctgagcagccctgccaagaacttcttcaagaaggctgctgctgccctgtttggaggcaagaaggacaaggcccgctacatcgacacccacaacagagtgtccaaagaagatgaggacatctacaagctgcggcatgacctgaagaagaccagcatcacccagcagcccagcaagcacaggacagatgaggagctgcagccccccaccaccaccgtggcccggagcggcaccccagctgtggagaacaagcagcagattggagatgccatccgcatgattgtgcggggcaccctgggcagctgcagcagcagcagtgaatgtctggaggacagcaccatgggctctgtggccgacacagtggcccgggtgctgcggggctgcctggagaacatgcctgaggccgactgcatccccaaggagcagctgagcaccagcttccagtgggtgaccaagtgggtggactacagcaacaagtatggcttcggctaccagctgagtgaccacacagtgggcgtgctcttcaacaatggagcccacatgagcctgctgcctgacaagaagacagtgcactactatgcagagctgggccagtgcagcgtcttccctgccacagatgcccctgagcagttcatcagccaggtgacagtgctgaagtacttcagccactacatggaggagaacctgatggatggaggagacctgcccagcgtgacagacatccggcggccccggctgtacctgctgcagtggctgaagagtgacaaggccctgatgatgctgttcaatgatggcaccttccaggtgaacttctaccatgaccacaccaagatcatcatctgcagccagaatgaggagtacctgctgacctacatcaatgaagatcgcatcagcaccaccttccggctgaccaccctgctgatgagcggctgcagcagcgagctgaagaacaggatggagtatgccctgaacatgctgctgcagcgctgcaactag

SEQ ID NO: 166643 - DNA, 1140 bp, Artificial Sequence
  derived and/or modified sequence
atggagctgctgcggaccatcacctaccagcctgctgccagcaccaagatgtgtgagcaggccctgggcaagggctgtggggctgacagcaagaagaagaggcctccccagcccccagaggagagccagcccccccagagccaggcccaggtgcccccagctgccccccaccaccaccaccaccacagccacagcggccctgagatcagccgcatcatcgtggaccccaccaccgggaagcgctactgccggggcaaggtgctgggcaagggcggctttgccaagtgctatgagatgacagacctgaccaacaacaaggtgtatgctgccaagatcatcccccacagccgggtggccaagccccaccagcgggagaagattgacaaggagattgagctgcaccgcatcctgcaccacaagcacgtggtgcagttctaccactactttgaggacaaggagaacatctacatcctgctggagtactgcagccgccgctccatggcccacatcctgaaggccaggaaggtgctgacagagcctgaggtgcgctactacctgcggcagatcgtgtctggcctgaagtacctgcacgagcaggagatcctgcaccgggacctgaagctgggcaacttcttcatcaatgaggccatggagctgaaggtgggggactttggcctggccgcccggctggagcccctggagcacagaagaaggaccatctgtggcacccccaactacctgagccctgaggtgctgaacaagcagggccacggctgtgagagtgacatctgggccctgggctgtgtgatgtacaccatgctgctgggccggcccccatttgagaccaccaacctgaaggagacctaccgctgcatccgggaggcccgctacaccatgcccagcagcctgctggccccagccaagcacctgattgcctccatgctgagcaagaaccctgaggaccggcccagcctggatgacatcatcagacatgacttcttcctgcagggcttcaccccagaccggctgagcagcagctgctgccacacagtgcctgacttccacctgagcagccctgccaagaacttcttcaagagagctgctgagcacatcatctctgtgggccaccagatgggctag

SEQ ID NO: 166644 - DNA, 2058 bp, Artificial Sequence
  derived and/or modified sequence
atggagctgctgcggaccatcacctaccagcccgccgccagcaccaaaatgtgcgaacaggcactgggtaaaggatgtggcgctgattccaagaagaagcgccctccccagccaccagaagagagccagcctccccagagccaagctcaagtacctccagccgcgccccaccaccaccatcaccacagccacagcggtccagagatttcgaggataatagtcgaccctactacgggaaaaaggtactgtcgcggtaaggtcctgggcaagggaggctttgctaaatgctacgagatgactgatcttaccaataataaggtttacgccgccaagatcattcctcacagtagggtggccaagccccaccagagagagaagattgataaggagattgaactccatcgaatcttgcatcacaagcacgtagtgcagttctatcactattttgaggacaaggagaacatatacatcctcttggaatactgtagcagacgaagcatggctcatatccttaaagctcgcaaagtgctgaccgaacctgaagttcgctattacctccgccagattgtgtctgggctcaagtacctgcatgagcaggaaatcctgcaccgggatttaaagctgggaaattttttcataaatgaagccatggaacttaaggtgggagacttcgggcttgctgcccgcttggaacctctggaacacaggcgcaggacgatatgtggtacgccaaactacctgagccctgaagttcttaacaaacaaggccacgggtgcgaatccgatatttgggcccttgggtgcgtcatgtacaccatgttgcttgggcgccccccgtttgaaaccacaaacctcaaagagacctatcgctgtataagggaagccagatatactatgccttcttccctcctggcacctgcaaaacaccttattgcctccatgctttccaaaaatcctgaggaccggccgtccctcgacgacatcataagacatgattttttcctccaaggttttacacccgaccgcttgtcttcctcctgttgccacacagttcccgactttcacctctccagcccggcaaagaattttttcaaaaaagcagcagccgccttattcggtggaaaaaaggataaggccagatatatagacacccataatcgggtaagcaaggaggacgaggacatatataagctgagacatgatctgaagaaaacctccataacccaacagccaagcaagcaccgcactgacgaggagttacaaccccctacgaccacagtggcccgctccggcacccctgccgtcgagaacaaacagcagattggggatgcaattcggatgattgtgaggggcactctggggagctgcagcagtagctccgaatgcctggaagacagcactatgggttctgttgcggatactgtggctcgggtcctgagggggtgtctcgagaacatgccagaggccgattgtatccctaaggaacagctgtcaacttctttccagtgggtgaccaaatgggtcgactattccaacaaatacgggtttggctatcaactatccgaccatactgtcggcgtcctttttaacaacggcgctcatatgtctctcctacccgataaaaagacagtgcactattacgcagaactggggcaatgcagcgtttttcccgcaactgacgcacccgagcagttcatctcacaggtcacagtgctgaaatattttagtcactacatggaagaaaacctgatggacgggggcgatcttccctccgtgacagatattcggcgtccacggctttatctcctccagtggcttaagtcggataaggctttaatgatgctgttcaacgacggaaccttccaggtcaacttctaccatgaccatacaaagattatcatttgctcccagaatgaagagtacctactgacatatatcaacgaagacagaatcagtacgacattcaggctaacaacattgctgatgagtggttgcagctcagagctcaaaaatagaatggagtatgccctaaacatgctgctgcaacgctgtaactag

SEQ ID NO: 166645 - DNA, 1140 bp, Artificial Sequence
  derived and/or modified sequence
atggagctgctgcggaccatcacctaccagcccgccgccagcaccaagatgtgtgaacaagcccttggtaagggttgcggtgccgactctaagaaaaaacggccccctcagcccccggaggaatcgcagccaccccagagccaggcacaggtgcctcctgctgcacctcatcatcatcatcaccacagccattctggaccagagatttctcgtataatagtagaccccacgacagggaagcggtactgcagagggaaggttttagggaaaggaggtttcgcgaagtgttatgagatgaccgatctcaccaataataaggtatatgccgccaaaataattccacatagtagagtcgccaagccccaccagcgagaaaagattgacaaggaaatcgagctccacagaatcttacaccataaacacgtcgtgcagttttatcactactttgaagacaaagagaacatctacattctgctggaatattgtagtcggcgttccatggctcacatcctgaaggctcgaaaagtgctcaccgaaccagaagtgcggtactacctgagacagatcgtatccgggctgaagtaccttcatgagcaggaaatactgcacagagatctgaaactggggaacttctttataaacgaggccatggagttgaaagtcggcgatttcggactggccgctcggctggaaccgttggagcacaggcgccgcacaatttgtggtactcctaactatctcagccctgaggtactgaataagcagggccacgggtgtgaatccgacatatgggccctcggctgcgtgatgtacactatgctgcttggacgcccccctttcgagacaacgaatttgaaagagacgtacaggtgcatcagagaagcccggtacacaatgccctcatcactcttggcgccagccaaacacttaatcgcgtccatgctcagcaagaatcccgaagatagaccgtctctggacgacatcattaggcacgacttcttcctacagggatttacaccagatcggttgtccagcagctgttgccacactgtccccgactttcatcttagctccccagctaagaatttctttaaacgggccgcggaacatatcatatcagtgggccatcagatggggtag

SEQ ID NO: 166646 - DNA, 2960 bp, Artificial Sequence
  derived and/or modified sequence
gcgcgcggctccgctgggaagcgagacccgggtggcgggacaagacttgcttcccggccacgcgcgctcggccggccgtggggcggggcataggccgtgacgtgatgtcgcgtatcgagtctccgcccccttcccgcctccccgtatataagacttcgccgagcgctctcactcgcacaagtggaccggggtgttgggtgctagtcggcaccagaggcaagggtgcgaggaccacggccggctcggacgtgtgaccgcgcctagggggtggcagcgggcagtgcggggcggcaaggcgaccatggagcttttgcggactatcacctaccagccagccgccagcaccaaaatgtgcgagcaggcgctgggcaagggttgcggagcggactcgaagaagaagcggccgccgcagccccccgaggaatcgcagccacctcagtcccaggcgcaagtgcccccggcggcccctcaccaccatcaccaccattcgcactcggggccggagatctcgcggattatcgtcgaccccacgactgggaagcgctactgccggggcaaagtgctgggaaagggtggctttgcaaaatgttacgagatgacagatttgacaaataacaaagtctacgccgcaaaaattattcctcacagcagagtagctaaacctcatcaaagggaaaagattgacaaagaaatagagcttcacagaattcttcatcataagcatgtagtgcagttttaccactacttcgaggacaaagaaaacatttacattctcttggaatactgcagtagaaggtcaatggctcatattttgaaagcaagaaaggtgttgacagagccagaagttcgatactacctcaggcagattgtgtctggactgaaataccttcatgaacaagaaatcttgcacagagatctcaaactagggaacttttttattaatgaagccatggaactaaaagttggggacttcggtctggcagccaggctagaacccttggaacacagaaggagaacgatatgtggtaccccaaattatctctctcctgaagtcctcaacaaacaaggacatggctgtgaatcagacatttgggccctgggctgtgtaatgtatacaatgttactagggaggcccccatttgaaactacaaatctcaaagaaacttataggtgcataagggaagcaaggtatacaatgccgtcctcattgctggctcctgccaagcacttaattgctagtatgttgtccaaaaacccagaggatcgtcccagtttggatgacatcattcgacatgacttttttttgcagggcttcactccggacagactgtcttctagctgttgtcatacagttccagatttccacttatcaagcccagctaagaatttctttaagaaagcagctgctgctctttttggtggcaaaaaagacaaagcaagatatattgacacacataatagagtgtctaaagaagatgaagacatctacaagcttaggcatgatttgaaaaagacttcaataactcagcaacccagcaaacacaggacagatgaggagctccagccacctaccaccacagttgccaggtctggaacacccgcagtagaaaacaagcagcagattggggatgctattcggatgatagtcagagggactcttggcagctgtagcagcagcagtgaatgccttgaagacagtaccatgggaagtgttgcagacacagtggcaagggttcttcggggatgtctggaaaacatgccggaagctgattgcattcccaaagagcagctgagcacatcatttcagtgggtcaccaaatgggttgattactctaacaaatatggctttgggtaccagctctcagaccacaccgtcggtgtccttttcaacaatggtgctcacatgagcctccttccagacaaaaaaacagttcactattacgcagagcttggccaatgctcagttttcccagcaacagatgctcctgagcaatttattagtcaagtgacggtgctgaaatacttttctcattacatggaggagaacctcatggatggtggagatctgcctagtgttactgatattcgaagacctcggctctacctccttcagtggctaaaatctgataaggccctaatgatgctctttaatgatggcacctttcaggtgaatttctaccatgatcatacaaaaatcatcatctgtagccaaaatgaagaataccttctcacctacatcaatgaggataggatatctacaactttcaggctgacaactctgctgatgtctggctgttcatcagaattaaaaaatcgaatggaatatgccctgaacatgctcttacaaagatgtaactgaaagacttttcgaatggaccctatgggactcctcttttccactgtgagatctacagggaagccaaaagaatgatctagagtatgttgaagaagatggacatgtggtggtacgaaaacaattcccctgtggcctgctggactggttggaaccagaacaggctaaggcatacagttcttgactttggacaatccaagagtgaaccagaatgcagttttccttgagatacctgttttaaaaggtttttcagacaattttgcagaaaggtgcattgattcttaaattctctctgttgagagcatttcagccagaggactttggaactgtgaatatacttcctgaaggggagggagaagggaggaagctcccatgttgtttaaaggctgtaattggagcagcttttggctgcgtaactgtgaactatggccatatataattttttttcattaatttttgaagatacttgtggctggaaaagtgcattccttgttaataaactttttatttattacagcccaaagagcagtatttattatcaaaatgtctttttttttatgttgaccattttaaaccgttggcaataaagagtatgaaaacgcagaaa

SEQ ID NO: 166647 - DNA, 1267 bp, Artificial Sequence
  derived and/or modified sequence
gcacaagtggaccggggtgttgggtgctagtcggcaccagaggcaagggtgcgaggaccacggccggctcggacgtgtgaccgcgcctagggggtggcagcgggcagtgcggggcggcaaggcgaccatggagcttttgcggactatcacctaccagccagccgccagcaccaaaatgtgcgagcaggcgctgggcaagggttgcggagcggactcgaagaagaagcggccgccgcagccccccgaggaatcgcagccacctcagtcccaggcgcaagtgcccccggcggcccctcaccaccatcaccaccattcgcactcggggccggagatctcgcggattatcgtcgaccccacgactgggaagcgctactgccggggcaaagtgctgggaaagggtggctttgcaaaatgttacgagatgacagatttgacaaataacaaagtctacgccgcaaaaattattcctcacagcagagtagctaaacctcatcaaagggaaaagattgacaaagaaatagagcttcacagaattcttcatcataagcatgtagtgcagttttaccactacttcgaggacaaagaaaacatttacattctcttggaatactgcagtagaaggtcaatggctcatattttgaaagcaagaaaggtgttgacagagccagaagttcgatactacctcaggcagattgtgtctggactgaaataccttcatgaacaagaaatcttgcacagagatctcaaactagggaacttttttattaatgaagccatggaactaaaagttggggacttcggtctggcagccaggctagaacccttggaacacagaaggagaacgatatgtggtaccccaaattatctctctcctgaagtcctcaacaaacaaggacatggctgtgaatcagacatttgggccctgggctgtgtaatgtatacaatgttactagggaggcccccatttgaaactacaaatctcaaagaaacttataggtgcataagggaagcaaggtatacaatgccgtcctcattgctggctcctgccaagcacttaattgctagtatgttgtccaaaaacccagaggatcgtcccagtttggatgacatcattcgacatgacttttttttgcagggcttcactccggacagactgtcttctagctgttgtcatacagttccagatttccacttatcaagcccagctaagaatttctttaaaagagcagctgagcacatcatttcagtgggtcaccaaatgggttga

SEQ ID NO: 166648 - DNA, 2058 bp, Artificial Sequence
  derived and/or modified sequence
atggagctgcttaggaccatcacataccaacccgctgcttctacaaagatgtgtgagcaggcccttggaaaaggctgcggagccgacagtaaaaagaagaggccccctcaacctccagaagaatctcagccaccccagtcccaggcccaggtcccccctgcagcgccacaccaccaccatcatcattctcatagtggcccagaaatcagcaggattatagttgacccaactacggggaaacgttattgcaggggcaaagtcctgggaaagggcggatttgcaaagtgctacgaaatgacagacctcaccaataataaagtttacgccgcaaagataattcctcatagtcgggtcgccaaacctcaccagcgtgagaagattgacaaggagattgagctccaccggattttacaccacaagcatgtggtacagttctaccactacttcgaggacaaagaaaatatatatatcctactcgaatattgttcccggagaagcatggcccatatcctaaaagccagaaaagtgttaactgaaccagaagtcaggtattatttacggcagattgtatccgggctcaaatacctgcacgagcaggagatccttcatagggatctgaagttgggcaacttttttatcaacgaggctatggagctcaaggttggcgatttcggccttgctgcacggctagagcctctggagcaccggcgacgcaccatttgcgggacacccaactacctctctccagaggttcttaacaaacagggccacggatgtgagtccgatatttgggctcttggttgcgtgatgtatacaatgctcctgggaagacctccgttcgaaacaactaatctgaaggagacatatcggtgtattagagaagcgaggtacacaatgccaagctccctactcgctcccgcaaagcacctcattgcaagtatgctgtcaaagaatcctgaggatcgcccttctctggatgatattattcgtcacgactttttcctacaaggatttacaccagatcgcttgagttcctcttgttgtcacacagtgccagactttcatttgagttcaccagccaagaacttttttaagaaagccgcagcggctcttttcggcggtaaaaaggacaaggccaggtatatcgacactcataatcgggttagtaaggaagatgaggatatctataagctgcgccacgatttgaaaaagacctcaattactcagcaaccctctaagcaccggactgatgaggaactgcagccccctacaactactgtggcaaggtctggcactccagcggtggaaaacaagcaacagattggcgacgctattcggatgatagttcgcggaacactgggatcctgctcaagcagctccgagtgtctagaggactcgaccatgggatcagttgcggacacagtggcacgcgtgttgcgtggatgcttggagaacatgccggaggcggattgtattcccaaggaacagctcagcactagttttcaatgggtgactaagtgggttgactatagcaataagtatggcttcgggtatcagctttcagaccatacagtaggtgtgttgttcaataacggagcacacatgtcactgctccctgataagaaaacggtccactactacgccgaactcggacagtgttccgtatttcccgctacagacgccccagaacagttcatctcccaggtgacagtgctgaaatatttcagccattacatggaagagaacttaatggacggcggagaccttccgtctgtgacagatatcagacggccacgcctgtacttattgcagtggttaaagtctgataaagctctgatgatgctgtttaacgacggaacattccaagttaacttctaccatgatcacactaagatcattatatgctcccagaatgaggaatacctgttgacctacattaatgaggatcggatctcaacaactttcaggcttacaaccctactcatgagtgggtgcagctccgagctaaaaaatagaatggaatatgcgctgaatatgctgctgcagcgctgtaactag

SEQ ID NO: 166649 - DNA, 1140 bp, Artificial Sequence
  derived and/or modified sequence
atggagttgctgcgcacaataacttaccagcccgcagcatccaccaagatgtgtgagcaagctctgggaaagggctgtggagccgactcaaagaagaagagacccccacagcctcccgaagagagtcaaccccctcaatcccaagcccaagttccccctgcagccccacaccaccatcaccatcacagccattccggcccagagatcagtaggatcatcgtggatcccacaactggcaaacggtattgtcggggaaaggtgttgggtaaaggagggtttgcgaaatgttatgagatgactgatttgacgaacaataaggtgtatgccgcaaaaatcattccccatagccgcgtggctaagcctcaccaacgcgagaaaattgacaaagaaatcgaattgcaccgcatcctccatcacaagcacgttgtgcaattctaccattactttgaggataaagagaatatatacatattgctcgagtattgcagcagaagatctatggcccatatcctaaaagccagaaaagttcttacagagccggaagtgcggtactacctgaggcagatcgtttccggccttaaatacctgcatgagcaggagatcctccatagagatctcaagttaggcaatttttttattaacgaagcaatggagcttaaggtcggtgacttcggcctggccgcaaggcttgagcctctggaacaccgccgacggactatctgcggaacacctaactatttgagcccggaagtgctcaacaagcaagggcacggctgcgagagtgatatctgggccctcgggtgcgtcatgtatacaatgctgctgggccgaccccctttcgaaactactaatctgaaggagacttatagatgcataagggaagcgaggtacacgatgcctagcagtctgcttgcaccagcaaagcatctgatcgcatccatgctgagtaagaaccccgaggaccgcccttctctcgatgatatcattcgacatgatttctttctgcagggctttaccccagatagactgtcctcctcatgctgccacaccgtgccggactttcatctcagctcccctgcaaaaaatttttttaaaagggccgctgaacacattataagtgtgggtcaccaaatggggtag

SEQ ID NO: 166650 - DNA, 2058 bp, Artificial Sequence
  derived and/or modified sequence
atggagctgctgagaaccatcacctaccagcccgccgccagcaccaagatgtgcgagcaggccctgggcaagggctgcggcgccgacagcaagaagaagagacccccccagccccccgaggagagccagcccccccagagccaggcccaggtgccccccgccgccccccaccaccaccaccaccacagccacagcggccccgagatcagcagaatcatcgtggaccccaccaccggcaagagatactgcagaggcaaggtgctgggcaagggcggcttcgccaagtgctacgagatgaccgacctgaccaacaacaaggtgtacgccgccaagatcatcccccacagcagagtggccaagccccaccagagagagaagatcgacaaggagatcgagctgcacagaatcctgcaccacaagcacgtggtgcagttctaccactacttcgaggacaaggagaacatctacatcctgctggagtactgcagcagaagaagcatggcccacatcctgaaggccagaaaggtgctgaccgagcccgaggtgagatactacctgagacagatcgtgagcggcctgaagtacctgcacgagcaggagatcctgcacagagacctgaagctgggcaacttcttcatcaacgaggccatggagctgaaggtgggcgacttcggcctggccgccagactggagcccctggagcacagaagaagaaccatctgcggcacccccaactacctgagccccgaggtgctgaacaagcagggccacggctgcgagagcgacatctgggccctgggctgcgtgatgtacaccatgctgctgggcagaccccccttcgagaccaccaacctgaaggagacctacagatgcatcagagaggccagatacaccatgcccagcagcctgctggcccccgccaagcacctgatcgccagcatgctgagcaagaaccccgaggacagacccagcctggacgacatcatcagacacgacttcttcctgcagggcttcacccccgacagactgagcagcagctgctgccacaccgtgcccgacttccacctgagcagccccgccaagaacttcttcaagaaggccgccgccgccctgttcggcggcaagaaggacaaggccagatacatcgacacccacaacagagtgagcaaggaggacgaggacatctacaagctgagacacgacctgaagaagaccagcatcacccagcagcccagcaagcacagaaccgacgaggagctgcagccccccaccaccaccgtggccagaagcggcacccccgccgtggagaacaagcagcagatcggcgacgccatcagaatgatcgtgagaggcaccctgggcagctgcagcagcagcagcgagtgcctggaggacagcaccatgggcagcgtggccgacaccgtggccagagtgctgagaggctgcctggagaacatgcccgaggccgactgcatccccaaggagcagctgagcaccagcttccagtgggtgaccaagtgggtggactacagcaacaagtacggcttcggctaccagctgagcgaccacaccgtgggcgtgctgttcaacaacggcgcccacatgagcctgctgcccgacaagaagaccgtgcactactacgccgagctgggccagtgcagcgtgttccccgccaccgacgcccccgagcagttcatcagccaggtgaccgtgctgaagtacttcagccactacatggaggagaacctgatggacggcggcgacctgcccagcgtgaccgacatcagaagacccagactgtacctgctgcagtggctgaagagcgacaaggccctgatgatgctgttcaacgacggcaccttccaggtgaacttctaccacgaccacaccaagatcatcatctgcagccagaacgaggagtacctgctgacctacatcaacgaggacagaatcagcaccaccttcagactgaccaccctgctgatgagcggctgcagcagcgagctgaagaacagaatggagtacgccctgaacatgctgctgcagagatgcaactag

SEQ ID NO: 166651 - DNA, 1140 bp, Artificial Sequence
  derived and/or modified sequence
atggagctgctgagaaccatcacctaccagcccgccgccagcaccaagatgtgcgagcaggccctgggcaagggctgcggcgccgacagcaagaagaagagacccccccagccccccgaggagagccagcccccccagagccaggcccaggtgccccccgccgccccccaccaccaccaccaccacagccacagcggccccgagatcagcagaatcatcgtggaccccaccaccggcaagagatactgcagaggcaaggtgctgggcaagggcggcttcgccaagtgctacgagatgaccgacctgaccaacaacaaggtgtacgccgccaagatcatcccccacagcagagtggccaagccccaccagagagagaagatcgacaaggagatcgagctgcacagaatcctgcaccacaagcacgtggtgcagttctaccactacttcgaggacaaggagaacatctacatcctgctggagtactgcagcagaagaagcatggcccacatcctgaaggccagaaaggtgctgaccgagcccgaggtgagatactacctgagacagatcgtgagcggcctgaagtacctgcacgagcaggagatcctgcacagagacctgaagctgggcaacttcttcatcaacgaggccatggagctgaaggtgggcgacttcggcctggccgccagactggagcccctggagcacagaagaagaaccatctgcggcacccccaactacctgagccccgaggtgctgaacaagcagggccacggctgcgagagcgacatctgggccctgggctgcgtgatgtacaccatgctgctgggcagaccccccttcgagaccaccaacctgaaggagacctacagatgcatcagagaggccagatacaccatgcccagcagcctgctggcccccgccaagcacctgatcgccagcatgctgagcaagaaccccgaggacagacccagcctggacgacatcatcagacacgacttcttcctgcagggcttcacccccgacagactgagcagcagctgctgccacaccgtgcccgacttccacctgagcagccccgccaagaacttcttcaagagagccgccgagcacatcatcagcgtgggccaccagatgggctag

SEQ ID NO: 166652 - protein, 220 aa, Artificial Sequence
  derived and/or modified sequence
MKSVIYHALSQKEANDSDVQPSGAQRAEAFVRAFLKRSTPRMSPQAREDQLQRKAVVLEYFTRHKRKEKKKKAKGLSARQRRELRLFDIKPEQQRYSLFLPLHELWKQYIRDLCSGLKPDTQPQMIQAKLLKADLHGAIISVTKSKCPSYVGITGILLQETKHIFKIITKEDRLKVIPKLNCVFTVETDGFISYIYGSKFQLRSSERSAKKFKAKGTIDL

SEQ ID NO: 166653 - protein, 139 aa, Artificial Sequence
  derived and/or modified sequence
MHCLRKRRMTPMSRYSLFLPLHELWKQYIRDLCSGLKPDTQPQMIQAKLLKADLHGAIISVTKSKCPSYVGITGILLQETKHIFKIITKEDRLKVIPKLNCVFTVETDGFISYIYGSKFQLRSSERSAKKFKAKGTIDL

SEQ ID NO: 166654 - DNA, 663 bp, Artificial Sequence
  derived and/or modified sequence
atgaaaagcgtaatctaccacgcactgtcccagaaagaggcaaatgacagcgatgtgcagcctagcggcgctcagcgggcagaggcgtttgtgcgagcattcctgaaaaggagcactccaaggatgtcccctcaagcccgcgaagatcagctgcagagaaaggccgtggttctagagtacttcaccagacataaaaggaaagaaaagaagaaaaaagctaaaggcctgagcgcacggcaacgcagggagttaagattgttcgatatcaagcccgaacagcagcgatatagtttatttctcccccttcacgagctgtggaaacagtacattagagatctgtgctctggattaaagccagacacacaacctcagatgattcaagctaagttgctgaaagccgacttgcacggtgcaataatttctgtgaccaaatcaaagtgtccatcctacgtgggcatcacaggaatcttactgcaggaaaccaagcatatcttcaagataatcacaaaggaagacaggctcaaggttatcccgaagttgaactgcgtgtttactgttgaaactgacggttttatcagttacatctatggctccaaatttcagcttagaagcagtgagcgcagcgccaagaaattcaaggctaagggaaccatcgatctttag

SEQ ID NO: 166655 - DNA, 663 bp, Artificial Sequence
  derived and/or modified sequence
atgaagagcgtcatctaccacgccctgagccagaaggaggccaatgacagtgatgtgcagcccagcggggcccagagagctgaggcctttgtgcgggccttcctgaagaggagcacccccaggatgagcccccaggcccgggaggaccagctgcagaggaaggctgtggtgctggagtacttcaccaggcacaagaggaaggagaagaagaagaaggccaagggcctgagcgcccggcagaggcgggagctgcggctgtttgacatcaagccagagcagcagcgctacagcctcttcctgcccctgcacgagctgtggaagcagtacatccgggacctgtgcagcggcctgaagccagacacccagccccagatgatccaggccaagctgctgaaggctgacctgcacggggccatcatctctgtgaccaagagcaagtgccccagctatgtgggcatcaccggcatcctgctgcaggagaccaagcacatcttcaagatcatcaccaaggaggaccggctgaaggtgatccccaagctgaactgtgtgttcaccgtggagacagatggcttcatctcctacatctacggcagcaagttccagctgcggagcagcgagaggtctgccaagaagttcaaggccaagggcaccatcgacctgtag

SEQ ID NO: 166656 - DNA, 663 bp, Artificial Sequence
  derived and/or modified sequence
atgaagagcgtgatctaccacgccctgagccagaaggaggccaacgactctgatgtacaaccaagtggagcgcagagagcagaggcttttgtgcgagcattcttgaaacgctccacgccccggatgtccccccaagcccgtgaggaccagctgcagcgcaaagctgtggtgctggaatattttactcggcataaacgaaaagaaaaaaagaagaaagcaaagggtctgagtgcccgccagcggagggagctacggttgttcgacatcaaaccagagcagcagaggtactcgctttttctgcctctccatgagctgtggaagcagtatatccgcgatctttgttccggcctgaaacccgatactcaacctcagatgatccaggccaagttgctcaaggctgacctgcatggcgccattatttccgttacaaagtcaaagtgcccctcttatgtcgggatcacaggcatcctgctgcaggagaccaaacacatctttaagattattacaaaagaggaccgtctgaaagttattccaaaactcaattgtgtgtttaccgtggagactgatggatttatttcctatatctatgggagcaaattccagctgcggagtagtgaacgcagcgctaagaaattcaaagccaagggcaccatcgacctctag

SEQ ID NO: 166657 - DNA, 663 bp, Artificial Sequence
  derived and/or modified sequence
atgaagagtgtgatatatcatgccttaagtcagaaagaggcaaacgatagcgacgtgcaaccttctggggctcagagagccgaggcgtttgtcagagcattcctgaagaggtctacgccccgaatgtctccgcaggcacgtgaggatcagttgcagagaaaagccgtcgtgttggagtattttacacgccataaaaggaaagagaagaagaagaaggcaaagggactgtcagccaggcagagacgtgagctgcggctgttcgatataaaacctgagcagcagaggtatagcctctttcttcctctgcatgaactgtggaaacaatatattagagatttgtgttctggactgaaaccagacacccagccccaaatgattcaggccaaattacttaaagccgatctgcacggtgcaatcatttccgtcacaaagtcaaagtgtccatcatatgtaggaattacaggaatcctgctgcaggagacaaagcacatctttaaaataataaccaaggaagaccggctgaaagtgattcccaagctcaactgtgttttcactgtggaaacagacgggtttataagctacatctatggtagcaagttccaactccggagttccgaacggtccgcgaaaaagttcaaagccaagggcacaatagatttgtag

SEQ ID NO: 166658 - DNA, 663 bp, Artificial Sequence
  derived and/or modified sequence
atgaagagcgtgatctaccacgccctgagccagaaggaggccaacgacagcgacgtgcagcccagcggcgcccagagagccgaggccttcgtgagagccttcctgaagagaagcacccccagaatgagcccccaggccagagaggaccagctgcagagaaaggccgtggtgctggagtacttcaccagacacaagagaaaggagaagaagaagaaggccaagggcctgagcgccagacagagaagagagctgagactgttcgacatcaagcccgagcagcagagatacagcctgttcctgcccctgcacgagctgtggaagcagtacatcagagacctgtgcagcggcctgaagcccgacacccagccccagatgatccaggccaagctgctgaaggccgacctgcacggcgccatcatcagcgtgaccaagagcaagtgccccagctacgtgggcatcaccggcatcctgctgcaggagaccaagcacatcttcaagatcatcaccaaggaggacagactgaaggtgatccccaagctgaactgcgtgttcaccgtggagaccgacggcttcatcagctacatctacggcagcaagttccagctgagaagcagcgagagaagcgccaagaagttcaaggccaagggcaccatcgacctgtag

SEQ ID NO: 166659 - DNA, 663 bp, Artificial Sequence
  derived and/or modified sequence
atgaaaagcgtgatctaccatgccctgagtcagaaagaagccaacgattccgacgtgcagccatccggagctcagagggctgaggctttcgtgcgagcttttctgaaacgttccacaccacgaatgtctccgcaagctcgcgaggatcagctgcagaggaaagccgtagtgctggagtactttaccagacacaagagaaaggagaaaaagaaaaaggccaaaggcttgagtgctcggcaacgtagggagctgcgactgttcgatataaaacccgagcagcagcgatattccctcttcttgcccctccacgaattatggaaacagtacataagagacctgtgctccggtctaaaacccgacacccagccccaaatgatccaggcaaagctgttgaaagcagacttgcacggcgcgatcatcagcgtgacaaaaagtaaatgccccagctacgtggggatcacaggcatcctgctccaagagacaaaacatatcttcaaaataatcacaaaggaggacagattaaaagtgattcccaagctcaattgcgtcttcacagtggagactgacgggttcatctcttatatctacgggtctaagtttcagctgcgcagctccgaacgaagcgctaaaaagttcaaggctaaagggaccatcgatctgtag

SEQ ID NO: 166660 - DNA, 420 bp, Artificial Sequence
  derived and/or modified sequence
atgcattgtctcagaaagagacggatgacaccaatgtctagatactcattgttccttccactgcacgaattgtggaaacagtatattcgcgatctctgttcagggttgaaacctgatactcaacctcagatgatccaggccaagctcctgaaagctgatctgcatggcgctatcattagcgtaacaaaaagtaaatgtccttcctatgtcggcatcacaggtatattattacaggagaccaaacatatttttaagataatcactaaggaagatcgattaaaagtaattccgaaactgaactgcgtgtttacagtcgaaacggatgggttcatcagctatatttacggctcaaaattccaattacggagctcagagcggtctgccaaaaagtttaaggccaaggggacaatcgatctctag

SEQ ID NO: 166661 - DNA, 420 bp, Artificial Sequence
  derived and/or modified sequence
atgcactgcctgaggaagaggaggatgacccccatgagccgctacagcctcttcctgcccctgcacgagctgtggaagcagtacatccgggacctgtgcagcggcctgaagccagacacccagccccagatgatccaggccaagctgctgaaggctgacctgcatggagccatcatctctgtgaccaagagcaaatgtcccagctatgtgggcatcaccggcatcctgctgcaggagaccaagcacatcttcaagatcatcaccaaggaggaccggctgaaggtgatccccaagctgaactgtgtgttcaccgtggagacagatggcttcatctcctacatctacggcagcaagttccagctgcggagcagcgagaggtctgccaagaagttcaaggccaagggcaccatcgacctgtag

SEQ ID NO: 166662 - DNA, 663 bp, Artificial Sequence
  derived and/or modified sequence
atgaagagcgtgatctaccacgccctgagccagaaggaggccaacgatagtgacgtgcagccatcaggggcccaacgagcagaggctttcgtacgcgcttttttgaaacgatcaaccccccgtatgagccctcaggccagggaggaccagctgcagaggaaggcagttgtgctggaatattttactaggcacaagaggaaagagaaaaaaaagaaggctaaaggcctgagcgctaggcagcgacgggaactccgcctatttgacattaagcctgagcagcagcgctactcactctttctgccgttacacgagctctggaagcaatacatacgcgacctctgctccggcctcaagcctgacacccagccacagatgatccaagccaagcttctcaaggccgatctacacggcgccattatatccgttactaaatctaaatgcccaagttacgtgggcattaccggtattctgctgcaggaaactaaacatatctttaagattataactaaggaagatcgcctcaaggtaatccccaaattaaactgtgtcttcacagtcgagacagatggattcataagctatatttatggaagcaagttccaattacggagcagtgagcgttccgctaagaaattcaaagccaaaggtactatcgatctgtag

SEQ ID NO: 166663 - DNA, 420 bp, Artificial Sequence
  derived and/or modified sequence
atgcactgcctgcggaagcggcggatgacccccatgagccggtactccctgttcctaccactgcacgaactctggaagcaatacatccgtgacctctgtagcggccttaaacctgacactcagccgcagatgatacaagcgaagttactgaaagccgatctgcatggagccataatttctgttacaaaatcaaaatgtccctcctacgtggggatcacaggcatcctgctccaagaaacaaaacatatctttaagatcatcacaaaagaagaccggctcaaagtcatccccaaactaaattgtgtgttcacggtggaaaccgatgggttcatttcatacatttacggatccaagtttcagctcaggagctcggaacggtcagccaaaaagtttaaggccaaaggcactatcgacctgtag

SEQ ID NO: 166664 - DNA, 663 bp, Artificial Sequence
  derived and/or modified sequence
atgaaatcagtaatataccacgctctgagccaaaaggaggctaatgatagcgatgtgcagccctctggggctcagagggcagaggccttcgttagggcgtttctcaaacgttcaacacccaggatgtccccccaagcacgcgaagaccaactccaaaggaaagccgtggtgctcgaatacttcactcggcacaagcggaaggagaagaaaaagaaagctaagggactctccgctcgccagagaagagagcttcgcctgttcgatattaagcctgagcaacagcgttacagcttgtttctgccactgcatgaactttggaagcaatatatccgggacttgtgctctggcttgaagccagacacccagccccagatgatacaggctaagctgctaaaagcagatctgcatggggcaattatctcggttaccaagtctaaatgcccaagctacgttggaattacaggcatcctactgcaggagacaaaacatatctttaagatcatcactaaggaagataggctgaaagtcattcctaagttgaactgtgtgtttaccgtagagaccgatggattcatttcatatatttacggatccaagttccaactgcggtcatcagagcgaagcgccaaaaaattcaaggcaaaagggacgattgatctgtag

SEQ ID NO: 166665 - DNA, 420 bp, Artificial Sequence
  derived and/or modified sequence
atgcactgcctgcggaagcggaggatgacccccatgtccagatattctctgttccttccgcttcatgagctctggaagcagtacatccgcgatctgtgcagcggactgaaaccggatacgcaaccacaaatgatccaggcaaaactcctcaaggcggatctgcacggcgctatcatttctgtgactaaaagcaaatgcccaagctacgtggggatcaccggaatactcctgcaggagaccaagcacatattcaagattatcacaaaggaagacagactgaaagtgattcctaagctgaattgcgtgttcaccgtagagaccgacgggtttatttcctatatatacgggagcaaattccaactccggtcgagcgaaagaagcgcaaagaagtttaaagcaaagggcacaatcgatttatag

SEQ ID NO: 166666 - DNA, 3385 bp, Artificial Sequence
  derived and/or modified sequence
gtttgctttttaaaaaatattttaggctgggcgcagtggctcacccctgtaatctcagcactttgggaggccgaggcgggtggatcatgagatcaggagttcgagaccaacctgaccaacatggtaaaaccctgtctctactaaaaatacaaaaattagctgggcgtggtggtgtgtgcctgtaatctcagctactcaggaggctgaggcaggagaatcacttcaacctaggaggcagaggttgcagtgagccgagatcacaccattgcactccagcctggacaacacagcaagactccgtctcaaaaaaaaaaatattttaatgatgaaggaactatgttgtaattgcaactcaaggacgacccaccccaccaccatcagggaattcgaggggagactggcagttatccagggatcccagaaggagtcaactgggagttaagagtcctaacaaccctagaaaaaaactttcaaagacacaggtcttctcattaatctccataatcacagaggtcttgcctaaaagggccccccttgagtacacagctctgaaactggctaacatcttctgctgtctcatttgattttaaagttcacatttgtgaagggctctattgtacaacatggtgactatagttaataacagtgaatttcagttaataacctgaatttcactgagagtaggtctgaagtgttctcatcacaaaatgagtgtattagcatcgctcatagctcatttagccattacacaatgtatacacatttcaaaccatattgtataccataaatacatacaattcttattggttaattttaaaaataataaaagttctctatcagtcccataaattacaattttcaggcatctgcaaaggcagcatgttttggtttaaatgtggtctttccaaattttatacgtataaaataaatgcataagtgtactacatatgcaaaaactaatacataaattttataaagtcaatgcacgcggggtcactgggatgaaccaatttcagtgcctgcagtctaatgtttaaaatcaaaatggtacaaggtcaccaccaaagaaattgtttaagccaatgtttctcaaactaaaacctttggacatactcccagaatcccctgtaaagaaatgtatactgtactcaaagttgagaaccactgacttagcataaagggaccgtatttcttttctctcccacccagcacaggcccagtgctcagcagaaattggggctccacagttctgcccaacactgggtcactgctgagaagtctgcaccaggccttcctgcacctttccactgagcaatggagtttgtttattcatttatttatttatatggaatttatttatttattttggagacagggtctcactctgtcacccaggctggagtgcagtagcgcaatccaggttcactgcagccctaaactccttgggctcaactgatcctcccacctcagatacccgagtagttgggactacaagcacgcaccaccacgcctggataattttttttaaatgttttgtagagatggggtctcccgatgttgcccaggctggtctcgaactcctgggctcaagagatcctcccgcctgcgcctcccacggtgtgagccacctttgatcttattgctatgatttttttattgataaaaactaataaatattctgagtctcaagaaagctttctgaaactatcaaagggacccaggcggcgcatcactacctgtgaggccgaccccactcacagcacagactgcaagtgaggcttacagatgggaagtgccctaagcgaggttaaacagctagttagcagcagacacggaactagaacctaagcctgctgtcccagcttcggtgcccgtgctcacagcggaagctgcctcggctcatccgtaagggcgctgattagggacgacaaagacctcaccccaccgtccccgtcccatttccgccctcccagatccccaacctccttcgagtcctctccaagtcgcctcgcctcgctccactccaggccttagcaagcattccacatgcctttaccccaaccctactgcctgtcccccaaaagatgcaggcggaaaagaccccaggaagcgagcccactcctccccactgctcagcaacaccgcctacgacgttctcagtagccgaatccctttccaggcgcatgcgcccccgaggtgggcgagcgccggtgatgtcacgcatagcgccatctccgagctccgagagtctgcgacagcagctgccagtgcgtcatcagagagcgccggaagcggtccgagaatgaagagtgtgatctaccatgcattgtctcagaaagaggcgaatgactccgatgtccagccttcaggagcacagcgggccgaggccttcgtgagggccttcctgaagcgcagcacgccccgcatgagcccgcaggcccgcgaggaccagctgcagcgcaaggcggtggtcctggagtacttcacccgccacaagcgcaaggagaagaagaagaaagccaaaggcctctctgccaggcaaaggagggagctgcggctctttgacattaaaccagagcagcagagatacagccttttcctccctctccatgaactctggaaacagtacatcagggacctgtgcagtgggctcaagccagacacgcagccacagatgattcaggccaagctcttaaaggcagatcttcacggggctattatttcagtgacaaaatccaaatgcccctcttatgtgggtattacaggaatccttctacaggaaacaaagcacattttcaaaattatcaccaaagaagaccgcctgaaagttatccccaagctaaactgcgtgttcactgtggaaaccgatggctttatttcctacatttacgggagcaaattccagcttcggtcaagtgaacggtctgcgaagaagttcaaagcgaagggaacgattgacctgtgaattctttgccgtctaaggcagttgtttatgacagctgaaaactggacactccctaaatgtccacctttcagtgaagagatagttaagccaattccatttatagaccacctccagccagtgacgctccgagttgaggatgttgaacaacatgggaaggtcgcagcgtactaagtgaagaagtcagaggacagaggaatttctctttctaggagattttcattttgtgtgactcccatggggaggaacagactggcaggaagcacaccggggttaacactggttgacttgaataggattattcgatttttaaaaatacttttccatgttttctgagtgctctatgataaatcagttgcatctgtgataatacagtacatatgtggacataaacagggatcaaataaaggaggtattgctgca

SEQ ID NO: 166667 - DNA, 2594 bp, Artificial Sequence
  derived and/or modified sequence
agtctgcgacagcagctgccagtgcgtcatcagagagcgccggaagcggtccgagaatgaagagtgtgatctaccatgcattgtctcagaaagaggcgaatgactccgatgtccagccttcaggagcacagcgggccgaggccttcgtgagggccttcctgaagcgcagcacgccccgcatgagcccgcaggcccgcgaggaccagctgcagcgcaaggcggtggtcctggagtacttcacccgccacaagcgcaaggagaagaagaagaaagccaaaggcctctctgccaggcaaaggagggagctgcggctctttgacattaaaccagagcagcagagatacagccttttcctccctctccatgaactctggaaacagtacatcagggacctgtgcagtgggctcaagccagacacgcagccacagatgattcaggccaagctcttaaaggcagatcttcacggggctattatttcagtgacaaaatccaaatgcccctcttatgtgggtattacaggaatccttctacaggaaacaaagcacattttcaaaattatcaccaaagaagaccgcctgaaagttatccccaagctaaactgcgtgttcactgtggaaaccgatggctttatttcctacatttacgggagcaaattccagcttcggtcaagtgaacggtctgcgaagaagttcaaagcgaagggaacgattgacctgtgaattctttgccgtctaaggcagttgtttatgacagctgaaaactggacactccctaaatgtccacctttcagtgaagagatagttaagccaattccatttatagaccacctccagccagtgacgctccgagttgaggatgttgaacaacatgggaaggtcgcagcgtactaagtgaagaagtcagaggacagaggaatttctctttctaggagattttcattttgtgtgactcccatggggaggaacagactggcaggaagcacaccggggttaacactggttgacttgaataggattattcgatttttaaaaatacttttccatgttttctgagtgctctatgataaatcagttgcatctgtgataatacagtacatatgtggacataaacagggatcaaataaaggaggtattgctgcagtccagccaggttgaaagggaaggggggtccccaaaggtccattggatggcaggtgtctacagaggctcgcctttgggtggaactctgacccacctaaggtttactttgctatttcaggaaggttgaagaggattgaagggtgagttgctaagtgacttagggtttattcacttcaggaatcatagctggggtggaccccaggagcagagtactgcatgcagctgtgcccatgcatggttgccccagcgtagtgagatgggacctgccgcagcatgcccactcctgagctgccaggctgagccatggaggactgaaaggaggtcgcccggcatcacctcccgaggtgagacctgctgcaaaagccaagccagcagcattgacgccctttgatatcttcgccatttttgctgctgaaagacttggcttttcagtctgaccctggccctctgtgaccatgtgtctgtaaagccagtgggtcaggcccttccatgcagggccagaggaaaagcgggcccagggctgcagtgagagcggggcaggggaccagcctaccagatgggttggaaacatggctcagaaggaccaactaccccttccctttgaggagcaagtctctgccgatcagcaaggcaaggccaggagccctcctggcgaaaggcaggccacaaatctgttctcccccaggagaagtagcagtgccagggctttgcgtttctggtaacttccacccaaaccacaccagagagaaacaccgtagtggagaagggaagtgggagcgctgactgctgtgtgccaggagagtagaaaggcccaggtctgtgccaccacccctccccaaagctcagtgcacccagagtctcacagggaccaacacggtgcctcggtcctgcttccatccatgcaagtgtcctccgctcaccagggtgttctgaggcagctcaagtgctctcccccaagcagcacgcagtcaccgctgccagtgatgaacacacgcacgggctaggcacatggagcccaagcacactgccacctcggacacgggccccggcccagcgactgccttgtggtgtggccgtcctcatctgccacaggaagacagacttcgagggacctcttgcctaaggcctcgctgactcaagggtagattgagatttggacctaataggctccagaactgtgctttgagctacagggtggctgcaggatgagacggatgcagttcaaagtgcaggatgtgctgcctttattacctgctttcccgctgagcaaatccctgtcttgagtgggaagtggcatctattcccccagccatctgaaaatgctgtgttcataaccaaataggtgctgtagcttcctagccatcccgctcttacccgcccctctgcaatgtaaaaggcgtccactgttgtgtaaatacacagttgctttccagaaaagttgtaggtaccacttgc

SEQ ID NO: 166668 - DNA, 854 bp, Artificial Sequence
  derived and/or modified sequence
agcgccggaagcggtccgagaatgaagagtgtgatctaccatgcattgtctcagaaagaggcgaatgactccgatgtccagatacagccttttcctccctctccatgaactctggaaacagtacatcagggacctgtgcagtgggctcaagccagacacgcagccacagatgattcaggccaagctcttaaaggcagatcttcacggggctattatttcagtgacaaaatccaaatgcccctcttatgtgggtattacaggaatccttctacaggaaacaaagcacattttcaaaattatcaccaaagaagaccgcctgaaagttatccccaagctaaactgcgtgttcactgtggaaaccgatggctttatttcctacatttacgggagcaaattccagcttcggtcaagtgaacggtctgcgaagaagttcaaagcgaagggaacgattgacctgtgaattctttgccgtctaaggcagttgtttatgacagctgaaaactggacactccctaaatgtccacctttcagtgaagagatagttaagccaattccatttatagaccacctccagccagtgacgctccgagttgaggatgttgaacaacatgggaaggtcgcagcgtactaagtgaagaagtcagaggacagaggaatttctctttctaggagattttcattttgtgtgactcccatggggaggaacagactggcaggaagcacaccggggttaacactggttgacttgaataggattattcgatttttaaaaatacttttccatgttttctgagtgctctatgataaatcagttgcatctgtgataatacagtacatatgtggacataaacagg

SEQ ID NO: 166669 - DNA, 420 bp, Artificial Sequence
  derived and/or modified sequence
atgcactgcctgagaaagagaagaatgacccccatgagcagatacagcctgttcctgcccctgcacgagctgtggaagcagtacatcagagacctgtgcagcggcctgaagcccgacacccagccccagatgatccaggccaagctgctgaaggccgacctgcacggcgccatcatcagcgtgaccaagagcaagtgccccagctacgtgggcatcaccggcatcctgctgcaggagaccaagcacatcttcaagatcatcaccaaggaggacagactgaaggtgatccccaagctgaactgcgtgttcaccgtggagaccgacggcttcatcagctacatctacggcagcaagttccagctgagaagcagcgagagaagcgccaagaagttcaaggccaagggcaccatcgacctgtag

SEQ ID NO: 166670 - DNA, 656 bp, Artificial Sequence
  derived and/or modified sequence
aaaaccctataaatgtaaggattgtgggaaagccttcactcagaactcagaccttactaagcatgcacgaactcacagtggagagaggccctatgaatgtaaggaatgtggaaaggcctttgccagatcctctcgccttagtgaacatacaagaactcacactggagagaagccttttgaatgtgtcaaatgtgggaaagcctttgctatttcttcaaatcttagtggacatttgagaattcacactggagagaagccctttgagtgcctggaatgtggtaaagcatttacgcattcctccagtcttaataatcacatgcggacccacagcgccaaaaaaccattcacgtgtatggaatgtggcaaagcctttaagtttcccacgtgtgttaaccttcacatgcggatccacactggagaaaaaccctacaaatgtaaacagtgtgggaaatccttcagttactccaattcgtttcagttacatgaacgaactcacactggagagaaaccctatgaatgtaaggagtgcgggaaagccttcagttcttccagttcctttcgaaatcatgaaagaaggcatgcggatgagagactgtcagcataaggaatgtgggaaaacctaaaggtgtccctgttctctctgaagacatgaaaac

SEQ ID NO: 166671 - DNA, 1650 bp, Artificial Sequence
  derived and/or modified sequence
atgctggagaactacaagaacctggccaccgtgggctaccagctgttcaagcccagcctgatcagctggctggagcaggaggagagcagaaccgtgcagagaggcgacttccaggccagcgagtggaaggtgcagctgaagaccaaggagctggccctgcagcaggacgtgctgggcgagcccaccagcagcggcatccagatgatcggcagccacaacggcggcgaggtgagcgacgtgaagcagtgcggcgacgtgagcagcgagcacagctgcctgaagacccacgtgagaacccagaacagcgagaacaccttcgagtgctacctgtacggcgtggacttcctgaccctgcacaagaagaccagcaccggcgagcagagaagcgtgttcagccagtgcggcaaggccttcagcctgaaccccgacgtggtgtgccagagaacctgcaccggcgagaaggccttcgactgcagcgacagcggcaagagcttcatcaaccacagccacctgcagggccacctgagaacccacaacggcgagagcctgcacgagtggaaggagtgcggcagaggcttcatccacagcaccgacctggccgtgagaatccagacccacagaagcgagaagccctacaagtgcaaggagtgcggcaagggcttcagatacagcgcctacctgaacatccacatgggcacccacaccggcgacaacccctacgagtgcaaggagtgcggcaaggccttcaccagaagctgccagctgacccagcacagaaagacccacaccggcgagaagccctacaagtgcaaggactgcggcagagccttcaccgtgagcagctgcctgagccagcacatgaagatccacgtgggcgagaagccctacgagtgcaaggagtgcggcatcgccttcaccagaagcagccagctgaccgagcacctgaagacccacaccgccaaggaccccttcgagtgcaagatctgcggcaagagcttcagaaacagcagctgcctgagcgaccacttcagaatccacaccggcatcaagccctacaagtgcaaggactgcggcaaggccttcacccagaacagcgacctgaccaagcacgccagaacccacagcggcgagagaccctacgagtgcaaggagtgcggcaaggccttcgccagaagcagcagactgagcgagcacaccagaacccacaccggcgagaagcccttcgagtgcgtgaagtgcggcaaggccttcgccatcagcagcaacctgagcggccacctgagaatccacaccggcgagaagcccttcgagtgcctggagtgcggcaaggccttcacccacagcagcagcctgaacaaccacatgagaacccacagcgccaagaagcccttcacctgcatggagtgcggcaaggccttcaagttccccacctgcgtgaacctgcacatgagaatccacaccggcgagaagccctacaagtgcaagcagtgcggcaagagcttcagctacagcaacagcttccagctgcacgagagaacccacaccggcgagaagccctacgagtgcaaggagtgcggcaaggccttcagcagcagcagcagcttcagaaaccacgagagaagacacgccgacgagagactgagcgcctag

SEQ ID NO: 166672 - DNA, 1650 bp, Artificial Sequence
  derived and/or modified sequence
atgctggagaattacaaaaatctggccacagtaggctatcaactctttaagccatccctaatctcttggctggagcaggaggaatccaggactgttcaaaggggtgactttcaagcctcggaatggaaagttcaacttaagaccaaagagctcgctcttcaacaagatgttctgggcgagccaacgtctagtgggatccaaatgatcggttcccacaatggtggcgaagtgagcgatgtcaaacaatgcggcgacgtttctagtgagcactcctgtctgaaaacccatgtgcgaacacaaaacagcgaaaatacattcgaatgctacctatacggcgtagattttctgaccctacataaaaagacttccacaggtgaacagcgctctgtattcagccaatgtggcaaagcattttctcttaatccggacgtggtgtgccagagaacttgcaccggagaaaaggccttcgactgctctgattccggaaagtcttttatcaatcacagccatttgcagggacatttgagaacccataacggcgagagcctgcacgaatggaaggagtgcgggcggggcttcatacactctacagatctggccgtgaggatacaaactcataggagcgagaagccatataaatgcaaagagtgtggcaagggatttaggtattcagcttacctgaacatacatatgggaacccacactggggacaatccttatgagtgtaaggagtgcggcaaagcttttaccagaagttgtcagctcacacagcatcggaagacacataccggtgagaagccatataaatgtaaggactgcggccgagcatttaccgtctcatcttgcctttcgcagcacatgaaaattcatgtgggagaaaagccctatgagtgcaaggaatgtgggatagcgttcacacggagcagtcagctgacagagcatcttaaaacccacactgccaaagaccctttcgagtgcaaaatatgtggtaagtcattcaggaacagttcctgtttgtcagaccattttcgtattcacaccggcataaaaccgtataagtgcaaggactgtgggaaagcattcacacagaactctgatttgaccaagcatgctagaactcattcaggcgagcggccttatgagtgtaaagagtgcggaaaagcgtttgcgagaagctcgcgcctttcggagcacacccgcacacatacaggggagaaaccctttgagtgcgtcaagtgtggcaaggcatttgccatcagctcgaatttatcaggccatcttagaatacataccggggagaagccctttgagtgtctggagtgcgggaaggccttcactcacagctccagtttgaacaatcatatgaggactcattctgcgaaaaagccgtttacatgtatggagtgcggaaaagccttcaagtttcctacatgtgtgaacctgcacatgcggattcatactggggagaagccctataaatgtaagcagtgcgggaagagcttctcatacagcaattccttccaacttcacgaacgcacacacacgggggagaagccttacgagtgtaaggagtgtggcaaggcctttagctcgagtagttctttcagaaatcatgagagaaggcacgcagatgagagattaagcgcttag

SEQ ID NO: 166673 - DNA, 1650 bp, Artificial Sequence
  derived and/or modified sequence
atgctagagaattacaaaaatttggccaccgtgggatatcagctcttcaaaccttctctgatttcatggttagagcaggaggaatcacgcaccgttcaaaggggcgacttccaagcaagcgaatggaaggtgcaactgaaaactaaggagctagcccttcaacaggacgttctgggagagcctaccagttcaggcatacagatgataggatctcacaatggaggagaagtgagcgatgtgaaacagtgcggtgatgtgagcagcgagcatagctgcctgaagacccacgtgcggactcagaattcagagaatacttttgagtgctatctttacggcgtggattttctgaccttgcacaaaaagacctcaacaggggagcaaaggagtgtcttttcacagtgcggcaaagcattcagtttgaacccagacgtggtgtgccaacgaacttgcacaggggagaaggcatttgactgctcggactcgggtaagagctttattaatcactcacatctgcaaggacatttgagaacgcataatggcgagtcactccacgagtggaaagaatgcggaagaggctttattcactcaacagatctcgcggtgaggattcagacgcacaggtcagaaaaaccgtataagtgcaaggaatgcggtaaaggatttcgctattcagcttaccttaatattcacatgggtactcataccggggataacccttacgaatgtaaagagtgcggaaaggcttttacgcggagttgccagctgacgcagcatcgaaagacccatactggcgagaagccatacaagtgtaaggattgcggacgcgctttcaccgtgtctagctgtttaagccagcatatgaaaatacatgtaggcgaaaaaccttatgagtgtaaggagtgtggtatcgcgtttaccagaagctcacagttgaccgagcacctgaaaacccacacagccaaagacccgtttgaatgtaagatttgcggaaagtcctttcgtaatagttcttgcctgagcgatcactttcgaattcataccggcatcaaaccatacaagtgcaaagactgcggtaaagctttcacccaaaattccgacctgacaaagcacgctaggacacactcaggtgaacggccttacgaatgcaaggagtgtggtaaggcgttcgcccgcagtagcagactctctgagcatactcggacacacactggagagaagccattcgaatgtgtgaaatgcggaaaggcttttgccatttcttctaatctctcggggcatttgcgcattcacaccggagaaaaacctttcgaatgtttggaatgcggtaaggcttttactcactccagctcactgaataatcacatgcgcactcacagcgccaaaaagccatttacgtgcatggaatgcgggaaagcttttaagtttcccacttgcgttaatttacacatgagaatccatacgggtgaaaaaccttacaagtgtaaacagtgtggcaagagcttttcctattctaatagtttccagctgcatgagagaacacacaccggcgaaaaaccctacgagtgcaaagagtgcggtaaggccttcagttcttcatcatcttttagaaatcatgagcgcagacatgctgatgaacgcttaagtgcttag

SEQ ID NO: 166674 - DNA, 1650 bp, Artificial Sequence
  derived and/or modified sequence
atgttggaaaactataaaaatcttgctaccgtgggataccagctttttaagccttctcttatctcttggctggaacaggaggagtctaggacagtccagcgcggcgattttcaggcctctgagtggaaagtgcaattaaagactaaggaactagcgctacagcaggacgtactgggcgagcccacgagctccggaattcaaatgattgggagccataacgggggagaggtgagcgatgtgaagcagtgtggggatgtctcatccgagcacagttgcttaaaaacacatgtgcgaacccaaaacagtgaaaacacctttgaatgttacctctacggtgtcgattttctcacgttgcataagaaaacgagcactggagaacagcggtccgttttttcgcagtgcggcaaagctttttcccttaatcctgacgtagtctgtcagaggacgtgcacgggagaaaaagccttcgactgcagcgactcggggaaatccttcatcaaccatagtcatctccaggggcacctgaggactcacaacggcgaatcccttcacgaatggaaagagtgtggccggggctttatacacagcacagacttggccgtcagaattcaaacacaccggagcgaaaaaccgtataagtgcaaagagtgcggaaagggttttcggtattccgcttaccttaacatccatatgggcactcatacaggggacaacccctatgaatgcaaggagtgcggcaaagcctttacaaggtcctgccaactgactcaacatagaaaaacccatacaggagagaaaccttataaatgcaaagactgtgggcgagcgtttactgtttccagctgtctaagtcagcacatgaagatccatgtaggggaaaaaccctatgagtgtaaagagtgcggcattgccttcaccagatcttcccagttaaccgagcacttgaagacccacaccgccaaagatcccttcgaatgcaagatttgcggtaagtcatttaggaatagcagttgcctctctgaccatttcagaatacatacaggcattaaaccgtataaatgtaaggactgtggcaaagcttttacccagaactccgatctgacaaaacacgcaagaacgcactctggcgagcgaccatacgagtgcaaggagtgtggcaaagccttcgctaggagctctagactgagtgaacatacccgtacgcataccggcgagaagccattcgaatgcgtgaaatgcgggaaggcctttgccatcagcagtaatctgagtggccacctcagaatccacaccggagagaaacccttcgagtgccttgaatgtggaaaggcctttactcacagttcctctcttaacaaccatatgcggacacacagcgccaagaagccattcacatgcatggagtgtgggaaggcatttaagtttccaacttgtgttaatcttcacatgaggatacacaccggcgagaaaccctataaatgtaagcagtgtggaaagtcattttcctacagcaactcttttcaactccatgaacgcacacataccggcgaaaagccctacgaatgtaaggaatgcggaaaagctttctcaagctccagttccttccgcaaccatgagcgcagacacgcagacgagaggctgagtgcatag

SEQ ID NO: 166675 - DNA, 1650 bp, Artificial Sequence
  derived and/or modified sequence
atgctggagaactacaagaacctggccaccgtgggctaccagctgttcaagcccagcctcatctcctggctggagcaggaggagagcaggacagtgcagagaggagacttccaggccagcgagtggaaggtgcagctgaagaccaaggagctggccctgcagcaggatgtgctgggggagcccaccagcagcggcatccagatgattggcagccacaatggaggagaggtgtctgatgtgaagcagtgtggagatgtgagcagcgagcacagctgcctgaagacccacgtgaggacccagaacagcgagaacacctttgagtgctacctgtatggagtggacttcctgaccctgcacaagaagaccagcactggagagcagaggtctgtgttcagccagtgtgggaaggccttcagcctgaacccagatgtggtgtgccagaggacctgcacaggagagaaggcctttgactgcagcgacagcggcaagagcttcatcaaccacagccacctgcagggccacctgcggacccacaatggagagagcctgcacgagtggaaggaatgtggccggggcttcatccacagcacagacctggccgtgcgcatccagacccacaggtctgagaagccctacaagtgcaaggaatgtgggaagggcttccgctacagcgcctacctgaacatccacatgggcacccacactggagacaacccctatgagtgcaaggaatgtgggaaggccttcaccaggagctgccagctgacccagcacaggaagacccacactggagagaagccctacaagtgcaaggactgtggccgggccttcaccgtgagcagctgcctgagccagcacatgaagatccacgtgggggagaagccctatgagtgcaaggaatgtggcatcgccttcaccaggagcagccagctgacagagcacctgaagacccacacagccaaggacccctttgagtgcaagatctgtgggaagagcttcaggaacagcagctgcctgagtgaccacttccgcatccacacaggcatcaagccctacaagtgcaaggactgtgggaaggccttcacccagaacagcgacctgaccaagcacgcccggacccacagcggggagcggccctatgagtgcaaggaatgtgggaaggcctttgcccggagcagccggctgtctgagcacaccaggacccacactggagagaagccctttgaatgtgtgaagtgtgggaaggcctttgccatcagcagcaacctgagcggccacctgcgcatccacactggagagaagccctttgaatgtctggagtgtgggaaggccttcacccacagcagcagcctgaacaaccacatgaggacccacagcgccaagaagcccttcacctgcatggagtgtgggaaggccttcaagttccccacctgtgtgaacctgcacatgaggatccacactggagagaagccctacaagtgcaagcagtgtgggaagagcttctcctacagcaacagcttccagctgcacgagaggacccacactggagagaagccctatgagtgcaaggaatgtgggaaggccttcagcagcagcagcagcttcaggaaccacgagaggagacatgctgatgagcggctgagcgcctag

SEQ ID NO: 166676 - DNA, 1650 bp, Artificial Sequence
  derived and/or modified sequence
atgctggagaactacaagaacctggccaccgtgggctaccagctgtttaagccaagcctgatctcatggttagaacaggaggagtctagaactgtgcagcgaggcgactttcaggcgagcgagtggaaggtgcagctcaaaaccaaggagctggctctccagcaagatgtcctaggggaaccaacctccagcggcattcagatgattggatcacacaacggaggcgaagtgtccgacgtgaagcagtgcggcgatgtatcttccgagcactcctgcttgaaaacccatgtgcgcacccagaattcagagaatacctttgaatgttatctttacggagtggacttcctgaccctccataagaaaacctccacaggggaacagcgaagtgtcttctcccaatgcgggaaggcattcagtctgaaccccgatgtcgtgtgtcaacggacttgtacaggcgaaaaagcctttgactgcagcgattccggaaaaagttttataaaccactcccatctccagggccacttgcgtactcacaacggagaaagtctgcatgagtggaaagagtgcggcagagggttcattcacagtactgatctcgccgtcaggatacagacacacagaagcgaaaaaccatataaatgtaaggagtgcggcaagggattccgctatagcgcctacctgaacattcacatggggactcataccggggacaatccttacgaatgcaaggagtgcggaaaggctttcacaagaagctgccagctcacccagcacaggaaaactcatactggtgagaagccctacaaatgcaaagattgcgggcgtgccttcactgtgtccagctgcctgagtcagcacatgaagattcatgtcggggaaaagccttacgagtgtaaggaatgtggtattgcgttcacacgtagcagccagttaacagaacacttgaagacacacactgcaaaagaccccttcgagtgcaagatctgcgggaagagcttcaggaactcctcctgccttagcgatcactttaggatacatactggaattaaaccatacaagtgtaaggattgtggcaaagcatttacccagaactctgatctcacgaaacacgcccggactcactcaggagagaggccttatgagtgtaaagagtgcggtaaggcctttgcccggtcatccaggttgtcggaacatacacggacccacacaggtgaaaagccattcgagtgtgtcaagtgtggcaaagcttttgcaatcagcagcaatctttctgggcatctgagaatccatactggggagaagcccttcgagtgtctggagtgtggcaaagctttcacacatagttcctccctaaacaaccacatgcggactcacagtgcgaaaaaaccattcacgtgtatggagtgcggtaaggcattcaaatttccgacctgcgtgaacctgcacatgcgaatacacaccggagaaaaaccttacaagtgcaagcagtgcgggaagtccttttcatacagcaacagcttccaattgcacgagcgcacacacacaggggagaagccctacgagtgcaaagaatgtgggaaagcgttctcaagtagctcaagctttagaaaccacgagaggcgtcatgccgatgagcgcctgtccgcctag

SEQ ID NO: 166677 - DNA, 1650 bp, Artificial Sequence
  derived and/or modified sequence
atgctggagaactacaagaacctggccaccgtgggctaccagctgttcaaaccgtctctcattagttggctcgagcaagaagaaagtcgaaccgtccaacgcggtgactttcaggcctccgagtggaaagtgcagctgaagaccaaggagctcgcattacaacaggacgtactgggtgaacctaccagtagtggaatccagatgataggaagtcacaatggaggagaggtttcagatgttaaacagtgcggtgatgtctcatctgaacattcttgtttgaaaacacacgtacgaacccagaattccgagaatacctttgagtgttacctatacggggtagatttcctcactctgcacaagaagacttctactggcgaacagcgatccgtattctctcagtgcgggaaagccttctcactcaatcccgacgtggtgtgtcagagaacctgcaccggcgaaaaggcgttcgactgttccgattccgggaagtcttttatcaaccatagccacctgcagggccatctgcggactcacaacggagagtctctgcacgaatggaaggaatgtggaaggggctttatacatagcacagacctggccgtgcggatacagacccataggagtgagaaaccttacaagtgtaaagagtgtggcaagggcttccggtactcggcctacctgaatattcatatggggacccacaccggagacaacccttatgagtgtaaggaatgcggaaaggctttcacacggtcctgccaacttacacagcatcgaaaaacacacaccggggagaagccatacaaatgcaaggattgtggcagagcctttaccgtatcttcctgccttagccagcacatgaagatccatgttggagaaaaaccatacgaatgcaaggagtgcggtatagcattcacccgcagctcccagctcacggagcacttgaagacacacaccgcaaaagatccctttgaatgtaaaatctgcggaaagtcgtttaggaatagttcttgcctttccgaccactttcggattcatacaggaataaagccttacaagtgcaaggactgtgggaaagcattcacacaaaacagtgacctgactaaacacgccaggacccactctggtgaacggccctacgaatgcaaagaatgtgggaaagcttttgctaggagctcaaggctcagtgagcacactcggacccacacgggcgagaagcccttcgaatgcgtaaaatgtggaaaggcatttgcgataagttccaatctgtccgggcatctccgcatacacacaggggaaaaaccgttcgagtgcctagagtgtggaaaggcatttacccatagtagttccctcaacaatcatatgagaacacatagcgctaagaaacccttcacctgcatggagtgcggaaaagcattcaagtttcccacatgcgttaacctccacatgcgcattcacacaggggaaaaaccgtacaagtgcaaacaatgtgggaaatccttctcttattctaattcgttccagctccatgaaagaactcacacaggggagaagccctacgagtgtaaggagtgcggtaaagccttctctagttcctccagctttcgtaaccatgagcggagacatgcagacgaacggctgagcgcctag

SEQ ID NO: 166678 - DNA, 1650 bp, Artificial Sequence
  derived and/or modified sequence
atgctggagaactacaagaacctggccaccgtgggctaccagctgtttaaaccatctctcatctcatggctggagcaggaagagtctcgaacagtccagagaggcgactttcaggcgtccgagtggaaggttcagttgaagaccaaggagctggcattgcaacaagatgtgctgggagagccaacctcttcggggatccagatgatagggtcccataacgggggtgaggtctcagatgttaagcagtgtggtgacgtatcatccgagcactcctgtttgaagacgcacgtgaggacgcaaaacagtgaaaacacatttgaatgctatctctacggcgtcgatttcctgaccttgcacaagaaaacaagtaccggagaacaacgcagtgtcttttctcagtgcggaaaagcgttctctttgaaccctgacgtagtttgtcagcggacctgcacaggggagaaggcttttgactgtagcgattcgggcaagtccttcataaatcactcacacctgcaaggtcacctaaggacacacaatggtgaatccctgcatgaatggaaggaatgtgggcgcggatttatccatagtacagatctggctgtgagaatacagacacatcgaagcgaaaaaccctacaagtgcaaggagtgtggaaagggctttagatattccgcctatcttaacatccatatggggactcacacaggcgacaatccatatgagtgtaaggagtgtggtaaagccttcacacggtcatgtcaattaacacagcacagaaaaactcacaccggagagaagccctacaagtgcaaggactgtggtcgagcctttaccgtctcatcatgcctgtctcagcatatgaaaattcatgtcggagaaaagccttacgagtgtaaggagtgtggtatcgcgtttacgcgttcgagccaactaaccgaacacctcaaaacccatactgcgaaggatccattcgagtgtaagatttgcgggaaaagcttccgtaatagcagttgtctgtctgatcattttcggattcacactggcatcaaaccctacaagtgcaaggattgcggaaaggcgtttactcagaattcagatctgactaaacatgcccggacccacagtggcgaacggccctacgaatgcaaggagtgtggcaaggcgttcgctcgatcatcgcgactcagtgagcatacccgaacacacacaggagaaaagccattcgaatgcgtgaaatgcgggaaagccttcgcaattagtagtaatctcagcgggcatctccggattcacaccggtgaaaaaccattcgagtgcctcgaatgcggaaaggctttcacacactccagctctctgaataaccacatgcggacccacagcgcgaagaaaccctttacttgtatggagtgcggtaaagctttcaaattccctacttgcgtgaatctacacatgagaattcacaccggggaaaagccctacaaatgtaagcagtgcggaaaatcctttagctacagtaatagtttccagctgcacgaacggactcatacgggagagaaaccctacgagtgcaaggagtgtggcaaggccttcagcagcagttcttcttttcgaaaccatgagcgccgccacgccgatgaacggctcagtgcatag

SEQ ID NO: 166679 - DNA, 1650 bp, Artificial Sequence
  derived and/or modified sequence
atgcttgaaaactacaagaacctggcaacggtgggatatcagctgttcaagccctccctcatttcctggcttgagcaggaggaatctcgcactgttcagcgcggtgactttcaagcaagcgagtggaaggtccaactaaagactaaggagctggctctgcagcaggacgtcctgggggaacccaccagcagcggaatccagatgattgggagccataatggaggagaggtctccgatgtcaagcaatgcggggatgtcagctctgagcattcttgcctgaaaacacacgtgaggacccaaaattctgagaacacttttgaatgctatttgtacggcgtggactttctcaccctccacaaaaaaacctccactggggagcagcgaagtgttttcagtcaatgtggcaaagccttttctcttaatcctgatgtcgtctgtcagaggacttgtaccggcgagaaggccttcgattgctccgacagtggaaaatcatttatcaatcacagccacctgcagggacacttgcgtactcacaatggcgagtctctgcatgaatggaaggaatgtggcagaggtttcatacattcgaccgacctcgccgttcgcatccagacacacaggtcagaaaagccctacaaatgcaaggagtgcggcaaagggtttagatactccgcctatcttaatattcatatggggacacacactggcgacaatccatatgagtgtaaagagtgtggcaaagcatttacgaggtcatgtcagctaacccagcacaggaaaactcatactggggagaaaccatacaagtgtaaggactgcggaagggcctttacggtttcttcttgtctctcccaacatatgaagatccatgttggggagaaaccttacgagtgtaaggagtgtgggattgcctttacgcggtcctcccagcttactgaacatcttaagactcacaccgccaaagatccatttgaatgcaaaatttgtgggaagtcgttccgcaacagcagttgcctgagcgaccattttcggatccacaccggtatcaagccctacaaatgtaaagattgtggcaaggcgtttacacagaacagtgacctgacaaaacatgctaggacacattccggcgaacggccatatgagtgtaaagagtgtggcaaggcattcgctcggtcttcacgcctcagtgaacacactcgcacacacaccggcgagaagccctttgaatgtgtgaagtgtggtaaggcgtttgcaatcagctcaaacctctctggacatctccgcatacatactggtgagaagcctttcgaatgtcttgaatgtggcaaagcctttactcattccagcagcctgaacaatcacatgagaacacattctgctaaaaaaccatttacctgtatggagtgtggtaaggcgtttaagtttccaacatgtgtgaacctgcatatgaggattcataccggcgagaagccctacaagtgcaagcagtgcgggaaaagcttttcatactccaatagctttcagttgcatgagcgaacgcacaccggcgaaaagccctacgaatgcaaagaatgtggcaaagccttcagcagttcttcttccttccgtaatcacgagcgaaggcacgcggacgagaggctatccgcctag

SEQ ID NO: 166680 - DNA, 1650 bp, Artificial Sequence
  derived and/or modified sequence
atgctagaaaactacaaaaatctggccactgttggttatcagctgtttaaaccctctctgatttcctggctggaacaagaagagtcacgtactgtacagagaggggattttcaagcgtcagagtggaaagtccaactgaaaactaaggaattagcccttcagcaggacgttctcggagagcccaccagtagtggaattcagatgattgggtctcacaatggaggggaagtctctgacgtcaaacagtgcggagatgtgagctctgaacacagctgtctaaagacccacgtgcgtactcagaattctgagaacacatttgagtgttacctatatggggtcgatttcctaaccttgcacaaaaaaactagtacgggtgagcagagatccgtcttttcccaatgcggtaaagcattctctttaaacccggacgtagtctgccagcgtacctgcacaggggagaaggcattcgactgctccgattcaggcaagtctttcataaatcactcgcatcttcagggccatctgcggacccataatggggaatccctgcatgaatggaaggagtgcggacgcggattcatacattctaccgacctggccgtcaggatccagacgcaccggtcggagaaaccctataagtgtaaggagtgcgggaagggtttccgatactctgcttaccttaacattcacatggggacccacacaggggataatccatatgaatgtaaggagtgtggcaaagcatttacgcggtcctgccaattgacccagcaccggaaaacccacactggtgaaaaaccttataagtgtaaggactgcggcagggctttcaccgtgtctagttgcttatcccaacacatgaagattcacgttggggagaaaccctatgagtgtaaagagtgcggaattgccttcacccggagcagtcagttaactgagcatctgaagactcataccgcaaaggacccctttgagtgcaaaatttgcgggaagtcttttcgcaactccagttgtctttctgatcactttaggatacacaccggtatcaagccgtacaagtgcaaggactgtggcaaggctttcacacagaatagcgatttgactaagcatgcacgtacccacagcggcgaacggccttatgagtgcaaggagtgtggaaaagcctttgccagatcgagtagattgtctgagcacacgagaacccatactggggagaagccctttgaatgcgtcaagtgcggtaaggccttcgccatttccagcaacttgtccggacatctgcgcatccatactggtgaaaagcccttcgagtgtcttgaatgcggcaaggcctttactcattccagctctctcaacaaccacatgcgtactcactctgccaaaaaaccctttacctgtatggagtgtggcaaagcgttcaagttccccacttgcgttaacctgcacatgaggatacacaccggggagaaaccttacaaatgtaagcagtgcggcaaaagtttcagctacagcaattcttttcagctgcacgaaaggacccataccggcgagaagccatacgaatgcaaggaatgcggcaaggctttttcctcctcctcttcattcaggaaccacgagcggagacacgctgatgagcgtctgtcagcttag

SEQ ID NO: 166681 - DNA, 1650 bp, Artificial Sequence
  derived and/or modified sequence
atgctggagaattacaagaatctggctaccgtggggtatcagctgtttaagccatctcttatatcatggttagagcaggaagaatcacggaccgtgcagcggggagattttcaggcgtccgagtggaaagtccaactgaagaccaaagaattagctttacagcaggacgtgctcggggagcccacatcttcggggatacagatgatcggatcccacaatggaggggaggtgtccgatgtcaaacaatgtggggacgtgtcctctgagcattcatgcctaaaaacacacgtccgcacccagaacagcgagaacactttcgagtgttatttatacggcgtagattttttgactcttcacaaaaagacctccactggagagcagaggtcagtcttctctcagtgtggaaaggcatttagcctgaaccctgacgtcgtctgccagagaacatgcaccggagaaaaggcctttgattgtagcgacagcggtaagagcttcatcaaccactctcacctccaggggcatctccgcacacacaacggtgaatccctccacgagtggaaagagtgcggccgaggttttattcattctactgatttagcggtgcggatccagacacatcgaagcgagaagccatacaaatgcaaagaatgcggtaaggggttccggtactcagcctacctcaacatccacatgggaacacacacaggcgataacccttacgaatgcaaggagtgcgggaaggcctttactcgtagctgccaacttacccagcatcgaaaaacacacactggcgagaaaccctataaatgcaaggattgtgggagggcatttacggtgtcatcgtgtctatcccagcacatgaaaatccatgtaggagaaaagccatatgagtgcaaggaatgtggcatagctttcacccgctcttcgcagctgaccgaacatctgaagacgcacactgccaaggatccgtttgagtgcaaaatctgcggaaagagcttccgaaacagctcatgcctgagcgatcacttcagaatacatacggggataaaaccatacaagtgcaaggactgcggtaaggctttcacacagaattctgacctcacaaagcacgccaggactcacagcggggaacgtccttacgagtgcaaggagtgcggcaaagcgtttgcaaggagttcaaggttatctgaacatacacggactcacaccggggagaaacctttcgagtgcgttaagtgcggaaaagcattcgcaatctctagcaatctttccggacacctcaggatacacaccggggaaaaaccattcgagtgtctcgaatgtggaaaggcttttactcacagctcatccctcaacaaccacatgcgcactcactcagccaagaagcccttcacctgcatggagtgtggtaaggcctttaagtttcccacttgcgtgaacctgcatatgaggattcacaccggtgaaaaaccctataaatgtaagcagtgtggtaaatcatttagctatagcaatagttttcaactccacgaacgaacacacaccggcgaaaagccatatgagtgcaaggagtgcggtaaggcattctcctcctcatcctctttccgcaatcacgagagaaggcatgctgacgaaaggctgagtgcctag

SEQ ID NO: 166682 - protein, 420 aa, Artificial Sequence
  derived and/or modified sequence
MATKTELSPTARESKNAQDMQVDETLIPRKVPSLCSARYGIALVLHFCNFTTIAQNVIMNITMVAMVNSTSPQSQLNDSSEVLPVDSFGGLSKAPKSLPAKSSILGGQFAIWEKWGPPQERSRLCSIALSGMLLGCFTAILIGGFISETLGWPFVFYIFGGVGCVCCLLWFVVIYDDPVSYPWISTSEKEYIISSLKQQVGSSKQPLPIKAMLRSLPIWSICLGCFSHQWLVSTMVVYIPTYISSVYHVNIRDNGLLSALPFIVAWVIGMVGGYLADFLLTKKFRLITVRKIATILGSLPSSALIVSLPYLNSGYITATALLTLSCGLSTLCQSGIYINVLDIAPRYSSFLMGASRGFSSIAPVIVPTVSGFLLSQDPEFGWRNVFFLLFAVNLLGLLFYLIFGEADVQEWAKERKLTRL

SEQ ID NO: 166683 - protein, 99 aa, Artificial Sequence
  derived and/or modified sequence
  misc_feature (1)..(1): Xaa can be any naturally occurring amino acid
XTLSCGLSTLCQSGIYINVLDIAPRYSSFLMGASRGFSSIAPVIVPTVSGFLLSQDPEFGWRNVFFLLFAVNLLGLLFYLIFGEADVQEWAKERKLTRL

SEQ ID NO: 166684 - DNA, 1263 bp, Artificial Sequence
  derived and/or modified sequence
atggccactaaaaccgagctatctcccaccgctagagagtctaaaaatgcccaagatatgcaggttgatgaaactttaattcctaggaaagtcccatccctctgctcagccaggtatggcatcgccctcgtcttgcatttttgcaactttactaccatcgctcaaaatgttattatgaatattaccatggtcgcaatggtaaattcgactagtccgcaaagtcagttaaatgactccagtgaggttctgcccgtagactccttcggcggcttgtctaaagcccctaagagcctacctgccaaatcttctatcctgggtggacaatttgcaatctgggaaaagtgggggcccccccaggaaaggagtcgcctctgttccattgctctttcaggcatgctacttggctgtttcaccgcaattctcatcgggggtttcatctctgagactcttgggtggcctttcgtattctacatatttggcggagtgggatgtgtttgctgtctgctgtggttcgtggtgatttacgacgaccctgtgagctacccgtggatctccacttcagaaaaagagtatattatcagtagcctgaagcaacaggtcggatctagcaagcagccgctgcctatcaaagcaatgcttaggtccttgcctatctggtcaatatgtctcggctgctttagccatcagtggttggtgtcaactatggttgtgtacatccccacatacatctcaagtgtgtaccatgtcaatatcagagacaacggattacttagtgccttaccgttcatcgtcgcatgggtgataggcatggttgggggttacctcgccgattttctcttgactaaaaagtttcgtttaattaccgttagaaaaattgctaccatcttgggcagtttaccatccagcgcccttattgtttcccttccctacttgaactcaggttatattactgccacagctctgcttactctgagctgcggtttgagcacattatgtcagagtggaatatacattaatgtgctagatatcgcaccaaggtactcctcgtttttaatgggagcctctcgcggctttagctctatcgctccagttatcgttccaaccgtatcaggattcctcctgagccaggaccccgagttcggctggcgcaacgtgtttttcttactgtttgcggtgaatttgctcggactcctattttatcttatttttggggaagctgacgtgcaggaatgggccaaggaaaggaagctgaccaggctttag

SEQ ID NO: 166685 - DNA, 1263 bp, Artificial Sequence
  derived and/or modified sequence
atggctacaaagactgagctttcaccaactgctcgtgagtccaagaacgcgcaagacatgcaggtggatgagaccctgattccgcgaaaagtcccatcactttgctccgcccgctacggcattgctctggtcttgcacttctgtaacttcactacaatagcccagaatgttattatgaatattacaatggtggcgatggtcaactctactagcccccagtctcagttaaatgactcaagtgaagttttacctgttgactcttttggaggactttctaaggccccgaaatctctgcccgctaaatcctcaatattggggggccagttcgcaatttgggagaagtggggcccaccccaggagagatctaggctgtgtagcattgccctgtccggtatgctgttaggatgtttcacagctatcctgattggaggtttcatctccgagacactgggctggccttttgtattttacatttttggcggagtcggctgtgtctgctgcttgctgtggttcgtcgttatttatgatgacccagtcagttacccttggatctccacctccgaaaaggaatatataatctccagcttgaagcagcaggttggttcatccaagcagccacttcccataaaggctatgctgcgcagtctgccaatctggagcatctgcctgggctgttttagccatcaatggctcgtgtctacaatggtggtgtatatccccacatacattagctctgtgtaccatgtgaacattagagacaatggtctgctgtctgcgttgccatttattgttgcctgggtcataggaatggtcggagggtacttagctgacttcctgctgaccaagaaattccgcctgataactgtccggaagattgccactattctggggtctctccccagtagtgccctgatagtcagcctaccctacctgaattccggctatatcactgctacagcccttctcacactctcatgtggactctcaaccctatgtcagagcggtatctacattaatgtactcgacatagccccccgatacagcagcttcctcatgggagcctctcgcggattctccagtattgctccagtcattgtgcctaccgtctccgggtttctattgtcgcaggatccagagtttggttggcggaacgtgttcttcctcctttttgccgtgaatctactcggattgctgttttatctcatctttggtgaagcagacgtccaggagtgggccaaagagaggaaattaacccgcctttag

SEQ ID NO: 166686 - DNA, 300 bp, Artificial Sequence
  derived and/or modified sequence
tgaactttgtcttgcggattaagcacactctgtcagagcggtatctacatcaatgtgctggacattgcccctaggtatagcagtttcctgatgggtgcctcaagagggttctccagcatcgcgcccgtcattgtacctactgtttccgggttcctgctatctcaggaccctgaatttggatggagaaatgtttttttcttactgttcgctgtgaacctgctcgggctgctgttctacctgatcttcggcgaggctgacgtgcaagagtgggccaaggagcgaaaattgacaaggctatag

SEQ ID NO: 166687 - DNA, 156 bp, Artificial Sequence
  derived and/or modified sequence
tctggattcctactctctcaagatccagaattcggctggaggaacgtcttctttttgcttttcgcagtgaatctgctgggactcctgttctacttaattttcggtgaagctgacgtccaagagtgggccaaagaacggaagcttacaaggctctag

SEQ ID NO: 166688 - DNA, 1263 bp, Artificial Sequence
  derived and/or modified sequence
atggccaccaagacagagctgagccccacagcccgggagagcaagaatgcccaggacatgcaggtggatgagaccctcatccccaggaaggtgcccagcctgtgcagcgcccgctatggaattgccctggtgctgcacttctgcaacttcaccaccatcgcccagaatgtcatcatgaacatcaccatggtggccatggtgaacagcaccagcccccagagccagctgaatgacagcagcgaggtgctgcctgtggacagctttggaggcctgagcaaggcccccaagagcctgcctgccaagagcagcatcctgggcggccagtttgccatctgggagaagtggggccccccccaggagaggagccggctgtgcagcatcgccctgagcggcatgctgctgggctgcttcaccgccatcctgattggaggcttcatcagcgagaccctgggctggccctttgtgttctacatctttggaggagtgggctgtgtgtgctgcctgctgtggtttgtggtgatctatgatgatcctgtgtcctacccctggatcagcaccagcgagaaggagtacatcatcagcagcctgaagcagcaggtgggcagcagcaagcagcccctgcccatcaaggccatgctgcggagcctgcccatctggagcatctgcctgggctgcttcagccaccagtggctggtgtccaccatggtggtgtacatccccacctacatcagctctgtgtaccacgtgaacatccgggacaatggcctgctgagcgccctgcccttcatcgtggcctgggtgattggcatggtgggcggctacctggccgacttcctgctgaccaagaagttccgcctcatcaccgtgaggaagatcgccaccatcctgggcagcctgcccagcagcgccctgattgtgtccctgccctacctgaacagcggctacatcacagccacagccctgctgaccctgagctgtggcctgagcaccctgtgccagagcggcatctacatcaacgtgctggacatcgccccccgctacagcagcttcctgatgggcgccagccggggcttcagcagcatcgcccctgtgattgtgcccaccgtgtctggcttcctgctgagccaggaccctgagtttggctggagaaatgtgttcttcctgctgtttgctgtgaacctgctgggcctgctcttctacctgatctttggagaggctgatgtgcaggagtgggccaaggagaggaagctgacccggctgtag

SEQ ID NO: 166689 - DNA, 300 bp, Artificial Sequence
  derived and/or modified sequence
tgaaccctgagctgtggcctgagcaccctgtgccagagcggcatctacatcaacgtgctggacatcgccccccgctacagcagcttcctgatgggcgccagccggggcttcagcagcatcgcccctgtgattgtgcccaccgtgtctggcttcctgctgagccaggaccctgagtttggctggagaaatgtgttcttcctgctgtttgctgtgaacctgctgggcctgctcttctacctgatctttggagaggctgatgtgcaggagtgggccaaggagaggaagctgacccggctgtag

SEQ ID NO: 166690 - DNA, 156 bp, Artificial Sequence
  derived and/or modified sequence
tctggcttcctgctgagccaggaccctgagtttggctggagaaatgtgttcttcctgctgtttgctgtgaacctgctgggcctgctcttctacctgatctttggagaggctgatgtgcaggagtgggccaaggagaggaagctgacccggctgtag

SEQ ID NO: 166691 - DNA, 1263 bp, Artificial Sequence
  derived and/or modified sequence
atggccaccaagaccgagctgagccccaccgcccgggagagcaagaatgcccaggacatgcaagtggacgaaactctgatcccccgcaaagtcccctcactatgcagcgctagatatgggatagccttggtcctccatttttgcaactttactaccatcgcacagaatgtcataatgaacatcacaatggtggctatggtgaattccacttcaccccagtcccaactgaacgatagttcagaggtactgcccgtcgattcgttcggcggactgtccaaagctcccaaatctttgccagctaaaagcagtatcctcgggggccagtttgcaatttgggaaaagtgggggcctccacaggagagaagccgactatgctcgattgctttaagtggcatgctgttggggtgtttcaccgccatactcattgggggattcattagcgaaacactgggatggcctttcgtgttctatatctttggaggtgtgggctgcgtgtgttgtctgctgtggttcgtggtgatttatgatgaccctgttagctacccatggatatccacgagcgaaaaagagtacattatctcctctctgaaacaacaagttggttcatccaagcagcccctgcctataaaagccatgctgaggagcttgcccatatggagcatatgtctgggctgtttctcacaccaatggttggtctcaacaatggtagtatatatccccacatatatttcatcggtttaccacgtcaatatcagggacaacgggctgcttagcgccctgcccttcattgtcgcctgggttatcggaatggtgggcggctacctggctgactttttgctgacaaaaaaattcaggcttattacagtccgtaaaatcgctactattttgggctccctcccatcttcagccctgattgtctccttaccctatcttaactcaggctacatcacagccactgccctcctgaccctgagctgtggtttatctacattatgtcaatccggcatctacattaatgtgctggacatagcccccaggtattcttcttttctcatgggcgcctctcgtgggttttcctccatcgcccccgtcattgtccctaccgtctcaggatttctactcagtcaggaccccgaattcggttggcggaatgtattttttttactgttcgctgtgaacctgttgggtttgctcttttatctcatcttcggagaggctgacgttcaggagtgggcaaaagagcgaaagctgactcggttgtag

SEQ ID NO: 166692 - DNA, 1263 bp, Artificial Sequence
  derived and/or modified sequence
atggccaccaagaccgagctgagccccaccgcccgggagagcaagaacgcgcaggacatgcaggtggacgagaccctgatccccaggaaagtaccctccctgtgttcagcccggtatggcatcgcactggtcctccacttctgtaattttaccacaattgcacagaacgtcatcatgaacatcacaatggtcgctatggtgaattctacttccccgcaaagtcaactcaacgacagttctgaggtgttgcccgtcgactcattcggagggctgagtaaggcgcccaaatcacttcccgctaaatcctcgattttgggcgggcagttcgctatctgggagaagtgggggcctcctcaagagaggtcccgcctctgttccatcgccctgtcgggtatgttgctcggatgcttcactgccatcttaataggaggttttattagtgagacactgggttggcccttcgtgttttatatttttgggggcgtcggctgtgtgtgctgtctcctctggtttgtggtcatctacgacgacccggtgtcttatccatggatctccactagtgagaaggaatatattatatcatctctgaaacagcaggtgggttcaagcaagcagccactgccgatcaaggccatgcttcggagtctgccaatctggtcaatatgcctgggttgcttttcccaccagtggctggtgtccaccatggtggtgtatattcctacctacatttccagtgtataccatgtcaacataagagataacgggctcctgtccgctctgccctttatcgtcgcatgggtaataggtatggtgggcggatatctggcggatttccttctgaccaaaaaattccgcttaattactgttaggaagatagctacaatcctaggcagcctcccctcttctgcactgatagtttcacttccctacctgaacagcggatacattacagcaaccgccctgctgaccctgtcctgtgggctgtctaccctctgtcagtcaggcatttatattaatgtcctagacatcgccccccggtattcgagctttttaatgggagcatctagaggctttagtagtattgcacccgttattgtgccaaccgtgagcggattcctgttgagccaggaccctgaatttggttggcgcaacgtgttcttcctgctgtttgccgtgaatctattagggctccttttttatctgatattcggggaagcagacgtccaggagtgggctaaagaacggaagctcaccagactctag

SEQ ID NO: 166693 - DNA, 300 bp, Artificial Sequence
  derived and/or modified sequence
tgaaccctgagctgcggcctgagcaccctgtgccagagcggcatctacataaacgtcttagacattgcccctaggtatagttcctttctaatgggtgcaagtagaggattcagctccatcgccccagtgattgtccctaccgtgtctggtttcttgctgagccaggatcctgaatttggatggcgcaatgtatttttcttgctgttcgccgtcaacttattggggctgctgttctaccttatatttggggaagccgatgttcaggagtgggcaaaagaacgcaaactgacaaggttgtag

SEQ ID NO: 166694 - DNA, 156 bp, Artificial Sequence
  derived and/or modified sequence
agcggcttcctgctgagccaggaccccgagttcggctggcggaacgtgtttttcctgttgtttgctgtaaatttgctggggctcctgttttacctcatatttggcgaggccgatgtgcaggagtgggccaaggagaggaagctgaccagactttag

SEQ ID NO: 166695 - DNA, 1263 bp, Artificial Sequence
  derived and/or modified sequence
atggcgaccaaaactgagctgtcccctacggctagagagagcaagaacgcacaggatatgcaggtcgacgagacgcttatcccgagaaaggtaccttctttatgttccgctagatacggcatcgccctggtactgcacttttgcaactttactactatagctcaaaatgtgataatgaacattacaatggtcgccatggttaatagtacttctccacagtctcagttaaacgattcatcagaggttctgcccgtggattcctttggcggtctgagtaaggctccaaaaagcctgcctgccaagtctagtatcttaggcggacagttcgctatttgggagaagtggggaccaccccaggaacgctctcgactgtgctctatcgccctgagcggcatgctgctgggctgtttcaccgctatactgatcggtggcttcatcagtgaaacgctgggctggccattcgtattttatatctttggaggagtgggctgcgtgtgctgcttgctgtggttcgtcgtgatttatgacgatcccgtgagctacccttggatctccacaagtgagaaggaatacatcatttcgtctctaaaacagcaagtgggtagttctaagcagcccctgcccatcaaggccatgcttaggtcactgcccatctggtctatttgtcttgggtgcttttcccaccagtggctcgtttcaaccatggtagtgtacatccccacctacatatctagcgtctatcatgttaacatccgcgacaatggcttgctcagtgcactgccttttattgtagcttgggtgattggcatggtcgggggatatctggctgattttctgctgacaaaaaaatttcgcctaattacggtgcggaagatcgcgaccattctggggagcctgccctcctcagccctgattgtgagtcttccatacttgaatagcggctatatcacagcaacagccctattaaccctttcctgcggtttgagtaccctttgccaatccggaatctatatcaacgtcctggacatcgcccctagatactcgagtttcctgatgggagcttcaagagggttttctagcatcgctcctgttatcgttcctacagtttcaggattcttgcttagccaagacccagagtttggctggagaaacgtttttttcctgctctttgccgttaacctactgggcttactgttttacttaatcttcggcgaggccgatgtgcaagagtgggccaaggaaaggaagctcactagactttag

SEQ ID NO: 166696 - DNA, 1263 bp, Artificial Sequence
  derived and/or modified sequence
atggccaccaagaccgagctcagccctacagctagagagtcaaaaaatgcgcaagacatgcaggttgacgaaacactgattcctaggaaagttcccagtctatgttccgcgaggtatggcattgcactcgtactccacttttgtaatttcacaacaattgctcagaacgtaattatgaacatcaccatggtggcaatggtgaacagcacatccccgcagtcccagcttaatgattcttctgaggtcctaccggtggattcgttcggaggcctctctaaggctccaaagagtctccctgctaaaagtagcatcctagggggacagttcgctatatgggagaagtggggacctccccaggaaagatctcggctttgctccatcgcccttagcggcatgttgctcggctgtttcaccgccatactgatcggcggttttatcagcgaaactctgggttggccttttgtgttctacattttcggtggtgtcgggtgtgtgtgctgcctcctttggttcgtcgtgatttacgacgatcctgtgtcctatccctggatttccacaagtgaaaaggaatacatcattagtagccttaaacagcaggtcgggtctagcaagcaaccactaccaattaaggccatgctgcggtcactgccgatttggtccatttgcctgggctgcttcagtcatcagtggctggtcagcactatggtggtatacatccccacttacatctcttctgtatatcatgtcaatatccgtgacaacggcttactgtccgctctgccttttattgtcgcttgggtgatcggcatggtcgggggttatctggcggattttctgcttacaaaaaaattcagactgatcacggtcagaaagattgccacaattctgggaagtcttccttcctccgctcttatcgtctccctgccctacctcaacagcggctacattactgcaaccgcactgctgacattgtcatgtggcttgagtactctatgccagagtgggatatacatcaatgtgctggacatcgctccaagatactcatctttcctgatgggcgcatcccggggttttagcagcatagcacccgtaattgttcctactgtgagcggattcctgctgtcccaggatcctgagttcggttggcggaatgtgttctttttgctatttgccgtcaacctgctgggcctccttttttacctgatattcggcgaggcagatgtccaggaatgggctaaagagcggaaactaactcggctgtag

SEQ ID NO: 166697 - DNA, 300 bp, Artificial Sequence
  derived and/or modified sequence
tagactctttcatgtggcctcagcaccttatgccagagcggcatctacattaacgtgttggacattgcccctcggtattcatcattcctgatgggcgcttctagggggttctctagcatcgcccctgtcatagtgccaaccgtgagtgggtttctgctgagtcaggatccggagtttggttggcgcaacgtgttcttccttctattcgctgtcaacctgctcggtctgcttttttacctgattttcggagaagccgacgtacaggagtgggctaaggagagaaaactgacccgattatag

SEQ ID NO: 166698 - DNA, 156 bp, Artificial Sequence
  derived and/or modified sequence
tccggttttctgctgagccaggaccctgagttcgggtggagaaacgtttttttcctcctgttcgctgtcaacttactcgggctgcttttttacctgatcttcggagaggccgatgtccaggaatgggccaaggagcgtaaactcaccaggctctag

SEQ ID NO: 166699 - DNA, 1750 bp, Artificial Sequence
  derived and/or modified sequence
gtcggggccagagcgcaggtgtacctggcggccgtgctggagcacctgaccgccgagatcctggagctggctggcaacccggcccgcgacaagaagacccgcatcatcctgcgccacctgtagctggccattcgcaacggcgaggagcttaacaagctgctgggcgaagtcaccatcgcgcagggcggtgtcctgcccaacattcagggcgtgcttctgccccagaagaccaagagccaccacaaggccaagggtgaaaaccattcactaggagaggagaaacacaatggccaccaagacagagttgagtcccacagcaagggagagcaagaacgcacaagatatgcaagtggatgagacactgatccccaggaaagttccaagtttatgttctgctcgctatggaatagccctcgtcttacatttctgcaatttcacaacgatagcacaaaatgtcatcatgaacatcaccatggtagccatggtcaacagcacaagccctcaatcccagctcaatgattcctctgaggtgctgcctgttgactcatttggtggcctaagtaaagccccaaagagtcttcctgcaaagtcctcaatacttgggggtcagtttgcaatttgggaaaagtggggccctccacaagaacgaagcagactctgcagcattgctttatcaggaatgttactgggatgctttactgccatcctcataggtggcttcattagtgaaacccttgggtggccctttgtcttctatatctttggaggtgttggctgtgtctgctgccttctctggtttgttgtgatttatgatgaccccgtttcctatccatggataagcacctcagaaaaagaatacatcatatcctccttgaaacaacaggtcgggtcttctaagcagcctcttcccatcaaagctatgctcagatctctacccatttggtccatatgtttaggctgtttcagccatcaatggttagttagcacaatggttgtatacataccaacttacatcagctctgtgtaccatgttaacatcagagacaatggacttctatctgcccttccttttattgttgcctgggtcataggcatggtgggaggctatctggcagatttccttctaaccaaaaagtttagactcatcactgtgaggaaaattgccacaattttaggaagtctcccctcttcagcactcattgtgtctctgccttacctcaattccggctatatcacagcaactgccttgctgacgctctcttgcggattaagcacattgtgtcagtcagggatttatatcaatgtcttagatattgctccaaggtattccagttttctcatgggagcatcaagaggattttcgagcatagcacctgtcattgtacccactgtcagtggatttcttcttagtcaggaccctgagtttgggtggaggaatgtcttcttcttgctgtttgccgttaacctgttaggactactcttctacctcatatttggagaagcagatgtccaagaatgggctaaagagagaaaactcactcgtttatgaagttatcccaccttggatggaaaagtcattaggcaccgtattgcataaaatagaaggcttccgtgatgaaaataccagtgaaaagattttttttttcctgtggctcttttcaattatgagatcagttcattattttattcagacttttttttgagagaaatgtaagatgaataaaaattcaaataaaatgataactaagaa

SEQ ID NO: 166700 - DNA, 1543 bp, Artificial Sequence
  derived and/or modified sequence
ggaaacgctgggttcaacttgaagcccttccacagacattaagtcggtgaaaaccattcactaggagaggagaaacacaatggccaccaagacagagttgagtcccacagcaagggagagcaagaacgcacaagatatgcaagtggatgagacactgatccccaggaaagttccaagtttatgttctgctcgctatggaatagccctcgtcttacatttctgcaatttcacaacgatagcacaaaatgtcatcatgaacatcaccatggtagccatggtcaacagcacaagccctcaatcccagctcaatgattcctctgaggtgctgcctgttgactcatttggtggcctaagtaaagccccaaagagtcttcctgcaaagtcctcaatacttgggggtcagtttgcaatttgggaaaagtggggccctccacaagaacgaagcagactctgcagcattgctttatcaggaatgttactgggatgctttactgccatcctcataggtggcttcattagtgaaacccttgggtggccctttgtcttctatatctttggaggtgttggctgtgtctgctgccttctctggtttgttgtgatttatgatgaccccgtttcctatccatggataagcacctcagaaaaagaatacatcatatcctccttgaaacaacaggtcgggtcttctaagcagcctcttcccatcaaagctatgctcagatctctacccatttggtccatatgtttaggctgtttcagccatcaatggttagttagcacaatggttgtatacataccaacttacatcagctctgtgtaccatgttaacatcagagacaatggacttctatctgcccttccttttattgttgcctgggtcataggcatggtgggaggctatctggcagatttccttctaaccaaaaagtttagactcatcactgtgaggaaaattgccacaattttaggaagtctcccctcttcagcactcattgtgtctctgccttacctcaattccggctatatcacagcaactgccttgctgacgctctcttgcggattaagcacattgtgtcagtcagggatttatatcaatgtcttagatattgctccaaggtattccagttttctcatgggagcatcaagaggattttcgagcatagcacctgtcattgtacccactgtcagtggatttcttcttagtcaggaccctgagtttgggtggaggaatgtcttcttcttgctgtttgccgttaacctgttaggactactcttctacctcatatttggagaagcagatgtccaagaatgggctaaagagagaaaactcactcgtttatgaagttatcccaccttggatggaaaagtcattaggcaccgtattgcataaaatagaaggcttccgtgatgaaaataccagtgaaaagattttttttttcctgtggctcttttcaattatgagatcagttcattattttattcagacttttttttgagagaaatgtaagatgaataaaaattcaaataaaatgataactaagaa

SEQ ID NO: 166701 - DNA, 599 bp, Artificial Sequence
  derived and/or modified sequence
tgacgctctcttgcggattaagcacattgtgtcagtcagggatttatatcaatgtcttagatattgctccaaggtattccagttttctcatgggagcatcaagaggattttcgagcatagcacctgtcattgtacccactgtcagtggatttcttcttagtcaggaccctgagtttgggtggaggaatgtcttcttcttgctgtttgccgttaacctgttaggactactcttctacctcatatttggagaagcagatgtccaagaatgggctaaagagagaaaactcactcgtttatgaagaaaatgccagaaattgcccagcatgaaacaggacagtacaaacattctgcaacacacagaagaggaccagcagaatctggacttttgaaaaagaaaaaatctaactgaataacaacatcaaagtctcctgggcaaaggggttaaagatttacaacatttctttagaggaaaaaaataactggttgaatttacagagcatctgctatgtgccaaacatttaatgagcactttaaaagcatgataaaaattaaaaaaaaacttgttaagcatgaaataaattacctataatgcaaaatca

SEQ ID NO: 166702 - DNA, 661 bp, Artificial Sequence
  derived and/or modified sequence
agtggatttcttcttagtcaggaccctgagtttgggtggaggaatgtcttcttcttgctgtttgccgttaacctgttaggactactcttctacctcatatttggagaagcagatgtccaagaatgggctaaagagagaaaactcactcgtttatgaaggcagtaccaaccttggacagggatggggtaatgattcacatttatggggggaaaaattatctttgtgtgactccagtcacagtttgcttctatcaaatcttcagtctccaatgaagtttaaatattcctgggaatcctaatgaaggactgtttttatgagttttgtgttatcattgtaatgtcaagattgtgtgtcaagtcaatatgaagtttaaaaccatttccaatatgttcacttgatttactcttttccattatttggatatcccattacacaggcacagtggatgatttaagtattccaggaagctgtttctataccaaagtacctagcaataatgtaacaattccccttatcaacccaaaccacataaatgtatcccaaattttggtccaatgaaatgcattcccactgcagccttcccttcaccatatcaaaaaatgccaagagcaactccatagtactatggtacccaataggatggagatagtaactttaaaca

SEQ ID NO: 166703 - DNA, 1263 bp, Artificial Sequence
  derived and/or modified sequence
atggccaccaagaccgagctgagccccaccgccagagagagcaagaacgcccaggacatgcaggtggacgagaccctgatccccagaaaggtgcccagcctgtgcagcgccagatacggcatcgccctggtgctgcacttctgcaacttcaccaccatcgcccagaacgtgatcatgaacatcaccatggtggccatggtgaacagcaccagcccccagagccagctgaacgacagcagcgaggtgctgcccgtggacagcttcggcggcctgagcaaggcccccaagagcctgcccgccaagagcagcatcctgggcggccagttcgccatctgggagaagtggggccccccccaggagagaagcagactgtgcagcatcgccctgagcggcatgctgctgggctgcttcaccgccatcctgatcggcggcttcatcagcgagaccctgggctggcccttcgtgttctacatcttcggcggcgtgggctgcgtgtgctgcctgctgtggttcgtggtgatctacgacgaccccgtgagctacccctggatcagcaccagcgagaaggagtacatcatcagcagcctgaagcagcaggtgggcagcagcaagcagcccctgcccatcaaggccatgctgagaagcctgcccatctggagcatctgcctgggctgcttcagccaccagtggctggtgagcaccatggtggtgtacatccccacctacatcagcagcgtgtaccacgtgaacatcagagacaacggcctgctgagcgccctgcccttcatcgtggcctgggtgatcggcatggtgggcggctacctggccgacttcctgctgaccaagaagttcagactgatcaccgtgagaaagatcgccaccatcctgggcagcctgcccagcagcgccctgatcgtgagcctgccctacctgaacagcggctacatcaccgccaccgccctgctgaccctgagctgcggcctgagcaccctgtgccagagcggcatctacatcaacgtgctggacatcgcccccagatacagcagcttcctgatgggcgccagcagaggcttcagcagcatcgcccccgtgatcgtgcccaccgtgagcggcttcctgctgagccaggaccccgagttcggctggagaaacgtgttcttcctgctgttcgccgtgaacctgctgggcctgctgttctacctgatcttcggcgaggccgacgtgcaggagtgggccaaggagagaaagctgaccagactgtag

SEQ ID NO: 166704 - DNA, 300 bp, Artificial Sequence
  derived and/or modified sequence
tgaaccctgagctgcggcctgagcaccctgtgccagagcggcatctacatcaacgtgctggacatcgcccccagatacagcagcttcctgatgggcgccagcagaggcttcagcagcatcgcccccgtgatcgtgcccaccgtgagcggcttcctgctgagccaggaccccgagttcggctggagaaacgtgttcttcctgctgttcgccgtgaacctgctgggcctgctgttctacctgatcttcggcgaggccgacgtgcaggagtgggccaaggagagaaagctgaccagactgtag

SEQ ID NO: 166705 - DNA, 156 bp, Artificial Sequence
  derived and/or modified sequence
agcggcttcctgctgagccaggaccccgagttcggctggagaaacgtgttcttcctgctgttcgccgtgaacctgctgggcctgctgttctacctgatcttcggcgaggccgacgtgcaggagtgggccaaggagagaaagctgaccagactgtag

SEQ ID NO: 166706 - protein, 1575 aa, Artificial Sequence
  derived and/or modified sequence
MPHEELPSLQRPRYGSIVDDERLSAEEMDERRRQNIAYEYLCHLEEAKRWMEVCLVEELPPTTELEEGLRNGVYLAKLAKFFAPKMVSEKKIYDVEQTRYKKSGLHFRHTDNTVQWLRAMESIGLPKIFYPETTDVYDRKNIPRMIYCIHALSLYLFKLGIAPQIQDLLGKVDFTEEEISNMRKELEKYGIQMPSFSKIGGILANELSVDEAALHAAVIAINEAVEKGIAEQTVVTLRNPNAVLTLVDDNLAPEYQKELWDAKKKKEENARLKNSCISEEERDAYEELLTQAEIQGNINKVNRQAAVDHINAVIPEGDPENTLLALKKPEAQLPAVYPFAAAMYQNELFNLQKQNTMNYLAHEELLIAVEMLSAVALLNQALESNDLVSVQNQLRSPAIGLNNLDKAYVERYANTLLSVKLEVLSQGQDNLSWNEIQNCIDMVNAQIQEENDRVVAVGYINEAIDEGNPLRTLETLLLPTANISDVDPAHAQHYQDVLYHAKSQKLGDSESVSKVLWLDEIQQAVDDANVDKDRAKQWVTLVVDVNQCLEGKKSSDILSVLKSSTSNANDIIPECADKYYDALVKAKELKSERVSSDGSWLKLNLHKKYDYYYNTDSKESSWVTPESCLYKESWLTGKEIEDIIEEVTVGYIRENIWSASEELLLRFQATSSGPILREEFEARKSFLHEQEENVVKIQAFWKGYKQRKEYMHRRQTFIDNTDSIVKIQSWFRMATARKSYLSRLQYFRDHNNEIVKIQSLLRANKARDDYKTLVGSENPPLTVIRKFVYLLDQSDLDFQEELEVARLREEVVTKIRANQQLEKDLNLMDIKIGLLVKNRITLEDVISHSKKLNKKKGGEMEILNNTDNQGIKSLSKERRKTLETYQQLFYLLQTNPLYLAKLIFQMPQNKSTKFMDTVIFTLYNYASNQREEYLLLKLFKTALEEEIKSKVDQVQDIVTGNPTVIKMVVSFNRGARGQNTLRQLLAPVVKEIIDDKSLIINTNPVEVYKAWVNQLETQTGEASKLPYDVTTEQALTYPEVKNKLEASIENLRRVTDKVLNSIISSLDLLPYGLRYIAKVLKNSIHEKFPDATEDELLKIVGNLLYYRYMNPAIVAPDGFDIIDMTAGGQINSDQRRNLGSVAKVLQHAASNKLFEGENEHLSSMNNYLSETYQEFRKYFKEACNVPEPEEKFNMDKYTDLVTVSKPVIYISIEEIISTHSLLLEHQDAIAPEKNDLLSELLGSLGEVPTVESFLGEGAVDPNDPNKANTLSQLSKTEISLVLTSKYDIEDGEAIDSRSLMIKTKKLIIDVIRNQPGNTLTEILETPATAQQEVDHATDMVSRAMIDSRTPEEMKHSQSMIEDAQLPLEQKKRKIQRNLRTLEQTGHVSSENKYQDILNEIAKDIRNQRIYRKLRKAELAKLQQTLNALNKKAAFYEEQINYYDTYIKTCLDNLKRKNTRRSIKLDGKGEPKGAKRAKPVKYTAAKLHEKGVLLDIDDLQTNQFKNVTFDIIATEDVGIFDVRSKFLGVEMEKVQLNIQDLLQMQYEGVAVMKMFDKVKVNVNLLIYLLNKKFYGK

SEQ ID NO: 166707 - DNA, 4728 bp, Artificial Sequence
  derived and/or modified sequence
atgccccacgaggagctcccgagccttcagcgcccgcgctatggttccatcgtggacgacgagagattgagcgcagaagagatggacgagcgtcgtagacaaaatatcgcatacgagtacctctgtcacctggaggaggccaaacggtggatggaagtatgcttggtagaagaactgccccccacaacagaactggaggagggacttaggaacggcgtctatttagctaaactcgccaagtttttcgcaccaaaaatggtgtccgagaagaagatctatgacgtcgagcagacacgctacaagaagtcgggtctgcactttcggcatactgacaacaccgttcaatggctccgagccatggaaagcatcgggcttcccaagatattttatccagaaacgacagacgtctatgatagaaaaaatatccctcgtatgatatattgtatccacgccctgtcgctctatttatttaagctcggtatcgctccccaaatccaagatctgctcggcaaggtggattttaccgaagaggaaatcagcaatatgcgcaaggaattggaaaagtatggaattcagatgccctcattctccaaaatcggcggcattctcgccaacgaacttagcgtcgatgaagccgcacttcacgccgcagttattgctatcaacgaggccgtagagaaaggtattgccgagcagactgtggttactctcagaaacccaaatgccgtcttgaccctggtggatgataacctggcaccagagtatcagaaggaactatgggacgccaagaaaaagaaagaggaaaacgcacgacttaagaactcctgcatttccgaggaggaaagagatgcttacgaagaactgctgacccaggccgagatccagggaaatattaataaggtgaatagacaagccgccgttgatcatataaatgctgtgattcctgaaggcgaccccgaaaacaccctccttgcactgaagaagccggaggcccagttgcccgcagtctatcccttcgcggccgcaatgtaccagaacgaactgtttaatctccagaagcagaacaccatgaattacctcgcacacgaggaactgctcatcgcagtcgagatgctatctgcagtagcacttcttaaccaagcattagaatctaatgacttggtaagtgtgcagaaccaactgagatctcccgcaataggcctgaacaacctggataaagcgtacgtggaaagatatgccaatacgctgctttcagtgaagctcgaggtgctgagccagggacaggataacctgagttggaatgaaatacaaaattgtattgacatggtcaatgcgcagatacaagaagaaaatgatagggtggtggccgttgggtacatcaatgaggcaatcgatgaagggaaccccctgaggacactcgagacactgctgttgccgaccgccaacatcagcgatgtcgatcctgcccatgcacagcattaccaggacgtgctctatcatgccaagtctcagaaacttggcgattccgaatctgtgagcaaggttctgtggttggacgaaattcaacaagcagtagacgacgcgaacgtagacaaggaccgtgctaaacagtgggtcaccttagtggtcgacgtcaatcagtgtctggagggcaagaagtcatcggacattctgagtgtgctgaagtccagtaccagcaatgcaaatgacatcatccccgagtgcgcagacaaatactacgatgcccttgttaaggccaaggaattgaagtctgagagagtgtcctctgacgggtcctggctgaagcttaatctgcacaaaaaatacgattattactataatacagattctaaggagtcatcctgggtgacccctgagagctgcctttacaaagagagctggctgactgggaaagagatcgaggacatcatagaggaagttacagtcggctatattcgggagaacatctggtcagcttcagaggaacttttgctgcgttttcaggctacaagctccgggcccattctgcgggaggagtttgaagcaagaaaatccttcttgcatgaacaagaggaaaacgtggtcaaaatccaggccttttggaaaggatataagcagagaaaggagtatatgcacagaagacagaccttcatcgataacacggactcaatcgtgaaaattcagtcttggttccgaatggctaccgccaggaagtcctacctctccagacttcagtactttcgagatcacaataacgaaattgtgaagatccagtctcttctccgtgcgaacaaagccagagacgactataagaccttggtggggagtgagaaccccccacttaccgtgattcgcaagttcgtttacctgctggatcagagtgacctggactttcaggaagagctggaagtcgcccgcctgagggaggaagtggtgacaaagatccgcgccaatcagcagctggaaaaggacttgaacctgatggacataaagatagggctgctggtaaaaaacagaatcacactcgaagatgttatcagccacagtaaaaaactgaataagaaaaaaggaggcgaaatggagatccttaataacaccgacaaccaaggcatcaagtcgctgtctaaggagcgtcgcaagacgttggagacataccagcagctattttacttgttgcagaccaatcccttatatctcgctaaactcatcttccagatgcctcagaataagagcacgaagtttatggatactgtgatatttacactgtacaactatgcgtccaaccaaagagaggagtatctcttgctcaagctgttcaagacagctttggaagaggagatcaaatcaaaagtggatcaagttcaggacatcgttactgggaacccaacagtcatcaagatggtggtctcattcaatcgcggagctcggggacagaacactttaagacagcttcttgcccctgtagtgaaagagatcatcgatgataagtctctgattattaacaccaatcctgtggaggtgtacaaggcatgggtgaaccagctggaaacgcagaccggagaggcaagcaaattaccatatgacgttacaactgaacaggcactgacgtaccctgaggttaaaaacaaactcgaagccagtattgaaaaccttcgaagagtcactgacaaagtcctaaacagtatcatctcatctcttgatctgctcccttatggactgagatatatagctaaagttcttaagaatagtattcacgaaaagtttcccgatgcgaccgaagatgagctcctgaaaattgtggggaacctcctctattatcggtacatgaaccctgccatcgttgccccggatgggtttgacattatagacatgaccgctggcggtcaaatcaactccgaccagcggcgaaatctgggatccgtggctaaggttctacaacatgccgcctccaataagttgtttgagggcgaaaatgaacacctgtctagtatgaacaattatctaagcgagacttatcaagaatttcggaaatatttcaaagaagcctgtaatgtgcccgagcctgaggagaaatttaatatggataagtataccgatttggtaaccgttagtaaaccagtgatctatatctcaatagaggagatcatcagcacccacagcttgcttttggaacaccaggacgcaatagctcccgaaaagaatgacttgctgtctgagctactcgggtcacttggggaagtccccacagttgagagtttcctaggggagggtgccgtggacccgaatgatccaaataaggccaataccctgagccaactcagtaagaccgagatatctctcgttctaacctctaagtacgacatcgaggatggcgaagccatcgactcacgaagtctcatgataaagacaaaaaagctgatcatagacgtgatccgcaatcagccaggaaatacactcacagaaatcctggagactccggccaccgcgcaacaggaggtggatcatgccactgacatggtgtcccgcgcaatgatcgactcccgcacaccggaagaaatgaaacactcccagtcgatgatcgaggatgcacaacttcctctggagcagaagaaaagaaaaatacaaaggaacctgcggactttggaacagaccggccacgtttcttcagagaataaataccaggatattctgaacgagattgcgaaagacatccggaatcagcgcatttacagaaaactccgcaaggccgaactagcaaaattacagcagacgcttaacgcccttaataagaaagctgcattctatgaagaacagatcaattactatgacacctatataaaaacctgcttggacaatttgaaacgcaagaacacaagacggtcaattaaactggatggcaaaggcgagccaaagggagctaaacgggctaagcccgtgaagtatactgcggctaaattgcatgaaaagggggtcttgttggacatcgacgacctgcaaactaatcagttcaagaatgttacgtttgacattattgctaccgaggatgtaggaatcttcgatgtcagatctaaattcctaggcgtggaaatggaaaaagtgcagcttaatattcaggacctcctccagatgcaatacgaaggcgttgctgtgatgaagatgtttgataaggtaaaggtgaacgttaatctgctaatctatctgcttaataaaaagttttatgggaagtag

SEQ ID NO: 166708 - DNA, 5844 bp, Artificial Sequence
  derived and/or modified sequence
cgcggtgaataacggggcctggctggaggagaaaggaaacctgctgcgggaggcggcggcgaccggccagggagcgagggaggagagttcacttttacttcagtgtcagcgcgcggcggccgtggctggctctggcgagagagcaccgagggagtgggtcgcagatcttcgggcggctaggggaaatcggcgagaggcgggatccgagcgcgccggcggggcgcagagcccgcgagcctggccagcgagggtagccgcggggggcgcgccccgggcgggcccccggagacgcgcaggatgccacacgaagagctgccgtcgctgcagagaccccgctatggctctattgtggacgatgaaaggctctctgcagaggagatggatgagaggaggcggcagaacattgcttatgaatatctgtgccacttagaggaagccaaaaggtggatggaagtttgcttagttgaagaattgccaccaaccactgaattggaagaagggctccggaatggagtttaccttgcaaagttagccaagttctttgccccgaaaatggtatcagagaaaaagatctatgatgtggaacaaacacgttataagaagtctggccttcattttcgacacacagataataccgtccagtggttaagagcgatggagtctattggtctacccaagatattttatccagaaacaacagatgtctatgatcggaaaaacataccaagaatgatatattgcattcacgcactgagtttgtatctgttcaaactaggaatagcaccccagatccaggatttgttgggcaaagtagacttcacagaggaggaaatcagtaatatgagaaaagaacttgagaaatatggaatacagatgccatctttcagcaaaataggtggtattctggccaatgaactgtccgtggatgaagctgcattacatgctgcagttatagccattaatgaagcagttgaaaaaggaatagcagagcaaaccgttgtaacactaagaaacccaaatgcggttttaactttagtggatgacaaccttgcaccagaatatcagaaagaactctgggatgccaaaaagaaaaaagaggaaaatgcaagactgaagaatagctgtatttcagaagaagaaagagatgcttatgaagaactgctgacacaagcagaaatccaaggcaatattaataaagtcaacaggcaggctgcagtggaccatatcaatgctgtcattccggaaggtgaccccgagaatacgctgcttgcactgaagaaaccagaggcccagctgcctgctgtttatccctttgctgctgccatgtatcagaacgaacttttcaacctccagaaacagaacaccatgaactacttggcccacgaggagcttttgattgctgtggaaatgttgtctgctgttgctttactaaaccaggccttggaaagcaacgatcttgtgtctgtgcagaatcaactcagaagccccgcaataggcttaaacaatctggacaaggcatatgtggaacgttatgcaaacacactactctctgttaaactagaagttttatcccaagggcaagataacttaagctggaatgaaattcagaattgtattgatatggttaatgctcaaattcaagaagaaaatgaccgagttgtagctgtagggtacatcaatgaagctattgatgaagggaatcctttgaggactttagaaactttgctcctacctactgcgaatattagtgatgtggacccagcccatgcccagcactaccaggatgttttataccatgctaaatcacagaaactcggagactctgagagtgtttccaaagtgctttggctggatgagatacagcaagccgtcgatgatgccaacgtggacaaggacagagcaaaacaatgggttactctggtggttgatgttaatcagtgtttggaaggaaaaaaatcaagtgatattttgtctgtattgaagtcttccacttctaatgcaaatgacataatcccggagtgtgctgacaaatactatgatgcccttgtgaaggcaaaagagctcaaatctgaaagagtgtctagtgacggttcatggctcaaactcaacctgcacaaaaaatatgactactattacaacactgattcaaaagagagttcctgggtcacacctgaatcatgcttgtataaagaatcatggctcacaggaaaagaaatcgaggacattattgaggaagtcacagtaggttacattcgtgagaatatatggtctgcttcagaagagttgcttcttcgctttcaagccacaagctcaggacccatccttagggaagagtttgaagctagaaaatcatttttgcatgaacaagaagagaatgtggtcaaaatacaggctttttggaaaggatataaacaacggaaggagtatatgcacaggcggcaaacgttcattgataatactgattctattgtgaagattcagtcctggttccgaatggcaactgcaagaaagagctatctttcaagactacagtatttcagagatcataataatgaaattgtgaaaatacagtcactgttgagagcgaacaaagctagagatgactacaaaacattggttggctctgaaaacccaccattaacagtaattcgcaaatttgtatacctgctggaccaaagtgatttggatttccaggaggaactagaggttgcacgattaagggaagaagtagtgaccaagatcagggccaatcaacagctggaaaaagacctgaacctgatggacatcaagattggactgctggtgaagaacaggatcacactagaggatgtaatttcacatagtaaaaagctgaacaagaaaaaaggaggagaaatggaaatactgaataacaccgacaaccaaggaataaaaagtttgagtaaggagaggagaaaaacactagaaacatatcagcagctgttttaccttttacagaccaaccctttatacttggctaagctgattttccagatgccacagaacaagtccactaaatttatggatactgttattttcacactatataattatgcctctaatcagcgagaagaatatctacttctcaagctttttaaaactgctctggaggaagaaataaaatcaaaagtggaccaggtacaggacatagttactggtaaccctacagtcatcaagatggtcgtcagcttcaatagaggtgcccggggacagaacaccctgcgccaactcctggctccagtggtaaaagagatcatcgacgacaagtcgctgattatcaacacaaaccctgtagaggtgtacaaggcttgggtgaaccaactagaaacacagactggagaggccagcaagttgccttatgatgtgaccacagaacaagctctaacatacccagaagtgaaaaataaactggaggcttccattgagaacctgagaagggtcaccgacaaagtcctgaattctatcatttcttcccttgatctactgccttatggattgaggtatatagccaaagtactgaagaattcgatccatgagaaattccccgatgcaacagaagatgagctattaaagattgttggaaacctcctgtactatcggtacatgaatccagccattgtagctccagatggctttgatatcatcgacatgacagctggaggtcagataaattctgaccaaaggagaaacttaggatcagtggccaaggttcttcagcacgcagcctccaacaagctgtttgaaggagaaaatgagcatctctcatctatgaacaattatttatcagagacgtatcaggaattcaggaaatatttcaaagaagcatgtaatgtccctgagccagaagagaagtttaatatggacaaatacacagacctggtgacagtcagcaaaccagtcatttatatttcaattgaagaaatcatcagcacacactcactcctgttggaacaccaggatgcaattgcccctgagaaaaatgacttactgagtgaattgctggggtcgctgggagaggtgccaaccgtggaatcttttcttggggaaggagcagttgaccccaatgaccctaacaaggcaaatacactaagtcagctttcaaagaccgagatttctcttgtcttgacaagcaaatatgacatagaggacggtgaagctatagatagccgaagcctcatgataaagaccaagaagctgataattgatgtgatccggaaccagccagggaacacattgacagaaatcttagagacaccagcaactgcgcaacaggaggtagaccatgccacggacatggtgagccgtgcaatgatagattccaggactccagaagaaatgaagcatagccaatctatgattgaagatgcacagctgcctcttgagcagaagaagaggaaaatccagaggaatcttcggacgttggaacagactggacacgtgtcatccgaaaataaataccaagacattctcaatgagattgccaaggatattcgaaatcaaagaatctatcgtaagcttcgaaaagctgaattggcaaaacttcagcagaccctgaatgcacttaacaagaaggcagcattttatgaagagcaaatcaattattatgacacctacataaagacttgtttagacaacttaaaaagaaaaaatactcggagatcaattaaactagatggaaaaggagaacccaaaggggcgaagagagcgaagccagtgaagtacactgcagcaaagctgcatgagaaaggtgtcctgctagatatagatgatcttcaaacaaaccagtttaagaatgttacatttgatatcatagctactgaagatgtaggcattttcgatgtaagatcaaaattccttggtgttgagatggaaaaggtgcaactcaatattcaggatttacttcagatgcaatatgaaggagtagctgtaatgaaaatgtttgataaggttaaagtgaatgtaaaccttctcatatacctgctgaacaagaagttctatggaaagtgaagtgcctacagaaatttcttggattctgtatcatctggattaggaaatgaatttgtttaatatttttgtttttaaacatgattgaaatcactgcttataaatgtgtgatttttttaaaacgaccaaaactgttctgaagaatgtacccaggtgcctttttgctaatttgatactataatagaatgagacataaaatgaattaatggaaacatatccacactgtactgtgatataggtactctgatttaaaactttggacatcctgtgatctgttttaaagttggggggtgggaaatttagctgactagggacaaacatgtaaacctattttcctatgaaaaaaattttaaatgtcccacttgaataacgtaattcttcatagtttttttaatctatggataaatggaaacctaattatttgtaatgaattatttagacagttctaagccctgtcttctgggagttatcaattttaaagagaacttttgtgcaattcaaatgaagtttttataagtaattgaaaatgacaacacaataacactttctgtataaaagtatatattttatgtgatttattcctactaaatgaaagtgcactactgcctcatgtaaagactcttgcacgcagagcctttaagtgactaaggaacaacatagatagtgagcatagtccccacctccacccctcacaatttatttgaatacttcaattgtgcctctcaattttttgtaatgctaaaaaatcagtatctagatggtttttaaatgtattctctggaaattgttttatgtaaaataaatgttacttaattccattaa

SEQ ID NO: 166709 - DNA, 4728 bp, Artificial Sequence
  derived and/or modified sequence
atgcctcatgaggagctgcccagcctgcagaggcccaggtatggcagcatcgtggatgatgagcggctgtctgctgaggagatggatgaaagaagacggcagaacatcgcctatgagtacctgtgccacctggaggaggccaagcgctggatggaggtgtgcctggtggaggagctgccccccaccacagagctggaggagggcctgagaaatggagtgtacctggccaagctggccaagttctttgcccccaagatggtgtctgagaagaagatctatgatgtggagcagacccgctacaagaagagcggcctgcacttccgccacacagacaacacagtgcagtggctgcgggccatggagagcatcggcctgcccaagatcttctacccagagaccacagatgtgtatgacaggaagaacatccccaggatgatctactgcatccacgccctgagcctgtacctgttcaagctgggcatcgccccccagatccaggacctgctgggcaaggtggacttcacagaggaggagatcagcaacatgaggaaggagctggagaagtatggcatccagatgcccagcttcagcaagattggaggcatcctggccaatgagctgtctgtggatgaggccgccctgcacgccgctgtgattgccatcaatgaggccgtggagaagggcattgctgagcagacagtggtgaccctgaggaaccccaatgctgtgctgaccctggtggatgacaacctggcccctgagtaccagaaggagctgtgggatgccaagaagaagaaggaggagaatgcccggctgaagaacagctgcatcagcgaggaggagagagatgcctatgaggagctgctgacccaggccgagatccagggcaacatcaacaaggtgaaccggcaggccgctgtggaccacatcaatgctgtgattcctgagggggaccctgagaacaccctgctggccctgaagaagccagaggcccagctgcctgctgtgtacccctttgctgctgccatgtaccagaatgagctgttcaacctgcagaagcagaacaccatgaactacctggcccacgaggagctgctgattgctgtggagatgctgtctgctgtggccctgctgaaccaggccctggagagcaatgacctggtgtctgtgcagaaccagctgcggagccctgccatcggcctgaacaacctggacaaggcctacgtggagagatatgccaacaccctgctgtctgtgaagctggaggtgctgagccagggccaggacaacctgtcctggaatgagatccagaactgcatcgacatggtgaatgcccagatccaggaggagaatgacagagtggtggccgtgggctacatcaatgaggccattgatgagggcaaccccctgcggaccctggagaccctgctgctgcccacagccaacatcagtgatgtggaccctgcccacgcccagcactaccaggatgtgctgtaccacgccaagagccagaagctgggggacagcgagagcgtgtccaaggtgctgtggctggatgagatccagcaggccgtggatgatgccaacgtggacaaggaccgggccaagcagtgggtgaccctggtggtggatgtgaaccagtgcctggagggcaagaagagcagtgacatcctgtctgtgctgaagagcagcaccagcaatgccaatgacatcatcccagaatgtgccgacaagtactatgatgccctggtgaaggccaaggagctgaagtctgagcgggtgtccagtgatggctcctggctgaagctgaacctgcacaagaagtatgactactactacaacacagacagcaaggagagctcctgggtgaccccagagagctgcctgtacaaggagagctggctgaccgggaaggagattgaggacatcatcgaggaggtgacagtgggctacatccgggagaacatctggagcgccagcgaggagctgctgctgcgcttccaggccaccagcagcggccccatcctgcgggaggagtttgaggccaggaagagcttcctgcacgagcaggaggagaatgtggtgaagatccaggccttctggaagggctacaagcagaggaaggagtacatgcaccggcggcagaccttcatcgacaacacagacagcatcgtgaagatccagagctggttcaggatggccacagccaggaagagctacctgagccggctgcagtacttccgggaccacaacaatgagatcgtgaagatccagagcctgctgcgggccaacaaggccagagatgactacaagaccctggtgggctctgaaaatccacccctgaccgtcatcaggaagtttgtgtacctgctggaccagagcgacctggacttccaggaggagctggaggtggcccggctgcgggaggaggtggtgaccaagatccgggccaaccagcagctggagaaggacctgaacctgatggacatcaagattggcctgctggtgaagaaccgcatcaccctggaggatgtgatcagccacagcaagaagctgaacaagaagaagggcggggagatggagatcctgaacaacacagacaaccagggcatcaagagcctgagcaaggagaggaggaagaccctggagacctaccagcagctgttctacctgctgcagaccaaccccctgtacctggccaagctgatcttccagatgccccagaacaagagcaccaagttcatggacaccgtcatcttcaccctgtacaactatgccagcaaccagcgggaggagtacctgctgctgaagctgttcaagacagccctggaggaggagatcaagagcaaggtggaccaggtgcaggacatcgtgactggaaaccccaccgtcatcaagatggtggtgtccttcaacagaggagcccggggccagaacaccctgcggcagctgctggcccctgtggtgaaggagatcattgatgacaagagcctcatcatcaacaccaaccctgtggaggtgtacaaggcctgggtgaaccagctggagacccagacaggagaggccagcaagctgccctatgatgtgaccacagagcaggccctgacctacccagaggtgaagaacaagctggaggccagcattgagaacctgcggcgggtgacagacaaggtgctgaacagcatcatcagcagcctggacctgctgccctacggcctgcgctacatcgccaaggtgctgaagaacagcatccacgagaagttcccagatgccacagaagatgagctgctgaagatcgtgggcaacctgctgtactaccgctacatgaacccagccatcgtggccccagatggctttgacatcatcgacatgacagctgggggccagatcaacagcgaccagaggaggaacctgggctctgtggccaaggtgctgcagcacgccgccagcaacaagctgtttgaaggagaaaatgagcacctgagctccatgaacaactacctgtctgagacctaccaggagttcaggaagtacttcaaggaggcctgcaatgtgcctgagcctgaggagaagttcaacatggacaagtacacagacctggtgacagtgtccaagcctgtgatctacatcagcattgaggagatcatcagcacccacagcctgctgctggagcaccaggatgccatcgcccctgagaagaatgacctgctgtctgagctgctgggcagcctgggggaggtgcccaccgtggagagcttcctgggggagggcgctgtggaccccaatgaccccaacaaggccaacaccctgagccagctgagcaagacagagatcagcctggtgctgaccagcaaatatgacattgaagatggagaggccatcgacagccgcagcctgatgatcaagaccaagaagctgatcattgatgtgatccggaaccagcccggcaacaccctgacagagatcctggagaccccagccacagcccagcaggaggtggaccacgccacagacatggtgtcccgggccatgattgacagcaggaccccagaggagatgaagcacagccagagcatgattgaagatgcccagctgcccctggagcagaagaagaggaagatccagaggaacctgcggaccctggagcagacaggccacgtgtcctctgagaacaagtaccaggacatcctgaatgagatcgccaaggacatccggaaccagaggatctacaggaagctgaggaaggccgagctggccaagctgcagcagaccctgaatgccctgaacaagaaggccgccttctatgaggagcagatcaactactatgacacctacatcaagacctgcctggacaacctgaagaggaagaacaccaggaggagcatcaagctggatggaaaaggagagcccaagggggccaagagggccaagcctgtgaagtacacagctgccaagctgcacgagaagggcgtgctgctggacattgatgacctgcagaccaaccagttcaagaatgtgacctttgacatcatcgccacagaagatgtgggcatctttgatgtgcgcagcaagttcctgggcgtggagatggagaaggtgcagctgaacatccaggacctgctgcagatgcagtatgaaggagtggccgtgatgaagatgtttgacaaggtgaaggtgaatgtgaacctgctgatctacctgctgaacaagaagttctacggcaagtag

SEQ ID NO: 166710 - DNA, 4728 bp, Artificial Sequence
  derived and/or modified sequence
atgccccacgaggagctgcccagcctgcagcggccccggtacggctccattgtggacgatgagagactgtccgctgaagagatggatgaacgtcggcggcaaaacatcgcatatgaatacttgtgccacctggaagaagcgaagaggtggatggaagtatgcttagtggaagaactccctccaaccacggagctggaggagggcctgaggaatggagtgtatcttgccaagctggccaagtttttcgcacccaagatggtgagtgagaagaagatctatgatgttgagcagaccagatataagaaatccggccttcacttccgccacaccgacaatacagtccagtggctgagagctatggaaagcattgggcttccaaaaatcttctatcctgaaaccacagacgtctatgaccgaaaaaatatcccgcgtatgatttattgtatccacgccctttctttgtaccttttcaagctgggtatcgcccctcagattcaggacttactcggtaaggttgattttaccgaggaggaaatcagtaacatgaggaaggaacttgagaagtacgggattcagatgccttctttttctaagataggcgggatactagcaaatgagctgtctgtggatgaggctgccctgcacgcagcagtcatagccattaatgaagctgtagaaaaaggtatagctgagcagaccgtggtaactctgagaaacccaaacgcagtcctgaccctggtcgatgacaacctggcccctgaataccaaaaggaactgtgggatgcaaagaaaaagaaggaggagaacgcgcgtttaaaaaattcttgtatttccgaggaggaaagggacgcctatgaggagctgctaactcaggcggagatccaaggcaacatcaacaaggtgaacaggcaggcagcggttgaccacataaatgcagttattcccgaaggagacccagaaaatactctgctcgctctgaaaaagcctgaagcgcagctaccagcggtgtacccttttgccgccgctatgtatcagaacgagctcttcaacttgcagaagcagaacacgatgaattacttggcacacgaagagctgctgatagctgtggaaatgctatcagcggtcgctctcctgaaccaagcactggagagcaatgatctcgtgtccgtccagaatcagctgcgctcccccgctatcggtctgaataatctagacaaggcctatgttgaaagatacgctaatacactcctttctgtaaaactggaggtgctatcccaaggccaagataacctgagctggaacgaaatccagaattgtattgatatggttaatgctcagatccaggaggaaaacgatagggttgttgctgtggggtacattaacgaggctattgatgaaggcaatccgctcagaacccttgaaactcttcttctgcctactgcgaacatctctgatgtggatcccgcacacgctcagcactatcaggacgtcctttaccatgcgaagagtcagaaacttggggactccgagagcgtgtcaaaagtcctgtggctagatgaaatccagcaagccgtggatgacgctaatgttgataaggaccgggctaaacagtgggttaccctcgtcgttgatgttaatcaatgccttgaagggaaaaagagctctgatattctgagtgtcctgaagagtagcacatccaacgctaatgacataattcctgaatgtgcggataagtactacgacgccctcgttaaagctaaggagttaaagtctgaacgggtttcatccgatggctcgtggctcaagttgaacctccacaaaaagtatgattactactataatacggacagtaaagaaagctcctgggtcactccggagagttgcctgtataaagaatcttggctgacaggcaaggagattgaggatataattgaggaggtgaccgtgggttacatacgcgagaatatctggagcgcttctgaagagttgcttctgcgcttccaggccacatctagcggtccaattctgcgcgaggagtttgaggcgcgaaagtccttcttgcacgagcaggaagagaatgtggtcaagattcaggccttctggaagggatacaaacaacggaaagagtacatgcaccggcgtcagactttcatcgacaacacagacagcattgttaagatccagagctggtttcgcatggctacggcacgcaagtcttacctgagccggctgcagtatttcagggatcataataacgaaattgtaaaaattcagtcactgctgcgagccaataaggctcgcgatgattataagaccttggtaggctcagaaaacccacccctcaccgttatccggaagtttgtgtacctcctggatcagagcgatctcgactttcaagaagaactggaggtggcccgactgagggaggaggtggtcactaagataagggcaaatcagcaattggaaaaagatctcaaccttatggatatcaaaattggacttctggttaagaatcgaatcactctggaagacgtgatctcacactcaaaaaaacttaataagaaaaaaggaggtgaaatggagattcttaataatacagacaatcaggggattaaaagcttgtctaaagaacgcaggaagaccctcgaaacctatcagcagcttttctatctccttcaaacaaacccactttatttagctaagttgattttccagatgccgcaaaataagtccacaaagttcatggacacggtcatattcacgctatataactatgcgtctaatcagagagaagaatacctgcttctgaaattgttcaaaaccgcattggaggaggagatcaaatctaaggtggaccaggtccaggacatagttaccggcaatccaacagtgatcaagatggttgtctcttttaacaggggtgcgcgaggccagaacactctgcgccaattactcgcccctgtggtgaaagagatcatagatgacaagtccctgatcattaatacgaacccagtggaggtttacaaggcctgggtgaatcagctagaaactcagactggggaggcatccaagctcccctatgacgtcactaccgagcaagccctcacgtaccctgaggtcaagaataaacttgaggcatcaatcgagaacttgcgacgggtaacggacaaggtgctgaacagtattataagctccctcgacttgcttccctacggattacgctacatcgccaaggtgctgaaaaactctattcacgagaagttcccggacgcaaccgaagatgagctgctgaagattgtgggcaacctcttgtattaccgttacatgaaccccgccatcgtggcacctgacggcttcgatattatcgatatgactgctggagggcagatcaatagtgaccagagacgcaaccttggctccgtggcaaaagtgttacagcacgccgccagtaacaaactgtttgagggcgagaacgagcatctgtcctctatgaataactacctcagcgagacctatcaggaattccgaaaatattttaaagaggcatgtaacgtgcccgagcccgaagaaaaatttaacatggacaaatacaccgacctggtcactgtctccaaaccagtgatctatatctccattgaagagattatctccactcactccttacttcttgaacaccaggatgccattgcccccgagaaaaacgatctcctatctgagttgctaggaagcctaggtgaggtccctactgtggaaagctttctgggcgagggcgccgtcgacccaaatgacccaaacaaagctaatacactctcgcagctgtccaagaccgagatttccctggtcctcacatcaaaatatgatatcgaagatggtgaagcaattgattctcggagcctgatgataaaaactaagaaactgatcatcgatgtcatacgaaatcaacctggaaacactcttacagaaatacttgaaacacctgccacagcccagcaagaagtggaccatgccaccgacatggtctcccgcgcaatgatcgacagcagaacccctgaggaaatgaaacacagtcagtctatgattgaggatgcccaactcccgttggagcaaaagaagaggaaaatccagcgtaacctccgcacgctggagcagaccggtcatgtcagctcagagaacaaataccaggatatcctgaacgaaatagcgaaggatattagaaatcagaggatctaccggaagctgagaaaagccgaactggccaaactgcaacaaactctaaatgcgctgaataaaaaggctgctttttatgaagaacagatcaattattatgacacctatatcaagacctgcctggataacctgaagaggaaaaacactcgcagaagtattaaacttgacggcaaaggagaacccaagggggcgaagcgcgccaagcctgttaagtacaccgcggcaaagctgcacgagaagggtgtcctgctggacatcgatgatctgcaaactaatcaattcaaaaatgtgacattcgacatcatcgcaacggaagacgttgggatcttcgacgttcggtcaaagttccttggggtggagatggaaaaagttcagctgaatatccaagacctgcttcagatgcagtacgaaggcgtcgcagttatgaagatgttcgacaaggtaaaagtcaacgtgaatttgctcatctacctgctgaacaagaagttctacggaaaatag

SEQ ID NO: 166711 - DNA, 4728 bp, Artificial Sequence
  derived and/or modified sequence
atgccacacgaggagctcccttccctgcagcgcccaaggtatgggtctattgtcgacgacgagcgcttaagcgcagaggaaatggatgagagacgaaggcagaacatcgcctacgagtacctgtgccatctggaggaggccaaaagatggatggaagtctgcttagtagaggagctcccccctacaaccgaattggaggagggcctacggaacggcgtttatctcgcgaagttggccaaattttttgcacctaaaatggtttctgaaaagaaaatctacgatgtcgaacagacccggtacaagaagtctggccttcatttcaggcatacagacaatactgtgcagtggctgagggccatggagtccataggcctgcccaaaatcttttacccagagactactgacgtctatgaccgtaagaacatccctcggatgatttactgtatccacgcgcttagcctatacctctttaaactggggatcgcaccccaaatacaggatctgctgggaaaggtcgattttaccgaggaagaaattagcaatatgcgaaaggagttggaaaagtacgggattcagatgccctcattctcaaaaattggaggtatactggcgaatgaactttcagttgatgaagctgcgctgcacgctgcggtgatcgcaatcaacgaagccgtagagaaaggcatcgcagaacagaccgtggtgaccctacgaaacccaaacgccgtgttaacccttgtagacgataatcttgcaccagagtatcagaaagaactgtgggacgcaaagaaaaagaaggaggagaacgcgagactgaaaaacagctgtatcagtgaggaggaaagggatgcctacgaggagttgcttacccaggctgagatacagggcaacattaataaagtgaaccgccaggcggctgtcgatcacatcaatgccgtcattccggaaggggaccccgagaatacacttcttgcccttaaaaagcctgaagcccaactacccgcagtgtacccattcgccgctgcaatgtaccagaacgagttattcaacctgcagaagcagaataccatgaactacttagcacacgaggagcttttgatagcagtggagatgctgagtgctgtggctttactgaaccaggctctcgaatccaacgacctggtgtccgtccagaaccagctgcgttcccctgcaatcggtctcaataacctggacaaggcctacgtagaacgatatgccaacacccttctatcagtgaagctggaagtcctttcacagggccaggacaacctttcgtggaatgagattcaaaactgtatcgacatggtcaacgcacaaatccaggaggagaatgaccgagttgtggcagtcgggtacatcaacgaggcgatcgatgagggtaacccactgaggacactggagactttactacttcctactgctaatatttctgacgtggatcccgctcatgctcagcactaccaagacgtgctttatcatgctaagtcacagaagttaggagacagcgaatccgtatctaaggttctctggcttgacgagattcaacaggctgtggacgatgccaacgtggacaaggacagggcaaagcagtgggttacactggtggtcgatgtcaatcagtgtttagagggaaagaaatctagcgacatcttgtctgtgttaaaaagctctacctccaatgctaacgatattatccccgagtgtgcggacaaatactacgatgctttggtgaaggctaaggaactgaagtctgagagggtctcttctgacggttcatggctgaaactgaatttgcacaagaagtatgattactactataacaccgattccaaggaatcaagttgggtcactcccgagtcatgcctgtataaggaatcatggcttactggaaaagagattgaggacattattgaagaggtcaccgtgggatacatcagggagaatatctggtccgcttctgaggagcttctgttgcggtttcaggcaaccagcagcggacctatactgcgggaagaattcgaagccagaaagtcctttctgcacgaacaggaggaaaacgtcgtgaaaattcaggccttctggaagggctacaagcagaggaaggagtatatgcacaggaggcagacctttattgacaacactgatagcattgtgaagatccagtcttggtttagaatggcaacagccaggaagtcctacctttcacgactgcagtattttagagaccataacaatgaaatagttaaaattcaatcccttctccgcgcaaacaaagcacgagatgattataagaccctggtgggtagcgaaaatccccctttgacagtgatacggaaatttgtatacctgttggatcagtcagatttagatttccaagaagagctggaagtagctcgcctcagagaggaagttgtgacaaagattagagcaaaccagcaactcgagaaggatttgaatctgatggacatcaagattgggctgctggttaaaaaccgaattactctcgaggacgtgatttcacattccaaaaagcttaataagaaaaagggcggagaaatggagatcctgaataatactgataaccaaggtatcaaaagcctgtctaaagaaagaagaaagacccttgagacataccagcagctcttttatttgctgcagacaaacccactctacttggctaagttgatcttccagatgccccagaacaaatcaacgaaatttatggataccgtaatctttaccctatataactacgcctcaaaccaacgcgaggagtatctgctcctgaagctcttcaagacagctttggaagaggagattaagagtaaggtggaccaagtgcaggacatcgtcactggtaatccgaccgtcattaaaatggtcgttagtttcaaccgcggagctagaggccagaacacgttgagacagttgttagccccagtcgtaaaggaaatcatcgacgataagtctctcattatcaacaccaaccctgtggaggtgtacaaagcgtgggtgaaccagctggaaacgcaaaccggcgaagctagtaaactgccctatgacgtaaccacagagcaggcactcacttatcctgaggtcaaaaacaagctagaggctagtatcgagaatctgaggcgggtcacagacaaagtcttgaactctattatctcaagcctcgaccttctcccatacggtttgaggtatatagcgaaagtcctgaaaaattccatccacgagaaatttcccgatgccactgaagacgagctgttaaaaattgtcggtaacctcctatactatagatacatgaatcccgcaatagtggctccagacggctttgacattatcgacatgacggctggtggccaaataaattccgaccaaaggaggaatctgggatcagtcgcgaaggtgcttcaacacgccgcatctaacaagctctttgagggagagaatgaacacttatcatcaatgaacaattacctctctgagacttaccaggagtttagaaagtacttcaaggaggcctgtaacgtgcctgagcccgaagaaaaattcaacatggataaatatactgatctcgtgacagtgtctaaacctgtgatctacatcagcatcgaggaaatcatttccacccatagtctcctgctcgagcaccaggacgctatagccccagaaaagaacgacctattgtccgaactcctgggaagtctgggggaagtgcctacagttgaatcctttctcggcgaaggcgcagtagaccccaatgaccccaacaaagccaacaccctgtcgcagctgtccaagacagagatctccctcgtgcttacgtcaaaatatgatatcgaggatggtgaggccattgatagtcggagtctgatgattaagacgaagaagctgatcatcgatgttattcgcaatcagcccggaaacacattgaccgagatcttggaaaccccagccaccgcccagcaggaggtagaccacgcaactgacatggtgagtcgggcaatgattgactcaagaacgcccgaggaaatgaagcactctcagtctatgatcgaggacgctcaactacctcttgagcagaaaaagaggaaaattcaacgtaatctaagaaccctggagcagaccggccacgtgagttcagaaaataagtatcaagatatcctgaatgagattgccaaagatattaggaatcagaggatttatcggaaactccgcaaggcagaattggctaagctccagcagaccctcaatgccctgaataagaaggccgctttttatgaggaacaaatcaactattacgacacttacatcaaaacctgcctcgacaatctcaagagaaagaacacgagaagatccataaagcttgacgggaaaggcgaaccgaagggcgcaaagcgagccaagccagtgaagtacactgccgctaaactgcatgagaagggcgtgctgctagatattgatgacctccagaccaaccagtttaaaaacgtgacattcgacataatcgccaccgaggatgtgggcatttttgatgtccgatctaaattcttgggggtggagatggagaaggttcagctaaacattcaggaccttctgcagatgcagtatgaaggggttgctgtgatgaagatgtttgataaagttaaggtaaacgttaatctccttatttatctgctcaacaagaagttttatggtaaatag

SEQ ID NO: 166712 - DNA, 4728 bp, Artificial Sequence
  derived and/or modified sequence
atgccccacgaggagctgcccagcctgcagagacccagatacggcagcatcgtggacgacgagagactgagcgccgaggagatggacgagagaagaagacagaacatcgcctacgagtacctgtgccacctggaggaggccaagagatggatggaggtgtgcctggtggaggagctgccccccaccaccgagctggaggagggcctgagaaacggcgtgtacctggccaagctggccaagttcttcgcccccaagatggtgagcgagaagaagatctacgacgtggagcagaccagatacaagaagagcggcctgcacttcagacacaccgacaacaccgtgcagtggctgagagccatggagagcatcggcctgcccaagatcttctaccccgagaccaccgacgtgtacgacagaaagaacatccccagaatgatctactgcatccacgccctgagcctgtacctgttcaagctgggcatcgccccccagatccaggacctgctgggcaaggtggacttcaccgaggaggagatcagcaacatgagaaaggagctggagaagtacggcatccagatgcccagcttcagcaagatcggcggcatcctggccaacgagctgagcgtggacgaggccgccctgcacgccgccgtgatcgccatcaacgaggccgtggagaagggcatcgccgagcagaccgtggtgaccctgagaaaccccaacgccgtgctgaccctggtggacgacaacctggcccccgagtaccagaaggagctgtgggacgccaagaagaagaaggaggagaacgccagactgaagaacagctgcatcagcgaggaggagagagacgcctacgaggagctgctgacccaggccgagatccagggcaacatcaacaaggtgaacagacaggccgccgtggaccacatcaacgccgtgatccccgagggcgaccccgagaacaccctgctggccctgaagaagcccgaggcccagctgcccgccgtgtaccccttcgccgccgccatgtaccagaacgagctgttcaacctgcagaagcagaacaccatgaactacctggcccacgaggagctgctgatcgccgtggagatgctgagcgccgtggccctgctgaaccaggccctggagagcaacgacctggtgagcgtgcagaaccagctgagaagccccgccatcggcctgaacaacctggacaaggcctacgtggagagatacgccaacaccctgctgagcgtgaagctggaggtgctgagccagggccaggacaacctgagctggaacgagatccagaactgcatcgacatggtgaacgcccagatccaggaggagaacgacagagtggtggccgtgggctacatcaacgaggccatcgacgagggcaaccccctgagaaccctggagaccctgctgctgcccaccgccaacatcagcgacgtggaccccgcccacgcccagcactaccaggacgtgctgtaccacgccaagagccagaagctgggcgacagcgagagcgtgagcaaggtgctgtggctggacgagatccagcaggccgtggacgacgccaacgtggacaaggacagagccaagcagtgggtgaccctggtggtggacgtgaaccagtgcctggagggcaagaagagcagcgacatcctgagcgtgctgaagagcagcaccagcaacgccaacgacatcatccccgagtgcgccgacaagtactacgacgccctggtgaaggccaaggagctgaagagcgagagagtgagcagcgacggcagctggctgaagctgaacctgcacaagaagtacgactactactacaacaccgacagcaaggagagcagctgggtgacccccgagagctgcctgtacaaggagagctggctgaccggcaaggagatcgaggacatcatcgaggaggtgaccgtgggctacatcagagagaacatctggagcgccagcgaggagctgctgctgagattccaggccaccagcagcggccccatcctgagagaggagttcgaggccagaaagagcttcctgcacgagcaggaggagaacgtggtgaagatccaggccttctggaagggctacaagcagagaaaggagtacatgcacagaagacagaccttcatcgacaacaccgacagcatcgtgaagatccagagctggttcagaatggccaccgccagaaagagctacctgagcagactgcagtacttcagagaccacaacaacgagatcgtgaagatccagagcctgctgagagccaacaaggccagagacgactacaagaccctggtgggcagcgagaacccccccctgaccgtgatcagaaagttcgtgtacctgctggaccagagcgacctggacttccaggaggagctggaggtggccagactgagagaggaggtggtgaccaagatcagagccaaccagcagctggagaaggacctgaacctgatggacatcaagatcggcctgctggtgaagaacagaatcaccctggaggacgtgatcagccacagcaagaagctgaacaagaagaagggcggcgagatggagatcctgaacaacaccgacaaccagggcatcaagagcctgagcaaggagagaagaaagaccctggagacctaccagcagctgttctacctgctgcagaccaaccccctgtacctggccaagctgatcttccagatgccccagaacaagagcaccaagttcatggacaccgtgatcttcaccctgtacaactacgccagcaaccagagagaggagtacctgctgctgaagctgttcaagaccgccctggaggaggagatcaagagcaaggtggaccaggtgcaggacatcgtgaccggcaaccccaccgtgatcaagatggtggtgagcttcaacagaggcgccagaggccagaacaccctgagacagctgctggcccccgtggtgaaggagatcatcgacgacaagagcctgatcatcaacaccaaccccgtggaggtgtacaaggcctgggtgaaccagctggagacccagaccggcgaggccagcaagctgccctacgacgtgaccaccgagcaggccctgacctaccccgaggtgaagaacaagctggaggccagcatcgagaacctgagaagagtgaccgacaaggtgctgaacagcatcatcagcagcctggacctgctgccctacggcctgagatacatcgccaaggtgctgaagaacagcatccacgagaagttccccgacgccaccgaggacgagctgctgaagatcgtgggcaacctgctgtactacagatacatgaaccccgccatcgtggcccccgacggcttcgacatcatcgacatgaccgccggcggccagatcaacagcgaccagagaagaaacctgggcagcgtggccaaggtgctgcagcacgccgccagcaacaagctgttcgagggcgagaacgagcacctgagcagcatgaacaactacctgagcgagacctaccaggagttcagaaagtacttcaaggaggcctgcaacgtgcccgagcccgaggagaagttcaacatggacaagtacaccgacctggtgaccgtgagcaagcccgtgatctacatcagcatcgaggagatcatcagcacccacagcctgctgctggagcaccaggacgccatcgcccccgagaagaacgacctgctgagcgagctgctgggcagcctgggcgaggtgcccaccgtggagagcttcctgggcgagggcgccgtggaccccaacgaccccaacaaggccaacaccctgagccagctgagcaagaccgagatcagcctggtgctgaccagcaagtacgacatcgaggacggcgaggccatcgacagcagaagcctgatgatcaagaccaagaagctgatcatcgacgtgatcagaaaccagcccggcaacaccctgaccgagatcctggagacccccgccaccgcccagcaggaggtggaccacgccaccgacatggtgagcagagccatgatcgacagcagaacccccgaggagatgaagcacagccagagcatgatcgaggacgcccagctgcccctggagcagaagaagagaaagatccagagaaacctgagaaccctggagcagaccggccacgtgagcagcgagaacaagtaccaggacatcctgaacgagatcgccaaggacatcagaaaccagagaatctacagaaagctgagaaaggccgagctggccaagctgcagcagaccctgaacgccctgaacaagaaggccgccttctacgaggagcagatcaactactacgacacctacatcaagacctgcctggacaacctgaagagaaagaacaccagaagaagcatcaagctggacggcaagggcgagcccaagggcgccaagagagccaagcccgtgaagtacaccgccgccaagctgcacgagaagggcgtgctgctggacatcgacgacctgcagaccaaccagttcaagaacgtgaccttcgacatcatcgccaccgaggacgtgggcatcttcgacgtgagaagcaagttcctgggcgtggagatggagaaggtgcagctgaacatccaggacctgctgcagatgcagtacgagggcgtggccgtgatgaagatgttcgacaaggtgaaggtgaacgtgaacctgctgatctacctgctgaacaagaagttctacggcaagtag

SEQ ID NO: 166713 - protein, 248 aa, Artificial Sequence
  derived and/or modified sequence
MKPASISEEELLNLINKLNNDDNVDGLLVQLPLPEHIDERRICNAVSPDKDVDGFHVINVGRMCLDQYSMLPATPWGVWEIIKRTGIPTLGKNVVVAGRSKNVGMPIAMLLHTDGAHERPGGDATVTISHRYTPKEQLKKHTILADIVISAAGIPNLITADMIKEGAAVIDVGINRVHDPVTAKPKLVGDVDFEGVRQKAGYITPVPGGVGPMTVAMLMKNTIIAAKKVLRLEEREVLKSKELGVATN

SEQ ID NO: 166714 - protein, 186 aa, Artificial Sequence
  derived and/or modified sequence
MCLDQYSMLPATPWGVWEIIKRTGIPTLGKNVVVAGRSKNVGMPIAMLLHTDGAHERPGGDATVTISHRYTPKEQLKKHTILADIVISAAGIPNLITADMIKEGAAVIDVGINRVHDPVTAKPKLVGDVDFEGVRQKAGYITPVPGGVGPMTVAMLMKNTIIAAKKVLRLEEREVLKSKELGVATN

SEQ ID NO: 166715 - protein, 350 aa, Artificial Sequence
  derived and/or modified sequence
MAATSLMSALAARLLQPAHSCSLRLRPFHLAAVRNEAVVISGRKLAQQIKQEVRQEVEEWVASGNKRPHLSVILVGENPASHSYVLNKTRAAAVVGINSETIMKPASISEEELLNLINKLNNDDNVDGLLVQLPLPEHIDERRICNAVSPDKDVDGFHVINVGRMCLDQYSMLPATPWGVWEIIKRTGIPTLGKNVVVAGRSKNVGMPIAMLLHTDGAHERPGGDATVTISHRYTPKEQLKKHTILADIVISAAGIPNLITADMIKEGAAVIDVGINRVHDPVTAKPKLVGDVDFEGVRQKAGYITPVPGGVGPMTVAMLMKNTIIAAKKVLRLEEREVLKSKELGVATN

SEQ ID NO: 166716 - DNA, 1053 bp, Artificial Sequence
  derived and/or modified sequence
atggccgccaccagcctgatgagcgccctggccgccagactgctgcagcccgcccacagctgcagcctgagactgagacccttccacctggccgccgtgagaaacgaggccgtggtgatcagcggcagaaagctggcccagcagatcaagcaggaggtgagacaggaggtggaggagtgggtggccagcggcaacaagagaccccacctgagcgtgatcctggtgggcgagaaccccgccagccacagctacgtgctgaacaagaccagagccgccgccgtggtgggcatcaacagcgagaccatcatgaagcccgccagcatcagcgaggaggagctgctgaacctgatcaacaagctgaacaacgacgacaacgtggacggcctgctggtgcagctgcccctgcccgagcacatcgacgagagaagaatctgcaacgccgtgagccccgacaaggacgtggacggcttccacgtgatcaacgtgggcagaatgtgcctggaccagtacagcatgctgcccgccaccccctggggcgtgtgggagatcatcaagagaaccggcatccccaccctgggcaagaacgtggtggtggccggcagaagcaagaacgtgggcatgcccatcgccatgctgctgcacaccgacggcgcccacgagagacccggcggcgacgccaccgtgaccatcagccacagatacacccccaaggagcagctgaagaagcacaccatcctggccgacatcgtgatcagcgccgccggcatccccaacctgatcaccgccgacatgatcaaggagggcgccgccgtgatcgacgtgggcatcaacagagtgcacgaccccgtgaccgccaagcccaagctggtgggcgacgtggacttcgagggcgtgagacagaaggccggctacatcacccccgtgcccggcggcgtgggccccatgaccgtggccatgctgatgaagaacaccatcatcgccgccaagaaggtgctgagactggaggagagagaggtgctgaagagcaaggagctgggcgtggccaccaactag

SEQ ID NO: 166717 - DNA, 1053 bp, Artificial Sequence
  derived and/or modified sequence
atggccgctacctcactgatgagcgcacttgctgcgaggttgttgcagcctgcacactcctgctcccttaggttaaggccattccatctagctgccgtccgcaacgaggctgtggtcataagtggcaggaaactggctcagcagattaaacaggaggtccgtcaggaggtcgaagagtgggtggcctcaggtaacaagaggcctcatttgtctgtcattcttgtcggagagaaccccgcaagccactcttacgtccttaacaaaactagggcagccgcggtggtcggaattaactccgagacaatcatgaagcccgcctccatttcagaggaagagctcctcaatttgatcaataagcttaacaatgacgacaacgtggacggactcctggtgcagctgcctctccccgagcatattgacgaacggagaatttgcaacgcagtgtcgccagataaggatgttgacgggttccacgtgattaacgtcggccggatgtgtctggaccagtactcaatgctgcccgctaccccatggggagtgtgggaaatcattaagcgcactggtatcccaacactgggaaagaacgtagtggtagcaggccgcagcaaaaacgttgggatgccgattgccatgttacttcacactgatggtgcccacgaacggccaggcggggatgcgacggtgacaatatcacaccgctacacacctaaagaacagctcaagaagcataccattctcgcagacatcgtgatctccgccgccgggatacccaatcttattaccgccgatatgatcaaggaaggtgccgcagtcattgatgtggggataaatcgcgtgcacgaccctgtgaccgctaaacctaagctggtgggcgatgtcgacttcgagggggttcgccagaaggccggctatatcactccagtgcccggtggggtaggccccatgacagttgccatgctaatgaaaaacacaattattgctgctaaaaaggttttaagactcgaggaacgggaggtcctgaaatctaaggaactgggcgtagctacaaactag

SEQ ID NO: 166718 - DNA, 1053 bp, Artificial Sequence
  derived and/or modified sequence
atggccgccaccagcctgatgtctgccctggccgcccggctgctgcagcctgcccacagctgcagcctgcggctgcggcccttccacctggccgctgtgagaaatgaagctgtggtgatcagcggcaggaagctggcccagcagatcaagcaggaggtgcggcaggaggtggaggagtgggtggccagcggcaacaagaggccccacctgagcgtcatcctggtgggagaaaatcctgccagccacagctatgtgctgaacaagaccagggctgctgctgtggtgggcatcaacagcgagaccatcatgaagccagccagcatcagcgaggaggagctgctgaacctgatcaacaagctgaacaatgatgacaacgtggatggcctgctggtgcagctgcccctgcctgagcacattgatgagcggcgcatctgcaatgctgtgtccccagacaaggatgtggatggcttccacgtgatcaacgtgggccgcatgtgcctggaccagtacagcatgctgcctgccaccccctggggcgtgtgggagatcatcaagaggacaggcatccccaccctgggcaagaatgtggtggtggccggccgcagcaagaatgtgggcatgcccatcgccatgctgctgcacacagatggagcccacgagaggcctggaggagatgccaccgtgaccatcagccaccgctacacccccaaggagcagctgaagaagcacaccatcctggccgacatcgtcatctctgctgctggcatccccaacctgatcacagctgacatgatcaaggagggcgctgctgtgattgatgtgggcatcaacagagtgcatgaccctgtgacagccaagcccaagctggtgggagatgtggactttgaaggagtgcggcagaaggccggctacatcacccctgtgcctggaggagtgggccccatgacagtggccatgctgatgaagaacaccatcatcgccgccaagaaggtgctgcggctggaggagcgggaggtgctgaagagcaaggagctgggcgtggccaccaactag

SEQ ID NO: 166719 - DNA, 1396 bp, Artificial Sequence
  derived and/or modified sequence
ccctcccggcgcagtcaccggcgcggtctatggctgcgacttctctaatgtctgctttggctgcccggctgctgcagcccgcgcacagctgctcccttcgccttcgccctttccacctcgcggcagttcggaatcaacagtgagacaattatgaaaccagcttcaatttcagaggaagaattgttgaatttaatcaataaactgaataatgatgataatgtagatggcctccttgttcagttgcctcttccagagcatattgatgagagaaggatctgcaatgctgtttctccagacaaggatgttgatggctttcatgtaattaatgtaggacgaatgtgtttggatcagtattccatgttaccggctactccatggggtgtgtgggaaataatcaagcgaactggcattccaaccctagggaagaatgtggttgtggctggaaggtcaaaaaacgttggaatgcccattgcaatgttactgcacacagatggggcgcatgaacgtcccggaggtgatgccactgttacaatatctcatcgatatactcccaaagagcagttgaagaaacatacaattcttgcagatattgtaatatctgctgcaggtattccaaatctgatcacagcagatatgatcaaggaaggagcagcagtcattgatgtgggaataaatagagttcacgatcctgtaactgccaaacccaagttggttggagatgtggattttgaaggagtcagacaaaaagctgggtatatcactccagttcctggaggtgttggccccatgacagtggcaatgctaatgaagaataccattattgctgcaaaaaaggtgctgaggcttgaagagcgagaagtgctgaagtctaaagagcttggggtagccactaattaactactgtgtcttctgtgtcacaaacagcactccaggccagctcaagaagcaaagcaggccaatagaaatgcaatatttttaatttattctactgaaatggtttaaaatgatgccttgtatttattgaaagcttaaatgggtgggtgtttctgcacatacctctgcagtacctcaccagggagcattccagtatcatgcagggtcctgtgatctagccaggagcagccattaacctagtgattaatatgggagacattaccatatggaggatggatgcttcactttgtcaagcacctcagttacacattcgccttttctaggattgcatttcccaagtgctattgcaataacagttgatactcattttaggtaccaaaccttttgagttcaactgatcaaaccaaaggaaaagtgttgctagagaaaattagggaaaaggtgaaaaagaaaaaatggtagtaattgagcagaaaaaaattaatttatatatgtattgatt

SEQ ID NO: 166720 - DNA, 4456 bp, Artificial Sequence
  derived and/or modified sequence
cggggcctgccacgaggccgcagtataaccgcgtggcccgcgcgcgcgcttccctcccggcgcagtcaccggcgcggtctatggctgcgacttctctaatgtctgctttggctgcccggctgctgcagcccgcgcacagctgctcccttcgccttcgccctttccacctcgcggcagttcgaaatgaagctgttgtcatttctggaaggaaactggcccagcagatcaagcaggaagtgcggcaggaggtagaagagtgggtggcctcaggcaacaaacggccacacctgagtgtgatcctggttggcgagaatcctgcaagtcactcctatgtcctcaacaaaaccagggcagctgcagttgtgggaatcaacagtgagacaattatgaaaccagcttcaatttcagaggaagaattgttgaatttaatcaataaactgaataatgatgataatgtagatggcctccttgttcagttgcctcttccagagcatattgatgagagaaggatctgcaatgctgtttctccagacaaggatgttgatggctttcatgtaattaatgtaggacgaatgtgtttggatcagtattccatgttaccggctactccatggggtgtgtgggaaataatcaagcgaactggcattccaaccctagggaagaatgtggttgtggctggaaggtcaaaaaacgttggaatgcccattgcaatgttactgcacacagatggggcgcatgaacgtcccggaggtgatgccactgttacaatatctcatcgatatactcccaaagagcagttgaagaaacatacaattcttgcagatattgtaatatctgctgcaggtattccaaatctgatcacagcagatatgatcaaggaaggagcagcagtcattgatgtgggaataaatagagttcacgatcctgtaactgccaaacccaagttggttggagatgtggattttgaaggagtcagacaaaaagctgggtatatcactccagttcctggaggtgttggccccatgacagtggcaatgctaatgaagaataccattattgctgcaaaaaaggtgctgaggcttgaagagcgagaagtgctgaagtctaaagagcttggggtagccactaattaactactgtgtcttctgtgtcacaaacagcactccaggccagctcaagaagcaaagcaggccaatagaaatgcaatatttttaatttattctactgaaatggtttaaaatgatgccttgtatttattgaaagcttaaatgggtgggtgtttctgcacatacctctgcagtacctcaccagggagcattccagtatcatgcagggtcctgtgatctagccaggagcagccattaacctagtgattaatatgggagacattaccatatggaggatggatgcttcactttgtcaagcacctcagttacacattcgccttttctaggattgcatttcccaagtgctattgcaataacagttgatactcattttaggtaccaaaccttttgagttcaactgatcaaaccaaaggaaaagtgttgctagagaaaattagggaaaaggtgaaaaagaaaaaatggtagtaattgagcagaaaaaaattaatttatatatgtattgattggcaaccagatttatctaagtagaactgaattggctaggaaaaaagaaaaactgcatgttaatcattttcctaagctgtccttttgaggcttagtcagtttattgggaaaatgtttaggattattccttgctattagtactcattttatgtatgttacccttcagtaagttctccccattttagttttctaggactgaaaggattcttttctacattatacatgtgtgttgtcatatttggcttttgctatatactttaacttcattgttaaatttttgtattgtatagtttctttggtgtatcttaaaacctatttttgaaaaacaaacttggcttgataatcatttgggcagcttgggtaagtacgcaacttacttttccaccaaagaactgtcagcagctgcctgcttttctgtgatgtatgtatcctgttgacttttccagaaattttttaagagtttgagttactattgaatttaatcagactttctgattaaagggttttctttcttttttaataaaacacatctgtctggtatggtatgaatttctgaaattctgtcttcctatgactcctagttgtgacctaaccagtttttttctcatttaatcaatgtagctattcctatattcagtaacacttacttctatagccttaaatagataattttttttcttctatttttttttttttttttgtagagatggggtcttgctatgttgcctgggctggtattgaactcctggcctcaagcaatcaatcctcttgcctcagcttcccagagggctgggattacaggcctgggccacccacacccaaacagaggtttaaagagctttggagaaaccagcctcgtcctccagtctctttgtttgtttgttttgagactgagtcttgctctgttgcccaggctggagtgcagtggcatgatctcgggtcactgcaacctctgcctctcgggttcaaacaattcttgtgcctcagcctcctgagtagctgggattacaggtgcatgccaccatgcctggctaatttttgtgtttttagtagagatggggtttcatcacattggccaggctggtctcaaactcctgacctcaagtgatccacctgcctcggcctcccaaaatgctaggattacaggcgtgagccactgcacctggcctgtcctacagtcttatatcacaacaggttgtgccaagctaggagcttaatctgtaaaatacttgaggcagggataggtttgtctgttttggcttttggctttcatgcgagcagaagtagctcctgctctaggcagcttgaggcagaaagagaagaaacaattgagttgacctacctccgtcctcgttcttctgccagctggcgttattcttttgatagttctctggagtttaaagaagtttagatagtttgctggagatgtttttgtaagtgacgtatagcttatgtctctaatccatgcctgcttacctagattattaaatgtggagcaagatgaccagacaggattaaattttattgaattacagttacaagtggaaaaaatgactgacttactgcatggagaagtattatgtcaacctgttaaaagctatggaaattaaaatgttcatgtatatacaaaatataaatgacatgtaaggtaaaattacagtgatcaatttacaacaaagaaattaacagtagttttccagcttgtttgattaatcaagcaggtttactcttgaatccatagcatttctacaatttaatttggacaaagttctattccagatcagccaggttttaaaactgaaatgtgttaagggtggattgttagcttccccaggattggtgtggatgataaatactttttttaaaaattaattattattgtttataagacatggattccagctgtctccctggctggagtgcagtggcatgattatagctcactgcagccttgaactcctggacttaaacgatcctcctgcatcagcctctgaaatggctgggactacaggtgtgtgccagcatgcctagctaatttttaaacatttgtttagagatgggtctcactatgttgcccaggctggtcttgacctcctgacctctgctgattccccccacctctgcctcccaagtagcgggattacaggtgtgagccactgtgtctgacaagaatttatacttaagcataggagatggttctggaaattctaagaaattctgctctcagtaagagtagaggtttggagctttacctcttggcagtatcccttggaagggagctctgagattaaatgtaatcaaacacttattgagagctttctatggaccaggcactacactagacgctgggaattacagaggcaattacctgtcctatactcaaggtgttaatgatctagtgtcatttttctttaaaaaagaaagcacctgcatttgtcatcttgagcaaatatagtaactctaacctcaaggttcaagtgatttactcaaggtttaaatcatagttgttttggagaaagtaagtgtcagatgcactgtggctgtcagggtcatagtaggcattaaatcaacatggttggtgttcattaaatgtggattgaagataaaatgactgatcttaagtttcatgaggaataggtttgcttcattgaaactggtttttatcttcccaaatagttttcaatcattcctttaaagtactaggttgattaatattgcaaagttgtaatgtaaaatgtgaccttacctctgtctaacctgtattgttcacatgaatgggagtttgactttgggaataaacattgaaaatttgcagggaggaccca

SEQ ID NO: 166721 - DNA, 1053 bp, Artificial Sequence
  derived and/or modified sequence
atggccgccaccagcctgatgagcgccctggccgcccggctgctgcagcctgcgcactcctgcagccttaggttgcgaccattccacttggccgccgtgcgaaacgaggcagtggtgattagcggtagaaagctggcccagcaaataaaacaggaggttcgccaagaagtcgaggagtgggttgcatcgggcaacaagcgacctcacttgagtgtgatcctggttggggagaaccccgcaagccattcctacgtactcaacaaaacacgggcggctgctgtggtaggaatcaattctgaaaccataatgaaacccgcatctattagcgaagaggaactgctgaacttgattaataaacttaataacgacgacaatgttgatgggctgctggtgcagctacccctccctgagcatatcgacgagcgcaggatctgtaatgcggttagtcccgataaggatgtggatgggttccacgtcatcaacgtgggtaggatgtgcctcgaccaatatagcatgctgccagccacgccatggggagtgtgggaaatcatcaagcgcacaggcataccaaccctgggcaaaaatgtagttgtggcaggacgttctaagaacgtgggaatgccaatcgcgatgctactgcatacagatggtgcccacgagcgccccggcggtgacgcgaccgtgaccataagccatcgatataccccgaaggaacagctcaagaaacacacaattctggctgacattgtgatcagtgctgctggaatccctaatctgattacagcagacatgatcaaggaaggggccgccgtcatcgatgtcggaatcaacagggtccacgacccggtcaccgctaaacctaagctggtgggggacgtggacttcgagggcgtgcggcagaaggctggctacatcaccccggtgccgggaggtgtcggtcctatgacagtagccatgttaatgaagaacacaattatagccgcgaagaaagttcttaggctcgaggagagggaggttctaaaatcaaaagaactcggcgtggccactaactag

SEQ ID NO: 166722 - DNA, 1053 bp, Artificial Sequence
  derived and/or modified sequence
atggcggctaccagcctgatgtccgccctcgccgctaggctgttgcagcccgcacactcttgctcactgaggctgcgcccattccatttggccgcagtgaggaacgaggccgtggtgatttccggaagaaagctcgcccagcagatcaaacaagaggtgcgacaggaggtggaagagtgggttgccagcggcaacaaacggccacacctctctgtgattttggtcggagagaaccctgcctcacactcttatgtactgaataaaactcgggcagcagccgttgtaggcatcaacagtgagaccataatgaaacctgcttcaatatcagaggaggagctgcttaaccttattaataaactcaataatgacgataacgtggacggcctcctggtgcagctccccctgccagagcacattgatgaaaggcggatttgcaacgccgtgagcccagataaagacgtggatggttttcacgtgattaacgtaggacgcatgtgtttagatcaatattccatgctgcccgctactccctggggagtgtgggagatcataaagaggaccgggatcccaacacttggcaagaatgtagtagtggctgggcgttccaaaaacgttggcatgcccatcgctatgcttctacacaccgacggggcacacgaaagacctggcggagacgccaccgtaactatctcccataggtataccccgaaagaacagcttaagaaacacacaattttggcggacattgtgatctcagcggcagggattcccaatctgatcacagccgacatgattaaagagggtgccgctgtaattgacgtcggcattaaccgagtgcacgaccctgtaacggcaaagcctaagctggtgggcgatgttgattttgaaggcgttaggcagaaggcaggttacataacccccgtgcccggaggcgttggtccaatgactgtcgcaatgctgatgaagaacactattattgccgctaagaaagtcctgcgcctagaagaacgtgaagtgctcaagagcaaggagctgggagtcgcgacaaattag

SEQ ID NO: 166723 - protein, 363 aa, Artificial Sequence
  derived and/or modified sequence
MATLRRLREAPRHLLVCEKSNFGNHKSRHRHLVQTHYYNYRVSFLIPECGILSEELKNLVMNTGPYYFVKNLPLHELITPEFISTFIKKGSCYALTYNTHIDEDNTVALLPNGKLILSLDKDTYEETGLQGHPSQFSGRKIMKFIVSIDLMELSLNLDSKKYERISWSFKEKKPLKFDFLLAWHKTGSEESTMMSYFSKYQIQEHQPKVALSTLRDLQCPVLQSSELEGTPEVSCRALELFDWLGAVFSNVDLNNEPNNFISTYCCPEPSTVVAKAYLCTITGFILPEKICLLLEHLCHYFDEPKLAPWVTLSVQGFADSPVSWEKNEHGFRKGGEHLYNFVIFNNQDYWLQMAVGANDHCPP

SEQ ID NO: 166724 - protein, 303 aa, Artificial Sequence
  derived and/or modified sequence
MNTGPYYFVKNLPLHELITPEFISTFIKKGSCYALTYNTHIDEDNTVALLPNGKLILSLDKDTYEETGLQGHPSQFSGRKIMKFIVSIDLMELSLNLDSKKYERISWSFKEKKPLKFDFLLAWHKTGSEESTMMSYFSKYQIQEHQPKVALSTLRDLQCPVLQSSELEGTPEVSCRALELFDWLGAVFSNVDLNNEPNNFISTYCCPEPSTVVAKAYLCTITGFILPEKICLLLEHLCHYFDEPKLAPWVTLSVQGFADSPVSWEKNEHGFRKGGEHLYNFVIFNNQDYWLQMAVGANDHCPP

SEQ ID NO: 166725 - DNA, 1092 bp, Artificial Sequence
  derived and/or modified sequence
atggctacccttcggagactgcgagaagccccaagacacctgcttgtctgcgaaaagtccaactttggaaaccataaatctagacacagacacctggtgcagacccactattacaattaccgagtgagctttctgatcccagaatgcggaatactctctgaggagctaaaaaatctggtgatgaacacagggccttactattttgtaaagaacctgcccctacacgagctgatcacacccgaatttataagcacttttattaagaaaggctcttgctatgccctaacttacaatactcacatcgatgaggataatactgtagccctgctcccaaatgggaaactgatcctgtccctcgataaagacacctacgaggaaactggtctccagggccaccccagtcaattcagtggccggaaaataatgaaatttatcgtgagcatcgacctgatggaactgtctctcaacctggactctaaaaaatacgagagaatctcttggtcatttaaggagaaaaaacctctaaaatttgactttctgttggcctggcacaaaaccggtagtgaggagagtacgatgatgagttatttcagcaagtaccaaatccaggaacaccagcctaaggtggccctctctactttacgcgatctgcaatgtcccgtactgcagtcatcagagctggagggtaccccagaggtctcctgcagggcgttggagcttttcgactggttgggcgctgttttcagcaatgtggacttgaacaatgaacctaacaattttatttcgacttactgctgtcccgaaccaagcaccgtggtggctaaggcgtatctttgcacaatcactggcttcattctgccggaaaagatctgtctcctgctggaacacctctgtcactactttgatgaaccaaagctggcgccctgggtgacactgagtgtgcagggattcgccgacagtccagtcagctgggagaagaatgaacatggatttagaaaaggtggcgagcatttgtacaatttcgtcatctttaataatcaggactactggttgcagatggcagtgggagctaatgatcattgccctccatag

SEQ ID NO: 166726 - DNA, 912 bp, Artificial Sequence
  derived and/or modified sequence
atgaatactggtccctattattttgtcaaaaacctccccctccacgagctgatcactcccgagttcatctcaactttcattaagaagggaagttgctacgctctgacttataacactcacattgacgaggacaacacagtggctttattacctaatggtaaactgatcctctcgttggataaagatacttatgaggagactggcttgcaaggacacccctcacagttctcaggaaggaagataatgaagttcattgtgagtatcgacctcatggagctcagcctcaatctggattccaagaaatatgagcgcatttcctggagcttcaaggagaaaaagcccctcaaatttgattttttattggcttggcacaagacagggtctgaggagagtactatgatgtcttatttctcgaaataccagatccaagagcatcagccgaaagtagcgctctccaccctgcgcgatctgcaatgccctgttctgcagtcgtctgagcttgagggcactccggaggtgtcatgtcgtgccttagagctctttgattggctgggtgcggtgttttcaaacgtcgatttgaacaacgagcctaataactttatcagtacatattgttgtccagagccttcaacggtcgtggcaaaggcatacctgtgtaccataacaggttttattctgcccgagaaaatttgcctcctcctggagcatctgtgccattacttcgacgagcctaaactggcaccttgggttactcttagtgtgcaaggctttgcagactctcccgttagctgggagaagaatgagcacgggttcagaaagggtggtgagcacttatacaattttgtcatatttaataaccaggattattggctgcagatggccgtcggggcgaatgatcattgtccaccttag

SEQ ID NO: 166727 - DNA, 1092 bp, Artificial Sequence
  derived and/or modified sequence
atggccaccctgcggcggctgcgggaggcccccaggcacctgctggtgtgtgagaagagcaactttggaaaccacaagagccgccaccgccacctggtgcagacccactactacaactacagagtgtccttcctgatcccagaatgtggcatcctgtctgaggagctgaagaacctggtgatgaacacaggcccctactactttgtgaagaacctgcccctgcacgagctgatcaccccagagttcatcagcaccttcatcaagaagggcagctgctacgccctgacctacaacacccacattgatgaggacaacacagtggccctgctgcccaacgggaagctgatcctgagcctggacaaggacacctatgaggagaccggcctgcagggccaccccagccagttcagcggcaggaagatcatgaagttcatcgtgtccattgacctgatggagctgagcctgaacctggacagcaagaagtatgaaagaatctcctggagcttcaaggagaagaagcccctgaagtttgacttcctgctggcctggcacaagacaggcagcgaggagagcaccatgatgagctacttcagcaagtaccagatccaggagcaccagcccaaggtggccctgagcaccctgcgggacctgcagtgccctgtgctgcagagcagcgagctggagggcaccccagaggtgtcctgccgggccctggagctgtttgactggctgggcgctgtgttcagcaatgtggacctgaacaatgagcccaacaacttcatcagcacctactgctgcccagagcccagcacagtggtggccaaggcctacctgtgcaccatcaccggcttcatcctgcctgagaagatctgcctgctgctggagcacctgtgccactactttgatgagcccaagctggccccctgggtgaccctgtctgtgcagggctttgctgacagccctgtgtcctgggagaagaatgaacatggcttcagaaaaggaggagagcacctgtacaactttgtgatcttcaacaaccaggactactggctgcagatggctgtgggcgccaatgaccactgccccccatag

SEQ ID NO: 166728 - DNA, 912 bp, Artificial Sequence
  derived and/or modified sequence
atgaacacaggcccctactactttgtgaagaacctgcccctgcacgagctgatcaccccagagttcatcagcaccttcatcaagaagggcagctgctacgccctgacctacaacacccacattgatgaggacaacacagtggccctgctgcccaacgggaagctgatcctgagcctggacaaggacacctatgaggagaccggcctgcagggccaccccagccagttcagcggcaggaagatcatgaagttcatcgtgtccattgacctgatggagctgagcctgaacctggacagcaagaagtatgaaagaatctcctggagcttcaaggagaagaagcccctgaagtttgacttcctgctggcctggcacaagacaggcagcgaggagagcaccatgatgagctacttcagcaagtaccagatccaggagcaccagcccaaggtggccctgagcaccctgcgggacctgcagtgccctgtgctgcagagcagcgagctggagggcaccccagaggtgtcctgccgggccctggagctgtttgactggctgggcgctgtgttcagcaatgtggacctgaacaatgagcccaacaacttcatcagcacctactgctgcccagagcccagcacagtggtggccaaggcctacctgtgcaccatcaccggcttcatcctgcctgagaagatctgcctgctgctggagcacctgtgccactactttgatgagcccaagctggccccctgggtgaccctgtctgtgcagggctttgctgacagccctgtgtcctgggagaagaatgaacatggcttcagaaaaggaggagagcacctgtacaactttgtgatcttcaacaaccaggactactggctgcagatggctgtgggcgccaatgaccactgccccccatag

SEQ ID NO: 166729 - DNA, 1092 bp, Artificial Sequence
  derived and/or modified sequence
atggccaccctgcggcggctgcgggaggccccccggcacctgctggtgtgtgagaaatcgaacttcggcaaccacaagtcacgccatcgccacctggtccaaacacattactacaactatagggtctctttcctcattcctgaatgcggaatcttgtccgaagaactcaaaaacctggtgatgaacacgggtccttactatttcgtcaaaaatctaccgcttcatgaactcataactccggagttcatttctaccttcattaagaaaggatcctgttatgcgttgacctacaacacgcacattgacgaagacaataccgttgcgttgctccctaacggcaagctcatactgtctttagacaaagatacgtatgaggaaactggcctgcagggccacccaagccagtttagcggtcgaaagattatgaaattcatagtttccattgatctgatggagctgagtctgaacctcgacagtaagaaatacgaacgaatctcatggtcttttaaggagaagaaaccgctgaagttcgatttcctgctggcttggcataagaccgggtctgaagaatccacgatgatgagctactttagcaagtaccagatccaggagcaccagccaaaggtagccctttctaccttacgggatctccagtgcccggtgttacaatcctctgagttggagggtactcccgaggtcagttgccgagccctggaattgttcgattggctgggggctgtgtttagtaatgttgacctgaataatgaaccgaataattttatctccacatattgttgccctgaaccatctaccgttgtagcgaaggcctacttgtgtaccattactggtttcatcctcccggagaagatctgccttctgctcgaacacctgtgtcattattttgacgagccaaaactcgccccctgggtgactctcagcgtccaaggctttgccgatagcccagtgtcctgggaaaagaatgagcacggattcagaaaaggaggggagcatctctacaattttgtgatcttcaataaccaggattactggcttcagatggcagttggagccaatgaccattgtcctccgtag

SEQ ID NO: 166730 - DNA, 912 bp, Artificial Sequence
  derived and/or modified sequence
atgaacaccggcccctactacttcgtgaagaacctgcccctgcacgaactgatcactccagaatttatctcaacatttataaaaaagggcagctgttacgcgctgacttataatacccatatcgacgaggataacacagttgcgctgctgcctaatggaaaactgatactgtccctggataaggatacctacgaggagaccggcttgcagggacatcctagtcagtttagcggccgcaagattatgaagttcatagttagtattgacctgatggagctaagtttaaacctcgatagcaagaaatacgagagaattagctggagctttaaggagaaaaaacccctgaaatttgacttcctgctggcatggcataaaaccgggagcgaggagagtacgatgatgagctactttagcaagtatcagatccaggaacatcagcctaaggttgctttatctacattgagagacttgcagtgtcccgtcctacagagtagcgaactggaaggcactccagaagtttcttgcagagctcttgaactgtttgattggctgggagctgtgttcagcaatgtcgacctcaataatgagcccaacaatttcatttctacctactgttgtccggagccctcgaccgtcgtggccaaggcatacttgtgcactatcactggattcattttacccgaaaagatttgcttgctcctcgagcacctgtgtcattactttgacgagcctaagctggctccgtgggtgaccttgagtgttcagggattcgccgactcccccgtcagctgggagaaaaatgagcatggatttaggaagggaggagagcatctctacaacttcgtaatttttaacaaccaggactactggctgcagatggctgtcggagccaatgaccactgtccgccttag

SEQ ID NO: 166731 - DNA, 1092 bp, Artificial Sequence
  derived and/or modified sequence
atggcgacactcagacgccttcgcgaagccccaaggcatcttcttgtttgtgagaagtctaatttcggcaaccacaaatcgagacaccggcacctggtgcagacccattattacaactacagagtgagtttcctgattcctgaatgtggcatactttccgaggaactgaaaaacctcgttatgaacaccggaccatattactttgtgaagaacctcccactgcacgaattgatcacccctgagttcatcagtaccttcattaaaaagggatcatgttatgcgcttacgtataacacccacatagacgaggataatacggtggccttgcttcccaatggtaaactcatccttagcctggataaagatacttacgaagagaccggcttgcaggggcacccctcccagttttccggcaggaagatcatgaagttcattgtgagcatcgatctcatggaactgtctctcaacctcgattccaagaaatacgaacgaatcagttggtcatttaaagagaaaaagcctctgaagttcgacttcctcctggcttggcacaaaacagggagcgaagaaagcactatgatgtcttacttctccaagtatcagatccaggagcaccaacctaaagttgccctctccacgctccgagacctccagtgccctgtgctccagagctctgagctcgaaggcaccccggaggtttcttgtagggcgttggagctgttcgactggctcggcgcagtgttttccaacgttgacttgaataatgaaccaaataatttcattagtacatattgctgcccggagccctcaacagtagtggccaaggcttacctgtgtacaatcaccggtttcatcttgcccgaaaagatctgtctacttctagaacacttatgccactatttcgacgagcctaagctggcaccatgggtcacactttcagtgcaggggttcgctgatagtcccgtatcctgggaaaagaacgagcacggatttagaaaggggggagaacacctgtataattttgtaatcttcaacaaccaggactattggctgcagatggcggtcggcgctaatgatcactgccccccttag

SEQ ID NO: 166732 - DNA, 912 bp, Artificial Sequence
  derived and/or modified sequence
atgaatacaggcccttattacttcgtcaaaaacctgccactgcacgaactgattacccccgagttcattagcaccttcatcaaaaaagggtcgtgctatgccctcacgtacaatacccatatcgacgaagacaacacagtcgccctgttgccaaatgggaaattaatcctgagtctggacaaggacacatacgaagaaacaggcctgcagggacacccctcacagttctcagggagaaagattatgaaatttatagtgagcattgatctcatggagctttcattgaacctggattctaagaagtacgagcgtatctcgtggtccttcaaggagaagaagccccttaaattcgactttttgctcgcctggcataagacaggcagcgaagagtctaccatgatgtcatatttttcaaaataccagatccaagagcaccagccaaaagtggcccttagcaccctgagggacctgcagtgccccgtgttgcaaagcagtgagcttgagggaacgcccgaggtttcgtgcagggcactggagctgtttgactggctcggcgcagtgttttctaacgtggacctaaacaatgaacctaacaatttcatttcgacatactgttgtcccgagccctctaccgtggtggcaaaagcatacctttgtactatcacaggctttatactaccggagaagatctgcttgctgctcgagcacctgtgccactacttcgatgaaccaaaactcgcaccttgggttacattaagtgtccagggattcgccgacagcccagtctcatgggagaagaatgagcacggcttccgcaagggcggagagcatttatacaacttcgtgatcttcaacaatcaagactactggttacagatggcagtcggagctaatgatcattgtcctccctag

SEQ ID NO: 166733 - DNA, 1483 bp, Artificial Sequence
  derived and/or modified sequence
gtgccccgccagcggaggccgggaggaccaggaacccaggagagcatggccacgctgcgccggcttcgggaggcgccgcggcacttactggtttgcgagaaatccaacttcggcaaccacaagtcgcgccaccggcatcttgtgcagacgcactactataactacagggtttcatttctcattcctgaatgtgggatactatcggaagaactgaaaaacctggtcatgaacactggaccctattactttgtgaagaatttacctcttcatgaattaattacacctgaattcatcagtacctttataaagaaaggttcttgctatgcactaacatacaatacacatattgatgaagataatactgttgccctgctaccaaatgggaaattaattttgtcactggataaagacacttatgaagaaactggacttcagggtcatccatctcagttttctggcagaaaaattatgaaatttattgtttccattgatttgatggaattatccttaaacttggattctaagaagtatgaaagaatatcttggtctttcaaagaaaagaagccattgaaatttgattttcttttggcttggcataaaacaggttcagaagaatcgacaatgatgtcatatttttccaagtaccaaattcaggagcatcagccaaaagtagcactgagcacgttgagagatctccagtgcccagtgctgcagagcagcgagctggagggaacgccagaggtgtcctgccgggctctggagctcttcgactggctcggcgccgtcttcagtaatgtcgacctaaataatgagcctaataatttcatatcaacctattgctgtcctgagccaagcacagtggtggcaaaagcttatttgtgtacaatcactggcttcatacttccagagaagatctgtctcctattggaacatctctgtcactactttgatgaaccgaagttagctccatgggttacactgtccgttcaaggctttgcagacagccctgtttcttgggaaaaaaatgaacatggttttcgaaaaggaggagaacatttatataactttgtgatttttaataatcaggactattggcttcagatggctgttggggcaaatgatcactgtccaccataaaaaataaaaattaaaaatcgtgtttacttacatttacgcttgctttcagatttcttaatggtaaaaggtctgtgtgtccactcaggcttgtgtgatggtgacatttctcagatcagcatttgctggcatcctgccctgcacctgagacccatctgtgatggcagcaaggcctgctgtccagtgaatagctcatagttgatttctctctgtcaacataagcacagggttgtgggttactatgtggtacactgggccaggatgtccagggaccggggatattggtccccatctcactccattggttgagatatattttgttcattacaactttttcagataataaaaa

SEQ ID NO: 166734 - DNA, 1042 bp, Artificial Sequence
  derived and/or modified sequence
ggtacccagtctggagggagctgttgtcaggggcgttctggctgctcactcgtgtcaacccgccgaactgggagtttcatttctcattcctgaatgtgggatactatcggaagaactgaaaaacctggtcatgaacactggaccctattactttgtgaagaatttacctcttcatgaattaattacacctgaattcatcagtacctttataaagaaaggttcttgctatgcactaacatacaatacacatattgatgaagataatactgttgccctgctaccaaatgggaaattaattttgtcactggataaagacacttatgaagaaactggacttcagggtcatccatctcagttttctggcagaaaaattatgaaatttattgtttccattgatttgatggaattatccttaaacttggattctaagaagtatgaaagaatatcttggtctttcaaagaaaagaagccattgaaatttgattttcttttggcttggcataaaacaggttcagaagaatcgacaatgatgtcatatttttccaagtaccaaattcaggagcatcagccaaaagtagcactgagcacgttgagagatctccagtgcccagtgctgcagagcagcgagctggagggaacgccagaggtgtcctgccgggctctggagctcttcgactggctcggcgccgtcttcagtaatgtcgacctaaataatgagcctaataatttcatatcaacctattgctgtcctgagccaagcacagtggtggcaaaagcttatttgtgtacaatcactggcttcatacttccagagaagatctgtctcctattggaacatctctgtcactactttgatgaaccgaagttagctccatgggttacactgtccgttcaaggctttgcagacagccctgtttcttgggaaaaaaatgaacatggttttcgaaaaggaggagaacatttatataactttgtgatttttaataatcaggactattggcttcagatggctgttggggcaaatgatcactgtccaccataa

SEQ ID NO: 166735 - DNA, 1092 bp, Artificial Sequence
  derived and/or modified sequence
atggccaccctgagaagactgagagaggcccccagacacctgctggtgtgcgagaagagcaacttcggcaaccacaagagcagacacagacacctggtgcagacccactactacaactacagagtgagcttcctgatccccgagtgcggcatcctgagcgaggagctgaagaacctggtgatgaacaccggcccctactacttcgtgaagaacctgcccctgcacgagctgatcacccccgagttcatcagcaccttcatcaagaagggcagctgctacgccctgacctacaacacccacatcgacgaggacaacaccgtggccctgctgcccaacggcaagctgatcctgagcctggacaaggacacctacgaggagaccggcctgcagggccaccccagccagttcagcggcagaaagatcatgaagttcatcgtgagcatcgacctgatggagctgagcctgaacctggacagcaagaagtacgagagaatcagctggagcttcaaggagaagaagcccctgaagttcgacttcctgctggcctggcacaagaccggcagcgaggagagcaccatgatgagctacttcagcaagtaccagatccaggagcaccagcccaaggtggccctgagcaccctgagagacctgcagtgccccgtgctgcagagcagcgagctggagggcacccccgaggtgagctgcagagccctggagctgttcgactggctgggcgccgtgttcagcaacgtggacctgaacaacgagcccaacaacttcatcagcacctactgctgccccgagcccagcaccgtggtggccaaggcctacctgtgcaccatcaccggcttcatcctgcccgagaagatctgcctgctgctggagcacctgtgccactacttcgacgagcccaagctggccccctgggtgaccctgagcgtgcagggcttcgccgacagccccgtgagctgggagaagaacgagcacggcttcagaaagggcggcgagcacctgtacaacttcgtgatcttcaacaaccaggactactggctgcagatggccgtgggcgccaacgaccactgccccccctag

SEQ ID NO: 166736 - DNA, 912 bp, Artificial Sequence
  derived and/or modified sequence
atgaacaccggcccctactacttcgtgaagaacctgcccctgcacgagctgatcacccccgagttcatcagcaccttcatcaagaagggcagctgctacgccctgacctacaacacccacatcgacgaggacaacaccgtggccctgctgcccaacggcaagctgatcctgagcctggacaaggacacctacgaggagaccggcctgcagggccaccccagccagttcagcggcagaaagatcatgaagttcatcgtgagcatcgacctgatggagctgagcctgaacctggacagcaagaagtacgagagaatcagctggagcttcaaggagaagaagcccctgaagttcgacttcctgctggcctggcacaagaccggcagcgaggagagcaccatgatgagctacttcagcaagtaccagatccaggagcaccagcccaaggtggccctgagcaccctgagagacctgcagtgccccgtgctgcagagcagcgagctggagggcacccccgaggtgagctgcagagccctggagctgttcgactggctgggcgccgtgttcagcaacgtggacctgaacaacgagcccaacaacttcatcagcacctactgctgccccgagcccagcaccgtggtggccaaggcctacctgtgcaccatcaccggcttcatcctgcccgagaagatctgcctgctgctggagcacctgtgccactacttcgacgagcccaagctggccccctgggtgaccctgagcgtgcagggcttcgccgacagccccgtgagctgggagaagaacgagcacggcttcagaaagggcggcgagcacctgtacaacttcgtgatcttcaacaaccaggactactggctgcagatggccgtgggcgccaacgaccactgccccccctag

SEQ ID NO: 166737 - protein, 568 aa, Artificial Sequence
  derived and/or modified sequence
MERDRISALKRSFEVEEVETPNSTPPRRVQTPLLRATVASSTQKFQDLGVKNSEPSARHVDSLSQRSPKASLRRVELSGPKAAEPVSRRTELSIDISSKQVENAGAIGPSRFGLKRAEVLGHKTPEPAPRRTEITIVKPQESAHRRMEPPASKVPEVPTAPATDAAPKRVEIQMPKPAEAPTAPSPAQTLENSEPAPVSQLQSRLEPKPQPPVAEATPRSQEATEAAPSCVGDMADTPRDAGLKQAPASRNEKAPVDFGYVGIDSILEQMRRKAMKQGFEFNIMVVGQSGLGKSTLINTLFKSKISRKSVQPTSEERIPKTIEIKSITHDIEEKGVRMKLTVIDTPGFGDHINNENCWQPIMKFINDQYEKYLQEEVNINRKKRIPDTRVHCCLYFIPATGHSLRPLDIEFMKRLSKVVNIVPVIAKADTLTLEERVHFKQRITADLLSNGIDVYPQKEFDEDSEDRLVNEKFREMIPFAVVGSDHEYQVNGKRILGRKTKWGTIEVENTTHCEFAYLRDLLIRTHMQNIKDITSSIHFEAYRVKRLNEGSSAMANGMEEKEPEAPEM

SEQ ID NO: 166738 - DNA, 1707 bp, Artificial Sequence
  derived and/or modified sequence
atggagagagacagaatcagcgccctgaagagaagcttcgaggtggaggaggtggagacccccaacagcaccccccccagaagagtgcagacccccctgctgagagccaccgtggccagcagcacccagaagttccaggacctgggcgtgaagaacagcgagcccagcgccagacacgtggacagcctgagccagagaagccccaaggccagcctgagaagagtggagctgagcggccccaaggccgccgagcccgtgagcagaagaaccgagctgagcatcgacatcagcagcaagcaggtggagaacgccggcgccatcggccccagcagattcggcctgaagagagccgaggtgctgggccacaagacccccgagcccgcccccagaagaaccgagatcaccatcgtgaagccccaggagagcgcccacagaagaatggagccccccgccagcaaggtgcccgaggtgcccaccgcccccgccaccgacgccgcccccaagagagtggagatccagatgcccaagcccgccgaggcccccaccgcccccagccccgcccagaccctggagaacagcgagcccgcccccgtgagccagctgcagagcagactggagcccaagccccagccccccgtggccgaggccacccccagaagccaggaggccaccgaggccgcccccagctgcgtgggcgacatggccgacacccccagagacgccggcctgaagcaggcccccgccagcagaaacgagaaggcccccgtggacttcggctacgtgggcatcgacagcatcctggagcagatgagaagaaaggccatgaagcagggcttcgagttcaacatcatggtggtgggccagagcggcctgggcaagagcaccctgatcaacaccctgttcaagagcaagatcagcagaaagagcgtgcagcccaccagcgaggagagaatccccaagaccatcgagatcaagagcatcacccacgacatcgaggagaagggcgtgagaatgaagctgaccgtgatcgacacccccggcttcggcgaccacatcaacaacgagaactgctggcagcccatcatgaagttcatcaacgaccagtacgagaagtacctgcaggaggaggtgaacatcaacagaaagaagagaatccccgacaccagagtgcactgctgcctgtacttcatccccgccaccggccacagcctgagacccctggacatcgagttcatgaagagactgagcaaggtggtgaacatcgtgcccgtgatcgccaaggccgacaccctgaccctggaggagagagtgcacttcaagcagagaatcaccgccgacctgctgagcaacggcatcgacgtgtacccccagaaggagttcgacgaggacagcgaggacagactggtgaacgagaagttcagagagatgatccccttcgccgtggtgggcagcgaccacgagtaccaggtgaacggcaagagaatcctgggcagaaagaccaagtggggcaccatcgaggtggagaacaccacccactgcgagttcgcctacctgagagacctgctgatcagaacccacatgcagaacatcaaggacatcaccagcagcatccacttcgaggcctacagagtgaagagactgaacgagggcagcagcgccatggccaacggcatggaggagaaggagcccgaggcccccgagatgtag

SEQ ID NO: 166739 - DNA, 1707 bp, Artificial Sequence
  derived and/or modified sequence
atggaaagggacaggatatcagccctgaaaaggtcgtttgaggtggaggaagtcgaaacacctaattccacccccccacgccgcgtgcaaaccccactgttgagggcgaccgtggccagctcaacccagaaattccaagatctgggagttaagaattctgaacctagcgccaggcacgttgatagcctgtcgcagcgaagtcctaaggctagcttacgaagggtagaactgtcgggacccaaggcagcagagcccgtctctcgacgcacagaactgtctatcgatatcagctctaagcaggtggagaacgctggggccatcggccccagtcggtttgggcttaaaagagctgaagtcctggggcacaagacaccagagcctgcaccaaggaggacagagataacaattgtaaagccacaggaatccgcccatagaagaatggagccgcccgccagtaaggtgcctgaggtacctactgcccctgcgaccgacgcggcacctaaaagagttgaaattcagatgcccaagccagccgaggctccaactgcaccttcgccagcgcagactcttgagaattccgagcctgcacctgttagtcagctgcaaagcaggctggagcccaaaccccagccacctgtcgccgaagctacaccacggagccaggaggccacggaggcagcccccagttgcgttggcgatatggcagatacgccgagagatgcaggcctaaagcaggccccggcttcccgaaatgagaaagctccagttgactttggatacgtcggaatcgacagcattttagaacagatgcggcggaaggccatgaagcaggggttcgaattcaacataatggtagtcggacagtccgggctgggcaagtccactctgattaacacactgtttaaaagcaagatctcaaggaaaagtgtgcagcctacctccgaggagaggatccccaagaccatagagattaaaagcattacccatgatattgaagaaaaaggtgttaggatgaagttaacagttatagacacacctggcttcggcgatcacattaataacgaaaattgctggcagccaatcatgaaatttatcaatgaccagtatgagaaataccttcaggaggaggtgaacatcaataggaagaaacggatacctgacacccgggtccactgttgcttatattttattccagctactggccacagtctgcgcccgctagacatagagtttatgaagcgcctttcaaaggtggtgaatattgtgccggtgatagccaaagctgatacactgaccctggaggagagggtgcatttcaaacagagaatcaccgcggaccttctgtcaaacggcatagacgtctaccctcaaaaagagttcgatgaggactcagaggaccgcctggtgaatgaaaaattccgagagatgataccattcgccgtggtggggagtgatcacgagtaccaggtgaacgggaagcgaattctggggagaaaaactaaatggggtacaatcgaagtagagaatactactcactgtgagttcgcctacttgagggacctgctgataaggacccatatgcagaatatcaaggatattaccagttccatccactttgaggcttatagggtgaagcgactcaatgaaggttcatctgcaatggctaatgggatggaagagaaggaacccgaagctcctgagatgtag

SEQ ID NO: 166740 - DNA, 1707 bp, Artificial Sequence
  derived and/or modified sequence
atggagcgggaccgcatcagcgccctgaagaggagctttgaggtggaggaggtggagacccccaacagcaccccaccaagaagagtgcagacccccctgctgcgggccaccgtggccagcagcacccagaagttccaggacctgggcgtgaagaacagcgagcccagcgcccggcacgtggacagcctgagccagaggagccccaaggccagcctgcggcgggtggagctgagcggccccaaggctgctgagcctgtgtccagaagaacagagctgagcattgacatcagcagcaagcaggtggagaatgctggggccatcggccccagccgcttcggcctgaagagagctgaggtgctgggccacaagaccccagagcccgcccccaggagaacagagatcaccatcgtgaagccccaggagagcgcccacaggaggatggagcccccagccagcaaggtgcctgaggtgcccacagccccagccacagatgctgcccccaagagggtggagatccagatgcccaagccagctgaggcccccacagcccccagccctgcccagaccctggagaacagcgagcccgcccctgtgtcccagctgcagagccggctggagcccaagccccagccccctgtggccgaggccacccccaggagccaggaggccacagaggccgcccccagctgtgtgggggacatggctgacaccccaagagatgctggcctgaagcaggccccagccagcagaaatgagaaggcccctgtggactttggctacgtgggcatcgacagcatcctggagcagatgaggaggaaggccatgaagcagggctttgagttcaacatcatggtggtgggccagagcggcctgggcaagagcaccctcatcaacaccctcttcaagagcaagatcagcaggaagtctgtgcagcccaccagcgaggagcgcatccccaagaccatcgagatcaagagcatcacccatgacatcgaggagaagggcgtgaggatgaagctgactgtgattgacaccccaggctttggagaccacatcaacaatgaaaactgctggcagcccatcatgaagttcatcaatgaccagtatgagaagtacctgcaggaggaggtgaacatcaacaggaagaagaggatcccagacaccagggtgcactgctgcctgtacttcatcccagccaccggccacagcctgcggcccctggacatcgagttcatgaagaggctgagcaaggtggtgaacatcgtgcctgtgattgccaaggctgacaccctgaccctggaggagcgggtgcacttcaagcagaggatcacagctgacctgctgagcaatggaattgatgtgtacccccagaaggagtttgatgaggacagtgaagatcggctggtgaatgagaagttccgggagatgatcccctttgctgtggtgggcagtgaccacgagtaccaggtgaatggcaagaggatcctgggcaggaagaccaagtggggcaccatcgaggtggagaacaccacccactgtgaatttgcctacctgcgggacctgctgatccgcacccacatgcagaacatcaaggacatcaccagcagcatccactttgaggcctacagagtgaagaggctgaatgaaggcagcagcgccatggccaacggcatggaggagaaggagcctgaggcccctgagatgtag

SEQ ID NO: 166741 - DNA, 1707 bp, Artificial Sequence
  derived and/or modified sequence
atggagcgggaccggatcagcgccctgaagcggagcttcgaggtggaggaagtcgaaacccccaattcaacgcccccgcggcgagtgcagacacctttgctgcgcgctaccgtggcaagctctacccagaaattccaggacctcggagtgaaaaacagcgagccatctgcacggcacgtcgactcacttagccagcgatcgccgaaagcatccctcaggcgggtcgagctctccggtccgaaggctgcagaacctgtgagtagacggaccgaacttagcatcgatataagctccaagcaggtagagaatgctggagctatcggcccctctaggttcggtctcaaacgcgccgaagtgcttggccataagacgccagagcccgcccccagacggacggagattaccattgtcaagcctcaggagtccgcacataggcggatggaacctcccgcctcaaaagtacccgaagtgcctaccgcaccagccacggacgccgcgcctaaaagagttgagatccagatgccgaaacccgcagaagcgccaaccgcaccctcccctgcgcagaccctggagaacagcgagccagcaccagtgtcacagttgcagtcacggttggaaccaaaaccacagcccccggttgccgaggccacaccgcgaagccaagaagccacggaagccgctccctcctgcgtcggcgacatggctgatacaccccgggatgccggtctgaaacaggcaccagcatcacggaacgaaaaggctccagtcgattttggctacgtgggtatcgacagcattctcgaacagatgcgcaggaaagccatgaaacagggattcgagttcaatataatggtggtgggccagtccggactcggcaagtccaccttgatcaacactctgtttaaatccaagatcagcagaaagagtgtacagccaacgtctgaagaacgtattccaaagacaattgagattaagagtatcacccatgatatcgaagagaagggggtgaggatgaagctgacggtgatcgatactccgggatttggggatcacattaacaatgaaaactgctggcagcctattatgaaattcatcaacgaccaatacgagaagtatctgcaggaagaggtgaacatcaatcgaaagaagagaatacctgacaccagggttcattgctgtttgtacttcatcccagcgactgggcactctctacggcctctggacattgaatttatgaagaggctatccaaggtggtaaacattgttcctgtgatcgcaaaagccgacaccctgactctagaggagcgcgtccacttcaaacaacgaataaccgccgacctgctttcaaatggaatcgatgtgtacccacagaaggaattcgatgaagattctgaagatcgcctcgtgaacgagaagtttagagaaatgattcccttcgccgtggttgggtcggaccatgaatatcaggtgaacggcaaaagaattctgggcaggaaaaccaagtggggaactattgaggtggagaatactacgcactgcgaatttgcttatcttcgggatttgctaatacgcacacacatgcaaaatattaaagatattacttccagtatccattttgaggcataccgggttaaaagattgaatgagggctcatcagccatggccaatgggatggaagagaaagagccggaggctcccgagatgtag

SEQ ID NO: 166742 - DNA, 1707 bp, Artificial Sequence
  derived and/or modified sequence
atggaacgggatcgaatctccgccctgaagagatctttcgaggtagaggaggttgaaactccaaacagtacccccccacgaagggttcagactccactgcttcgcgcaacagtggcaagtagcactcagaagtttcaggatctgggcgtcaaaaactccgaaccttcggcgagacatgtggattcactgagtcagcgcagccctaaggcatcccttcgacgtgtggaactctctggaccgaaggccgctgaacctgtctcccggcgaacggaattgtctattgacatcagtagtaagcaagttgagaacgcgggagcaattggcccaagtagattcggactgaagagagctgaggtactgggccacaaaacaccggagcccgctcccagacgtacggagattacaatagtaaagccacaggaatcagcacatagacgtatggagccccctgcttccaaggttcccgaagttccaactgctccggctacggatgcagctccgaagagagtggagatccagatgcctaagcctgctgaggcgcctaccgcacctagcccagcacagaccctggagaactctgaacctgcccctgtatcccagctccagtctcggcttgagcccaaaccacagcccccagtggccgaagctacacccaggtcacaggaggcaactgaagccgcaccatcttgcgtgggcgatatggcagatactcccagggatgccggtttgaaacaggctcccgcaagtagaaacgagaaggcccctgtcgacttcggttatgtaggtatagattctattttggaacagatgcgccgaaaggccatgaagcagggttttgaatttaacatcatggtcgtggggcagtctgggctcggaaagtccaccctaattaatactctgtttaaatcaaagattagccggaaaagcgtccaacctacttcggaagaacgtattccaaagaccattgagatcaagtcgattacccatgatattgaagaaaagggtgttcggatgaagctaactgtgatagacactcccggattcggcgaccatatcaacaatgaaaattgctggcagcccattatgaagttcattaatgatcagtacgagaagtatttgcaggaagaagtgaacatcaataggaaaaagagaattccggatacccgtgttcactgctgcctttacttcatacctgcaaccggtcattccctgaggccactggatatcgagtttatgaagcgtctctccaaagttgtaaacattgtaccagtcattgctaaggccgataccctgaccctcgaagaacgcgtccatttcaaacagcgtatcaccgcggatttactttcaaatgggatcgatgtttatccgcaaaaggaatttgacgaggattctgaggacaggcttgtaaacgaaaagtttcgagagatgataccgttcgccgtagtcgggagcgaccacgagtatcaggtcaatggcaagcggatcctcgggcgtaagactaaatggggtacaatagaggtggaaaacaccactcactgtgagttcgcttatctgcgtgacctgctcataagaacacacatgcagaacatcaaagacatcacatcgtctatccatttcgaggcatacagagtcaagagactgaacgagggctcctctgccatggctaatggtatggaagaaaaagaaccagaagcaccagaaatgtag

SEQ ID NO: 166743 - DNA, 4453 bp, Artificial Sequence
  derived and/or modified sequence
tgcctctgtcactgcagactaatgggacggaggggggtgacttctcagggttcctcctgggcaggtgctccggaaccttttctcagcacgctggcctggggcacggccgttcctcctgcccagccacgttggggtacagggtgaagaagggctggggccagcccaggacagaggaaggcgaggcaggcacgcaggaactgggctttttaaacccttaagcccaaggaaatcgtagcatcgcgggacagggaaaatgaaagactttggaagtcgtcaggaatttgactctgtgagttggtttccaagagtctaagttaagcatctccaagtggatattaaaaaggagcagcaagcctcggggcggcgggggctggaggaggtggagagaggaggctgccggaagccgcactcgggacctctgcagccaccgaccagaccgggcggccgggactctgggactctcgcaggcagacccggtggtctgccggactcctcggggcccacttcgggccctctctcctgcctcctatttttggatttctctcctttgctccctttttcctcccgttttgaagagacaatgctacttcagtttggagcacaaacatatgatcagcacatggaaatgtggtaattcggatgcattcgtgattgcaacagattgaagaaattagaccagacaaagagtgtttttagaggaggaggaggaggaggaggaggctgagagagggagggcgacgggggtgagaaaggggaggccgcctctgagcgggacgccgggactcccgccgctgctaaatatatccgtaggaatggagagggaccggatctcagccttgaaaagatcttttgaggtcgaggaggtcgagacacccaactccaccccaccccggagggtccagactcccctactccgagccactgtggccagctccacccagaaattccaggacctgggcgtgaagaactcagaaccctcggcccgccatgtggactccctaagccaacgctcccccaaggcgtccctgcggagggtggagctctcgggccccaaggcggccgagccggtgtcccggcgcactgagctgtccattgacatctcgtccaagcaggtggagaacgccggggccatcggcccgtcccggttcgggctcaagagggccgaggtgttgggccacaagacgccagaaccggcccctcggaggacggagatcaccatcgtcaaaccccaggagtcagcccaccggaggatggagccccctgcctccaaggtccccgaggtgcccactgcccctgccaccgacgcagcccccaagagggtggagatccagatgcccaagcctgctgaggcgcccaccgcccccagcccagcccagaccttggagaattcagagcctgcccctgtgtctcagctgcagagcaggctggagcccaagccccagccccctgtggctgaggctacaccccggagccaggaggccactgaggcggctcccagctgcgttggcgacatggccgacacccccagagatgccgggctcaagcaggcgcctgcatcacggaacgagaaggccccggtggacttcggctacgtggggattgactccatcctggagcagatgcgccggaaggccatgaagcagggcttcgagttcaacatcatggtggtcgggcagagcggcttgggtaaatccaccttaatcaacaccctcttcaaatccaaaatcagccggaagtcggtgcagcccacctcagaggagcgcatccccaagaccatcgagatcaagtccatcacgcacgatattgaggagaaaggcgtccggatgaagctgacagtgattgacacaccagggttcggggaccacatcaacaacgagaactgctggcagcccatcatgaagttcatcaatgaccagtacgagaaatacctgcaggaggaggtcaacatcaaccgcaagaagcgcatcccggacacccgcgtccactgctgcctctacttcatccccgccaccggccactccctcaggcccctggacatcgagtttatgaaacgcctgagcaaggtggtcaacatcgtccctgtcatcgccaaggcggacacactcaccctggaggagagggtccacttcaaacagcggatcaccgcagacctgctgtccaacggcatcgacgtgtacccccagaaggaatttgatgaggactcggaggaccggctggtgaacgagaagttccgggagatgatcccatttgctgtggtgggcagtgaccacgagtaccaggtcaacggcaagaggatccttgggaggaagaccaagtggggtaccatcgaagttgaaaacaccacacactgtgagtttgcctacctgcgggaccttctcatcaggacgcacatgcagaacatcaaggacatcaccagcagcatccacttcgaggcgtaccgtgtgaagcgcctcaacgagggcagcagcgccatggccaacggcatggaggagaaggagccagaagccccggagatgtagacgccaccctgcccacccccgggatcctgcccccaagtcatttccgtccccccccaggccctcccaccaccccattttattttatatgattttctccatttgtcatcgttccccaccccttcgacatgctgccaggaaacaagggaaggggcctccctccgagtgagtcagtgatgaggccgcggcctccccgaggttgtggggaggctgcactggagccacaggcaggggtgagagcacccactgaattgacatgaccctctgtccccaggcctggctccccgagggctcagaagagcagcttcggtgtgcagatcatccgtctgtgtggggttctcagtgccggaggccttggggtgggggccaggcctcgcacttgcagaggagcccagtgggctgcacgctcccctccatccccatcggccctgtcccctggagtgtgtcagagcccaggggagaatgcagcccaccaggagcacctggaccccctgcccgccacatggtgtggccatcactcagcccctacccctgccctgctcctaagggtagaaaactccagggtcccctgccaccgactgcccagccactccaagccccctggcagctgcccctcctggagcagaaagtgcctttatctcagccatccgcagactgcttggccagatgcggggacaggctggaatgagggaggcgtcttcatctccctgccatccccctctcacgccacccccgcccccaccgggctgcaggtgctgctgatgcgctgggatctgattgaggataaaaaggaaggagagatgacccctaccccctcatcccccagttttgaaaaggtctaagcaagtgagtctggtggaggagctgagggagggagccatggaaggtgccagaaggaaggttggcgggggcacgtgtgggccgtggcttgggctggtcagagtggcgtgagctgcccggcgcctgccctgcccaagtgaccagggaagtgtgtgtgtgtccatgtgtatgcgtgtccgtctgtctgtctagtgtctgggtttggcccaagactgggctgtagttacattaatgcccagccagccacccctgccactcacccttcctggcccaggccttgctgactctctgagctggggaggtgggaggccaggcgagcctgactctgttgatctacccgtgcctgggcccctcccctcagagcccatggtaacgaacccctagaaaggagagaacgggcgtcaggggtgcacagtccacagctgaagagcaaggtttcgtggcagcacggcccggcccctcaccctctgtccccacgaggggacccatgggggctgtctttgcagggcacagatgaccaaagtcccttcctgcttcctgttacctgtcttgctcctggggagaaagaggggcctgatgagactccactcaggtgcacacatcaccaggtgcatctgcaggcaccgggctggctgcttgcagccaggagaaggtcagcgagaaggagtgtatgagtgtgagtgtgtgtgcatggaagttggggcactgggcgtctgactccctccccacccaagagaggaaggacccctcaccacccccactggtgagacagtttactttgccaacttgccatgtttttgccaaaaccaagattttgaaggaaatgagtggccagcgccagggcccaggccatgtggcctgcccagcctcaatgtcacttggtggcggggtggggtgggggtgggcagcagcatcccagccttgagatgcttcactttccttctctgtaaccagactttgaaaaattgttcgtttcatcaggctctgttcctcaatggccttttgctacgtgcctcccgagaaatttgtctttttgtataaatgacaaagtgttgaaaatgtatttcctgaaataaatgtttcaaatgcagaaaccc

SEQ ID NO: 166744 - DNA, 1707 bp, Artificial Sequence
  derived and/or modified sequence
atggaacgagatcggattagcgccctgaagcgaagtttcgaggtagaggaagtcgagacccctaactctaccccacctcggcgggtccaaacccccctgcttcgagcgacggtcgcctcaagcacccagaaattccaggatctcggggtcaaaaactcagaaccaagcgcgcgccatgtagactccctgtcccagcgaagtcctaaagccagtctcaggcgcgttgagctgtccgggccaaaagcagcagagcccgttagcagacggactgaattgagtatcgatatcagctctaaacaagtagagaatgccggcgctatcggaccatctagatttggactgaagagggcggaggtgctgggccacaaaactccagagcctgctccccggaggaccgagatcactatcgtcaagcctcaggagtccgcccatcgtagaatggaaccgcccgcctccaaggtcccagaagttccgaccgcccccgctaccgatgcagcacctaaacgcgtggagattcagatgccaaaacccgccgaggcccccactgcgcccagtcctgctcagaccttagaaaatagcgagcctgcacccgtgagccagctgcaaagcagacttgaacccaaaccccaaccacccgtggccgaggccacccctcgctcacaggaagcaacagaggccgctccatcctgcgttggcgatatggcagacactccgcgcgatgccgggctcaaacaggctcctgcttcccgaaatgagaaggcgcccgtcgactttggatacgttggaattgattccattctggagcagatgagaagaaaagccatgaagcaagggttcgagtttaatattatggtcgtcggccagtctggtctaggtaaatctactcttattaacactctgttcaagtccaagatctcacgaaagtccgtccaacctaccagcgaagaaagaattcctaaaacaattgagattaagtccatcactcacgacatcgaggagaagggcgtccgcatgaaactgactgtaatcgacacacctggcttcggcgaccacatcaataatgaaaattgctggcaacctatcatgaaattcataaatgatcagtacgagaagtacctgcaagaggaggtcaatattaaccgcaaaaaaaggattcctgacacgcgggtccactgctgtctctactttatcccagctacaggacatagtctgagaccactggacattgaatttatgaagagattgagcaaggtggtgaacatagtgcctgtcatcgccaaggcggatacgctaacacttgaggaacgcgtccactttaaacaaagaattaccgccgatctgttaagcaacggcatcgatgtctatcctcaaaaggagtttgatgaggatagcgaagatagactcgtgaatgaaaagtttagggaaatgattccatttgccgttgttggctctgaccacgaataccaagttaacggcaaaaggatactcgggcgtaaaactaaatggggcacaatcgaagtggagaacaccacacactgcgaattcgcttatctccgggatctactgatccgcacacacatgcagaacattaaggatataaccagctctattcacttcgaagcttaccgggtgaaacgacttaatgagggcagttccgccatggccaacggaatggaggagaaagagcctgaagccccagagatgtag

SEQ ID NO: 166745 - DNA, 1707 bp, Artificial Sequence
  derived and/or modified sequence
atggagcgggaccggatcagcgccctgaagcggagcttcgaggtggaagaagtggagactcccaattctacccctccgcgaagagtgcagaccccgctgcttcgggcgacagtcgcctcctccactcagaaatttcaagatctgggagtgaagaattctgaaccctcagccagacacgtcgatagcctgtcccaacgcagcccaaaggcctcgctgaggcgtgtcgagctgtcgggacctaaagctgccgaacccgtgtctcggagaactgagctgtccattgacatttcctccaagcaggtcgaaaatgcgggcgccatcgggcctagtcgattcggacttaaacgagcagaagttctgggacacaagacccctgaacccgcccctcgcaggaccgagatcacaatagtaaagccccaggagtccgcccacagaaggatggaaccacccgcttccaaagtccccgaagtgcccacggcacctgcaacagacgccgctcctaagcgggtggaaatccaaatgccgaaaccagccgaagccccgactgctccttctccagcccagacccttgagaactccgaacccgctcccgtgtcccagcttcaatccaggctggaaccgaaaccacagccacccgttgctgaggctacaccaagaagtcaggaggctaccgaagctgctccctcttgcgtgggcgacatggctgataccccccgggatgcaggtctgaagcaggcgccagcttctagaaatgaaaaggcacccgtggatttcggttacgttggaatcgatagcatccttgaacaaatgcggcgcaaggccatgaagcagggcttcgaatttaacattatggtagtcgggcaatccggcctgggaaaaagtaccctcataaacacactgtttaaatctaagatttcgagaaagagcgtgcagcccaccagcgaggaaaggattccgaagacaattgaaatcaaatctattacccatgatattgaagagaagggggtgaggatgaaacttactgtcatagatacacctggattcggagaccacattaataatgagaactgttggcagccaataatgaaattcatcaacgatcagtacgagaagtatcttcaggaggaggtgaacattaacagaaagaaaaggattccagacacgagggtccattgttgtttatatttcattccggccactggccattccctgaggccgctggatattgaattcatgaaacgcctgtctaaggttgtgaacatcgtgcctgtgatagccaaggcagatacactcactctggaggagagggtgcacttcaaacaacgcattaccgccgacctattgtctaacgggattgatgtgtatccacagaaggaattcgatgaggactctgaggatcggctcgtcaacgaaaagtttagggagatgataccctttgctgtggtcggctccgatcacgaataccaggtgaatgggaaacgtatcctcgggcgcaaaaccaagtgggggacgatcgaagttgagaacacaactcactgcgagtttgcgtatcttcgcgacctactcattcgaacacacatgcaaaacattaaggatatcacttcaagcattcactttgaggcctatcgggtgaagcgcttgaacgaaggttcctctgccatggccaacgggatggaggagaaagagcctgaggctcctgagatgtag

SEQ ID NO: 166746 - DNA, 1707 bp, Artificial Sequence
  derived and/or modified sequence
atggagagagaccgaatttcagccttaaaacggagctttgaagtggaagaagtagagactccgaattcaactccacccagacgcgtccagactcccttgctccgagcaactgtggccagctccacgcagaaattccaggatctgggagtcaagaatagtgagccatctgcacgtcacgtcgattcactgtctcagaggagccctaaggcaagtctgagacgcgttgagctgtctggaccaaaggccgcagagcccgtgtctcggaggacagagctgagcatcgatataagctccaaacaggttgagaatgctggagctatcgggcctagcaggttcggcctcaaacgggcagaagtgctaggacacaaaactccagagccggctcctcggaggaccgagatcacgatcgttaagcctcaggagtcggctcataggcgaatggaaccgccagccagcaaagtacccgaagtcccgacagctccagccacagatgctgctccaaaacgcgtcgaaattcaaatgcctaaacctgctgaggcgcctactgctccctcgccggcacagactctcgaaaatagtgagccggcaccggtgtcacagcttcagtcacgactcgagcccaagccacagcctcccgtcgccgaggctacccccagatcccaagaggccactgaggccgcaccctcttgtgtcggagacatggccgacactcctcgagatgccggactaaaacaggccccagcgtcccgcaatgaaaaggcacctgttgattttggttatgtcggaatcgacagcatactggaacagatgcgccgaaaggctatgaaacaaggcttcgaattcaatataatggtggtcggtcagtccggcctaggtaagtcaaccctgattaatacattgttcaagagtaagatatcaaggaaatccgtgcagcctaccagtgaggagcgcattccgaaaactatagaaatcaagtctatcactcatgatattgaagaaaagggggtaagaatgaaactcactgtgatcgatacaccgggattcggggatcacattaataatgagaattgctggcagccaatcatgaaatttataaatgaccagtacgaaaagtatctacaggaggaagtaaacatcaatagaaagaagcggattccggatactagagtgcattgctgcctgtattttatccccgcaacaggtcactctcttcgccctctggatatcgaattcatgaagcgcctgagcaaggtggtcaacatagttccagtcatcgcaaaggccgatactttgactctcgaagaacgagtccacttcaagcagagaataactgcggatcttctttcaaatggtatcgatgtgtacccacaaaaggaatttgatgaggattccgaggacaggttggtaaacgaaaagttcagagagatgatcccttttgcagtagtcggcagcgatcacgaatatcaggtaaacgggaaacggatccttgggagaaagacaaaatggggcactattgaggtggagaataccactcactgtgaattcgcatacttgcgggacctgctcatccggacacatatgcagaatatcaaagatatcacctcctccatccactttgaagcttaccgtgtaaagcggctcaatgagggctcttctgcaatggccaatgggatggaggaaaaggagccagaggcgccagaaatgtag

SEQ ID NO: 166747 - protein, 713 aa, Artificial Sequence
  derived and/or modified sequence
MAKSPENSTLEEILGQYQRSLREHASRSIHQLTCALKEGDVTIGEDAPNLSFSTSVGNEDARTAWPELQQSHAVNQLKDLLRQQADKESEVSPSRRRKMSPLRSLEHEETNMPTMHDLVHTINDQSQYIHHLEAEVKFCKEELSGMKNKIQVVVLENEGLQQQLKSQRQEETLREQTLLDASGNMHNSWITTGEDSGVGETSKRPFSHDNADFGKAASAGEQLELEKLKLTYEEKCEIEESQLKFLRNDLAEYQRTCEDLKEQLKHKEFLLAANTCNRVGGLCLKCAQHEAVLSQTHTNVHMQTIERLVKERDDLMSALVSVRSSLADTQQREASAYEQVKQVLQISEEANFEKTKALIQCDQLRKELERQAERLEKELASQQEKRAIEKDMMKKEITKEREYMGSKMLILSQNIAQLEAQVEKVTKEKISAINQLEEIQSQLASREMDVTKVCGEMRYQLNKTNMEKDEAEKEHREFRAKTNRDLEIKDQEIEKLRIELDESKQHLEQEQQKAALAREECLRLTELLGESEHQLHLTRQEKDSIQQSFSKEAKAQALQAQQREQELTQKIQQMEAQHDKTENEQYLLLTSQNTFLTKLKEECCTLAKKLEQISQKTRSEIAQLSQEKRYTYDKLGKLQRRNEELEEQCVQHGRVHETMKQRLRQLDKHSQATAQQLVQLLSKQNQLLLERQSLSEEVDRLRTQLPSMPQSDC

SEQ ID NO: 166748 - DNA, 2142 bp, Artificial Sequence
  derived and/or modified sequence
atggcaaaaagccctgaaaattccacactggaggagatcctgggtcagtatcaacgaagcctgagggagcatgcatctcggagtatacaccaacttacatgcgcgttgaaggaaggcgatgtgacaattggtgaagacgctccaaatctcagcttctccacgagtgtgggaaacgaggatgccaggacagcttggccggaactgcagcagtcccacgcagttaaccagctgaaggacttgctcaggcagcaggcagacaaggagtccgaggtgagtcctagtcgtcggcggaagatgtcgcctctgcggtctctcgagcacgaggagaccaatatgccaactatgcacgatcttgttcacactatcaacgatcaatcccagtacatccaccacctcgaggccgaggtcaaattttgcaaggaagagctgtcagggatgaagaataaaattcaagttgtcgtcctcgagaatgaagggctgcagcagcaactgaaaagccagcgccaagaggagacactccgtgagcagaccctgcttgacgcatccgggaacatgcataattcctggatcactactggcgaagacagcggagtcggggagactagcaagcggcctttttctcacgacaacgccgatttcggcaaggccgcttcggctggcgaacagcttgaattggaaaaactgaagcttacatacgaggaaaagtgcgaaattgaggaaagccagttaaagttcctacgcaatgacctcgccgaataccagagaacatgtgaagacttgaaggaacaattgaaacacaaggaattcttactggcggccaacacttgcaaccgagtagggggactgtgcctgaaatgtgctcagcacgaagctgtgttgagtcagacacataccaatgtccatatgcagacaatcgagcggctcgtgaaagagagagatgatcttatgagcgcgctggtgtctgtgagatccagcctagctgatactcagcagagagaggcatccgcttatgaacaagtaaaacaggtgctccaaatcagcgaggaggctaacttcgagaaaaccaaagcactgatccaatgcgaccagctgaggaaagaactggaacggcaagccgagagactcgaaaaagagctcgcatctcagcaggaaaagcgggctattgagaaagacatgatgaaaaaagaaataactaaagagagagaatatatgggcagcaagatgctaatcctgagccagaacattgctcagctggaagcccaggtcgaaaaggtcaccaaagaaaagatttctgcgatcaaccagctcgaagaaatccagtctcagctggcctcccgagaaatggacgtgacaaaagtgtgtggcgagatgaggtatcaattaaataaaacaaacatggagaaagacgaagcagagaaggagcacagggaatttagggcaaagacaaatcgggatctggagatcaaggaccaagagattgaaaagctgagaatcgaactggacgaatcaaaacaacacttagagcaggaacaacaaaaggccgccctggccagggaggagtgcctgcggcttacagagttgttgggtgaaagcgaacaccagctacatctgacgagacaagagaaggatagtattcagcagtctttttccaaggaagccaaagcccaagccttgcaggcgcagcagcgggagcaggaacttactcagaaaatccagcagatggaggcccaacacgataagacggaaaacgaacagtatcttctgttgacgtcgcagaacacttttcttactaagttgaaagaagaatgttgcactctcgctaaaaagctagaacagattagccagaagacccggagcgagattgcccagttgtcacaggagaagcgctatacgtacgacaaactcggcaagcttcagagacgtaacgaggagctggaagagcagtgcgttcagcatggaagggtacacgaaaccatgaaacaacgcttacggcaactggacaagcactcacaagctacagctcaacagctagtccagctgctgagcaagcagaatcagctgctgctggaacggcagagtctcagtgaggaggtagatcggctgcgaactcaacttccatctatgccccaatctgactgctag

SEQ ID NO: 166749 - DNA, 2142 bp, Artificial Sequence
  derived and/or modified sequence
atggccaagagccctgagaacagcaccctggaggagatcctgggccagtaccagaggagcctgcgggagcacgccagccgcagcatccaccagctgacctgtgccctgaaggagggagatgtgaccatcggagaagatgcccccaacctgtccttcagcacctctgtgggcaatgaagatgccaggacagcctggccagagctgcagcagagccatgctgtgaaccagctgaaggacctgctgcggcagcaggccgacaaggagagcgaggtgagccccagcagaagaaggaagatgagccccctgcggagcctggagcacgaggagaccaacatgcccaccatgcatgacctggtgcacaccatcaatgaccagagccagtacatccaccacctggaggccgaggtgaagttctgcaaggaggagctgagcggcatgaagaacaagatccaggtggtggtgctggagaatgaaggcctgcagcagcagctgaagagccagaggcaggaggagaccctgcgggagcagaccctgctggatgccagcggcaacatgcacaacagctggatcaccaccggggaggacagcggcgtgggggagaccagcaagaggcccttcagccatgacaatgctgactttgggaaggccgccagcgctggggagcagctggagctggagaagctgaagctgacctatgaggagaagtgtgaaattgaggagagccagctgaagttcctgagaaatgacctggccgagtaccagaggacctgtgaggacctgaaggagcagctgaagcacaaggagttcctgctggccgccaacacctgcaacagagtgggcggcctgtgcctgaagtgtgcccagcatgaagctgtgctgagccagacccacaccaacgtgcacatgcagaccatcgagcggctggtgaaggagagagatgacctgatgtctgccctggtgtctgtgcgcagcagcctggccgacacccagcagcgggaggccagcgcctatgagcaggtgaagcaggtgctgcagatcagcgaggaggccaactttgagaagaccaaggccctgatccagtgtgaccagctgaggaaggagctggagcggcaggccgagcggctggagaaggagctggccagccagcaggagaagagggccatcgagaaggacatgatgaagaaggagatcaccaaggagcgggagtacatgggcagcaagatgctgatcctgagccagaacatcgcccagctggaggcccaggtggagaaggtgaccaaggagaagatcagcgccatcaaccagctggaggagatccagagccagctggccagccgggagatggatgtgaccaaggtgtgtggggagatgagataccagctgaacaagaccaacatggagaaggatgaagctgagaaggagcaccgggagttccgggccaagaccaacagagacctggagatcaaggaccaggagattgagaagctgcgcatcgagctggatgagagcaagcagcacctggagcaggagcagcagaaggccgccctggcccgggaggagtgcctgcggctgacagagctgctgggggagagcgagcaccagctgcacctgacccggcaggagaaggacagcatccagcagagcttcagcaaggaggccaaggcccaggccctgcaggcccagcagcgggagcaggagctgacccagaagatccagcagatggaggcccagcacgacaagacagaaaatgagcagtacctgctgctgaccagccagaacaccttcctgaccaagctgaaggaggagtgctgcaccctggccaagaagctggagcagatcagccagaagaccaggagtgaaattgcccagctgagccaggagaagcgctacacctatgacaagctgggcaagctgcagaggagaaatgaggagctggaggagcagtgtgtgcagcacggccgggtgcatgagaccatgaagcagaggctgcggcagctggacaagcacagccaggccacagcccagcagctggtgcagctgctgagcaagcagaaccagctgctgctggagcggcagagcctgtctgaggaggtggaccggctgcggacccagctgcccagcatgccccagagcgactgctag

SEQ ID NO: 166750 - DNA, 2142 bp, Artificial Sequence
  derived and/or modified sequence
atggccaagagccccgagaacagcaccctggaggagatcctgggccaataccagcgctccttgagggaacacgcatcaaggtctatccaccaactcacgtgtgcccttaaagaaggagatgtgaccattggtgaggacgctcccaatctttccttctctacctctgtggggaatgaggacgcgcggactgcatggcccgagctccaacagtcccatgccgttaaccagcttaaagatctgctcaggcagcaggctgacaaggagtccgaggtttcaccgtccaggcggagaaaaatgtctcccctgcgaagccttgagcacgaagagactaatatgccaaccatgcatgatctagtccacactattaacgatcagtctcagtacatccatcatctcgaggctgaagtgaaattctgcaaagaggaactgtcaggaatgaaaaacaagatccaagtggtcgtcctggaaaacgaagggctgcagcagcaactgaagtctcagcgacaggaggaaacactcagagagcagacgttgctcgacgcctcagggaatatgcacaacagctggattaccactggcgaagacagcggagtcggagagaccagtaaaagacctttctcccacgacaacgctgacttcgggaaggccgcctctgcgggtgagcagcttgagctcgaaaaactgaagctcacatacgaggagaaatgcgagattgaagagtcacaattaaaattcctgcgcaatgacctggccgagtatcagcgaacatgcgaagacttaaaggagcagcttaagcacaaggagttccttctggccgccaatacctgtaacagagtcggtggcctgtgtctgaaatgcgcccagcacgaagctgtcctgagtcagacccacactaatgtacatatgcaaacaatcgagcgcctggtcaaggagagagacgacctcatgtccgctctagtttcagtgcggagcagcctggctgacactcagcaaagagaagccagcgcctacgaacaggtcaaacaggtgcttcagattagtgaagaggccaacttcgaaaagaccaaagccctcattcagtgtgaccagctgcggaaagagctggagaggcaagctgaacggcttgagaaggagctcgcttcacagcaggagaaacgcgccattgagaaggacatgatgaagaaggagatcacgaaggagcgcgagtatatggggtcaaagatgctcattctcagccaaaacatagcccagctcgaggcccaggtcgagaaggtgacaaaagagaagatcagcgccattaatcagctggaagaaatccaatcccagttggcctcccgcgagatggacgtgacaaaagtgtgcggcgaaatgaggtaccagttaaataagacgaatatggaaaaggatgaggccgaaaaggagcacagagagtttcgggctaagaccaatagggacttggagattaaggaccaggaaattgagaaactgaggatcgagcttgacgagtcaaaacagcatctggagcaggagcaacaaaaagccgcactggcaagagaggagtgcctgcgcctgaccgaattgctgggcgagagcgaacaccagttacacctcacgcgtcaggagaaggatagcatccaacaatccttctcgaaagaggctaaggcgcaggccctacaggcgcaacaacgcgagcaggagttaactcaaaaaatccagcagatggaggcacaacacgacaaaaccgaaaacgagcaatacttgctgctgacttcccagaacacctttcttaccaagctgaaggaagagtgctgcactctcgcaaaaaaactcgagcagatctcccaaaaaactagatccgagattgcccagttgtcacaggaaaaacgatatacctacgataagttggggaagttgcaacgcagaaacgaggagctcgaggaacagtgtgttcagcacgggagggtccacgaaaccatgaaacaacggctcaggcagctcgacaaacactctcaggccactgcccagcagttggttcaactgctctccaaacaaaaccagttgctgctggaaagacaatctctttctgaagaggtggataggctcaggacacaattgccttctatgccacagagcgattgctag

SEQ ID NO: 166751 - DNA, 2142 bp, Artificial Sequence
  derived and/or modified sequence
atggccaagtccccagaaaattctacgctggaagagatcttaggccagtatcaacggtctttaagggagcatgcatctcgctcaatccaccagctgacctgcgcactcaaggagggtgacgttactattggcgaagacgctccaaacctttcctttagcacatccgtgggaaacgaggatgccaggacagcctggcctgaactgcagcaaagtcacgccgttaaccagctcaaagacctcctcagacagcaagccgacaaggagtcagaggtgtctccctcgcggagacgaaagatgagcccgctaaggtctctggagcacgaggagactaacatgccgacaatgcacgatttagtgcacacaatcaatgatcagagccagtacatccaccacctggaagccgaggtgaagttctgtaaggaagaactatctggaatgaagaacaagattcaggtggtcgtgcttgagaacgaaggcctccagcagcagctgaaatcacagcgacaggaagagacactgagagagcagaccttgcttgacgcctctggaaatatgcacaattcgtggataacaacaggggaagattctggggtgggagagacaagcaaacgtccctttagtcacgataatgctgatttcggcaaagctgcctcagctggcgagcaattggagctggaaaaattgaagcttacttatgaagagaaatgcgaaatcgaagagtcccagcttaagtttctccgaaatgacctggcagaatatcagcggacatgcgaagacctaaaagaacagctgaagcacaaggagtttttactggctgcgaatacatgtaatagagttggcggtctctgcctcaaatgcgcccagcacgaagcggtgttatcacaaacacacacaaacgttcacatgcagactatcgagcggctcgtcaaagaaagggacgatttgatgtccgctcttgtatccgtcaggtcatccctggctgatacccagcagcgggaagcctcagcatacgaacaagtgaagcaggtccttcaaattagcgaggaggctaatttcgagaagacaaaagccctgattcagtgtgatcagttgagaaaagagttggaaagacaagctgaaagactggaaaaggagctagcaagccaacaagagaaaagagcgatcgagaaggatatgatgaaaaaggaaattaccaaagagcgggaatatatggggagtaagatgctgattctatcccagaatattgctcagctggaggcgcaggtggagaaagtaactaaggagaaaatcagcgccatcaaccagctcgaagagatacagagtcagctggcaagcagagaaatggacgtgaccaaggtctgtggagaaatgcggtaccagctcaacaaaaccaatatggagaaggacgaagccgagaaggagcaccgcgagttccgggcaaagacgaaccgggacttggagatcaaggaccaggaaatcgaaaagcttcgaatcgagttggatgaatcaaagcaacatctggagcaagaacaacaaaaggctgccctagcccgagaagagtgcttgcgactgaccgagctgctgggagaaagcgaacaccagttacacctgacaagacaggagaaagattcgatccagcagtcgttctccaaggaggcgaaggcccaggctctccaagctcaacagcgcgagcaggagctgacacagaagattcagcagatggaagctcaacacgacaaaacagaaaacgagcagtatctattgctgacttcccagaatacatttctgacaaagctcaaggaggaatgttgcactctagcgaagaagctagagcagatctcccagaaaaccaggtctgaaattgcacaactgagtcaggagaaaagatatacttacgataaactcggtaagcttcagaggcgtaacgaggagcttgaagaacaatgcgtgcaacatggacgggtgcatgaaactatgaagcaacgactccgtcaactggataagcactcacaggccactgcccaacagctagtgcagctgttgagtaaacagaatcagcttctgctcgaacggcaatctctgtccgaggaggtggaccggctcagaacacagctcccgagtatgccgcaaagcgattgttag

SEQ ID NO: 166752 - DNA, 2567 bp, Artificial Sequence
  derived and/or modified sequence
gtgacagccgcggcaggaagcaggcgggcgctccccggccacaggcctgttgttctcggaagggagaaagctggacatttccccacgtaactcccagctctgggcctagagtgcgtgcatggcgaagtccccggagaactctaccctggaggagattctggggcagtatcaacggagtctccgggaacatgccagcagaagcattcaccaactgacatgtgccctgaaagaaggcgatgtcactattggagaagatgcaccaaatctttcttttagcaccagtgtgggaaatgaggacgccaggacagcctggcccgaattacaacagagccatgctgttaatcagctcaaagatttgttgcgccaacaagcagataaggaaagtgaagtatctccgtcaagaagaagaaaaatgtcccccttgaggtcattagaacatgaggaaaccaatatgcctactatgcacgaccttgttcatactattaatgaccagtctcaatatattcatcatttagaggcagaagttaagttctgcaaggaggaactctctggaatgaaaaataaaatacaagtagttgtgcttgaaaacgaagggctccagcaacagctaaaatctcaaagacaagaggagacactgagggaacaaacacttctggatgcatccggaaacatgcacaattcttggattacaacaggtgaagattctggggtgggcgaaacctccaaaagaccattttcccatgacaatgcagattttggcaaagctgcatctgctggtgagcagctagaactggagaagctaaaacttacttatgaggaaaagtgtgaaattgaggaatcccaattgaagtttttgaggaacgacttagctgaatatcagagaacttgtgaagatcttaaagagcaactaaagcataaagaatttcttctggctgctaatacttgtaaccgtgttggtggtctttgtttgaaatgtgctcagcatgaagctgttctttcccaaacccatactaatgttcatatgcagaccatcgaaagactggttaaagaaagagatgacttgatgtctgcactagtttccgtaaggagcagcttggcagatacgcagcaaagagaagcaagtgcttatgaacaggtgaaacaagttttgcaaatatctgaggaagccaattttgaaaaaaccaaggctttaatccagtgtgaccagttgaggaaggagctggagaggcaggcggagcgacttgaaaaagaacttgcatctcagcaagagaaaagggccattgagaaagacatgatgaaaaaggaaataacgaaagaaagggagtacatgggatcaaagatgttgatcttgtctcagaatattgcccaactggaggcccaggtggaaaaggttacaaaggaaaagatttcagctattaatcaactggaggaaattcaaagccagctggcttctcgggaaatggatgtcacaaaggtgtgtggagaaatgcgctatcagctgaataaaaccaacatggagaaggatgaggcagaaaaggagcacagagagttcagagcaaaaactaacagggatcttgaaattaaagatcaggaaatagagaaattgagaatagaactggatgaaagcaaacaacacttggaacaggagcagcagaaggcagccctggccagagaggagtgcctgagactaacagaactgctgggcgaatctgagcaccaactgcacctcaccagacaggaaaaagatagcattcagcagagctttagcaaggaagcaaaggcccaagcccttcaggcccagcaaagagagcaggagctgacacagaagatacagcaaatggaggcccagcatgacaaaactgaaaatgaacagtatttgttgctgacctcccagaatacatttttgacaaagttaaaggaagaatgctgtacattagccaagaaactggaacaaatctctcaaaaaaccagatctgaaatagctcaactcagtcaagaaaaaaggtatacatatgataaattgggaaagttacagagaagaaatgaagaattggaggaacagtgtgtccagcatgggagagtacatgagacgatgaagcaaaggctaaggcagctggataagcacagccaggccacagcccagcagctggtgcagctcctcagcaagcagaaccagcttctcctggagaggcagagcctgtcggaagaggtggaccggctgcggacccagttacccagcatgccacaatctgattgctgacctggatggaacagagtgaaataaatgatttacaaagagatatttacattcatctggtttagacttaatatgccacaacgcaccacgaccttcccagggtgacaccgcctcagcctgcagtggggctggtcctcatcaacgcgggcgctgtccccgcacgcagtcgggctggagctggagtctgactctagctgagcagagctcctggtgtatgttttcagaaatggcttgaagttatgtgtttaaatctgctcattcgtatgctaggttatacatatgattttcaataaatgaactttttaaagac

SEQ ID NO: 166753 - DNA, 2142 bp, Artificial Sequence
  derived and/or modified sequence
atggccaagagccccgagaacagcaccctggaggagatcctgggccagtaccagagaagcctgagagagcacgccagcagaagcatccaccagctgacctgcgccctgaaggagggcgacgtgaccatcggcgaggacgcccccaacctgagcttcagcaccagcgtgggcaacgaggacgccagaaccgcctggcccgagctgcagcagagccacgccgtgaaccagctgaaggacctgctgagacagcaggccgacaaggagagcgaggtgagccccagcagaagaagaaagatgagccccctgagaagcctggagcacgaggagaccaacatgcccaccatgcacgacctggtgcacaccatcaacgaccagagccagtacatccaccacctggaggccgaggtgaagttctgcaaggaggagctgagcggcatgaagaacaagatccaggtggtggtgctggagaacgagggcctgcagcagcagctgaagagccagagacaggaggagaccctgagagagcagaccctgctggacgccagcggcaacatgcacaacagctggatcaccaccggcgaggacagcggcgtgggcgagaccagcaagagacccttcagccacgacaacgccgacttcggcaaggccgccagcgccggcgagcagctggagctggagaagctgaagctgacctacgaggagaagtgcgagatcgaggagagccagctgaagttcctgagaaacgacctggccgagtaccagagaacctgcgaggacctgaaggagcagctgaagcacaaggagttcctgctggccgccaacacctgcaacagagtgggcggcctgtgcctgaagtgcgcccagcacgaggccgtgctgagccagacccacaccaacgtgcacatgcagaccatcgagagactggtgaaggagagagacgacctgatgagcgccctggtgagcgtgagaagcagcctggccgacacccagcagagagaggccagcgcctacgagcaggtgaagcaggtgctgcagatcagcgaggaggccaacttcgagaagaccaaggccctgatccagtgcgaccagctgagaaaggagctggagagacaggccgagagactggagaaggagctggccagccagcaggagaagagagccatcgagaaggacatgatgaagaaggagatcaccaaggagagagagtacatgggcagcaagatgctgatcctgagccagaacatcgcccagctggaggcccaggtggagaaggtgaccaaggagaagatcagcgccatcaaccagctggaggagatccagagccagctggccagcagagagatggacgtgaccaaggtgtgcggcgagatgagataccagctgaacaagaccaacatggagaaggacgaggccgagaaggagcacagagagttcagagccaagaccaacagagacctggagatcaaggaccaggagatcgagaagctgagaatcgagctggacgagagcaagcagcacctggagcaggagcagcagaaggccgccctggccagagaggagtgcctgagactgaccgagctgctgggcgagagcgagcaccagctgcacctgaccagacaggagaaggacagcatccagcagagcttcagcaaggaggccaaggcccaggccctgcaggcccagcagagagagcaggagctgacccagaagatccagcagatggaggcccagcacgacaagaccgagaacgagcagtacctgctgctgaccagccagaacaccttcctgaccaagctgaaggaggagtgctgcaccctggccaagaagctggagcagatcagccagaagaccagaagcgagatcgcccagctgagccaggagaagagatacacctacgacaagctgggcaagctgcagagaagaaacgaggagctggaggagcagtgcgtgcagcacggcagagtgcacgagaccatgaagcagagactgagacagctggacaagcacagccaggccaccgcccagcagctggtgcagctgctgagcaagcagaaccagctgctgctggagagacagagcctgagcgaggaggtggacagactgagaacccagctgcccagcatgccccagagcgactgctag

SEQ ID NO: 166754 - protein, 412 aa, Artificial Sequence
  derived and/or modified sequence
MSGYQRRPGATPLSRARSLAIPDAPAFYERRSCLPQLNCERPHGRDLDSPFFGIRPAFMCYVPSPVLASVGDTDDRFEDLEEANPFSFREFLKTKNLGLSKEDPASRIYAKEASRHSLGLDHNSPPSQTGGYGLEYQQPFFEDPTGAGDLLDEEEDEDTGWSGAYLPSAIEQTHPERVPAGTSPCSTYLSFFSTPSELAGPESLPSWALSDTDSRVSPASPAGSPSADFAVHGESLGDRHLRTLQISYDALKDENSKLRRKLNEVQSFSEAQTEMVRTLERKLEAKMIKEESDYHDLESVVQQVEQNLELMTKRAVKAENHVVKLKQEISLLQAQVSNFQRENEALRCGQGASLTVVKQNADVALQNLRVVMNSAQASIKQLVSGAETLNLVAEILKSIDRISEVKDEEEDS

SEQ ID NO: 166755 - DNA, 1239 bp, Artificial Sequence
  derived and/or modified sequence
atgtctgggtaccaaaggaggcctggagccacgcctctgagtagagctcgctctctagctatccctgatgcccctgcgttctacgaacgccgatcctgcctaccccagctcaactgtgaaaggccccacgggagagacctcgactccccattttttgggattcgccccgcgtttatgtgctatgtgccgtcccccgtcctggcttccgtaggcgacactgatgacagatttgaggacttggaagaggcgaaccccttctcctttagagaattcctcaaaaccaagaatctcggactctcaaaagaagaccctgccagtcgtatatacgccaaagaggccagcaggcacagtttaggcctggaccacaatagtccccccagccaaaccggaggttacggacttgagtaccaacaaccattcttcgaagaccccaccggcgccggtgatcttctcgatgaggaagaggatgaggatacaggatggagtggcgcatatctcccatctgccattgagcagacgcatccggaacgagtgcccgccggcacctcaccctgcagcacttacttgtccttcttctctacgccgagcgaattggccggtccagagtcccttccatcctgggccctctccgacactgattctcgggtaagtcctgcaagtcctgccggatcacccagcgcggacttcgcggtccacggcgagagccttggagaccgacatctgcggacacttcagataagttacgatgcactgaaagatgagaactccaaattgagaagaaaattgaacgaggttcagagcttctctgaagcccaaactgagatggttagaaccctcgaacgaaagctggaagcgaagatgataaaggaagaatccgactatcacgatcttgaatccgtggtgcagcaagtggaacagaacctagagctcatgacaaaacgcgccgtcaaagccgagaaccacgtggtcaagttgaagcaagagattagcttactgcaggcacaggtgagtaattttcagcgcgaaaacgaagctttgagatgcggacagggcgcctcccttaccgtagttaagcagaacgcagatgtggcgctccagaacctcagagtggttatgaattcagcgcaggcctctattaagcaactggtgagcggcgcggaaactctgaatctggttgccgagatacttaagagcatagatcgtatctccgaggtgaaagatgaagaggaggactcgtag

SEQ ID NO: 166756 - DNA, 1239 bp, Artificial Sequence
  derived and/or modified sequence
atgagcggctaccagaggaggcctggggccacccccctgagccgggcccggagcctggccatcccagatgccccagccttctatgaaagaagaagctgcctgccccagctgaactgtgagcggccccacggccgggacctggacagccccttcttcggcatccggcctgccttcatgtgctacgtgcccagccctgtgctggcctctgtgggggacacagatgacagatttgaggacctggaggaggccaaccccttctccttccgggagttcctgaagaccaagaacctgggcctgagcaaggaggaccctgccagccgcatctatgccaaggaggccagccgccacagcctgggcctggaccacaacagcccccccagccagacaggaggctacggcctggagtaccagcagcccttctttgaggaccccactggagctggggacctgctggatgaggaggaggatgaggacaccggctggagcggggcctacctgcccagcgccatcgagcagacccaccctgagcgggtgcctgctggcaccagcccctgcagcacctacctgtccttcttcagcacccccagcgagctggccggccctgagagcctgcccagctgggccctgagtgacacagacagccgggtgtccccagccagccctgctggcagccccagcgctgactttgctgtgcacggggagagcctgggggacagacacctgcggaccctgcagatctcctatgatgccctgaaggatgagaacagcaagctgcggaggaagctgaatgaggtgcagagcttcagcgaggcccagacagagatggtgaggaccctggagaggaagctggaggccaagatgatcaaggaggagagtgactaccatgacctggagagcgtggtgcagcaggtggagcagaacctggagctgatgaccaagagagctgtgaaggcagaaaatcatgtggtgaagctgaagcaggagatcagcctgctgcaggcccaggtgagcaacttccagcgggagaatgaggccctgcgctgtggccagggcgccagcctgactgtggtgaagcagaatgctgatgtggccctgcagaacctgcgggtggtgatgaacagcgcccaggccagcatcaagcagctggtgtctggagctgagaccctgaacctggtggccgagatcctgaagagcattgaccgcatcagcgaggtgaaggatgaggaggaggacagctag

SEQ ID NO: 166757 - DNA, 1239 bp, Artificial Sequence
  derived and/or modified sequence
atgagcggctaccagcggcggcccggcgccacccccctgagccgggctcggtcactggccatccctgacgctcccgctttttatgaacggagatcttgcttgccccaactaaattgcgaaaggccacacggccgggacctggattctccattctttggtatccggcccgccttcatgtgctacgttccatcacctgtgctcgctagtgtgggagatactgacgatcgatttgaggacctggaggaagcaaaccctttctccttccgggaatttttaaaaaccaagaacctgggactgtctaaggaagatccagcgagccgcatctacgcaaaggaagcttctaggcattcgcttgggctcgaccacaatagcccaccctctcagacaggagggtatgggctcgagtatcaacagccattcttcgaggatcccacaggcgccggtgatctacttgacgaggaagaggatgaggacaccggctggagtggggcgtacctgcccagtgcaatcgaacaaacgcaccccgaacgagttcctgctggcacttcaccctgctctacctacttgagttttttcagcacaccttctgagctggccggcccagaaagcttgccctcatgggcgctcagtgatacagactcccgggtgtctcccgcgtctccagcagggtcacccagtgcagactttgccgtccacggcgaatccttaggggaccggcatctcaggacgctccagatcagctacgatgccctgaaagatgagaatagcaagttgcgaagaaagctgaatgaagttcagtctttttctgaagctcagactgaaatggtgcgaactttagagcggaaactggaggctaaaatgatcaaagaagaatctgactaccatgaccttgagtctgttgtgcagcaggtggagcagaatctggaactcatgacaaaacgcgcagtcaaagccgaaaaccacgtggtgaaactcaaacaggagatcagcctgctgcaggcccaggtgtcaaatttccagcgcgagaatgaggcactccggtgcggtcagggcgcaagcctgaccgttgtgaaacagaatgcagatgtggccttgcagaacctgcgcgtggtcatgaatagtgcacaggcctcaatcaagcaacttgtcagcggtgccgagactctgaaccttgtcgccgagattttgaagtcgatcgacagaatcagcgaagtgaaggacgaagaagaagacagttag

SEQ ID NO: 166758 - DNA, 1239 bp, Artificial Sequence
  derived and/or modified sequence
atgagcggctaccagcgacgccctggagctaccccactgtctcgcgctcgttcccttgctatccccgacgctccagcgttctatgaacgacggtcttgcctgcctcagttgaattgtgagcggcctcacggacgcgatctggatagccccttttttggcattcggcctgccttcatgtgttatgttccaagcccagtgctggcatcggtcggcgacaccgatgatcggtttgaggacctcgaagaagccaacccttttagtttcagagaattcttaaagactaaaaatctgggactgagcaaggaggatcccgctagcagaatatacgctaaagaggcaagtcggcactctctgggtctagatcataacagcccccctagccagaccggaggctacgggttagagtaccaacagcccttctttgaagacccaaccggggctggcgacctgctggatgaggaagaagacgaggatacgggctggtctggagcgtacctaccaagtgccatcgagcagacgcaccctgagcgcgttccagccggtacctccccttgctcaacctacctttcctttttttcaacaccttcagagctggctgggccagagagcctgccttcttgggctttgtccgacacagactccagagtgtcccctgctagtcccgcaggatcaccttctgcggattttgccgtgcatggcgagagcctgggcgaccgccacctcaggactctccagattagctatgacgcactcaaggacgaaaattccaaactgcggaggaaactgaatgaagttcagagtttctctgaagcacagacagaaatggtgaggacactcgaaaggaaattagaggcaaagatgatcaaggaagagagtgactaccacgatctcgaatcggtagtgcaacaggtggagcagaatctcgaactaatgactaagagggcagtgaaagcggaaaaccatgtcgtgaagctcaagcaagagatcagcctattgcaggcccaggtcagtaattttcagagggagaatgaggcactgaggtgtggccagggagctagtcttactgtggtgaaacaaaacgcagatgtggccttgcaaaacctgcgcgtggtgatgaattccgcccaggctagcatcaagcaacttgtgagcggggctgagactttgaatcttgtggccgagattctcaaaagcatcgatagaataagcgaggtcaaggacgaagaagaggattcctag

SEQ ID NO: 166759 - DNA, 2314 bp, Artificial Sequence
  derived and/or modified sequence
cctcgccgacggcccaaggcgttcaggcacgcgctttcggtgctcggagcggaagcagcggcgagaggctcggaggcgcgggggcggccgagcggcgggcgacgggggcgggcgacgggggcgggcgacgcgggccgcggcacgggcggagccggggccatggagccgccgctgccgggctaggcaggtcgtgccccgccgggccggcggcgatgtcgggctaccagcgccgcccgggcgccaccccgctgtcccgagcccggagcctcgccattcccgacgctccagcgttctatgagcgccggtcttgtctcccccagctaaattgtgagcgcccccatggcagggacctggactcccccttcttcggcattcggccggcctttatgtgctatgtgcccagcccggtgctggcttccgtgggagacacagatgacagatttgaagatctggaagaggcaaatccattctcttttagagagtttctgaagaccaagaacctcggcctctcgaaagaggatccggccagcagaatttatgcaaaggaagcctcgaggcattccctgggacttgaccacaactccccaccctcccaaaccggcgggtatggcctggagtatcagcagccatttttcgaggatccgacaggggctggtgacctcctggatgaggaggaggatgaggacaccggatggagtggggcctacctgccgtccgccatcgagcagactcaccccgagagggtccctgccggcacgtcgccctgcagcacatacctttcctttttctccaccccgtcggagctggcagggcctgagtctctgccctcgtgggcgttgagtgacactgattctcgcgtgtctccggcctctccggcagggagtcctagcgcagactttgcggttcatggagagtctctgggagacaggcacctgcggacgctgcagataagttacgacgcactgaaagatgaaaattctaagctgagaagaaagctgaatgaggttcagagcttctctgaagctcaaacagaaatggtgaggacgcttgagcggaagttagaagcaaaaatgatcaaggaggaaagcgactaccacgacctggagtcggtggttcagcaggtggagcagaacctggagctgatgaccaaacgggctgtaaaggcagaaaaccacgtcgtgaaactaaaacaggaaatcagtttgctccaggcgcaggtctccaacttccagcgagagaatgaagccctgcggtgcggccagggtgccagcctgaccgtggtgaagcagaacgccgacgtggccctgcagaacctccgggtggtcatgaacagtgcacaggcttccatcaagcaactggtttccggagctgagacactgaatcttgttgccgaaatccttaaatctatagacagaatttctgaagttaaagacgaggaggaagactcttgaggacccctgggtgttctcagcatgaagctccgtgtataccctgaggtcaccaccgctcgatctaaatgtgcagttgtgtccttaaatatgcagtcttcacccagagtaaagtgttgatcgcaagagtccagtgtcgtgccctcagccagttcttggccaccacaatgggagcagccctggccgagttgtctctgtggtttctatgcagcccttcttggcgaaattcctgcgatcttatagattctaatgagctcttggaagacattgtcataaaagccagtgattttaagaaaaagagtggttctggaatcaatgttttccagtcccatcccagaacatcagttgtaagataagtacaattggttgtccttgatttcataagtagaacaaacactaaatgtgcctctgagatggccaccccgggcagggacctgtgccttccgccgatgctcagggctccctctggctcccgggtcactcttgtggccccagtgggtggtccctgcagtcatggcctgagtgcgcaggggccaccgcgtggctgctgctgtcctcctccgggacccacggggaccaaggtcacacgttccgtgctgtgaagctgtccagatgtgcctctttggctgggggttctggtggacgtttcaagtggcattttgtacaatgcaggttagaattcaggaatttcaagtatgtgcccgggtctgtcaggtcccagttgcctttctgacggcccccctcagagggacggcgatgagcactaaatgcttttttgactattttcctatagattttttttaaaacttttttttcctcctgttccaattgatagctttcttatttaataaattctgtagttcacc

SEQ ID NO: 166760 - DNA, 1239 bp, Artificial Sequence
  derived and/or modified sequence
atgagcggctaccagagaagacccggcgccacccccctgagcagagccagaagcctggccatccccgacgcccccgccttctacgagagaagaagctgcctgccccagctgaactgcgagagaccccacggcagagacctggacagccccttcttcggcatcagacccgccttcatgtgctacgtgcccagccccgtgctggccagcgtgggcgacaccgacgacagattcgaggacctggaggaggccaaccccttcagcttcagagagttcctgaagaccaagaacctgggcctgagcaaggaggaccccgccagcagaatctacgccaaggaggccagcagacacagcctgggcctggaccacaacagcccccccagccagaccggcggctacggcctggagtaccagcagcccttcttcgaggaccccaccggcgccggcgacctgctggacgaggaggaggacgaggacaccggctggagcggcgcctacctgcccagcgccatcgagcagacccaccccgagagagtgcccgccggcaccagcccctgcagcacctacctgagcttcttcagcacccccagcgagctggccggccccgagagcctgcccagctgggccctgagcgacaccgacagcagagtgagccccgccagccccgccggcagccccagcgccgacttcgccgtgcacggcgagagcctgggcgacagacacctgagaaccctgcagatcagctacgacgccctgaaggacgagaacagcaagctgagaagaaagctgaacgaggtgcagagcttcagcgaggcccagaccgagatggtgagaaccctggagagaaagctggaggccaagatgatcaaggaggagagcgactaccacgacctggagagcgtggtgcagcaggtggagcagaacctggagctgatgaccaagagagccgtgaaggccgagaaccacgtggtgaagctgaagcaggagatcagcctgctgcaggcccaggtgagcaacttccagagagagaacgaggccctgagatgcggccagggcgccagcctgaccgtggtgaagcagaacgccgacgtggccctgcagaacctgagagtggtgatgaacagcgcccaggccagcatcaagcagctggtgagcggcgccgagaccctgaacctggtggccgagatcctgaagagcatcgacagaatcagcgaggtgaaggacgaggaggaggacagctag

SEQ ID NO: 166761 - protein, 858 aa, Artificial Sequence
  derived and/or modified sequence
MSVVGLDVGSQSCYIAVARAGGIETIANEFSDRCTPSVISFGSKNRTIGVAAKNQQITHANNTVSNFKRFHGRAFNDPFIQKEKENLSYDLVPLKNGGVGIKVMYMGEEHLFSVEQITAMLLTKLKETAENSLKKPVTDCVISVPSFFTDAERRSVLDAAQIVGLNCLRLMNDMTAVALNYGIYKQDLPSLDEKPRIVVFVDMGHSAFQVSACAFNKGKLKVLGTAFDPFLGGKNFDEKLVEHFCAEFKTKYKLDAKSKIRALLRLYQECEKLKKLMSSNSTDLPLNIECFMNDKDVSGKMNRSQFEELCAELLQKIEVPLYSLLEQTHLKVEDVSAVEIVGGATRIPAVKERIAKFFGKDISTTLNADEAVARGCALQCAILSPAFKVREFSVTDAVPFPISLIWNHDSEDTEGVHEVFSRNHAAPFSKVLTFLRRGPFELEAFYSDPQGVPYPEAKIGRFVVQNVSAQKDGEKSRVKVKVRVNTHGIFTISTASMVEKVPTEENEMSSEADMECLNQRPPENPDTDKNVQQDNSEAGTQPQVQTDAQQTSQSPPSPELTSEENKIPDADKANEKKVDQPPEAKKPKIKVVNVELPIEANLVWQLGKDLLNMYIETEGKMIMQDKLEKERNDAKNAVEEYVYEFRDKLCGPYEKFICEQDHQNFLRLLTETEDWLYEEGEDQAKQAYVDKLEELMKIGTPVKVRFQEAEERPKMFEELGQRLQHYAKIAADFRNKDEKYNHIDESEMKKVEKSVNEVMEWMNNVMNAQAKKSLDQDPVVRAQEIKTKIKELNNTCEPVVTQPKPKIESPKLERTPNGPNIDKKEEDLEDKNNFGAEPPHQNGECYPNEKNSVNMDLD

SEQ ID NO: 166762 - protein, 639 aa, Artificial Sequence
  derived and/or modified sequence
MARERPCRCHGNGGRSPGTGCPLGRIFPEGSRRRKRKWHVEGPVEAPRNGQTPRAGAERGQGRKRRQEKQAGGIETIANEFSDRCTPSVISFGSKNRTIGVAAKNQQITHANNTVSNFKRFHGRAFNDPFIQKEKENLSYDLVPLKNGGVGIKVMYMGEEHLFSVEQITAMLLTKLKETAENSLKKPVTDCVISVPSFFTDAERRSVLDAAQIVGLNCLRLMNDMTAVALNYGIYKQDLPSLDEKPRIVVFVDMGHSAFQVSACAFNKGKLKVLGTAFDPFLGGKNFDEKLVEHFCAEFKTKYKLDAKSKIRALLRLYQECEKLKKLMSSNSTDLPLNIECFMNDKDVSGKMNRSQFEELCAELLQKIEVPLYSLLEQTHLKVEDVSAVEIVGGATRIPAVKERIAKFFGKDISTTLNADEAVARGCALQCAILSPAFKVREFSVTDAVPFPISLIWNHDSEDTEGVHEVFSRNHAAPFSKVLTFLRRGPFELEAFYSDPQGVPYPEAKIGRFVVQNVSAQKDGEKSRVKVKVRVNTHGIFTISTASMVEKVPTEENEMSSEADMECLNQRPPENPDTDKNVQQDNSEAGTQPQVQTDAQQTSQSPPSPELTSEENKIPDADKQMKKKLTSLQKLKSPK

SEQ ID NO: 166763 - DNA, 2577 bp, Artificial Sequence
  derived and/or modified sequence
atgtcagttgtgggcctggacgtcggcagtcagtcctgttatatcgcagtcgcacgcgccggggggatagagacaattgcaaacgaattctctgacagatgcacaccgtctgtgatctctttcggaagtaaaaaccggaccattggtgtagcagccaaaaaccagcaaatcacccatgctaataatacggtgtcaaacttcaagcgtttccatggtagagctttcaacgatccctttattcagaaggagaaggaaaacctctcttacgacctggtgcccctcaagaatggaggagtcggaataaaagtgatgtacatgggggaagagcacctgttcagcgtggaacagattacggctatgcttctgactaagttaaaagaaactgcagagaactctctcaagaagcctgtcacagattgcgtgataagtgtgcccagttttttcacggatgccgaaaggcggagtgtgctggacgccgcacagatagttggcctgaactgtttgaggctgatgaacgatatgaccgcagtggctctgaactatgggatctacaagcaggatctcccctctctggatgagaaaccccgaattgtagtctttgtggatatggggcatagtgccttccaggtgtccgcttgcgccttcaacaaagggaaactaaaggtacttggtacagctttcgatcccttccttggcggtaagaatttcgacgagaagctcgtggagcacttctgcgccgagtttaaaaccaaatataagctggacgcgaagtcaaaaatacgagcccttcttcggctttatcaggaatgtgagaagcttaaaaaactgatgtctagtaactctacagacttaccgctcaacattgaatgtttcatgaacgataaggacgtgagtgggaagatgaaccgctcacagttcgaggagctgtgtgctgaactcctgcagaaaatcgaagtgccactgtactcactgttagagcaaacccacctcaaagtcgaggatgtgtccgctgtggagattgtgggcggagccactaggatccctgcagtcaaagagcgaatagcaaagttttttggcaaggatatctcgacgacgctgaacgctgacgaagcagttgcacgaggatgtgcgttgcaatgtgccatactgtcacctgcttttaaagttagggagtttagtgtcacggatgccgtaccttttcctataagtttgatctggaaccacgacagcgaagacacagaaggagtgcacgaggttttctccagaaaccacgctgcgcccttctcaaaggttctgactttcttaagacgggggccattcgagctggaagccttttactctgatcctcagggggtgccgtatccggaggcaaagatcggcagattcgtcgtccaaaacgtgagcgcccagaaggacggcgagaagtctagagtgaaggtgaaggtgcgagtgaacacccacgggatctttaccatttccaccgcttccatggtggagaaagttcctaccgaggagaacgagatgtcttcagaggctgatatggaatgtctcaaccagcgccctcctgagaatccagacacggataaaaatgtccagcaggacaattcggaagcaggcacccagccccaggtgcagaccgatgctcaacagacgagtcaaagcccccccagtccagaattgaccagcgaggaaaacaagatccccgacgcggataaagccaatgagaaaaaagtggatcagccacctgaggccaaaaaacccaagatcaaggttgttaatgttgagctacctattgaagcaaacctggtttggcagttgggcaaggatttactgaatatgtacattgagacggaggggaagatgataatgcaggacaaattggaaaaggagaggaatgatgcaaaaaatgccgtcgaggagtacgtgtatgaatttcgagacaagctctgtggaccttatgagaaatttatttgtgagcaagaccatcagaactttctgaggctgctcaccgagacggaggactggctgtacgaggaaggggaagaccaggcaaaacaagcctacgtggacaaactggaagaacttatgaaaatcggaacacccgtcaaggtacgcttccaggaggcagaagagcgccctaaaatgttcgaagagctgggacagagactgcaacactacgcgaaaatcgccgcggactttcggaataaggacgagaagtataatcacatcgatgagagcgagatgaagaaggtggaaaagtccgtgaacgaagttatggaatggatgaacaatgtgatgaacgcccaggctaaaaaatccctggaccaggaccccgtcgtgagggcacaggaaatcaagacaaaaatcaaggagctgaataacacttgtgagccggttgttactcagccaaagccaaagatcgaaagtcccaagctagagcggaccccaaacggacctaacatcgataagaaggaagaagacctcgaggacaagaacaacttcggcgcggagccgccgcaccagaatggcgagtgctacccgaacgagaaaaactctgtcaacatggatcttgattag

SEQ ID NO: 166764 - DNA, 1920 bp, Artificial Sequence
  derived and/or modified sequence
atggcccgagagcgcccatgtcggtgccacggtaacgggggtaggtctccaggcacaggatgtcctctgggtcgaatcttccctgagggcagtaggcgtagaaagaggaaatggcatgtggagggccctgtcgaagcgccccggaatgggcaaactccccgggcgggtgcggagaggggacagggccgcaagcggagacaggagaagcaggccggcggaatagaaacgattgccaatgagttttcggatagatgtacccccagtgtgattagtttcggaagtaagaatcgtaccatcggagtcgctgcaaagaaccagcagattacacatgcaaataacacagtgagtaatttcaaacgatttcatggccgcgcatttaacgacccctttattcagaaggaaaaagagaacctgtcatatgacttggtcccccttaagaacggcggcgtcggaattaaggtgatgtatatgggggaggagcacctctttagcgtcgaacaaatcacagccatgctcctcacaaaactgaaggagactgctgaaaactctctgaaaaagcccgttactgattgtgtgatctctgttccttcatttttcaccgacgcagaaagacgcagcgtcctggatgccgcccaaatcgtaggtctgaattgtctgcgtctgatgaacgatatgacggctgtggccctcaattacgggatttataaacaggacttaccctctctcgatgagaagcctcgcatcgtcgtattcgtcgacatgggtcactctgcgttccaggtgtcggcctgtgctttcaataaaggaaagctgaaagtgctcgggacagcttttgatcctttcctgggcggcaaaaattttgatgaaaaactcgttgaacacttctgcgccgaattcaagaccaaatataagctggacgcaaaaagtaagatccgcgccttactgaggctgtaccaggaatgcgaaaagcttaagaagctgatgagcagtaactcgacggacctgcccctcaatatcgaatgtttcatgaacgacaaagatgtctccggaaaaatgaaccggtctcagttcgaggagctatgtgcagagctccttcagaaaatcgaagtgccactttattcattgctcgaacaaacccatctcaaggtcgaggacgtcagtgccgtcgagatcgttggtggcgctacccgtattcctgccgtgaaggagcgcatcgcaaagttcttcggcaaggacattagtaccaccttgaatgctgacgaggcagtcgcccgtggctgtgccctacagtgcgctatcctgagcccagcattcaaagtccgggaattttctgtgacggacgctgtgccattcccgatctctctaatctggaaccacgatagcgaagatactgagggggtccatgaggtcttcagcagaaaccatgctgcaccattctccaaggtgctgacctttcttaggagaggcccctttgagctggaggctttctattccgatcctcagggggttccataccctgaagccaagattggtaggtttgtcgtgcagaacgtttccgctcagaaggacggcgagaaaagtcgcgtaaaggttaaagtgagagtcaacacacatgggatcttcacaatctctacggcttctatggtcgagaaggtgccgacagaggaaaatgaaatgtcttcagaggccgatatggagtgcctgaatcaacgtccccccgaaaatcccgatacagataaaaacgtgcagcaggataacagcgaggcaggcacacagccccaggttcagaccgacgcccagcagacttctcagtcccctcctagccccgaactgacgtctgaggagaacaagattcctgacgcagataaacagatgaagaaaaagctcacatccctgcaaaagctgaaaagtccaaaatag

SEQ ID NO: 166765 - DNA, 3612 bp, Artificial Sequence
  derived and/or modified sequence
gaggaagtgggacctccccttttgggtcggtagttcagcgccggcgccggtgtgcgagccgcggcagagtgaggcaggcaacccgaggtgcggagcgacctgcggaggctgagccccgctttctcccagggtttcttatcagccagccgccgctgtccccgggggagtaggaggctcctgacaggccgcggctgtctgtgtgtccttctgagtgtcagaggaacggccagaccccgcgggccggagcagaacgcggccagggcagaaagcggcggcaggagaagcaggcagggggccggaggacgcagaccgagacccgaggcggaggcggaccgcgagccggccatgtcggtggtggggttggacgtgggctcgcagagctgctacatcgcggtagcccgggccgggggcatcgagaccatcgccaatgagttcagcgaccggtgcaccccgtcagtcatatcatttggatcaaaaaatagaacaatcggagttgcagccaaaaatcagcaaatcactcatgcaaacaatacggtgtctaacttcaaaagatttcatggccgagcattcaatgaccccttcattcaaaaggagaaggaaaacttgagttacgatttggttccattgaaaaatggtggagttggaataaaggtaatgtacatgggtgaagaacatctatttagtgtggagcagataacagccatgttgttgactaagctgaaggaaactgctgaaaacagcctcaagaaaccagtaacagattgtgttatttcagtcccctccttctttacagatgctgagaggcgatctgtgttagatgctgcacagattgttggcctaaactgtttaagacttatgaatgacatgacagctgttgctttgaattacggaatttataagcaggatctcccaagcctggatgagaaacctcggatagtggtttttgttgatatgggacattcagcttttcaagtgtctgcttgtgcttttaacaagggaaaattgaaggtactgggaacagcttttgatcctttcttaggaggaaaaaacttcgatgaaaagttagtggaacatttttgtgcagaatttaaaactaagtacaagttggatgcaaaatccaaaatacgagcactcctacgtctgtatcaggaatgtgaaaaactgaaaaagctaatgagctctaacagcacagaccttccactgaatatcgaatgctttatgaatgataaagatgtttccggaaagatgaacaggtcacaatttgaagaactctgtgctgaacttctgcaaaagatagaagtacccctttattcactgttggaacaaactcatctcaaagtagaagatgtgagtgcagttgagattgttggaggcgctacacgaattccagctgtgaaggaaagaattgccaaattctttggaaaagatattagcacaacactcaatgcagatgaagcagtagccagaggatgtgcattacagtgtgcaatactttccccggcatttaaagttagagaattttccgtcacagatgcagttccttttccaatatctctgatctggaaccatgattcagaagatactgaaggtgttcatgaagtctttagtcgaaaccatgctgctcctttctccaaagttctcacctttctgagaagggggccttttgagctagaagctttctattctgatccccaaggagttccatatccagaagcaaaaataggccgctttgtagttcagaatgtttctgcacagaaagatggagaaaaatctagagtaaaagtcaaagtgcgagtcaacacccatggcattttcaccatctctacggcatctatggtggagaaagtcccaactgaggagaatgaaatgtcttctgaagctgacatggagtgtctgaatcagagaccaccagaaaacccagacactgataaaaatgtccagcaagacaacagtgaagctggaacacagccccaggtacaaactgatgctcaacaaacctcacagtctcccccttcacctgaacttacctcagaagaaaacaaaatcccagatgctgacaaagcaaatgaaaaaaaagttgaccagcctccagaagctaaaaagcccaaaataaaggtggtgaatgttgagctgcctattgaagccaacttggtctggcagttagggaaagaccttcttaacatgtatattgagacagagggtaagatgataatgcaagataaattggaaaaagaaaggaatgatgctaaaaatgcagttgaggaatatgtgtatgagttcagagacaagctgtgtggaccatatgaaaaatttatatgtgagcaggatcatcaaaattttttgagactcctcacagaaactgaagactggctgtatgaagaaggagaggaccaagctaaacaagcatatgttgacaagttggaagaattaatgaaaattggcactccagttaaagttcggtttcaggaagctgaagaacggccaaaaatgtttgaagaactaggacagaggctgcagcattatgccaagatagcagctgacttcagaaataaggatgagaaatacaaccatattgatgagtctgaaatgaaaaaagtggagaagtctgttaatgaagtgatggaatggatgaataatgtcatgaatgctcaggctaaaaagagtcttgatcaggatccagttgtacgtgctcaggaaattaaaacaaaaatcaaggaattgaacaacacatgtgaacccgttgtaacacaaccgaaaccaaaaattgaatcacccaaactggaaagaactccaaatggcccaaatattgataaaaaggaagaagatttagaagacaaaaacaattttggtgctgaacctccacatcagaatggtgaatgttaccctaatgagaaaaattctgttaatatggacttggactagataaccttaaattggcctattccttcaattaataaaatatttttgccatagtatgtgactctacataacatactgaaactatttatattttcttttttaaggatatttagaaattttgtgtattatatggaaaaagaaaaaaagcttaagtctgtagtctttatgatcctaaaagggaaaattgccttggtaactttcagattcctgtggaattgtgaattcatactaagctttctgtgcagtctcaccatttgcatcactgaggatgaaactgacttttgtcttttggagaaaaaaaactgtactgcttgttcaagagggctgtgattaaaatctttaagcatttgttcctgccaaggtagttttcttgcattttgctctccattcagcatgtgtgtgggtgtggatgtttataaacaagactaagtctgacttcataagggctttctaaaaccatttctgtccaagagaaaatgactttttgctttgatattaaaaattcaatgagtaaaacaaaagctagtcaaatgtgttagcagcatgcagaacaaaaactttaaactttctctctcactatacagtatattgtcatgtgaaagtgtggaatggaagaaatgtcgatcctgttgtaactgattgtgaacacttttatgagctttaaaataaagttcatcttatggtgtcatttct

SEQ ID NO: 166766 - DNA, 2177 bp, Artificial Sequence
  derived and/or modified sequence
aacatgctctccggacagctggccggcctccccaccatcccggtgtctggggtctctgcaaaaatggggtctgtctccgcccgcccagcctccctttagcgttaaggatcggacaccacctcccggtagtaaattgtgactattccgagttttggagtcattcttcgttgcctgttttattagggcagcaaaacgcctgtggctagggcgggagtgggcggaggcaggtttgagccaatggcacgggagcggccctgtcgctgccatggcaacggcggccgttctccggggaccggctgcccattgggtagaatctttccagaaggctcgagaagaaggaagcggaagtggcacgtggaggggccggtggaggcgccgaggaacggccagaccccgcgggccggagcagaacgcggccagggcagaaagcggcggcaggagaagcaggcagggggcatcgagaccatcgccaatgagttcagcgaccggtgcaccccgtcagtcatatcatttggatcaaaaaatagaacaatcggagttgcagccaaaaatcagcaaatcactcatgcaaacaatacggtgtctaacttcaaaagatttcatggccgagcattcaatgaccccttcattcaaaaggagaaggaaaacttgagttacgatttggttccattgaaaaatggtggagttggaataaaggtaatgtacatgggtgaagaacatctatttagtgtggagcagataacagccatgttgttgactaagctgaaggaaactgctgaaaacagcctcaagaaaccagtaacagattgtgttatttcagtcccctccttctttacagatgctgagaggcgatctgtgttagatgctgcacagattgttggcctaaactgtttaagacttatgaatgacatgacagctgttgctttgaattacggaatttataagcaggatctcccaagcctggatgagaaacctcggatagtggtttttgttgatatgggacattcagcttttcaagtgtctgcttgtgcttttaacaagggaaaattgaaggtactgggaacagcttttgatcctttcttaggaggaaaaaacttcgatgaaaagttagtggaacatttttgtgcagaatttaaaactaagtacaagttggatgcaaaatccaaaatacgagcactcctacgtctgtatcaggaatgtgaaaaactgaaaaagctaatgagctctaacagcacagaccttccactgaatatcgaatgctttatgaatgataaagatgtttccggaaagatgaacaggtcacaatttgaagaactctgtgctgaacttctgcaaaagatagaagtacccctttattcactgttggaacaaactcatctcaaagtagaagatgtgagtgcagttgagattgttggaggcgctacacgaattccagctgtgaaggaaagaattgccaaattctttggaaaagatattagcacaacactcaatgcagatgaagcagtagccagaggatgtgcattacagtgtgcaatactttccccggcatttaaagttagagaattttccgtcacagatgcagttccttttccaatatctctgatctggaaccatgattcagaagatactgaaggtgttcatgaagtctttagtcgaaaccatgctgctcctttctccaaagttctcacctttctgagaagggggccttttgagctagaagctttctattctgatccccaaggagttccatatccagaagcaaaaataggccgctttgtagttcagaatgtttctgcacagaaagatggagaaaaatctagagtaaaagtcaaagtgcgagtcaacacccatggcattttcaccatctctacggcatctatggtggagaaagtcccaactgaggagaatgaaatgtcttctgaagctgacatggagtgtctgaatcagagaccaccagaaaacccagacactgataaaaatgtccagcaagacaacagtgaagctggaacacagccccaggtacaaactgatgctcaacaaacctcacagtctcccccttcacctgaacttacctcagaagaaaacaaaatcccagatgctgacaagcaaatgaaaaaaaagttgaccagcctccagaagctaaaaagcccaaaataaaggtggtgaatgttgagctg

SEQ ID NO: 166767 - DNA, 2577 bp, Artificial Sequence
  derived and/or modified sequence
atgtctgtggtgggcctggatgtgggcagccagagctgctacatcgctgtggcccgggccggcggcatcgagaccatcgccaatgagttcagtgaccgctgcaccccatctgtcatcagctttggcagcaagaacagaaccatcggcgtggccgccaagaaccagcagatcacccacgccaacaacacagtgagcaacttcaagcgcttccacggccgggccttcaatgaccccttcatccagaaggagaaggagaacctgtcctatgacctggtgcccctgaagaatggaggagtgggcatcaaggtgatgtacatgggagaggagcacctgttctctgtggagcagatcacagccatgctgctgaccaagctgaaggagacagctgagaacagcctgaagaagcctgtgacagactgtgtgatctctgtgcccagcttcttcacagatgctgagaggagatctgtgctggatgctgcccagatcgtgggcctgaactgcctgcggctgatgaatgacatgacagctgtggccctgaactacggcatctacaagcaggacctgcccagcctggatgagaagcccagaattgtggtgtttgtggacatgggccacagcgccttccaggtgtctgcctgtgccttcaacaagggcaagctgaaggtgctgggcacagcctttgaccccttcctgggcggcaagaactttgatgagaagctggtggagcacttctgtgccgagttcaagaccaagtacaagctggatgccaagagcaagatccgggccctgctgcggctgtaccaggagtgtgagaagctgaagaagctgatgagcagcaacagcacagacctgcccctgaacatcgagtgcttcatgaatgacaaggatgtgtctgggaagatgaacagaagccagtttgaggagctgtgtgccgagctgctgcagaagattgaggtgcccctgtacagcctgctggagcagacccacctgaaggtggaggatgtgtctgctgtggagatcgtgggcggggccacccgcatcccagctgtgaaggagcgcatcgccaagttcttcggcaaggacatcagcaccaccctgaatgctgatgaagctgtggcccggggctgtgccctgcagtgtgccatcctgagccctgccttcaaggtgcgggagttctctgtgacagatgctgtgcccttccccatcagcctcatctggaaccacgacagcgaggacacagaaggagtgcatgaggtgttcagcaggaaccacgccgcccccttcagcaaggtgctgaccttcctgcggcggggcccctttgagctggaggccttctacagcgacccccagggcgtgccctacccagaggccaagattggccgctttgtggtgcagaatgtgtctgcccagaaggatggagagaagagccgggtgaaggtgaaggtgcgggtgaacacccacggcatcttcaccatcagcacagcctccatggtggagaaggtgcccacagaagaaaatgagatgagcagcgaggccgacatggagtgcctgaaccagaggcccccagaaaatccagacacagacaagaatgtgcagcaggacaacagcgaggccggcacccagccccaggtgcagacagatgcccagcagaccagccagagcccccccagccctgagctgaccagcgaggagaacaagatcccagatgctgacaaggccaatgagaagaaggtggaccagcccccagaggccaagaagcccaagatcaaggtggtgaatgtggagctgcccatcgaggccaacctggtgtggcagctgggcaaggacctgctgaacatgtacattgaaacagagggcaagatgatcatgcaggacaagctggagaaggagagaaatgatgccaagaatgctgtggaggagtatgtgtatgagttccgggacaagctgtgtggcccctatgagaagttcatctgtgagcaggaccaccagaacttcctgcggctgctgacagaaacagaggactggctgtatgaggagggggaggaccaggccaagcaggcctacgtggacaagctggaggagctgatgaagattggcacccctgtgaaggtgcgcttccaggaggccgaggagcggcccaagatgtttgaggagctgggccagaggctgcagcactacgccaagattgctgctgacttcaggaacaaggatgagaagtacaaccacattgatgagagcgagatgaagaaggtggagaagtctgtgaatgaggtgatggagtggatgaacaacgtgatgaatgcccaggccaagaagagcctggaccaggaccctgtggtgcgggcccaggagatcaagaccaagatcaaggagctgaacaacacctgtgagcctgtggtgacccagcccaagcccaagattgagagccccaagctggagaggaccccaaatggccccaacatcgacaagaaggaggaggacctggaggacaagaacaactttggagctgagcccccccaccagaatggagagtgctacccaaatgagaagaacagcgtgaacatggacctggactag

SEQ ID NO: 166768 - DNA, 1920 bp, Artificial Sequence
  derived and/or modified sequence
atggcccgggagcggccctgccgctgccacggcaatggaggccgcagccctggcaccggctgccccctgggccgcatcttccctgagggcagcagaagaaggaagaggaagtggcacgtggagggccctgtggaggcccccagaaatggccagacccccagggctggagctgagcggggccagggcaggaagaggcggcaggagaagcaggccggcggcatcgagaccatcgccaatgagttcagtgaccgctgcacccccagcgtcatcagctttggcagcaagaacagaaccatcggcgtggccgccaagaaccagcagatcacccacgccaacaacacagtgagcaacttcaagcgcttccacggccgggccttcaatgaccccttcatccagaaggagaaggagaacctgtcctatgacctggtgcccctgaagaatggaggagtgggcatcaaggtgatgtacatgggagaggagcacctgttctctgtggagcagatcacagccatgctgctgaccaagctgaaggagacagctgagaacagcctgaagaagcctgtgacagactgtgtgatctctgtgcccagcttcttcacagatgctgagcggcgctctgtgctggatgctgcccagatcgtgggcctgaactgcctgcggctgatgaatgacatgacagctgtggccctgaactacggcatctacaagcaggacctgcccagcctggatgagaagccccgcatcgtggtgtttgtggacatgggccacagcgccttccaggtgtctgcctgtgccttcaacaagggcaagctgaaggtgctgggcacagcctttgaccccttcctgggcggcaagaactttgatgagaagctggtggagcacttctgtgccgagttcaagaccaagtacaagctggatgccaagagcaagatccgggccctgctgcggctgtaccaggagtgtgagaagctgaagaagctgatgagcagcaacagcacagacctgcccctgaacatcgagtgcttcatgaatgacaaggatgtgtctgggaagatgaacagaagccagtttgaggagctgtgtgccgagctgctgcagaagattgaggtgcccctgtacagcctgctggagcagacccacctgaaggtggaggatgtgtctgctgtggagatcgtgggcggggccacccgcatcccagctgtgaaggagagaattgccaagttcttcggcaaggacatcagcaccaccctgaatgctgatgaggccgtggcccggggctgtgccctgcagtgtgccatcctgagccctgccttcaaggtgcgggagttctctgtgacagatgctgtgcccttccccatcagcctcatctggaaccatgattctgaggacacagagggcgtgcatgaggtgttcagcagaaatcatgctgcccccttcagcaaggtgctgaccttcctgcggcggggcccctttgagctggaggccttctacagcgacccccagggcgtgccctacccagaggccaagattggccgctttgtggtgcagaatgtgtctgcccagaaggatggagagaagagccgggtgaaggtgaaggtgcgggtgaacacccacggcatcttcaccatcagcacagcctccatggtggagaaggtgcccacagaggagaatgagatgagcagcgaggccgacatggagtgcctgaaccagaggcctcctgagaacccagacacagacaagaatgtgcagcaggacaacagcgaggccggcacccagccccaggtgcagacagatgcccagcagaccagccagagcccccccagccctgagctgaccagcgaggagaacaagatcccagatgctgacaagcagatgaagaagaagctgaccagcctgcagaagctgaagagccccaagtag

SEQ ID NO: 166769 - DNA, 2577 bp, Artificial Sequence
  derived and/or modified sequence
atgagcgtggtgggcctggacgtgggcagccagagctgctacatcgccgtggcacgcgccggggggatcgaaaccatcgccaacgagttctccgaccgctgtaccccctctgtgataagtttcgggtcaaagaaccgtaccatcggggtggcagccaagaatcagcagataacgcacgccaataacaccgtctcaaactttaagcgcttccacggacgcgccttcaatgatccctttatacaaaaagagaaggaaaacctctcctacgacttggtgcccctgaagaacgggggcgtgggcattaaagtgatgtatatgggcgaggaacatctgttctctgtggagcagatcaccgctatgctgctgacaaagttaaaagagacagcggagaacagcctgaagaaacccgtgactgactgcgttatatccgtgccttccttctttaccgacgccgaacgcaggtcagtgctcgacgcagcccagatcgttggcttaaactgtctccgccttatgaatgatatgacggctgtcgctctgaattacggcatttacaagcaggacttgccctctctggatgaaaagccgagaatcgtggtgttcgtggatatgggccacagcgcatttcaggtcagcgcctgtgcattcaacaagggcaagctaaaggtcctgggaactgcatttgaccccttcctcggaggtaagaatttcgacgaaaagctcgtcgaacacttctgtgccgaatttaagactaagtacaaacttgatgccaagtctaagatcagagcattgttgcgactgtatcaggagtgcgagaaactgaagaagctaatgtcttcaaatagcaccgatctgccccttaatatcgagtgtttcatgaacgataaagacgtgtcaggaaaaatgaaccggagccagtttgaagaattatgcgccgagctcctccaaaaaatcgaagtccccttgtatagtcttctagagcagactcatctgaaagtggaagatgttagcgcggtggaaatcgtgggcggagccacaaggatccccgccgtaaaggaacgcatcgccaaattcttcggcaaggacatcagtactacattgaatgcagatgaagccgtggcgagaggctgtgctctgcagtgcgcaattctctcaccggcctttaaggtccgtgagttctcagtcaccgacgctgtacccttcccaatcagcctaatttggaaccatgacagcgaggacaccgagggtgtacacgaagtgttttctaggaaccacgccgcccccttttcaaaagttctgactttcctgcgccgcgggcctttcgagctggaggctttctatagtgaccctcagggagtaccctaccctgaggccaaaattggcagatttgtggtgcaaaacgtctcggcgcagaaggacggtgaaaagagtcgagtgaaagtcaaggtccgcgtgaacacccacggcatctttacgatctctactgcttcgatggtcgagaaggtccccacagaggagaacgaaatgagctcagaggcggatatggagtgtctgaaccagcgcccccccgaaaatccggataccgataagaatgtacaacaggataatagcgaagcaggaacccagccgcaggttcagacagacgcccagcaaacatcacagagtccgccctcaccagaattgacttcagaagaaaataagatccccgatgccgacaaggccaatgagaaaaaggtggatcaaccaccagaggctaaaaagccaaaaatcaaagtagtgaacgttgagctgcccattgaagccaatttagtgtggcaactggggaaagacttgctgaatatgtacattgaaaccgagggcaaaatgatcatgcaggacaaactagaaaaggaaagaaacgacgcaaagaacgcggtggaggagtatgtgtacgagttccgagacaagctgtgtgggccctatgaaaagttcatttgcgagcaggaccatcaaaacttcctcagactcctcacggaaacagaagactggctctacgaggagggcgaggaccaagccaaacaggcctacgtcgacaagttggaagagctgatgaaaattggcactcccgtgaaggttagattccaggaggcagaggagagaccgaagatgtttgaggaactgggccagcggctccagcattacgctaaaattgccgcggatttcagaaacaaggatgagaaatataaccacattgatgaaagtgaaatgaaaaaggtggagaaaagcgtgaacgaggtaatggaatggatgaataacgtgatgaatgcccaagccaagaaaagccttgaccaggatccagtagtgcgcgcgcaggaaataaaaaccaaaattaaggagttgaacaacacttgtgaacccgtcgtgacacaacctaagcccaaaatcgaatctcccaaactagaacgtacccctaatggtccaaacattgacaagaaagaggaggaccttgaggataagaacaatttcggtgctgagcctccacatcagaacggtgaatgctacccaaacgagaaaaacagtgtcaatatggatttggactag

SEQ ID NO: 166770 - DNA, 1920 bp, Artificial Sequence
  derived and/or modified sequence
atggcccgggagcggccctgccggtgccacggcaacggcggccggtccccaggaactggctgcccactggggcggatcttccccgaaggatctcgccgtcgcaaacgcaagtggcatgttgaaggaccagtagaagcgccacgcaatggacagacacccagagcaggtgcggagcggggacagggtcgaaagcggcgccaggagaagcaggccggagggattgaaaccatcgccaatgagttctccgatcggtgcactccaagcgtgattagtttcggctctaagaataggacaatcggagtggcagcaaaaaaccagcaaatcactcacgccaacaatactgtttccaactttaaacggttccatggccgggcatttaatgacccttttattcagaaggagaaggaaaacctctcctacgatctggtgcccttgaagaatggcggagtaggtattaaggttatgtacatgggagaagagcatcttttcagcgtcgagcaaattacggccatgttgctcactaagctcaaagagaccgccgagaattccctgaagaaacccgtgaccgattgcgtgatctccgtcccctctttttttacagacgccgaaagacgctctgttctcgatgccgcgcagatcgtagggctgaactgcctccgtctgatgaacgatatgacagctgttgcactgaactacggtatttataagcaagacctaccgtccttggacgagaaacccagaattgtagtgttcgtggatatgggccattcagcgttccaagtgagcgcctgcgcttttaacaagggtaagttgaaggtcctaggcacagcattcgatccgttcctcggcggaaaaaactttgatgagaagctcgtggaacatttttgtgcagagtttaagactaagtataaattagatgctaagtcgaaaatccgtgcactcctccgcctgtaccaggagtgtgaaaagctcaagaagcttatgtcctccaactcgaccgaccttccactcaacatcgagtgctttatgaacgataaggacgtcagcggaaagatgaataggagccaattcgaggagttgtgtgctgagctacttcaaaagattgaagtgcccctgtacagcctcctcgagcaaacacacctgaaggtggaggacgtgagtgcagtggagattgttgggggcgccacacgaatccctgcagtcaaggagaggatcgccaaattctttggcaaagatatttcaaccactctgaatgctgatgaggcggtggccagagggtgtgccttacaatgtgctatcctctccccagcttttaaggtgcgagaatttagtgtgactgatgctgttccattccccatctctcttatctggaatcacgactctgaggacaccgagggcgtacacgaagtgttcagccgaaaccatgccgcaccatttagcaaagtgttgacttttctccgtagggggcccttcgaactcgaggcattttactctgacccacaaggggtaccatatccagaagctaagatcgggagatttgtggtccagaacgtaagcgcgcaaaaggacggggagaagtctcgagtaaaggttaaagtccgggttaatacccatgggatcttcaccatttccacagccagtatggtggaaaaagtccctacagaggaaaatgaaatgagctccgaggctgatatggagtgccttaatcagagacccccggaaaacccggacactgacaagaacgtgcagcaagacaactccgaagcaggcactcaaccccaggttcagacagatgcgcagcagacttcccagtcgccacccagtcctgaactcacatcagaggagaataagattcctgatgctgataagcagatgaagaaaaaacttacctcactccagaagctgaaatctcctaaatag

SEQ ID NO: 166771 - DNA, 2577 bp, Artificial Sequence
  derived and/or modified sequence
atgtccgtggtaggcctggatgtaggatcacagagctgctacatagccgtcgccagagccggtgggatcgagaccattgcaaacgagttctccgaccggtgtactcctagcgtgatatcatttgggtctaagaatcgcaccattggcgtcgcagccaagaatcagcagatcactcatgccaataataccgtgtcgaactttaaaagatttcacggacgcgcatttaatgaccccttcatccagaaagagaaggagaatctttcttacgatttggtacccctcaagaacggaggagtgggcattaaggttatgtacatgggcgaggagcatctgttcagcgtggagcagattacagccatgcttttgacaaagctaaaagagaccgctgaaaacagtttaaaaaaaccagtgaccgattgcgtcatttcggtccctagctttttcacggatgctgaacgcagatccgttctcgatgctgctcaaatcgtagggctcaactgcctgagactgatgaatgatatgacagccgttgctctgaattatggtatctataagcaggacctcccgagtctagatgagaaacctagaatcgtggtgtttgtggacatggggcatagcgcctttcaggtgtcagcgtgtgcattcaacaaggggaagctgaaggtccttggcacagctttcgatccgtttctgggaggaaagaatttcgatgagaaactggttgaacacttttgcgccgagttcaaaacaaaatacaaactagatgccaaatccaagatccgagccctcctgaggctgtaccaggaatgtgaaaagttaaaaaaactgatgtctagcaacagcactgatcttccacttaacatagagtgcttcatgaacgataaggatgtgagcggaaagatgaatcgctcccagtttgaggagctctgtgccgagctactgcaaaaaatagaagttcctctctatagcttgctggagcagacccatctaaaggtggaagatgtcagtgctgtggaaatcgtggggggagctacacgaataccggctgtgaaagagcgaattgctaagttttttggaaaggatatctccaccacgttaaacgccgacgaggccgtggctcgtgggtgtgccttgcagtgcgccatcctcagtccagccttcaaggtgcgcgaatttagtgtaactgacgccgtgccattccccatatcattgatctggaatcacgatagcgaagacacagaaggtgtccacgaggtgttttctcggaatcacgcagcccctttctcgaaggtcttgacctttttgcgacgtggcccatttgagctggaagccttttattctgatccccagggagtcccctaccctgaagctaagatcggacgcttcgtagtccagaacgtttctgcccagaaggacggagaaaagtcacgggtcaaagtcaaggtacgtgtgaacacacacggtatctttacaatcagcaccgccagcatggtggagaaggtgcccactgaagaaaacgagatgtcatcagaggcagacatggaatgtctaaaccagcggcctcctgagaaccccgacacggacaagaacgtccagcaggataactctgaggccggtacccagcctcaggtgcagaccgatgctcagcagacatcccaatctcccccatccccagagctgacttcagaggaaaacaagatcccagatgccgataaagccaatgagaaaaaggtagatcagccccctgaggccaagaagccgaagattaaggtggtgaacgtggagctcccaattgaggccaacctggtatggcagttgggaaaggatctgctgaacatgtatatcgaaactgagggtaagatgattatgcaagacaaattagaaaaggaacgaaacgatgccaaaaatgcagtggaagagtacgtatatgaattccgagacaaactgtgtggaccttacgaaaagttcatatgcgagcaggaccatcagaactttttaaggcttttgacggaaaccgaggactggctgtatgaggaaggcgaggaccaggcgaagcaagcttacgttgataagttggaggagcttatgaagattggtacccctgtgaaggtacgattccaagaggccgaagagcgccctaaaatgtttgaagaattggggcagcgcctgcaacactatgccaagattgccgctgacttcaggaataaagacgaaaaatacaatcacatcgacgagtccgagatgaaaaaagtggagaaatcggtgaacgaagtgatggaatggatgaacaacgtaatgaatgctcaagccaaaaagagtctggaccaggaccccgtggtcagggcacaggaaattaagacgaaaatcaaagaactgaataatacctgtgagccagtggtcacacagcccaaacccaagattgaatcacctaagctggaaaggacgccaaatgggccaaacatcgacaagaaggaggaagacttagaagataaaaataactttggtgcggagccacctcaccagaatggcgagtgctatcccaatgaaaaaaattctgttaatatggacttagattag

SEQ ID NO: 166772 - DNA, 1920 bp, Artificial Sequence
  derived and/or modified sequence
atggccagggagagaccctgtagatgtcacggcaacggtggacgctccccaggaacgggctgtcctctgggtaggatattcccagagggatcacggaggaggaagagaaaatggcacgttgaaggcccagtggaagctccccgaaacgggcagaccccccgtgctggagcggagcgcggtcaaggacgtaagagacgacaagagaagcaggctggtggcatcgaaaccatcgccaacgaattctctgacagatgtaccccttccgtgatctctttcggctctaaaaacagaacaataggggtcgccgctaagaatcagcaaattacccacgccaacaacacagtctccaattttaagcggtttcacgggagagcttttaacgatcctttcattcagaaagaaaaggagaacctttcgtacgatctggtgcctctgaagaatggaggtgttggaatcaaggtcatgtatatgggggaagagcatctcttctccgtggaacagatcactgccatgctcctgacaaaactgaaggaaaccgccgagaattctcttaagaaacccgtgactgactgcgtaatatccgtgcccagttttttcacagacgcggaaagaaggagtgtgctggacgctgcacaaatcgtcggccttaactgcctccgtctgatgaatgacatgacagctgtcgcgttaaactatggtatctacaagcaggacctgcctagcctggacgaaaaacctcgcatcgtggtttttgttgacatggggcactctgcattccaggtgtcagcatgtgcctttaataaggggaagctcaaagtgctgggtacagcattcgatccttttcttgggggaaaaaattttgacgagaagctggtggagcacttttgcgccgagtttaaaactaagtataagctggacgcaaagtcgaaaattcgcgctttattacgcctgtatcaggagtgtgaaaagctcaaaaaactcatgtcctcaaactccacagacctacctctcaatatcgaatgtttcatgaatgataaggatgtatccggtaagatgaaccggtcccagtttgaggagctctgtgccgagctgctccaaaagatcgaagtgcctttgtatagcttactcgagcagacacacctgaaagtggaggatgtctctgcggttgaaatagtgggcggtgcaacaagaattcctgcggtgaaggagagaattgcgaagtttttcggcaaggatatctccaccactctgaatgctgatgaagctgtagcacggggatgcgccctgcaatgtgcaatcttgtctccggctttcaaggtgcgggagtttagcgtcaccgatgctgtacccttcccaatttctttgatctggaaccatgacagcgaagataccgagggagtgcacgaagtgttcagtcggaaccacgccgctccattttcaaaggtgctcacttttctccggcgtggcccatttgagctggaggctttttacagtgacccccagggggtgccatacccagaggccaaaattgggaggtttgttgtgcagaacgtcagcgcccagaaggacggggagaagagtagagtgaaagtgaaggtccgggtgaacacccacggcatttttaccataagtaccgcttccatggtggagaaggtgcctaccgaggaaaacgaaatgtcctccgaggcagacatggagtgcctcaaccagcgtccgcctgaaaatcctgatacagacaagaatgtccagcaggacaactccgaagcaggaacacagccccaggtgcaaaccgacgcacagcagaccagccagagcccgccttctccagaactaacatccgaagagaacaaaatccctgacgccgacaagcagatgaaaaagaaactcactagccttcagaaattgaaatcaccgaagtag

SEQ ID NO: 166773 - DNA, 2577 bp, Artificial Sequence
  derived and/or modified sequence
atgagcgtggtgggcctggacgtgggcagccagagctgctacatcgccgtggccagagccggcggcatcgagaccatcgccaacgagttcagcgacagatgcacccccagcgtgatcagcttcggcagcaagaacagaaccatcggcgtggccgccaagaaccagcagatcacccacgccaacaacaccgtgagcaacttcaagagattccacggcagagccttcaacgaccccttcatccagaaggagaaggagaacctgagctacgacctggtgcccctgaagaacggcggcgtgggcatcaaggtgatgtacatgggcgaggagcacctgttcagcgtggagcagatcaccgccatgctgctgaccaagctgaaggagaccgccgagaacagcctgaagaagcccgtgaccgactgcgtgatcagcgtgcccagcttcttcaccgacgccgagagaagaagcgtgctggacgccgcccagatcgtgggcctgaactgcctgagactgatgaacgacatgaccgccgtggccctgaactacggcatctacaagcaggacctgcccagcctggacgagaagcccagaatcgtggtgttcgtggacatgggccacagcgccttccaggtgagcgcctgcgccttcaacaagggcaagctgaaggtgctgggcaccgccttcgaccccttcctgggcggcaagaacttcgacgagaagctggtggagcacttctgcgccgagttcaagaccaagtacaagctggacgccaagagcaagatcagagccctgctgagactgtaccaggagtgcgagaagctgaagaagctgatgagcagcaacagcaccgacctgcccctgaacatcgagtgcttcatgaacgacaaggacgtgagcggcaagatgaacagaagccagttcgaggagctgtgcgccgagctgctgcagaagatcgaggtgcccctgtacagcctgctggagcagacccacctgaaggtggaggacgtgagcgccgtggagatcgtgggcggcgccaccagaatccccgccgtgaaggagagaatcgccaagttcttcggcaaggacatcagcaccaccctgaacgccgacgaggccgtggccagaggctgcgccctgcagtgcgccatcctgagccccgccttcaaggtgagagagttcagcgtgaccgacgccgtgcccttccccatcagcctgatctggaaccacgacagcgaggacaccgagggcgtgcacgaggtgttcagcagaaaccacgccgcccccttcagcaaggtgctgaccttcctgagaagaggccccttcgagctggaggccttctacagcgacccccagggcgtgccctaccccgaggccaagatcggcagattcgtggtgcagaacgtgagcgcccagaaggacggcgagaagagcagagtgaaggtgaaggtgagagtgaacacccacggcatcttcaccatcagcaccgccagcatggtggagaaggtgcccaccgaggagaacgagatgagcagcgaggccgacatggagtgcctgaaccagagaccccccgagaaccccgacaccgacaagaacgtgcagcaggacaacagcgaggccggcacccagccccaggtgcagaccgacgcccagcagaccagccagagcccccccagccccgagctgaccagcgaggagaacaagatccccgacgccgacaaggccaacgagaagaaggtggaccagccccccgaggccaagaagcccaagatcaaggtggtgaacgtggagctgcccatcgaggccaacctggtgtggcagctgggcaaggacctgctgaacatgtacatcgagaccgagggcaagatgatcatgcaggacaagctggagaaggagagaaacgacgccaagaacgccgtggaggagtacgtgtacgagttcagagacaagctgtgcggcccctacgagaagttcatctgcgagcaggaccaccagaacttcctgagactgctgaccgagaccgaggactggctgtacgaggagggcgaggaccaggccaagcaggcctacgtggacaagctggaggagctgatgaagatcggcacccccgtgaaggtgagattccaggaggccgaggagagacccaagatgttcgaggagctgggccagagactgcagcactacgccaagatcgccgccgacttcagaaacaaggacgagaagtacaaccacatcgacgagagcgagatgaagaaggtggagaagagcgtgaacgaggtgatggagtggatgaacaacgtgatgaacgcccaggccaagaagagcctggaccaggaccccgtggtgagagcccaggagatcaagaccaagatcaaggagctgaacaacacctgcgagcccgtggtgacccagcccaagcccaagatcgagagccccaagctggagagaacccccaacggccccaacatcgacaagaaggaggaggacctggaggacaagaacaacttcggcgccgagcccccccaccagaacggcgagtgctaccccaacgagaagaacagcgtgaacatggacctggactag

SEQ ID NO: 166774 - DNA, 1920 bp, Artificial Sequence
  derived and/or modified sequence
atggccagagagagaccctgcagatgccacggcaacggcggcagaagccccggcaccggctgccccctgggcagaatcttccccgagggcagcagaagaagaaagagaaagtggcacgtggagggccccgtggaggcccccagaaacggccagacccccagagccggcgccgagagaggccagggcagaaagagaagacaggagaagcaggccggcggcatcgagaccatcgccaacgagttcagcgacagatgcacccccagcgtgatcagcttcggcagcaagaacagaaccatcggcgtggccgccaagaaccagcagatcacccacgccaacaacaccgtgagcaacttcaagagattccacggcagagccttcaacgaccccttcatccagaaggagaaggagaacctgagctacgacctggtgcccctgaagaacggcggcgtgggcatcaaggtgatgtacatgggcgaggagcacctgttcagcgtggagcagatcaccgccatgctgctgaccaagctgaaggagaccgccgagaacagcctgaagaagcccgtgaccgactgcgtgatcagcgtgcccagcttcttcaccgacgccgagagaagaagcgtgctggacgccgcccagatcgtgggcctgaactgcctgagactgatgaacgacatgaccgccgtggccctgaactacggcatctacaagcaggacctgcccagcctggacgagaagcccagaatcgtggtgttcgtggacatgggccacagcgccttccaggtgagcgcctgcgccttcaacaagggcaagctgaaggtgctgggcaccgccttcgaccccttcctgggcggcaagaacttcgacgagaagctggtggagcacttctgcgccgagttcaagaccaagtacaagctggacgccaagagcaagatcagagccctgctgagactgtaccaggagtgcgagaagctgaagaagctgatgagcagcaacagcaccgacctgcccctgaacatcgagtgcttcatgaacgacaaggacgtgagcggcaagatgaacagaagccagttcgaggagctgtgcgccgagctgctgcagaagatcgaggtgcccctgtacagcctgctggagcagacccacctgaaggtggaggacgtgagcgccgtggagatcgtgggcggcgccaccagaatccccgccgtgaaggagagaatcgccaagttcttcggcaaggacatcagcaccaccctgaacgccgacgaggccgtggccagaggctgcgccctgcagtgcgccatcctgagccccgccttcaaggtgagagagttcagcgtgaccgacgccgtgcccttccccatcagcctgatctggaaccacgacagcgaggacaccgagggcgtgcacgaggtgttcagcagaaaccacgccgcccccttcagcaaggtgctgaccttcctgagaagaggccccttcgagctggaggccttctacagcgacccccagggcgtgccctaccccgaggccaagatcggcagattcgtggtgcagaacgtgagcgcccagaaggacggcgagaagagcagagtgaaggtgaaggtgagagtgaacacccacggcatcttcaccatcagcaccgccagcatggtggagaaggtgcccaccgaggagaacgagatgagcagcgaggccgacatggagtgcctgaaccagagaccccccgagaaccccgacaccgacaagaacgtgcagcaggacaacagcgaggccggcacccagccccaggtgcagaccgacgcccagcagaccagccagagcccccccagccccgagctgaccagcgaggagaacaagatccccgacgccgacaagcagatgaagaagaagctgaccagcctgcagaagctgaagagccccaagtag

SEQ ID NO: 166775 - DNA, 3680 bp, Artificial Sequence
  derived and/or modified sequence
tgagtaaatgccgcagattctggaaagttctgatcagtgcgatacataaggctgaggaagtgggacctccccttttgggtcggtagttcagcgccggcgccggtgtgcgagccgcggcagagtgaggcaggcaacccgaggtgcggagcgacctgcggaggctgagccccgctttctcccagggtttcttatcagccagccgccgctgtccccgggggagtaggaggctcctgacaggccgcggctgtctgtgtgtccttctgagtgtcagaggaacggccagaccccgcgggccggagcagaacgcggccagggcagaaagcggcggcaggagaagcaggcagggggccggaggacgcagaccgagacccgaggcggaggcggaccgcgagccggccatgtcggtggtggggttggacgtgggctcgcagagctgctacatcgcggtagcccgggccgggggcatcgagaccatcgccaatgagttcagcgaccggtgcaccccgtcagtcatatcatttggatcaaaaaatagaacaatcggagttgcagccaaaaatcagcaaatcactcatgcaaacaatacggtgtctaacttcaaaagatttcatggccgagcattcaatgaccccttcattcaaaaggagaaggaaaacttgagttacgatttggttccattgaaaaatggtggagttggaataaaggtaatgtacatgggtgaagaacatctatttagtgtggagcagataacagccatgttgttgactaagctgaaggaaactgctgaaaacagcctcaagaaaccagtaacagattgtgttatttcagtcccctccttctttacagatgctgagaggcgatctgtgttagatgctgcacagattgttggcctaaactgtttaagacttatgaatgacatgacagctgttgctttgaattacggaatttataagcaggatctcccaagcctggatgagaaacctcggatagtggtttttgttgatatgggacattcagcttttcaagtgtctgcttgtgcttttaacaagggaaaattgaaggtactgggaacagcttttgatcctttcttaggaggaaaaaacttcgatgaaaagttagtggaacatttttgtgcagaatttaaaactaagtacaagttggatgcaaaatccaaaatacgagcactcctacgtctgtatcaggaatgtgaaaaactgaaaaagctaatgagctctaacagcacagaccttccactgaatatcgaatgctttatgaatgataaagatgtttccggaaagatgaacaggtcacaatttgaagaactctgtgctgaacttctgcaaaagatagaagtacccctttattcactgttggaacaaactcatctcaaagtagaagatgtgagtgcagttgagattgttggaggcgctacacgaattccagctgtgaaggaaagaattgccaaattctttggaaaagatattagcacaacactcaatgcagatgaagcagtagccagaggatgtgcattacagtgtgcaatactttccccggcatttaaagttagagaattttccgtcacagatgcagttccttttccaatatctctgatctggaaccatgattcagaagatactgaaggtgttcatgaagtctttagtcgaaaccatgctgctcctttctccaaagttctcacctttctgagaagggggccttttgagctagaagctttctattctgatccccaaggagttccatatccagaagcaaaaataggccgctttgtagttcagaatgtttctgcacagaaagatggagaaaaatctagagtaaaagtcaaagtgcgagtcaacacccatggcattttcaccatctctacggcatctatggtggagaaagtcccaactgaggagaatgaaatgtcttctgaagctgacatggagtgtctgaatcagagaccaccagaaaacccagacactgataaaaatgtccagcaagacaacagtgaagctggaacacagccccaggtacaaactgatgctcaacaaacctcacagtctcccccttcacctgaacttacctcagaagaaaacaaaatcccagatgctgacaaagcaaatgaaaaaaaagttgaccagcctccagaagctaaaaagcccaaaataaaggtggtgaatgttgagctgcctattgaagccaacttggtctggcagttagggaaagaccttcttaacatgtatattgagacagagggtaagatgataatgcaagataaattggaaaaagaaaggaatgatgctaaaaatgcagttgaggaatatgtgtatgagttcagagacaagctgtgtggaccatatgaaaaatttatatgtgagcaggatcatcaaaattttttgagactcctcacagaaactgaagactggctgtatgaagaaggagaggaccaagctaaacaagcatatgttgacaagttggaagaattaatgaaaattggcactccagttaaagttcggtttcaggaagctgaagaacggccaaaaatgtttgaagaactaggacagaggctgcagcattatgccaagatagcagctgacttcagaaataaggatgagaaatacaaccatattgatgagtctgaaatgaaaaaagtggagaagtctgttaatgaagtgatggaatggatgaataatgtcatgaatgctcaggctaaaaagagtcttgatcaggatccagttgtacgtgctcaggaaattaaaacaaaaatcaaggaattgaacaacacatgtgaacccgttgtaacacaaccgaaaccaaaaattgaatcacccaaactggaaagaactccaaatggcccaaatattgataaaaaggaagaagatttagaagacaaaaacaattttggtgctgaacctccacatcagaatggtgaatgttaccctaatgagaaaaattctgttaatatggacttggactagataaccttaaattggcctattccttcaattaataaaatatttttgccatagtatgtgactctacataacatactgaaactatttatattttcttttttaaggatatttagaaattttgtgtattatatggaaaaagaaaaaaagcttaagtctgtagtctttatgatcctaaaagggaaaattgccttggtaactttcagattcctgtggaattgtgaattcatactaagctttctgtgcagtctcaccatttgcatcactgaggatgaaactgacttttgtcttttggagaaaaaaaactgtactgcttgttcaagagggctgtgattaaaatctttaagcatttgttcctgccaaggtagttttcttgcattttgctctccattcagcatgtgtgtgggtgtggatgtttataaacaagactaagtctgacttcataagggctttctaaaaccatttctgtccaagagaaaatgactttttgctttgatattaaaaattcaatgagtaaaacaaaagctagtcaaatgtgttagcagcatgcagaacaaaaactttaaactttctctctcactatacagtatattgtcatgtgaaagtgtggaatggaagaaatgtcgatcctgttgtaactgattgtgaacacttttatgagctttaaaataaagttcatcttatggtgtcatttctaaaaaaaaaaaaaaa

SEQ ID NO: 166776 - protein, 291 aa, Artificial Sequence
  derived and/or modified sequence
MEKLAASTEPQGPRPVLGRESVQVPDDQDFRSFRSECEAEVGWNLTYSRAGVSVWVQAVEMDRTLHKIKCRMECCDVPAETLYDVLHDIEYRKKWDSNVIETFDIARLTVNADVGYYSWRCPKPLKNRDVITLRSWLPMGADYIIMNYSVKHPKYPPRKDLVRAVSIQTGYLIQSTGPKSCVITYLAQVDPKGSLPKWVVNKSSQFLAPKAMKKMYKACLKYPEWKQKHLPHFKPWLHPEQSPLPSLALSELSVQHADSLENIDESAVAESREERMGGAGGEGSDDDTSLT

SEQ ID NO: 166777 - protein, 89 aa, Artificial Sequence
  derived and/or modified sequence
MEKLAASTEPQGPRPVLGRESVQVPDDQDFRSFRSECEAEVGWNLTYSRAGVSVWVQAVEMDRTLHKIKCRMECCDVPAETLYDVLHDI

SEQ ID NO: 166778 - protein, 252 aa, Artificial Sequence
  derived and/or modified sequence
MEKLAASTEPQGPRPVLGRESVQVPDDQDFRSFRSECEAEVGWNLTYSRAGVSVWVQAVEMDRTLHKIKCRMECCDVPAETLYDVLHDIEYRKKWDSNVIETFDIARLTVNADVGYYSWRCPKPLKNRDVITLRSWLPMGADYIIMNYSVKHPKYPPRKDLVRAVSIQTGYLIQSTGPKSCVITYLAQVDPKGSLPKWVVNKSSQFLAPKAMKKMYKACLKYPEWKQKHLPHFKPWLHPEQSPLPSLALSEL

SEQ ID NO: 166779 - protein, 191 aa, Artificial Sequence
  derived and/or modified sequence
MEKLAASTEPQGPRPVLGRESVQVPDDQDFRSFRSECEAEVGWNLTYSRAGVSVWVQAVEMDRTLHKIKCRMECCDVPAETLYDVLHDIEYRKKWDSNVIETFDIARLTVNADVGYYSWRCPKPLKNRDVITLRSWLPMGADYIIMNYSVKHPKYPPRKDLVRAVSIQTGYLIQSTGPKSCVITYLAQVDP

SEQ ID NO: 166780 - protein, 138 aa, Artificial Sequence
  derived and/or modified sequence
MEKLAASTEPQGPRPVLGRESVQVPDDQDFRSFRSECEAEVGWNLTYSRAGVSVWVQAVEMDRTLHKIKCRMECCDVPAETLYDVLHDIEYRKKWDSNVIETFDIARLTVNADVGYYSWRCPKPLKNRDVITLRSWLP

SEQ ID NO: 166781 - DNA, 876 bp, Artificial Sequence
  derived and/or modified sequence
atggagaagctggccgccagcaccgagccccagggccccagacccgtgctgggcagagagagcgtgcaggtgcccgacgaccaggacttcagaagcttcagaagcgagtgcgaggccgaggtgggctggaacctgacctacagcagagccggcgtgagcgtgtgggtgcaggccgtggagatggacagaaccctgcacaagatcaagtgcagaatggagtgctgcgacgtgcccgccgagaccctgtacgacgtgctgcacgacatcgagtacagaaagaagtgggacagcaacgtgatcgagaccttcgacatcgccagactgaccgtgaacgccgacgtgggctactacagctggagatgccccaagcccctgaagaacagagacgtgatcaccctgagaagctggctgcccatgggcgccgactacatcatcatgaactacagcgtgaagcaccccaagtacccccccagaaaggacctggtgagagccgtgagcatccagaccggctacctgatccagagcaccggccccaagagctgcgtgatcacctacctggcccaggtggaccccaagggcagcctgcccaagtgggtggtgaacaagagcagccagttcctggcccccaaggccatgaagaagatgtacaaggcctgcctgaagtaccccgagtggaagcagaagcacctgccccacttcaagccctggctgcaccccgagcagagccccctgcccagcctggccctgagcgagctgagcgtgcagcacgccgacagcctggagaacatcgacgagagcgccgtggccgagagcagagaggagagaatgggcggcgccggcggcgagggcagcgacgacgacaccagcctgacctag

SEQ ID NO: 166782 - DNA, 270 bp, Artificial Sequence
  derived and/or modified sequence
atggagaagctggccgccagcaccgagccccagggccccagacccgtgctgggcagagagagcgtgcaggtgcccgacgaccaggacttcagaagcttcagaagcgagtgcgaggccgaggtgggctggaacctgacctacagcagagccggcgtgagcgtgtgggtgcaggccgtggagatggacagaaccctgcacaagatcaagtgcagaatggagtgctgcgacgtgcccgccgagaccctgtacgacgtgctgcacgacatctag

SEQ ID NO: 166783 - DNA, 759 bp, Artificial Sequence
  derived and/or modified sequence
atggagaagctggccgccagcaccgagccccagggccccagacccgtgctgggcagagagagcgtgcaggtgcccgacgaccaggacttcagaagcttcagaagcgagtgcgaggccgaggtgggctggaacctgacctacagcagagccggcgtgagcgtgtgggtgcaggccgtggagatggacagaaccctgcacaagatcaagtgcagaatggagtgctgcgacgtgcccgccgagaccctgtacgacgtgctgcacgacatcgagtacagaaagaagtgggacagcaacgtgatcgagaccttcgacatcgccagactgaccgtgaacgccgacgtgggctactacagctggagatgccccaagcccctgaagaacagagacgtgatcaccctgagaagctggctgcccatgggcgccgactacatcatcatgaactacagcgtgaagcaccccaagtacccccccagaaaggacctggtgagagccgtgagcatccagaccggctacctgatccagagcaccggccccaagagctgcgtgatcacctacctggcccaggtggaccccaagggcagcctgcccaagtgggtggtgaacaagagcagccagttcctggcccccaaggccatgaagaagatgtacaaggcctgcctgaagtaccccgagtggaagcagaagcacctgccccacttcaagccctggctgcaccccgagcagagccccctgcccagcctggccctgagcgagctgtag

SEQ ID NO: 166784 - DNA, 39 bp, Artificial Sequence
  derived and/or modified sequence
atggagaagctggccgccagcaccgagccccagggctag

SEQ ID NO: 166785 - DNA, 576 bp, Artificial Sequence
  derived and/or modified sequence
atggagaagctggccgccagcaccgagccccagggccccagacccgtgctgggcagagagagcgtgcaggtgcccgacgaccaggacttcagaagcttcagaagcgagtgcgaggccgaggtgggctggaacctgacctacagcagagccggcgtgagcgtgtgggtgcaggccgtggagatggacagaaccctgcacaagatcaagtgcagaatggagtgctgcgacgtgcccgccgagaccctgtacgacgtgctgcacgacatcgagtacagaaagaagtgggacagcaacgtgatcgagaccttcgacatcgccagactgaccgtgaacgccgacgtgggctactacagctggagatgccccaagcccctgaagaacagagacgtgatcaccctgagaagctggctgcccatgggcgccgactacatcatcatgaactacagcgtgaagcaccccaagtacccccccagaaaggacctggtgagagccgtgagcatccagaccggctacctgatccagagcaccggccccaagagctgcgtgatcacctacctggcccaggtggacccctag

SEQ ID NO: 166786 - DNA, 417 bp, Artificial Sequence
  derived and/or modified sequence
atggagaagctggccgccagcaccgagccccagggccccagacccgtgctgggcagagagagcgtgcaggtgcccgacgaccaggacttcagaagcttcagaagcgagtgcgaggccgaggtgggctggaacctgacctacagcagagccggcgtgagcgtgtgggtgcaggccgtggagatggacagaaccctgcacaagatcaagtgcagaatggagtgctgcgacgtgcccgccgagaccctgtacgacgtgctgcacgacatcgagtacagaaagaagtgggacagcaacgtgatcgagaccttcgacatcgccagactgaccgtgaacgccgacgtgggctactacagctggagatgccccaagcccctgaagaacagagacgtgatcaccctgagaagctggctgccctag

SEQ ID NO: 166787 - DNA, 876 bp, Artificial Sequence
  derived and/or modified sequence
atggaaaagctggcagccagtactgagccccagggccctagacctgtgctcggccgggagtcagtccaggttcccgacgatcaggacttcaggtcttttcggtcagagtgtgaagctgaagtgggatggaacctgacctatagccgcgcaggcgtgtcagtgtgggtccaggccgtggagatggatcgcacgttgcacaaaataaagtgtaggatggagtgttgtgacgtgcctgcagaaacactgtacgacgtacttcacgacatagagtaccgcaaaaagtgggattcgaacgttattgagaccttcgatatagccagacttactgtgaatgctgatgtgggatactactcctggagatgtcccaaacctctgaagaaccgggacgttatcactttgcgctcttggctgccaatgggcgcagattacattatcatgaattactccgttaagcatcccaagtacccccccagaaaggatctcgtgagggctgtttccatccagacaggatatctgattcagtctacaggccctaaaagttgtgtgattacttatctggctcaggtcgaccccaaaggatccctccccaaatgggtggtgaacaagtcttctcaattcttggcccctaaggcgatgaagaaaatgtataaggcatgcctgaaatatccggagtggaaacagaaacacctgccccacttcaagccatggctgcatcctgaacagagcccattgccatccctcgctctctctgaactcagcgttcagcacgcggacagcttagagaacatcgacgagtctgctgtagcagagtcacgagaggagcggatgggtggggccggaggtgagggaagtgatgacgatacttctctgacatag

SEQ ID NO: 166788 - DNA, 270 bp, Artificial Sequence
  derived and/or modified sequence
atggagaaacttgcagcctcgacagaaccccaaggcccacgcccggttctgggcagggagtccgtgcaggtgcctgatgatcaggacttccgctccttcagatccgagtgtgaagctgaagttggctggaacctgacttattctcgggctggcgtcagcgtctgggtgcaagcggtagagatggataggacactgcataaaataaagtgcagaatggaatgctgcgacgttcctgctgaaacattatatgatgtcctgcatgacatttag

SEQ ID NO: 166789 - DNA, 759 bp, Artificial Sequence
  derived and/or modified sequence
atggagaagctggctgcatcaactgagccacaaggtccacggcctgtgctaggaagggaatcagttcaggtgcccgacgaccaagatttccgatccttcaggtcagagtgtgaggctgaggtgggttggaacctgacctattccagagctggagtgagcgtgtgggtccaggccgtagagatggatagaactctgcataaaatcaaatgcagaatggagtgctgcgacgtacctgccgaaactctgtatgatgtgctgcatgatatagagtacaggaagaaatgggacagtaacgtgattgaaaccttcgacattgccagactgactgtcaatgccgacgtgggctattatagctggcggtgcccaaagcctttaaagaatcgtgacgtgattacacttaggtcttggctacccatgggggccgactatatcattatgaactactcagtgaaacacccaaagtaccccccccggaaggatcttgtgagggccgtgagtattcagacagggtatcttatacagtctaccggacccaagtcctgtgtgattacctatctggcacaggtagatcccaaaggttccctcccgaaatgggtggtgaacaaatcttctcaatttctcgcccctaaagcaatgaaaaagatgtacaaagcatgtctgaagtaccctgagtggaagcagaaacacctgcctcactttaaaccttggctgcatcccgaacaatcgcccctccccagcctggccctgtccgagctgtag

SEQ ID NO: 166790 - DNA, 39 bp, Artificial Sequence
  derived and/or modified sequence
atggaaaagctggccgctagcacagaacctcagggctag

SEQ ID NO: 166791 - DNA, 576 bp, Artificial Sequence
  derived and/or modified sequence
atggagaaactcgccgccagcactgagccacagggaccccgcccggtgctgggcagagaaagcgtgcaggtccccgacgatcaggattttcgctcttttcggtctgagtgcgaggcggaagttggctggaacctgacatactcacgtgccggggtcagcgtctgggtgcaggccgtggagatggacaggactctccataagattaaatgtcgtatggagtgttgtgacgtgcccgccgaaaccctgtacgatgtgctgcacgacatcgagtatcgaaagaagtgggactcgaacgtgatcgaaacattcgacattgctagactgactgttaatgcagatgtcgggtattactcctggagatgccccaaaccactgaaaaaccgagatgtgattaccctgcgctcctggctccctatgggcgccgattatatcataatgaactactcggtcaagcatccaaaatatccaccaagaaaggatttagttagggccgtgtcaattcagactggttacctaatccagtctacaggccctaaaagctgtgttatcacatatctggcccaggtggatccttag

SEQ ID NO: 166792 - DNA, 876 bp, Artificial Sequence
  derived and/or modified sequence
atggagaaactggccgccagcacagagccgcaaggtcctagacctgttctaggtagggagtccgtgcaggtgccggacgatcaggactttaggtcatttcggagcgaatgcgaggctgaagtggggtggaatctgacctacagtcgcgcaggcgtttcagtgtgggtgcaggctgtggagatggatcgcacattgcacaaaataaagtgtaggatggagtgctgcgacgtgccggctgagacgttgtatgatgtgcttcatgatattgaatacagaaagaagtgggattccaacgtaatcgaaacattcgacatagcgaggctcaccgttaacgccgacgtgggttactactcctggcggtgccctaagccactgaaaaatagagacgtgatcactctgagatcctggctgcccatgggagccgactacatcattatgaattatagtgtcaagcatcccaagtatccccccaggaaggacctggtgcgggctgtgagcatccagaccggctacctaatccagagtactggccctaaaagctgtgtgatcacatacctggctcaggtggatcctaagggctccctgcccaaatgggtggtcaacaaatcatctcagtttcttgctcctaaagctatgaaaaaaatgtataaagcatgcctcaagtacccagagtggaagcaaaaacaccttccacactttaagccctggctccaccctgagcaatcaccccttccctctctcgccctgtcagagctctcggtgcaacatgccgatagcctggaaaacatcgacgagagcgccgtggctgaaagcagagaagagcgcatggggggcgcagggggcgaaggctccgacgacgacacttctctgacctag

SEQ ID NO: 166793 - DNA, 417 bp, Artificial Sequence
  derived and/or modified sequence
atggaaaaactggctgctagcactgaaccacagggcccccgtcctgtactgggcagagaatcagtccaggtaccagatgaccaggacttccgctcgtttagatctgagtgtgaggccgaagttggatggaacctgacctattccagagccggggtgagtgtatgggtgcaggcggtcgagatggatcgaacgctgcacaagataaagtgccggatggaatgttgcgacgtgccagctgagaccctgtatgatgtacttcacgacatcgagtaccgtaagaagtgggattctaatgtcatcgaaaccttcgatatcgctagattgaccgtcaacgcagacgtagggtattacagttggaggtgcccaaaacccttgaagaaccgggatgtgataactcttaggtcgtggctgccttag

SEQ ID NO: 166794 - DNA, 876 bp, Artificial Sequence
  derived and/or modified sequence
atggagaagctggccgccagcacagagccccagggccccaggcctgtgctgggccgggagagcgtgcaggtgcctgatgaccaggacttccgctccttccgctcagaatgtgaggccgaggtgggctggaacctgacctacagccgggccggcgtgtctgtgtgggtgcaggccgtggagatggacaggaccctgcacaagatcaagtgcaggatggagtgctgtgatgtgcctgctgagaccctgtatgatgtgctgcatgacatcgagtacaggaagaagtgggacagcaatgtcatcgagacctttgatattgcccggctgactgtgaatgctgatgtgggctactacagctggcgctgccccaagcccctgaagaacagagatgtgatcaccctgcgctcctggctgcccatgggcgctgactacatcatcatgaactacagcgtgaagcaccccaagtacccacccaggaaggacctggtgcgggctgtgtccatccagacaggctacctgatccagagcacaggccccaagagctgtgtgatcacctacctggcccaggtggaccccaagggcagcctgcccaagtgggtggtgaacaagagcagccagttcctggcccccaaggccatgaagaagatgtacaaggcctgcctgaagtacccagagtggaagcagaagcacctgccccacttcaagccctggctgcaccctgagcagagccccctgcccagcctggccctgtctgagctgtctgtgcagcacgccgacagcctggagaacattgatgagagcgctgtggccgagagccgggaggagaggatgggcggggccggcggggagggcagtgatgatgacaccagcctgacctag

SEQ ID NO: 166795 - DNA, 270 bp, Artificial Sequence
  derived and/or modified sequence
atggagaagctggccgccagcacagagccccagggccccaggcctgtgctgggccgggagagcgtgcaggtgcctgatgaccaggacttccgctccttccgctcagaatgtgaggccgaggtgggctggaacctgacctacagccgggccggcgtgtctgtgtgggtgcaggccgtggagatggacaggaccctgcacaagatcaagtgcaggatggagtgctgtgatgtgcctgctgagaccctgtatgatgtgctgcatgacatctag

SEQ ID NO: 166796 - DNA, 759 bp, Artificial Sequence
  derived and/or modified sequence
atggagaagctggccgccagcacagagccccagggccccaggcctgtgctgggccgggagagcgtgcaggtgcctgatgaccaggacttccgctccttccgctcagaatgtgaggccgaggtgggctggaacctgacctacagccgggccggcgtgtctgtgtgggtgcaggccgtggagatggacaggaccctgcacaagatcaagtgcaggatggagtgctgtgatgtgcctgctgagaccctgtatgatgtgctgcatgacatcgagtacaggaagaagtgggacagcaatgtcatcgagacctttgatattgcccggctgactgtgaatgctgatgtgggctactacagctggcgctgccccaagcccctgaagaacagagatgtgatcaccctgcgctcctggctgcccatgggcgctgactacatcatcatgaactacagcgtgaagcaccccaagtacccacccaggaaggacctggtgcgggctgtgtccatccagacaggctacctgatccagagcacaggccccaagagctgtgtgatcacctacctggcccaggtggaccccaagggcagcctgcccaagtgggtggtgaacaagagcagccagttcctggcccccaaggccatgaagaagatgtacaaggcctgcctgaagtacccagagtggaagcagaagcacctgccccacttcaagccctggctgcaccctgagcagagccccctgcccagcctggccctgtctgagctgtag

SEQ ID NO: 166797 - DNA, 39 bp, Artificial Sequence
  derived and/or modified sequence
atggagaagctggccgccagcacagagccccagggctag

SEQ ID NO: 166798 - DNA, 576 bp, Artificial Sequence
  derived and/or modified sequence
atggagaagctggccgccagcacagagccccagggccccaggcctgtgctgggccgggagagcgtgcaggtgcctgatgaccaggacttccgctccttccgctcagaatgtgaggccgaggtgggctggaacctgacctacagccgggccggcgtgtctgtgtgggtgcaggccgtggagatggacaggaccctgcacaagatcaagtgcaggatggagtgctgtgatgtgcctgctgagaccctgtatgatgtgctgcatgacatcgagtacaggaagaagtgggacagcaatgtcatcgagacctttgatattgcccggctgactgtgaatgctgatgtgggctactacagctggcgctgccccaagcccctgaagaacagagatgtgatcaccctgcgctcctggctgcccatgggcgctgactacatcatcatgaactacagcgtgaagcaccccaagtacccacccaggaaggacctggtgcgggctgtgtccatccagacaggctacctgatccagagcacaggccccaagagctgtgtgatcacctacctggcccaggtggacccctag

SEQ ID NO: 166799 - DNA, 417 bp, Artificial Sequence
  derived and/or modified sequence
atggagaagctggccgccagcacagagccccagggccccaggcctgtgctgggccgggagagcgtgcaggtgcctgatgaccaggacttccgctccttccgctcagaatgtgaggccgaggtgggctggaacctgacctacagccgggccggcgtgtctgtgtgggtgcaggccgtggagatggacaggaccctgcacaagatcaagtgcaggatggagtgctgtgatgtgcctgctgagaccctgtatgatgtgctgcatgacatcgagtacaggaagaagtgggacagcaatgtcatcgagacctttgatattgcccggctgactgtgaatgctgatgtgggctactacagctggcgctgccccaagcccctgaagaacagagatgtgatcaccctgcgctcctggctgccctag

SEQ ID NO: 166800 - DNA, 876 bp, Artificial Sequence
  derived and/or modified sequence
atggagaagctggccgccagcaccgagccccagggcccccggcccgtgctgggccgtgaatctgtccaggtaccggacgatcaggactttcgctccttccgttcggagtgcgaagcggaagttgggtggaacttgacctattcacgcgcaggtgtttcagtttgggtgcaggctgtcgagatggacagaacactgcacaaaattaagtgcagaatggaatgttgtgatgtgcccgcggaaactctgtacgatgtgctccacgatatcgagtacaggaaaaaatgggactccaacgtaatcgagacctttgacatcgccagattgacggttaatgctgacgtaggctattacagctggagatgtcccaagcctctgaaaaatagggatgtcatcactctgcgctcctggcttccaatgggagctgattatatcatcatgaattattctgtcaagcatcctaagtacccgcctcggaaggatttggtaagggccgtgtcaatccagaccggttacctcattcagagcaccggaccaaagtcatgcgtcattacctatctggcacaggtggatcctaaaggctcgctgcccaaatgggtggtcaataaaagttcccagtttttggcccccaaggcaatgaagaagatgtataaagcctgccttaagtatccagaatggaagcagaagcacctcccacatttcaagccttggttgcacccagaacaatcccctctgcctagtctcgccctgtctgagcttagcgtgcagcacgcagactcgttagaaaatattgacgagtcagcggtcgcagagagtcgggaggaaaggatgggtggggctggcggtgaaggaagcgacgacgacacatctctgacctag

SEQ ID NO: 166801 - DNA, 270 bp, Artificial Sequence
  derived and/or modified sequence
atggagaagctggccgccagcaccgagccccagggcccccggcccgtgctgggcagagaaagtgttcaggtcccagacgaccaggacttcaggtcttttaggagcgagtgtgaggcagaggttgggtggaacctgacctatagcagagctggcgtttccgtgtgggtccaggctgtggagatggaccgcaccctgcacaaaatcaagtgcagaatggagtgttgcgacgtgccagctgaaacactttacgatgtcctgcacgatatttag

SEQ ID NO: 166802 - DNA, 759 bp, Artificial Sequence
  derived and/or modified sequence
atggagaagctggccgccagcaccgagccccagggcccccggcccgtgctggggagggaatcagtgcaggtgcccgatgatcaggacttcaggtcatttaggagcgaatgcgaggcagaagtcgggtggaacctcacatatagcagggcgggtgtctctgtttgggtccaggcagtggagatggatcggacactgcataagattaagtgccgcatggaatgttgcgacgtcccagccgagaccctttacgatgtcctgcacgacattgaataccgaaagaagtgggattcgaacgttatcgagacctttgacatcgctcggctgactgtgaacgccgacgttggttactactcttggagatgtcctaagcctttgaagaatcgggatgtgatcaccctgcgtagttggcttccgatgggtgcagactacataatcatgaattattccgtgaagcacccaaaataccctccaaggaaggacctggtgcgggcagtctccatacaaacagggtatctaatccagtcaactgggcctaagtcctgcgtgatcacttacctggcccaggtggacccaaaagggagcctaccaaagtgggtggttaataagtctagccagttcttggcaccgaaagcaatgaaaaagatgtataaggcctgcttgaaatatcccgagtggaaacagaaacatctgccacacttcaagccttggcttcacccagagcagtctccacttccttcccttgcactgtcagagctctag

SEQ ID NO: 166803 - DNA, 576 bp, Artificial Sequence
  derived and/or modified sequence
atggagaagctggccgccagcaccgagccccagggcccccggcccgtgctgggcagggagagcgtccaagtcccggatgatcaggattttcgatctttcaggagtgagtgcgaagcggaggtgggctggaatttgacctattcccgcgccggcgtttccgtatgggttcaggcggtggagatggatagaacactccataaaattaaatgtcgcatggagtgttgtgacgtgcccgccgagaccctctacgatgtgctgcacgatatagagtaccgtaagaaatgggactcaaacgtcattgagacctttgacatcgcccgcctaacagtgaatgccgacgtcggatactacagctggcgctgtcctaagcccctgaagaacagggatgtgatcactctcaggagctggttacccatgggcgccgactatataatcatgaactacagcgtgaaacatcctaaatatcccccgcggaaggacctggttcgcgctgtgtcaattcagaccggttatctgatacaatccaccggaccaaaatcatgcgttataacctacctcgcgcaggtagacccatag

SEQ ID NO: 166804 - DNA, 876 bp, Artificial Sequence
  derived and/or modified sequence
atggagaagctggccgccagcaccgagccccagggcccccggcccgtacttgggcgggaatccgtccaggtgcccgacgaccaggactttcggagcttccggagcgagtgcgaggcagaggtgggatggaatttgacttatagcagagccggagtgtctgtttgggtgcaggccgtcgagatggacagaacactgcacaaaatcaaatgtagaatggaatgttgtgacgtgccagccgagactctttatgacgtgctgcacgacattgaatatcggaagaaatgggactccaacgtgatcgaaacgttcgacattgcaaggttaactgtcaacgcagacgtgggttattacagctggagatgccccaagccccttaaaaatcgcgatgtgatcacgctacggagctggttaccgatgggggccgattacatcattatgaactatagcgtgaagcaccctaagtacccccccagaaaggacctcgtgcgggccgtgagcatacagaccgggtatctgatacagtccacgggaccaaagagctgtgtgattacctacctggcccaagttgatcccaaggggagtctcccaaagtgggtcgtaaataagtcctcccagttccttgctccgaaggcgatgaagaaaatgtacaaggcatgcttaaaatacccagaatggaagcaaaagcatctgccccatttcaaaccctggttgcatccagagcagtcccctctgccaagtctggcactctccgagctctctgtgcagcatgcagacagtctggagaatatcgatgagtccgcagtggccgagagcagagaggaacgaatggggggcgcaggtggagaagggagcgacgatgacacaagtttaacatag

SEQ ID NO: 166805 - DNA, 417 bp, Artificial Sequence
  derived and/or modified sequence
atggagaagctggccgccagcaccgagccccagggcccccggcccgtccttggacgcgaatccgtgcaggttcctgatgaccaggactttcgaagctttcggtcagaatgcgaggctgaggttggctggaatctaacatactcccgagctggagtaagcgtttgggttcaggctgtggaaatggaccggaccttacataaaataaaatgtagaatggagtgctgtgacgtccccgcagagactctgtacgatgtgttgcacgatatagagtaccgcaagaaatgggattctaacgttatcgaaacattcgacatcgcacgacttaccgtgaatgctgacgtgggctactacagttggagatgtcccaagcccctgaagaaccgggatgtaatcactctccggtcctggctgccttag

SEQ ID NO: 166806 - DNA, 876 bp, Artificial Sequence
  derived and/or modified sequence
atggagaaacttgctgcctccacagagcctcaggggccaaggccagtccttgggagggagtcggttcaagtcccggatgatcaggattttaggagtttccggtccgagtgcgaagcagaagtcggttggaacctgacatacagccgcgctggcgtttccgtttgggtgcaggccgtcgaaatggatcggactctccacaaaattaaatgtaggatggagtgttgcgatgtgccggctgaaacactttacgatgttctgcacgacattgaataccggaagaagtgggatagcaacgtgattgagacatttgatatcgcaagattgaccgtcaacgcagacgtgggatattattcatggagatgtcccaagccactgaaaaacagggatgtcataactctccgctcatggctgccgatgggtgccgactatatcataatgaattacagcgttaagcatcctaaataccctccccgaaaggaccttgttcgcgctgttagtattcagactggatacctgatccaatccacagggccaaaatcctgcgtaatcacatatctcgcccaggttgacccaaaggggtcccttcccaaatgggttgttaataagtcgtcccagttcttggccccaaaagcaatgaagaagatgtacaaagcatgtctgaagtatcctgaatggaagcaaaaacatctcccacactttaagccatggcttcacccagagcagagccccttgccttccctggctcttagtgagttgagtgtacagcacgctgactcactggaaaacatcgacgagagcgccgtcgcagaatcccgggaggagaggatgggaggcgctggcggagagggtagcgacgacgacaccagcctcacctag

SEQ ID NO: 166807 - DNA, 270 bp, Artificial Sequence
  derived and/or modified sequence
atggaaaagctagccgcatccaccgagcctcagggacccaggcctgtcctagggagggagtccgtccaagttcccgatgatcaagactttcgttcatttcggtctgaatgtgaggcggaggtgggctggaatctcacatattccagagcaggcgtcagtgtgtgggtgcaggccgttgagatggatcgaaccctgcataagattaagtgtcggatggagtgctgcgatgtcccggctgagaccctgtacgacgtactccatgatatttag

SEQ ID NO: 166808 - DNA, 759 bp, Artificial Sequence
  derived and/or modified sequence
atggagaaactggcggctagcacagagccgcaaggtcctaggcccgtgctgggcagagagagcgtgcaggtgcctgacgatcaggacttcagatctttccgcagtgaatgcgaggccgaggtgggttggaacttgacttattcccgcgcaggcgtgtctgtctgggtacaggcagtggagatggaccggactctgcataagatcaaatgtaggatggagtgctgcgacgtgcccgctgagaccctgtatgatgtgttgcacgatatcgaatatcgcaagaagtgggattccaacgttattgagacctttgatatcgccagactgactgtgaatgccgatgtggggtattactcctggcggtgcccaaaacctttgaagaatcgagacgtgataacacttagatcatggctgcctatgggcgcagattacattataatgaactacagcgtgaagcatccgaagtacccaccacgcaaagatctcgttcgcgcagtcagcatccaaacaggctatcttatccaaagcaccgggcctaagagctgcgtcattacttacctggcccaagtcgaccctaaaggctctctaccaaaatgggtcgtcaacaagtccagccagttcctggccccaaaggcaatgaaaaaaatgtataaagcctgcttaaagtaccccgagtggaaacaaaagcatctccctcacttcaagccctggttgcaccccgagcagagccctcttccatcacttgccctaagtgagctctag

SEQ ID NO: 166809 - DNA, 39 bp, Artificial Sequence
  derived and/or modified sequence
atggagaagctggcggcaagtaccgaaccccagggctag

SEQ ID NO: 166810 - DNA, 576 bp, Artificial Sequence
  derived and/or modified sequence
atggagaagctggcagcctccacagagccccagggacccaggcctgtgctgggaagggaatctgtacaggtgcctgacgaccaggattttcgctcgtttcgctctgaatgtgaggcagaggtcgggtggaatcttacgtactccagagcaggcgtgagcgtctgggtccaggcagttgagatggatagaacgttgcataagatcaagtgtaggatggaatgttgtgatgtgccggcagaaacgctctatgacgtgctgcacgatatcgagtataggaagaagtgggactctaacgtgattgaaacattcgatattgcccgactgactgttaacgctgatgtgggttactatagctggcgatgccccaagcccctgaaaaaccgcgacgtcatcacactgcgctcttggctccccatgggcgcagactatatcatcatgaattatagtgtgaaacacccaaaataccctcctaggaaggacttggtgagagctgtctctatacagacagggtatttgattcagagcaccggacctaagtcatgcgtgatcacatatcttgctcaggtggatccatag

SEQ ID NO: 166811 - DNA, 876 bp, Artificial Sequence
  derived and/or modified sequence
atggagaagctggccgcttctacggagccccaaggtccccgaccagtgcttggtcgggagtcagtacaggtccccgacgaccaggatttcaggtccttccgatccgagtgtgaggctgaagtaggctggaacttgacctattcccgagccggagtaagcgtctgggttcaggctgtcgaaatggaccggactctacacaagattaagtgccgcatggaatgctgcgatgttcctgccgagacgttatatgacgtgctgcacgatatcgaataccgaaaaaaatgggatagtaacgttatagagaccttcgacatcgcaagactgaccgtgaatgctgacgttggatactactcatggcgatgtcccaaacctcttaagaaccgcgatgttattaccctgcgaagctggcttccgatgggcgctgattacattattatgaactactcggtcaaacatccaaaatatcccccaagaaaggatctcgttcgcgcagtctctatccagaccgggtatctcattcagagcaccgggccaaagtcatgcgtgattacatatctggcgcaagttgatcccaagggcagtctgcccaagtgggtagttaacaagagttcacagtttctcgcgcctaaggctatgaagaaaatgtataaggcatgcctgaagtatccagaatggaagcaaaagcatcttccgcatttcaagccatggctccacccagaacagagtccacttccctcgctcgctctatccgaactgtccgtccagcatgcagatagcctcgagaacattgatgaatctgcagttgccgaaagcagggaggaacgtatgggcggagccggaggagaaggatccgacgatgacacgtccctgacttag

SEQ ID NO: 166812 - DNA, 417 bp, Artificial Sequence
  derived and/or modified sequence
atggaaaaactcgccgcaagcaccgagcctcaaggcccacgccctgtcctcggcagagaaagtgtgcaggtccccgatgaccaggactttcgctcatttaggagtgagtgtgaggcagaggtgggctggaatctgacgtattccagggcaggcgtgagcgtgtgggttcaggctgtggagatggaccggactctgcacaaaataaagtgccggatggaatgctgtgacgtccctgcggaaacattgtatgatgtgctccacgacatcgaataccggaagaaatgggactccaatgtaatcgaaacctttgatatagctcgtctgacagtgaatgccgatgttggatattatagctggagatgtcctaaacctctgaagaacagagacgttataacgcttaggtcgtggctcccctag

SEQ ID NO: 166813 - DNA, 1963 bp, Artificial Sequence
  derived and/or modified sequence
acgtgggggcgcctgagcgaagataaccgtaataaatagtaacctaacggtccagtcatcgttctgtggtcctttcttttatgattcacaaggaatgaccctcttcatcgcctctcctaattcagtcctcacaacagtccttttacaaatgggacaacaggttagaggaagtcaggcagatttccagcatcatagagagtaaaggaccagggaaggatcaggattcaaggactgcacccaggctctgcttccagcttgctgtgtgactttgggtaattttgttcccttagggaactgagctttctcatttgtaaatgcaaacaggctgttgggaggatcaaatgagatccaggggtgaaaacagcttagtttactttcaggaatttacccacgcggtatataaaggcaaaatattattatagtcaggtgattgtagattgaggaacccatttcctcattctgcaaattgcaaacctgagggcccaaagagggacaggggcttgccccaggtctcagcaggctgtgagcaagagctaaagcctaatcctcctgcctttgggcctggagcccttccttgtaccccaggggtcagtgtctttgttggatacaggcttagattgactgactgtaccctgagaacctaggggagtccctgttcccaattcttctcctacccccaccttggcctgatggaggaagaccctgctgtgttgagatgagcaccagagccaagaagctgaggaggatctggagaattctggaggaagaggagagtgttgctggagctgtacagaccctgcttctcaggtcccaggaaggtggcgtcagcatctgcagccgcgtcgacgttgtcggagcctccgcggaggacccaggagagccggactaggaccagggccctgggcctccccacactccccatggagaagctggcggcctctacagagccccaagggcctcggccggtcctgggccgtgagagtgtccaggtgcccgatgaccaagactttcgcagcttccggtcagagtgtgaggctgaggtgggctggaacctgacctatagcagggctggggtgtctgtctgggtgcaggctgtggagatggatcggacgctgcacaagatcaagtgccggatggagtgctgtgatgtgccagccgagacactctacgacgtcctacacgacattgagtaccgcaagaaatgggacagcaacgtcattgagacttttgacatcgcccgcttgacagtcaacgctgacgtgggctattactcctggaggtgtcccaagcccctgaagaaccgtgatgtcatcaccctccgctcctggctccccatgggcgctgattacatcattatgaactactcagtcaaacatcccaaatacccacctcggaaagacttggtccgagctgtgtccatccagacgggctacctcatccagagcacagggcccaagagctgcgtcatcacctacctggcccaggtggaccccaaaggctccttacccaagtgggtggtgaataaatcttctcagttcctggctcccaaggccatgaagaagatgtacaaggcgtgcctcaagtaccccgagtggaaacagaagcacctgcctcacttcaagccgtggctgcacccggagcagagcccgttgccgagcctggcgctgtcggagctgtcggtgcagcatgcggactcactggagaacatcgacgagagcgcggtggccgagagcagagaggagcggatgggcggcgcgggcggcgagggcagcgacgacgacacctcgctcacctgagcgccgcaccgcttcagggacggagacaggaccgggcgagccctggggcggcggccgctcctgcactttctcccctcccccacccggcacctggtggcaccgggccaggcccaggcgggtgctgcagcctggctggacagagccccaataaacgatcccacagcctc

SEQ ID NO: 166814 - DNA, 438 bp, Artificial Sequence
  derived and/or modified sequence
tgctggtggacaagggccagagtgtggggctggagggagtcccggttcaagctcccaggtcccaggaaggtggcgtcagcatctgcagccgcgtcgacgttgtcggagcctccgcggaggacccaggagagccggactaggaccagggccctgggcctccccacactccccatggagaagctggcggcctctacagagccccaagggcctcggccggtcctgggccgtgagagtgtccaggtgcccgatgaccaagactttcgcagcttccggtcagagtgtgaggctgaggtgggctggaacctgacctatagcagggctggggtgtctgtctgggtgcaggctgtggagatggatcggacgctgcacaagatcaagtgccggatggagtgctgtgatgtgccagccgagacactctacgacgtcctacacgacatt

SEQ ID NO: 166815 - DNA, 1100 bp, Artificial Sequence
  derived and/or modified sequence
cacctccgcagcctggaaaatcccgagccgcggccgccgagcccccgagcccccgagcccccagcctagccgggaggggcgcgcggggctggggcccggggcggggccgggcggcgggacccactgctcctcccaccagagcccccgcgcggccccgggtctcccgggcagctgcggcggcggcgctggcaccccggccccggcgggccccggcggagcggcgggcaaaggtcccaggaaggtggcgtcagcatctgcagccgcgtcgacgttgtcggagcctccgcggaggacccaggagagccggactaggaccagggccctgggcctccccacactccccatggagaagctggcggcctctacagagccccaagggcctcggccggtcctgggccgtgagagtgtccaggtgcccgatgaccaagactttcgcagcttccggtcagagtgtgaggctgaggtgggctggaacctgacctatagcagggctggggtgtctgtctgggtgcaggctgtggagatggatcggacgctgcacaagatcaagtgccggatggagtgctgtgatgtgccagccgagacactctacgacgtcctacacgacattgagtaccgcaagaaatgggacagcaacgtcattgagacttttgacatcgcccgcttgacagtcaacgctgacgtgggctattactcctggaggtgtcccaagcccctgaagaaccgtgatgtcatcaccctccgctcctggctccccatgggcgctgattacatcattatgaactactcagtcaaacatcccaaatacccacctcggaaagacttggtccgagctgtgtccatccagacgggctacctcatccagagcacagggcccaagagctgcgtcatcacctacctggcccaggtggaccccaaaggctccttacccaagtgggtggtgaataaatcttctcagttcctggctcccaaggccatgaagaagatgtacaaggcgtgcctcaagtaccccgagtggaaacagaagcacctgcctcacttcaagccgtggctgcacccggagcagagcccgttgccgagcctggcgctgtcggagctgt

SEQ ID NO: 166816 - DNA, 839 bp, Artificial Sequence
  derived and/or modified sequence
gccttgttgccctgcacaacctgtgaatttgctccatcaaaactggcaggcagggttacccctgaggagggggtgggggagaaggggtaggggtgggaccctatcatctcccagaggggagatcaaggcagccatcatctgtcgaactagatggtcccaggaaggtggcgtcagcatctgcagccgcgtcgacgttgtcggagcctccgcggaggacccaggagagccggactaggaccagggccctgggcctccccacactccccatggagaagctggcggcctctacagagccccaagggcctcggccggtcctgggccgtgagagtgtccaggtgcccgatgaccaagactttcgcagcttccggtcagagtgtgaggctgaggtgggctggaacctgacctatagcagggctggggtgtctgtctgggtgcaggctgtggagatggatcggacgctgcacaagatcaagtgccggatggagtgctgtgatgtgccagccgagacactctacgacgtcctacacgacattgagtaccgcaagaaatgggacagcaacgtcattgagacttttgacatcgcccgcttgacagtcaacgctgacgtgggctattactcctggaggtgtcccaagcccctgaagaaccgtgatgtcatcaccctccgctcctggctccccatgggcgctgattacatcattatgaactactcagtcaaacatcccaaatacccacctcggaaagacttggtccgagctgtgtccatccagacgggctacctcatccagagcacagggcccaagagctgcgtcatcacctacctggcccaggtggacccc

SEQ ID NO: 166817 - DNA, 1513 bp, Artificial Sequence
  derived and/or modified sequence
aaccgtaataaatagtaacctaacggtccagtcatcgttctgtggtcctttcttttatgattcacaaggaatgaccctcttcatcgcctctcctaattcagtcctcacaacagtccttttacaaatgggacaacaggttagaggaagtcaggcagatttccagcatcatagagagtaaaggaccagggaaggatcaggattcaaggactgcacccaggctctgcttccagcttgctgtgtgactttggaccctgctgtgttgagatgagcaccagagccaagaagctgaggaggatctggagaattctggaggaagaggagagtgttgctggagctgtacagaccctgcttctcaggtcccaggaaggtggcgtcagcatctgcagccgcgtcgacgttgtcggagcctccgcggaggacccaggagagccggactaggaccagggccctgggcctccccacactccccatggagaagctggcggcctctacagagccccaagggcctcggccggtcctgggccgtgagagtgtccaggtgcccgatgaccaagactttcgcagcttccggtcagagtgtgaggctgaggtgggctggaacctgacctatagcagggctggggtgtctgtctgggtgcaggctgtggagatggatcggacgctgcacaagatcaagtgccggatggagtgctgtgatgtgccagccgagacactctacgacgtcctacacgacattgagtaccgcaagaaatgggacagcaacgtcattgagacttttgacatcgcccgcttgacagtcaacgctgacgtgggctattactcctggaggtgtcccaagcccctgaagaaccgtgatgtcatcaccctccgctcctggctccccatgggcgctgattacatcattatgaactactcagtcaaacatcccaaatacccacctcggaaagacttggtccgagctgtgtccatccagacgggctacctcatccagagcacagggcccaagagctgcgtcatcacctacctggcccaggtggaccccaaaggctccttacccaagtgggtggtgaataaatcttctcagttcctggctcccaaggccatgaagaagatgtacaaggcgtgcctcaagtaccccgagtggaaacagaagcacctgcctcacttcaagccgtggctgcacccggagcagagcccgttgccgagcctggcgctgtcggagctgtcggtgcagcatgcggactcactggagaacatcgacgagagcgcggtggccgagagcagagaggagcggatgggcggcgcgggcggcgagggcagcgacgacgacacctcgctcacctgagcgccgcaccgcttcagggacggagacaggaccgggcgagccctggggcggcggccgctcctgcactttctcccctcccccacccggcacctggtggcaccgggccaggcccaggcgggtgctgcagcctggctggacagagccccaataaacgatcccacagcctca

SEQ ID NO: 166818 - DNA, 620 bp, Artificial Sequence
  derived and/or modified sequence
ggttgggtgtgtgtaggcttggtgtgcctctagcttggtgggggatgcaagctgtgggcatctctgagctgctgtggggctgtcatccctgcgagtcccaggaaggtggcgtcagcatctgcagccgcgtcgacgttgtcggagcctccgcggaggacccaggagagccggactaggaccagggccctgggcctccccacactccccatggagaagctggcggcctctacagagccccaagggcctcggccggtcctgggccgtgagagtgtccaggtgcccgatgaccaagactttcgcagcttccggtcagagtgtgaggctgaggtgggctggaacctgacctatagcagggctggggtgtctgtctgggtgcaggctgtggagatggatcggacgctgcacaagatcaagtgccggatggagtgctgtgatgtgccagccgagacactctacgacgtcctacacgacattgagtaccgcaagaaatgggacagcaacgtcattgagacttttgacatcgcccgcttgacagtcaacgctgacgtgggctattactcctggaggtgtcccaagcccctgaagaaccgtgatgtcatcaccctccgctcctggctccc

SEQ ID NO: 166819 - protein, 502 aa, Artificial Sequence
  derived and/or modified sequence
MPLVKRNIEPRHLCRGALPEGITSELECVTNSTLAAIIRQLSSLSKHAEDIFGELFNEANNFYIRANSLQDRIDRLAVKVTQLDSTVEEVSLQDINMKKAFKSSTVQDQQVVSKNSIPNPVADIYNQSDKPPPLNILTPYRDDKKDGLKFYTDPSYFFDLWKEKMLQDTEDKRKEKRRQKEQKRIDGTTREVKKVRKARNRRQEWNMMAYDKELRPDNRLSQSVYHGASSEGSLSPDTRSHASDVTDYSYPATPNHSLHPQPVTPSYAAGDVPPHGPASQAAEHEYRPPSASARHMALNRPQQPPPPPPPQAPEGSQASAPMAPADYGMLPAQIIEYYNPSGPPPPPPPPVIPSAQTAFVSPLQMPMQPPFPASASSTHAAPPHPPSTGLLVTAPPPPGPPPPPPGPPGPGSSLSSSPMHGPPVAEAKRQEPAQPPISDARSDLLAAIRMGIQLKKVQEQREQEAKREPVGNDVATILSRRIAVEYSDSDDDSEFDENDWSD

SEQ ID NO: 166820 - DNA, 92 bp, Artificial Sequence
  derived and/or modified sequence
ggttcaacttacaatattttgacttgacaacagtgcaaaagcaatacacgattagtagaaacacacttccaatgcccataggaccattctgc

SEQ ID NO: 166821 - DNA, 1509 bp, Artificial Sequence
  derived and/or modified sequence
atgcccctggtgaagagaaacatcgagcccagacacctgtgcagaggcgccctgcccgagggcatcaccagcgagctggagtgcgtgaccaacagcaccctggccgccatcatcagacagctgagcagcctgagcaagcacgccgaggacatcttcggcgagctgttcaacgaggccaacaacttctacatcagagccaacagcctgcaggacagaatcgacagactggccgtgaaggtgacccagctggacagcaccgtggaggaggtgagcctgcaggacatcaacatgaagaaggccttcaagagcagcaccgtgcaggaccagcaggtggtgagcaagaacagcatccccaaccccgtggccgacatctacaaccagagcgacaagcccccccccctgaacatcctgaccccctacagagacgacaagaaggacggcctgaagttctacaccgaccccagctacttcttcgacctgtggaaggagaagatgctgcaggacaccgaggacaagagaaaggagaagagaagacagaaggagcagaagagaatcgacggcaccaccagagaggtgaagaaggtgagaaaggccagaaacagaagacaggagtggaacatgatggcctacgacaaggagctgagacccgacaacagactgagccagagcgtgtaccacggcgccagcagcgagggcagcctgagccccgacaccagaagccacgccagcgacgtgaccgactacagctaccccgccacccccaaccacagcctgcacccccagcccgtgacccccagctacgccgccggcgacgtgcccccccacggccccgccagccaggccgccgagcacgagtacagaccccccagcgccagcgccagacacatggccctgaacagaccccagcagccccccccccccccccccccccaggcccccgagggcagccaggccagcgcccccatggcccccgccgactacggcatgctgcccgcccagatcatcgagtactacaaccccagcggcccccccccccccccccccccccccgtgatccccagcgcccagaccgccttcgtgagccccctgcagatgcccatgcagccccccttccccgccagcgccagcagcacccacgccgcccccccccacccccccagcaccggcctgctggtgaccgccccccccccccccggcccccccccccccccccccggcccccccggccccggcagcagcctgagcagcagccccatgcacggcccccccgtggccgaggccaagagacaggagcccgcccagccccccatcagcgacgccagaagcgacctgctggccgccatcagaatgggcatccagctgaagaaggtgcaggagcagagagagcaggaggccaagagagagcccgtgggcaacgacgtggccaccatcctgagcagaagaatcgccgtggagtacagcgacagcgacgacgacagcgagttcgacgagaacgactggagcgactag

SEQ ID NO: 166822 - DNA, 1509 bp, Artificial Sequence
  derived and/or modified sequence
atgccacttgttaagcgtaatattgagccccgccatctctgtagaggcgccttgcctgaaggaatcacatccgagctggagtgcgttaccaactctacattagcagcaataatacggcagctgtcttcactgtcaaaacatgccgaagatattttcggagagctctttaatgaagcaaataatttttatatccgggcgaatagcctccaggatagaatcgatagactggctgtgaaggtgacacagctcgatagcaccgtggaggaggtgagtcttcaggacatcaacatgaagaaggcctttaaaagcagcacagtacaagaccaacaggtggttagcaagaatagtatccctaacccagtcgccgacatttataatcagagcgataaacccccaccgcttaacatactaactccttaccgggacgacaagaaggatggtctgaaattttacactgacccaagctacttctttgacctttggaaggaaaagatgctgcaggatactgaggacaagcggaaggaaaaacggcgccaaaaggagcaaaagaggattgacggcacaacacgggaggtcaaaaaagtgaggaaggctcggaacaggcggcaagagtggaatatgatggcctatgataaagagcttcggcccgataatcgcctttcgcagtctgtttaccacggtgccagcagtgaggggagcctctctccagataccaggagtcacgcgtccgatgtgaccgattactcataccctgcaacgccaaatcacagcctgcacccgcaaccggtcacaccatcatacgccgcaggagacgtaccccctcacgggcccgcttctcaggcagccgagcacgagtatagaccccccagtgcaagcgctagacacatggcccttaatagaccacagcaacccccaccccccccgcctccgcaggcacctgaaggttctcaggcatcagccccaatggcaccagcagattatggaatgctgcctgctcagattatcgagtactacaaccccagcggtcctccaccccctcccccgcctccggtaatcccaagcgcgcagaccgcatttgtgtctcccttacagatgccaatgcagcctcccttcccagccagcgcctcctcaactcatgctgcccccccccatccgccaagcaccgggctgctagtaaccgctccgcctccgcccggccccccgcctccccctcccggcccccctggcccagggagttctctgagtagttcacccatgcatggcccaccggtagctgaggctaagaggcaagagcccgcacagcctcccattagcgatgctagaagtgatctactggcggccatcaggatggggatccagctgaagaaagtgcaggagcagcgcgagcaggaggctaaacgcgaacccgtgggcaatgacgtggcaacgatcctgtctaggagaatcgcagtggagtacagtgattcggacgacgacagcgagttcgacgagaatgattggagcgactag

SEQ ID NO: 166823 - DNA, 1509 bp, Artificial Sequence
  derived and/or modified sequence
atgcccctggtgaagaggaacatcgagcccaggcacctgtgccgcggggccctgcctgagggcatcaccagcgagctggagtgtgtgaccaacagcaccctggccgccatcatccggcagctgagcagcctgagcaagcatgctgaggacatctttggagagctgttcaatgaggccaacaacttctacatccgggccaacagcctgcaggacagaattgaccggctggccgtgaaggtgacccagctggacagcacagtggaggaggtgtccctgcaggacatcaacatgaagaaggccttcaagagcagcacagtgcaggaccagcaggtggtgtccaagaacagcatccccaaccctgtggccgacatctacaaccagagcgacaagcccccacccctgaacatcctgaccccctacagagatgacaagaaggatggcctgaagttctacacagaccccagctacttctttgacctgtggaaggagaagatgctgcaggacacagaggacaagaggaaggagaagaggcggcagaaggagcagaagagaattgatggcaccacccgggaggtgaagaaggtgaggaaggccaggaacagacggcaggagtggaacatgatggcctatgacaaggagctgcggccagacaaccggctgagccagagcgtgtaccacggggccagcagcgagggcagcctgagcccagacaccaggagccacgccagtgatgtgacagactacagctacccagccacccccaaccacagcctgcacccccagcctgtgacccccagctatgctgctggagatgtgccccctcatggccctgccagccaggccgctgagcacgagtaccggccccccagcgccagcgcccggcacatggccctgaaccggccccagcagcccccacctcctcctccaccccaggcccctgagggcagccaggccagcgcccccatggccccagctgactatggcatgctgcctgcccagatcatcgagtactacaaccccagcggccccccacctcctcctcctcctcctgtgatccccagcgcccagacagcctttgtgagccccctgcagatgcccatgcagccccccttccctgccagcgccagcagcacccacgccgccccaccccacccccccagcacaggcctgctggtgacagcccctcctcctcctggccccccacctcctcctcctggccccccaggccctggcagcagcctgagcagcagccccatgcacggcccccctgtggccgaggccaagaggcaggagcccgcccagccccccatcagtgatgcccggagtgacctgctggccgccatccgcatgggcatccagctgaagaaggtgcaggagcagcgggagcaggaggccaagcgggagcctgtgggcaatgatgtggccaccatcctgagcagaagaattgctgtggagtacagcgacagtgatgatgattctgaatttgatgaaaatgactggagcgactag

SEQ ID NO: 166824 - DNA, 1509 bp, Artificial Sequence
  derived and/or modified sequence
atgcccctggtgaagcggaacatcgagccccggcacctgtgccggggggccctccctgaaggtattactagcgagctagaatgtgtcactaactcaacccttgcagccattattcgccagctgagcagcctttcaaaacacgcagaagacatctttggcgagttatttaatgaagccaacaacttttatatcagggcaaactcactccaagaccgtatcgatagactcgccgtcaaagttacgcagctggactcaaccgtggaagaggtttctctacaagatatcaatatgaaaaaggcatttaaaagttcaaccgttcaggatcagcaagtggtcagcaaaaactccattccaaatcctgtggcagatatctataatcagtctgataagcccccaccattaaacattcttaccccctatcgtgacgacaagaaggacggactgaagttttacacggaccccagttattttttcgatctgtggaaagaaaagatgctccaggacaccgaggacaaacgaaaggagaagcgcaggcaaaaggagcagaaaagaattgacggcaccaccagagaggtcaaaaaggtgaggaaagcgagaaaccgaagacaagaatggaatatgatggcatacgacaaagagctccgacccgacaatcgtcttagtcagtcggtctaccacggggccagctccgagggatctctgagtcccgatactcggagtcacgctagtgacgttactgattactcgtaccctgcgacgccaaaccactcgttacacccccagccagtcaccccttcctacgccgccggggatgtgcccccacatggacctgcttcacaagctgctgagcacgagtaccgtcccccttctgccagcgccaggcacatggctctcaatagaccacagcagccaccaccacctccccctccccaggccccagagggaagccaggcatccgccccaatggctccagcagattatggtatgttacctgcacagatcatcgaatactacaatccatcgggacctccgccgcccccacctccccccgtgatccccagcgcccaaactgcatttgtaagtcccctccagatgccgatgcagcctccattccctgcctcagcctcatccacacacgccgctcctccccacccacccagtacagggctgttagtcactgcacctccccctcctggaccacctccacctccccccgggccccccgggcctggctcgagcttgagtagctcgcctatgcatggcccgccagtggctgaggctaagagacaggagcccgctcagccccctatatctgatgcaagaagcgatctgctggccgccattcgcatggggattcagctgaagaaggtgcaagaacagcgcgagcaggaggccaagagggagcctgttggcaacgacgttgccactattctgagtcggagaatcgcagtcgagtattccgacagcgatgacgattcagagttcgatgagaatgactggagtgactag

SEQ ID NO: 166825 - DNA, 1509 bp, Artificial Sequence
  derived and/or modified sequence
atgcctttggtgaagaggaatattgagccccgtcatctttgtaggggcgctctgcctgaaggtattacatctgaactggagtgtgtcactaattccacgctggccgctatcattcgtcagctgtccagcctgtctaaacacgccgaagacatttttggcgaactgtttaacgaagcaaacaatttctatataagagcaaactccttacaggaccggatcgacagattggccgtgaaagtgacgcaactcgactccactgtcgaggaggtctccctccaggatatcaacatgaagaaggcatttaaatcaagcaccgtgcaggaccaacaagttgtctccaagaactcaattcccaatcccgtcgcagacatttataaccagtccgacaagccaccacctctgaatatactgactccttatagagacgacaagaaagatggccttaagttctacaccgatcccagctactttttcgacctttggaaggaaaagatgttgcaggataccgaggataagcgcaaggagaaaaggaggcagaaggagcagaagcgcattgatggcactacccgggaagttaaaaaggtgaggaaggctaggaatcggaggcaggagtggaacatgatggcctacgataaggagctgaggccagacaatcgcctcagtcagtctgtctatcatggggctagcagtgaagggtccctgagcccagataccaggtctcatgcatcagacgttactgactattcttaccctgctacccctaaccactcgctccatcctcagccagttacacccagctacgctgctggggatgtgccccctcatgggccagcaagtcaggcggcagaacatgagtaccgccctccatctgccagtgctcggcacatggccttgaaccggccacaacagcctccaccccctccacctccacaggcccctgaaggaagtcaggcctccgcaccgatggccccagctgactacggtatgttgccagctcagattatcgagtattacaatcccagcggccctcccccacccccacccccaccagtgattcccagcgcccaaaccgccttcgtttccccactgcagatgcccatgcaaccaccttttccagcctctgcgtcgagtacccacgcagcaccgccacaccccccatctacgggcctgctagtgacagctcccccacctcccggacccccacccccaccacctggacctccaggaccgggtagctccctgtcatccagtcccatgcatgggcctcctgtcgctgaagcgaagcgtcaggagcccgctcagcccccaatttcagatgcccgttcggatcttctggcagcaatacggatgggcatccagttgaagaaggttcaggagcaacgagagcaagaggctaagcgagagcccgtgggtaacgacgtggcaacaattctgagccgtcgcatcgccgtggagtattccgatagtgatgacgacagtgagtttgatgagaacgactggagcgattag

SEQ ID NO: 166826 - DNA, 4790 bp, Artificial Sequence
  derived and/or modified sequence
gcggccgcggcgcggcgggaccatggagctcagagcgcagccccggcgccggcggcgggaccgcggaccgttttagttttgattgctgttaactactactgataactgagccaaagtggtgatgctacttgaggggaatttctgcaacccatagtcaacgattacatgattgtgaaccatgcctttagtgaagaggaacattgagccccggcacttgtgccggggagctctgcctgaagggattaccagcgaacttgaatgtgtaaccaatagtactcttgccgctatcatacgccagctgagcagtctgagcaaacatgctgaagacatatttggtgagttgtttaatgaggctaacaacttctacatcagagcaaattctcttcaagacagaattgatcgccttgctgtcaaagtcacccagctggattcaacagtggaagaggtctcactacaggatatcaacatgaaaaaagctttcaaaagttccacagtccaagaccagcaagtggtttcaaagaacagcattcctaatcctgttgctgatatttacaaccagagtgataagccaccgcctctgaacatcctgacaccatacagagatgacaagaaggatgggctgaagttctatactgatccttcctatttctttgacctctggaaagaaaaaatgctacaggacacagaagacaaaaggaaagagaaaaggcgtcaaaaggagcaaaagcgtatagatggcaccacccgtgaggtgaaaaaggttagaaaagccagaaacaggcgccaggagtggaatatgatggcatatgacaaagagcttagacccgacaacaggttgtctcagagtgtgtaccatggagcgtcttccgagggatccctgtccccagatactaggtcacatgcatcggacgttacggattactcttacccggctactcccaaccattctctgcacccccagcctgtgaccccttcctatgcagctggtgacgtgccaccacacgggcctgcaagccaggctgcggagcatgagtaccggcccccatctgcctcggcgaggcacatggccctcaacagacctcagcagccgccccccccgcctccccctcaggccccagaggggtcccaggcctctgcaccgatggctccagcagactacgggatgctcccagcgcagataattgagtattacaacccatccggaccacctcctccgccacctcctcctgtgattccctcagcacaaactgccttcgtcagccctctccagatgcccatgcagcccccgttccctgcatcagccagctccacgcacgcagctcctcctcacccaccctccaccgggctcctggtcacagccccgccacccccgggcccaccacctcccccgccaggccctcctggtcccgggtcttctctttcgtcctccccaatgcatggccccccagtagctgaggcgaagcggcaagagcctgcacagccaccaatcagtgatgctcgaagcgacctcctcgctgctattcgaatgggaattcaactgaaaaaggtgcaggagcagcgggagcaggaggccaagcgggagccagtggggaatgacgtggccacgatcctgtcccggcgcattgccgtggagtacagcgactctgacgacgactcagagttcgacgagaacgactggtccgactgagcaaaggccggcggagaggccgcgtgtgggagcgtgttgaagattttaagtggtctctacacccaaatagtggtattctaatcccgtagcatagcaccttttgtataaacaatgtgatattgcttctgcacatccaaaaattctgggtcttttcagtatttactgtgtaatacttaagtgccactaaacatagcaaattgtgctgcacatgaggaaataggctgtcactatcacattgtcctgaaaacagcatctgctttcctcttggccatgagagtatttagtgcagtttgggtttactcttactgatcaatataactctgcagacttgctgtgtgtttgtgaagctgcctggtgttaggtctctgcaagactaatgactatgtcagagtgatgtcttccaaccagtaagtgatattgtttcaccgctttggtttttccttttgtttttttaaaggatgtgtttctgaataagttggttttagagggaaaggttcaacaaacagggagaatccagtgtttctgctttcagtttcttggcttggtagcctctgagtgaatctgatgctctgctgaataatttcattacctctgcacatgcctgtcaaatatgaaattggaagggcccttttcaggctgggttccctgtgggcatttgcttagtaaatgcctgttgatggtttttgcaagagaattcagcagctcaacagtaatgaaagtgaagaacagagtccattttccttcctggggccattggggatgacactcaagatacttgccagtctctccagtgtgggcaccagccggccagaacagatgcgagcagtccatgactctgggagctacaccgctgagctgggcagagctgcggcacagggcctgggctgcaaaggagccctgctcctttagtttcctgacacctgtgtcctgagtgagccgcaggagttcttagctcctcagcgagcaacagagagcactttagatggcacctttcaccacttggtcagaattttaaaagcttaggtttaggtgaaagtagatattgacagctattcacctttcacggtgctggggccagattagggatcactcccgtgaggagggccttcaccctgttctagaagcacatggttgtcctcctgttgttggcacattaaatgataaaaagcacctcatgagattcccttgatcagccctgcagctgtagtacagtgctgtgccctcacctccacccttcctgttgttcccacgtgggcaataccagggacccatggggaaactcaagaatgacagcttctatattttgtaattctggatgaaagataactgtgttgaacaaacaggtgctccaggctttgattatagatacgacttcaaaaatatgctaagacgcttgacttattaaggactttaacctactcaacagtatttcatatccattgtggttagttactcagttatgttgagaagaatctggagctaaaagcagagatgtttgaggtgacggtaggaatgtgagcaggatggtgatgggggtttttgttaaaatgcatctgagcaagtcagccagccccgaagtcccctcagtgtgtgtgtctcgagtggctacctgttgggcttgtgggcagtgattgtacagagcctgtccattgggtgcagtcatgtagatctgaagccctgaaaagcctcatgtctgcatcccctttccaaggctgcttccctggtgtgtctgttctctcctctgtcccaggtgctgggagcgtcctcttcagcgtcttttcctagagctggtcaccactaggctgtcactataaattccttgaatataagtaacagttattaatgaacttctaaatttctaatttctctctctctctcttttttttttttttgttgttgttaaaaagggcctactacattggcgctattcttaggacttctgcaacttttaaagtcttacttgtctttcttgttgcttttgtattaggagttccccgtgtgggtctagaactcccctttggtaatgcttctttgtttttttatggcccttctgttctcaggatggagagaacacagaagctactatccatgtcaggatttattctatttatatcttattacaataaaattagtggcactttattcataaatattcatgagcctgttaattgttagttgtcttcctgtagctgaatcaacaagttattttcaactcaattttatgacttgcgaaaaagcttttgccctgttgtgtaccataacatttaaaagaatggaaaatgactgaaatccaatttagattatttttagagtatttttccagcaaattcaatttattctgaaatttaaatccagatcttttctaatatggtattacaatgaaaagaataaagagaagatttgaattttcagtttcattttcaaaaactatttaccaaaacaaatggagaagaaacatccaaaagcacatttcatttctccaaactttgtgttttaaattatagttataaattgtaaggtaattttaaattgtccctcgtattatttctccacgtctgttttagtttaatgtctcctaagcttttctctcatagcgtagacctagggaagggatgggaagattgcccagtccccgatggctgcgcacacaggaggcggcggagcacaaggcaagtgagtttgcactgtcagccccagaccgtaagcttggctacactgatgtttttctttactaaggatactattcaaaaattaacattttcatctcagtaagtttttagaacatcaaaatgttttctgagctccaagtggctaggttgtaaaagttttataataatttgcaattaaaatacatgatacatattaatccattaaagactagtgggaatgtatcagccagagtagcaagtaatttttgttttataaatcatagtatctgtcatcttgcagtattaccaatgctgttgtaaattgaatttaaagtggtattaaaaaaaactgttaaacaatttttatctgtttgtatatcttactatagattatgtacaagtaacatctaaataaaattacacttttaaccctaagaggttttgcttattaataa

SEQ ID NO: 166827 - protein, 483 aa, Artificial Sequence
  derived and/or modified sequence
MASLGDLVRAWHLGAQAVDRGDWARALHLFSGVPAPPARLCFNAGCVHLLAGDPEAALRAFDQAVTKDTCMAVGFFQRGVANFQLARFQEALSDFWLALEQLRGHAAIDYTQLGLRFKLQAWEVLHNVASAQCQLGLWTEAASSLREAMSKWPEGSLNGLDSALDQVQRRGSLPPRQVPRGEVFRPHRWHLKHLEPVDFLGKAKVVASAIPDDQGWGVRPQQPQGPGANHDARSLIMDSPRAGTHQGPLDAETEVGADRCTSTAYQEQRPQVEQVGKQAPLSPGLPAMGGPGPGPCEDPAGAGGAGAGGSEPLVTVTVQCAFTVALRARRGADLSSLRALLGQALPHQAQLGQLSYLAPGEDGHWVPIPEEESLQRAWQDAAACPRGLQLQCRGAGGRPVLYQVVAQHSYSAQGPEDLGFRQGDTVDVLCEEPDVPLAVDQAWLEGHCDGRIGIFPKCFVVPAGPRMSGAPGRLPRSQQGDQP

SEQ ID NO: 166828 - DNA, 1452 bp, Artificial Sequence
  derived and/or modified sequence
atggccagcctgggcgacctggtgagagcctggcacctgggcgcccaggccgtggacagaggcgactgggccagagccctgcacctgttcagcggcgtgcccgccccccccgccagactgtgcttcaacgccggctgcgtgcacctgctggccggcgaccccgaggccgccctgagagccttcgaccaggccgtgaccaaggacacctgcatggccgtgggcttcttccagagaggcgtggccaacttccagctggccagattccaggaggccctgagcgacttctggctggccctggagcagctgagaggccacgccgccatcgactacacccagctgggcctgagattcaagctgcaggcctgggaggtgctgcacaacgtggccagcgcccagtgccagctgggcctgtggaccgaggccgccagcagcctgagagaggccatgagcaagtggcccgagggcagcctgaacggcctggacagcgccctggaccaggtgcagagaagaggcagcctgccccccagacaggtgcccagaggcgaggtgttcagaccccacagatggcacctgaagcacctggagcccgtggacttcctgggcaaggccaaggtggtggccagcgccatccccgacgaccagggctggggcgtgagaccccagcagccccagggccccggcgccaaccacgacgccagaagcctgatcatggacagccccagagccggcacccaccagggccccctggacgccgagaccgaggtgggcgccgacagatgcaccagcaccgcctaccaggagcagagaccccaggtggagcaggtgggcaagcaggcccccctgagccccggcctgcccgccatgggcggccccggccccggcccctgcgaggaccccgccggcgccggcggcgccggcgccggcggcagcgagcccctggtgaccgtgaccgtgcagtgcgccttcaccgtggccctgagagccagaagaggcgccgacctgagcagcctgagagccctgctgggccaggccctgccccaccaggcccagctgggccagctgagctacctggcccccggcgaggacggccactgggtgcccatccccgaggaggagagcctgcagagagcctggcaggacgccgccgcctgccccagaggcctgcagctgcagtgcagaggcgccggcggcagacccgtgctgtaccaggtggtggcccagcacagctacagcgcccagggccccgaggacctgggcttcagacagggcgacaccgtggacgtgctgtgcgaggagcccgacgtgcccctggccgtggaccaggcctggctggagggccactgcgacggcagaatcggcatcttccccaagtgcttcgtggtgcccgccggccccagaatgagcggcgcccccggcagactgcccagaagccagcagggcgaccagccctag

SEQ ID NO: 166829 - DNA, 1452 bp, Artificial Sequence
  derived and/or modified sequence
atggcctcccttggcgatctcgtgcgggcatggcacttgggcgcacaggccgtcgaccgcggagactgggccagagctttacatctcttttcgggagtaccggccccacccgcaagattgtgtttcaacgcaggatgcgtccatttgctggctggggaccccgaggccgcccttcgcgctttcgaccaggccgtcaccaaggacacatgtatggcagtaggatttttccagagaggtgtcgcaaattttcaacttgccaggtttcaagaagccctttcagatttttggctggcactcgaacagctaaggggacacgctgctatagattacacgcagctcggcctgcggtttaaactgcaggcttgggaagtgctgcacaacgtagcatctgctcagtgccagctgggtttatggacagaggccgcaagctcactgcgggaagcaatgagtaagtggcctgaggggagcctcaacggcctagattccgctcttgatcaggttcagcgcagaggcagtctgccgccacgccaggtacctagaggcgaagtatttcggccgcacaggtggcacctcaaacacctggagccggttgacttcctcggcaaagcaaaggtcgttgcctcagccatccccgatgatcagggctggggggtgagacctcaacaacctcagggccctggggcaaaccacgacgcccgttcactgatcatggattcccctagagcgggcacacatcaaggaccactcgacgctgaaacagaagtgggcgcagataggtgcactagcacagcatatcaggaacagagacctcaggtggaacaagttggaaagcaagcccccttgtccccggggctgcctgccatgggaggccctggccctggaccctgtgaggatcctgcaggagctgggggagccggcgctggcggatctgaacccctggtgaccgtgaccgtgcagtgtgccttcactgtggctctccgggcccggagaggagccgacctatcttccctgcgagcactactcggtcaggctttgccccatcaagcccaactgggacagttgtcctatctagcccccggcgaagatggacattgggttcccattcctgaagaagaaagcttgcagcgagcgtggcaggacgctgcggcatgccccaggggactacagttgcaatgcagaggggccggcggacgccccgtgctgtaccaggtggtcgcacagcactcatacagtgcacaagggccagaggatcttggttttcgccagggcgacacagtagatgtcttgtgtgaagaacccgacgtgcccctcgcagttgaccaggcttggctggaggggcattgtgacggtcggatcggcattttccccaagtgcttcgtcgtgcctgccggccccaggatgtctggtgccccagggaggctcccccgctcacagcaaggggatcagccgtag

SEQ ID NO: 166830 - DNA, 1452 bp, Artificial Sequence
  derived and/or modified sequence
atggccagcctgggggacctggtgcgggcctggcacctgggcgcccaggccgtggacagaggagactgggcccgggccctgcacctgttctctggagtgcctgcccccccagcccggctgtgcttcaatgccggctgtgtgcacctgctggccggggaccctgaggccgccctgcgggcctttgaccaggccgtgaccaaggacacctgcatggctgtgggcttcttccagaggggcgtggccaacttccagctggcccgcttccaggaggccctgagtgacttctggctggccctggagcagctgcggggccacgccgccatcgactacacccagctgggcctgcgcttcaagctgcaggcctgggaggtgctgcacaacgtggccagcgcccagtgccagctgggcctgtggacagaagctgccagcagcctgcgggaggccatgagcaagtggccagagggcagcctgaatggcctggacagcgccctggaccaggtgcagaggcggggcagcctgcccccccggcaggtgcccagaggagaggtgttccggccccaccgctggcacctgaagcacctggagcctgtggacttcctgggcaaggccaaggtggtggccagcgccatcccagatgaccagggctggggcgtgcggccccagcagccccagggccctggggccaaccatgatgcccggagcctcatcatggacagcccccgggccggcacccaccagggccccctggatgctgagacagaggtgggcgctgaccgctgcaccagcacagcctaccaggagcagaggccccaggtggagcaggtgggcaagcaggcccccctgagccctggcctgcctgccatgggcggccctggccctggcccctgtgaagatcctgctggggccggcggggccggggccggcggcagcgagcccctggtgacagtgacagtgcagtgtgccttcaccgtggccctgcgggccaggagaggagctgacctgagcagcctgcgggccctgctgggccaggccctgccccaccaggcccagctgggccagctgagctacctggcccctggagaagatggccactgggtgcccatccctgaggaggagagcctgcagagggcctggcaggatgctgctgcctgcccccggggcctgcagctgcagtgcagaggagctgggggccggcctgtgctgtaccaggtggtggcccagcacagctacagcgcccagggccctgaggacctgggcttccggcagggcgacacagtggatgtgctgtgtgaggagccagatgtgcccctggccgtggaccaggcctggctggagggccactgtgatggccgcatcggcatcttccccaagtgctttgtggtgcctgctggccccaggatgtctggggcccctggccgcctgcccaggagccagcagggcgaccagccctag

SEQ ID NO: 166831 - DNA, 1678 bp, Artificial Sequence
  derived and/or modified sequence
ccggggaggggcgggcgcctgccgccagggggcgccgcggggcagcggggttgcacctggcgcttggcgcccgcacctctgcccgcctcggagaccccgcagccccgcgccgccgcctggccccggccccggcccctccgcgggatcctggcccctcctcgagcgccgccaccggccgccatggcctctctgggggacctggtgcgcgcctggcacctgggcgcgcaggctgtggatcgtggggactgggcccgcgccttgcacctcttctcgggcgtcccggcgccgcccgccaggctgtgcttcaacgcgggctgcgtgcacctgctggccggggaccccgaggccgcgctgcgggcatttgaccaagccgtgaccaaggacacctgcatggcggttggcttcttccagcgaggagtggccaacttccagctggcaaggttccaggaggctctgtctgacttctggctggccctggagcagctgaggggccacgctgccatcgactacacgcagctgggcctgcggttcaagctgcaagcctgggaggtgctacacaatgtggcgtcggcacagtgccagctggggctctggacagaggcggccagcagcctaagggaggccatgtccaagtggccggaggggtccctgaatggcctggactcagccctggaccaagtgcagagacggggctcactgccgccacggcaggtccccaggggcgaggtcttccggccccaccggtggcacctgaagcacttggagcccgtggatttcctgggcaaggccaaggtggtggcctctgccatccccgacgaccagggctggggcgtccgccctcagcagccacagggaccaggagcgaaccatgatgccaggtccctaatcatggactccccaagagctggcacccaccagggccccctcgatgcagagacagaggtcggtgctgaccgctgcacgtcgactgcctaccaggagcagaggccccaggtggagcaagttggcaaacaggctcctctctccccagggctgccggcaatgggggggcctggccccggcccctgtgaggaccccgcgggtgctgggggagcaggtgcagggggctccgagcccctggtgactgtcaccgtgcagtgcgccttcacagtggccctgagggcacgaagaggagccgacctgtccagcctgcgggcactgctgggccaagccctccctcaccaggcccagcttgggcaactcagttacctagccccaggtgaggacgggcactgggtccccatccccgaggaggagtcgctgcagagggcctggcaggacgcagctgcctgccccagggggctgcagctgcagtgcaggggagccgggggtcggccggtcctctaccaggtggtggcccagcacagctactccgcccaggggccagaggacctgggcttccgacagggggacacggtggacgtcctgtgtgaagagcccgatgtcccccttgcagtggaccaggcatggctggagggccactgtgacggccgcatcggcatcttccccaagtgcttcgtggtccccgccggccctcggatgtcaggagcccccggccgcctgccccgatcccagcagggagatcagccctaatgatgctgtgtccatgatgcttttaataaaaacaacccccactgca

SEQ ID NO: 166832 - DNA, 1452 bp, Artificial Sequence
  derived and/or modified sequence
atggccagcctgggcgacctggtgcgggcctggcacctgggcgcccaggcagtggatcgcggcgactgggcccgagcactgcaccttttctcaggggtaccagcaccccctgcgcgcttgtgcttcaatgctggatgtgtgcatcttcttgcaggagatccagaggcggcactgcgcgcctttgatcaggccgtcacgaaagacacatgtatggcagttggattttttcagcgcggcgtcgcgaatttccagctggctaggttccaggaggcactgagcgatttctggctcgcgctcgaacagcttcggggccacgccgctattgactacacacaattgggacttcgctttaagctccaggcctgggaagttctccacaacgtggccagcgcgcagtgtcagttgggcttgtggacggaggccgcaagttcactgagagaagcaatgtccaaatggcctgaagggagccttaatggactggacagtgccctggatcaggttcaaaggcgggggtccttgcctccccgccaggtaccaagaggcgaagtcttccgacctcatagatggcatctaaagcatttagaacctgtggactttctcggaaaggcgaaagtcgtggctagcgccattccggacgatcagggctggggagtgaggccccaacaacctcaaggaccgggtgcaaaccatgatgcaagaagtttaatcatggacagcccccgagctggcactcaccagggacccctggacgccgagacagaggtcggggctgaccgttgcacctcgacagcctaccaggaacagaggcctcaggtagagcaagtcgggaaacaagctccgctgagcccaggactacccgcgatgggcggaccagggcccggaccatgcgaggatccagctggtgccggcggagcaggtgcgggcggttctgaacccctggtgactgttaccgtgcagtgcgcctttaccgtagcactacgcgctcgtagaggagccgacctgagcagcctgagggccctgctcggacaggccctcccccatcaggctcagctggggcagttgtcctatctggccccaggagaagacggccactgggtccctatcccggaagaggaaagcctccagagagcctggcaggatgcggccgcatgccccagaggcttacaacttcaatgtcgaggcgccggcggccggccagtgctgtaccaggtggtcgctcagcactcgtatagcgcccagggaccagaggatctagggtttaggcagggagatactgtggacgtgctatgtgaagaacctgatgtgcctctggcagtggatcaagcatggttagaagggcactgtgacggaagaattggcatctttccgaaatgttttgtggtaccggctgggcccaggatgagcggggctcctggcagactgccaagatcacagcaaggtgatcaaccttag

SEQ ID NO: 166833 - DNA, 1452 bp, Artificial Sequence
  derived and/or modified sequence
atggccagcctgggggatttggtccgggcatggcacttgggagctcaggctgttgacaggggagactgggccagagcattacacctctttagtggggtgccagctccacctgccagactgtgttttaacgcaggctgcgttcacctcttggccggtgacccagaggcagccctgagagccttcgaccaggctgtgactaaagacacctgtatggccgtgggttttttccagaggggtgtggctaattttcagcttgccagatttcaggaggccctgtcagatttctggctcgcgctggagcagctgagaggccacgccgctattgactatacccagctgggcctgagattcaagctgcaagcctgggaggtgctccacaacgtggcctctgcgcagtgtcagctcggactatggacagaagccgcatccagcctgcgggaggctatgtcgaaatggccggagggtagcctcaacggattggactctgccctagaccaggtacagagacggggttcactacctccaagacaggtaccccgtggagaggttttccggcctcaccgctggcatttgaaacaccttgagcctgtggacttccttgggaaggccaaagtggttgccagcgccatcccagacgaccaggggtggggcgtgagacctcagcagccacagggcccaggggcaaatcacgacgcccgttcccttattatggatagcccccgtgcgggaactcatcagggtcccctggatgccgagaccgaagtgggcgctgatcgatgcactagtaccgcctaccaggagcagaggccccaagtcgaacaggtcggcaagcaagctccgcttagcccaggactgccagctatgggcggaccaggtcccggtccttgtgaggatccggcaggagcaggaggtgcaggcgctggcggaagcgagcccctggtaactgtgacagtgcagtgcgctttcaccgttgccttgcgggctcgcaggggggcagatctctcctccttgcgggcattactaggtcaggctttgccacaccaggcgcagctgggccaactatcttatctggccccaggagaggacggccattgggtccccatccccgaggaggagtctctccagcgggcatggcaggatgctgcagcctgtcctagagggttgcaactgcagtgccggggtgccggtggcaggcctgtactgtatcaagtggtggcccagcactcatatagcgctcaaggacctgaggaccttggttttcggcagggcgacacagtcgacgtgctctgcgaggaaccagatgttcctctcgcggttgaccaggcatggctggaaggacactgtgatggtcgtatcggaatatttcctaagtgtttcgtggtcccagccggtccaaggatgagtggcgctccgggaaggcttcctcggtcccaacagggtgatcaaccctag

SEQ ID NO: 166834 - protein, 717 aa, Artificial Sequence
  derived and/or modified sequence
MRGTMMERESIKSFWKQSVPLMERIGSGEKLVLADLLEPVKTSSSLATVKKQLSRVKSKKTVELPLNKEEIERIHREVAFNKTAQVLSKWDPVVLKNRQAEQLVFPLEKEEPAIAPIEHVLSGWKARTPLEQEIFNLLHKNKQPVTDPLLTPVEKASLRAMSLEEAKMRRAELQRARALQSYYEAKARREKKIKSKKYHKVVKKGKAKKALKEFEQLRKVNPAAALEELEKIEKARMMERMSLKHQNSGKWAKSKAIMAKYDLEARQAMQEQLSKNKELTQKLQVASESEEEEGGTEDVEELLVPDVVNEVQMNADGPNPWMLRSCTSDTKEAATQEDPEQLPELEAHGVSESEGEERPVAEEEILLREFEERRSLRKRSELSQDAEPAGSQETKDSGSQEVLSELRVLSQKLKENHQSRKQKASSEGTIPQVQREEPAPEEEEPLLLQRPERVQTLEELEELGKEECFQNKELPRPVLEGQQSERTPNNRPDAPKEKKKKEQMIDLQNLLTTQSPSVKSLAVPTIEELEDEEERNHRQMIKEAFAGDDVIRDFLKEKREAVEASKPKDVDLTLPGWGEWGGVGLKPSAKKRRRFLIKAPEGPPRKDKNLPNVIINEKRNIHAAAHQVRVLPYPFTHHWQFERTIQTPIGSTWNTQRAFQKLTTPKVVTKPGHIINPIKAEDVGYRSSSRSDLSVIQRNPKRITTRHKKQLKKCSVD

SEQ ID NO: 166835 - protein, 771 aa, Artificial Sequence
  derived and/or modified sequence
MTANRLAESLLALSQQEELADLPKDYLLSESEDEGDNDGERKHQKLLEAISSLDGKNRRKLAERSEASLKVSEFNVSSEGSGEKLVLADLLEPVKTSSSLATVKKQLSRVKSKKTVELPLNKEEIERIHREVAFNKTAQVLSKWDPVVLKNRQAEQLVFPLEKEEPAIAPIEHVLSGWKARTPLEQEIFNLLHKNKQPVTDPLLTPVEKASLRAMSLEEAKMRRAELQRARALQSYYEAKARREKKIKSKKYHKVVKKGKAKKALKEFEQLRKVNPAAALEELEKIEKARMMERMSLKHQNSGKWAKSKAIMAKYDLEARQAMQEQLSKNKELTQKLQVASESEEEEGGTEDVEELLVPDVVNEVQMNADGPNPWMLRSCTSDTKEAATQEDPEQLPELEAHGVSESEGEERPVAEEEILLREFEERRSLRKRSELSQDAEPAGSQETKDSGSQEVLSELRVLSQKLKENHQSRKQKASSEGTIPQVQREEPAPEEEEPLLLQRPERVQTLEELEELGKEECFQNKELPRPVLEGQQSERTPNNRPDAPKEKKKKEQMIDLQNLLTTQSPSVKSLAVPTIEELEDEEERNHRQMIKEAFAGDDVIRDFLKEKREAVEASKPKDVDLTLPGWGEWGGVGLKPSAKKRRRFLIKAPEGPPRKDKNLPNVIINEKRNIHAAAHQVRVLPYPFTHHWQFERTIQTPIGSTWNTQRAFQKLTTPKVVTKPGHIINPIKAEDVGYRSSSRSDLSVIQRNPKRITTRHKKQLKKCSVD

SEQ ID NO: 166836 - DNA, 2154 bp, Artificial Sequence
  derived and/or modified sequence
atgagaggcaccatgatggagagagagagcatcaagagcttctggaagcagagcgtgcccctgatggagagaatcggcagcggcgagaagctggtgctggccgacctgctggagcccgtgaagaccagcagcagcctggccaccgtgaagaagcagctgagcagagtgaagagcaagaagaccgtggagctgcccctgaacaaggaggagatcgagagaatccacagagaggtggccttcaacaagaccgcccaggtgctgagcaagtgggaccccgtggtgctgaagaacagacaggccgagcagctggtgttccccctggagaaggaggagcccgccatcgcccccatcgagcacgtgctgagcggctggaaggccagaacccccctggagcaggagatcttcaacctgctgcacaagaacaagcagcccgtgaccgaccccctgctgacccccgtggagaaggccagcctgagagccatgagcctggaggaggccaagatgagaagagccgagctgcagagagccagagccctgcagagctactacgaggccaaggccagaagagagaagaagatcaagagcaagaagtaccacaaggtggtgaagaagggcaaggccaagaaggccctgaaggagttcgagcagctgagaaaggtgaaccccgccgccgccctggaggagctggagaagatcgagaaggccagaatgatggagagaatgagcctgaagcaccagaacagcggcaagtgggccaagagcaaggccatcatggccaagtacgacctggaggccagacaggccatgcaggagcagctgagcaagaacaaggagctgacccagaagctgcaggtggccagcgagagcgaggaggaggagggcggcaccgaggacgtggaggagctgctggtgcccgacgtggtgaacgaggtgcagatgaacgccgacggccccaacccctggatgctgagaagctgcaccagcgacaccaaggaggccgccacccaggaggaccccgagcagctgcccgagctggaggcccacggcgtgagcgagagcgagggcgaggagagacccgtggccgaggaggagatcctgctgagagagttcgaggagagaagaagcctgagaaagagaagcgagctgagccaggacgccgagcccgccggcagccaggagaccaaggacagcggcagccaggaggtgctgagcgagctgagagtgctgagccagaagctgaaggagaaccaccagagcagaaagcagaaggccagcagcgagggcaccatcccccaggtgcagagagaggagcccgcccccgaggaggaggagcccctgctgctgcagagacccgagagagtgcagaccctggaggagctggaggagctgggcaaggaggagtgcttccagaacaaggagctgcccagacccgtgctggagggccagcagagcgagagaacccccaacaacagacccgacgcccccaaggagaagaagaagaaggagcagatgatcgacctgcagaacctgctgaccacccagagccccagcgtgaagagcctggccgtgcccaccatcgaggagctggaggacgaggaggagagaaaccacagacagatgatcaaggaggccttcgccggcgacgacgtgatcagagacttcctgaaggagaagagagaggccgtggaggccagcaagcccaaggacgtggacctgaccctgcccggctggggcgagtggggcggcgtgggcctgaagcccagcgccaagaagagaagaagattcctgatcaaggcccccgagggcccccccagaaaggacaagaacctgcccaacgtgatcatcaacgagaagagaaacatccacgccgccgcccaccaggtgagagtgctgccctaccccttcacccaccactggcagttcgagagaaccatccagacccccatcggcagcacctggaacacccagagagccttccagaagctgaccacccccaaggtggtgaccaagcccggccacatcatcaaccccatcaaggccgaggacgtgggctacagaagcagcagcagaagcgacctgagcgtgatccagagaaaccccaagagaatcaccaccagacacaagaagcagctgaagaagtgcagcgtggactag

SEQ ID NO: 166837 - DNA, 2316 bp, Artificial Sequence
  derived and/or modified sequence
atgaccgccaacagactggccgagagcctgctggccctgagccagcaggaggagctggccgacctgcccaaggactacctgctgagcgagagcgaggacgagggcgacaacgacggcgagagaaagcaccagaagctgctggaggccatcagcagcctggacggcaagaacagaagaaagctggccgagagaagcgaggccagcctgaaggtgagcgagttcaacgtgagcagcgagggcagcggcgagaagctggtgctggccgacctgctggagcccgtgaagaccagcagcagcctggccaccgtgaagaagcagctgagcagagtgaagagcaagaagaccgtggagctgcccctgaacaaggaggagatcgagagaatccacagagaggtggccttcaacaagaccgcccaggtgctgagcaagtgggaccccgtggtgctgaagaacagacaggccgagcagctggtgttccccctggagaaggaggagcccgccatcgcccccatcgagcacgtgctgagcggctggaaggccagaacccccctggagcaggagatcttcaacctgctgcacaagaacaagcagcccgtgaccgaccccctgctgacccccgtggagaaggccagcctgagagccatgagcctggaggaggccaagatgagaagagccgagctgcagagagccagagccctgcagagctactacgaggccaaggccagaagagagaagaagatcaagagcaagaagtaccacaaggtggtgaagaagggcaaggccaagaaggccctgaaggagttcgagcagctgagaaaggtgaaccccgccgccgccctggaggagctggagaagatcgagaaggccagaatgatggagagaatgagcctgaagcaccagaacagcggcaagtgggccaagagcaaggccatcatggccaagtacgacctggaggccagacaggccatgcaggagcagctgagcaagaacaaggagctgacccagaagctgcaggtggccagcgagagcgaggaggaggagggcggcaccgaggacgtggaggagctgctggtgcccgacgtggtgaacgaggtgcagatgaacgccgacggccccaacccctggatgctgagaagctgcaccagcgacaccaaggaggccgccacccaggaggaccccgagcagctgcccgagctggaggcccacggcgtgagcgagagcgagggcgaggagagacccgtggccgaggaggagatcctgctgagagagttcgaggagagaagaagcctgagaaagagaagcgagctgagccaggacgccgagcccgccggcagccaggagaccaaggacagcggcagccaggaggtgctgagcgagctgagagtgctgagccagaagctgaaggagaaccaccagagcagaaagcagaaggccagcagcgagggcaccatcccccaggtgcagagagaggagcccgcccccgaggaggaggagcccctgctgctgcagagacccgagagagtgcagaccctggaggagctggaggagctgggcaaggaggagtgcttccagaacaaggagctgcccagacccgtgctggagggccagcagagcgagagaacccccaacaacagacccgacgcccccaaggagaagaagaagaaggagcagatgatcgacctgcagaacctgctgaccacccagagccccagcgtgaagagcctggccgtgcccaccatcgaggagctggaggacgaggaggagagaaaccacagacagatgatcaaggaggccttcgccggcgacgacgtgatcagagacttcctgaaggagaagagagaggccgtggaggccagcaagcccaaggacgtggacctgaccctgcccggctggggcgagtggggcggcgtgggcctgaagcccagcgccaagaagagaagaagattcctgatcaaggcccccgagggcccccccagaaaggacaagaacctgcccaacgtgatcatcaacgagaagagaaacatccacgccgccgcccaccaggtgagagtgctgccctaccccttcacccaccactggcagttcgagagaaccatccagacccccatcggcagcacctggaacacccagagagccttccagaagctgaccacccccaaggtggtgaccaagcccggccacatcatcaaccccatcaaggccgaggacgtgggctacagaagcagcagcagaagcgacctgagcgtgatccagagaaaccccaagagaatcaccaccagacacaagaagcagctgaagaagtgcagcgtggactag

SEQ ID NO: 166838 - DNA, 2154 bp, Artificial Sequence
  derived and/or modified sequence
atgagaggcactatgatggaacgcgaatccatcaagagtttctggaaacaaagcgtgcctctaatggaacgtattggatcgggcgagaagcttgtgctcgcagacttgttggagcccgtgaaaacctcatcatccctcgcaaccgtcaaaaagcaactgtcaagggtgaaatcaaagaaaacggtggaactgcctttaaacaaggaagagatagagcgtatacatagagaggtggcgtttaacaagacagcgcaggtgctgtccaagtgggaccccgtggttctgaagaatcggcaagcggagcagcttgtcttcccactagagaaagaggaacctgcaatcgcccctatcgagcatgtgctaagcgggtggaaggccaggacacccctggagcaggaaatcttcaaccttctgcataagaacaaacaacccgtcactgaccccctgctgacccccgttgaaaaagcttcattgagagccatgagcctggaggaagccaagatgcgacgagctgaacttcagcgcgcccgggcactccagagttattacgaggccaaagctaggcgagagaaaaaaattaaatccaagaagtatcacaaagtcgtgaagaaagggaaggccaagaaggccttaaaagagtttgaacagttacgcaaagttaacccagccgcggccctagaggagttggagaaaattgagaaggcccgaatgatggagagaatgtctttaaagcaccaaaatagtggtaaatgggctaagtcaaaggccatcatggcaaaatacgatttggaggctcgacaagcaatgcaggagcagctttctaaaaataaggagttgacgcaaaaactccaggtggcgagtgagtcagaggaggaggagggaggcacagaagatgtggaagagctgcttgtgcccgacgtggtgaacgaggtccaaatgaacgctgacggaccaaatccttggatgctgcgctcctgtacctcggatactaaggaggccgcaacccaggaagatcctgagcaactgcccgaactggaggcccacggggtaagcgaatctgagggcgaagaaaggccagtggccgaagaggaaatactgctacgggaattcgaagagcgcaggtctttgagaaagcgctctgaactttcacaggacgctgagccagctggcagtcaggaaacaaaagactctggcagtcaggaggtgctctccgaacttcgggtcctgagccagaaactaaaagaaaaccatcaatcgcgcaagcaaaaggccagtagtgagggtacgatcccacaagtgcagcgggaggaaccagcccctgaggaagaggagccactgctgttgcagagaccggaaagagtacagacactggaagagttggaggagctggggaaggaagagtgtttccagaacaaagagctcccaagacccgttttggaaggtcagcaatcggagcgaacacctaataatcgtccagatgccccaaaagagaagaaaaagaaggagcagatgatcgatctgcagaacctgctcactactcaaagtccctccgtgaagagcttggccgtgccaaccatcgaagaactggaggatgaggaggaaagaaaccatagacagatgattaaagaagctttcgccggcgatgacgtgatacgggactttctgaaagagaagagagaggccgttgaggcaagtaaacctaaggacgtggacttgacacttcccggttggggagaatgggggggcgttggattgaagccgtccgccaagaagcggcgccggtttctgatcaaggctcctgaagggcccccgcgcaaggataagaaccttcctaacgtgataataaatgagaaaagaaacatccatgcagctgctcaccaggtcagagtgttgccctacccatttacacaccattggcagtttgagcgcacgatccagacgccaattggctccacgtggaacacccagagagcctttcagaagctgaccactcccaaagtggtaactaaacctggtcacatcataaacccaatcaaagctgaggatgtggggtatcggagctctagtaggtctgacctgtctgtgatccagcgcaatcctaagcgaattaccactcggcacaagaagcagctgaagaagtgttctgtggactag

SEQ ID NO: 166839 - DNA, 2316 bp, Artificial Sequence
  derived and/or modified sequence
atgaccgccaaccgcctggccgaatcactgctcgcattgtctcagcaggaggagctcgctgatctacccaaagattatttactgagcgagagtgaggacgagggcgacaatgacggggagcggaagcaccagaagctactggaagcgatctcttcattagatgggaaaaatagaaggaagctcgctgaaaggtccgaagcctccctgaaagtctccgaatttaatgtgtcttcggagggatcaggagaaaagcttgtgttggcggatctgctcgagcccgttaagacttcgagttccttggcaacagtcaaaaagcaactgagcagggtgaaatccaagaagaccgttgagctgcccctgaacaaagaggagatcgagaggatacatcgggaagtagcctttaacaagacggcacaggtcctgagcaagtgggaccctgtggtgctaaaaaatcgccaagccgagcagcttgtcttccccctggaaaaagaagagccagcaatcgcccccattgagcatgtacttagcgggtggaaagccaggaccccacttgagcaggagatcttcaatcttcttcataaaaacaagcagccagtgacagatcccttattgacacctgtggagaaggcatccctgcgggccatgagcctggaggaggccaagatgaggcgcgcggagctgcaacgagcacgtgcattacaatcatattatgaagcaaaggctcggcgtgaaaagaagatcaagagcaaaaagtaccacaaagtggtaaagaaaggcaaagcaaagaaagccctaaaggagtttgagcagttgcggaaagtgaaccctgctgctgccctggaggagctggagaaaatcgaaaaagcacgcatgatggagcggatgtctttaaagcatcaaaacagcggcaagtgggcaaaatcgaaggctatcatggccaagtacgacctggaggcccgccaagccatgcaggaacagctctcaaagaataaagagcttacccagaagctgcaggtcgcctctgagtcagaggaggaggaaggcggcaccgaggacgtcgaggaacttcttgtgcccgatgtcgtgaacgaggtgcaaatgaacgcggacggacctaatccttggatgctgaggtcctgcaccagcgacacaaaagaggcggctacccaggaggacccagaacagttgccggagctcgaggcccacggtgtttccgaatccgagggagaggaacgcccagtggccgaagaggaaattctattgcgggagttcgaggagcgacggtctcttagaaaaaggtccgaactcagccaggatgcagagccagccgggagccaagaaacaaaagacagtgggtcccaggaagtgctttctgagctccgggtcctgtcgcagaagcttaaagagaatcatcagtcccgaaaacaaaaggcatcctcagagggcacgatcccacaggtacaaagggaggagcctgcaccggaggaggaggagcctctgctgctacaacggcctgagcgtgtgcaaactctggaagagctagaagagctgggcaaagaggagtgctttcagaataaagagttgccgcgcccagtgcttgagggacagcagtccgagaggacacccaacaacagacccgacgcgcctaaggagaagaaaaagaaggagcagatgattgacctccagaatttactcaccacccagtctccatctgttaaatctttagctgtgccgacgatagaagaactcgaggacgaagaggagaggaatcatcgccagatgattaaggaggcgttcgccggagacgacgtcattcgcgactttctgaaagaaaagcgagaggcagttgaagcctctaagcccaaggacgtagaccttacccttcccggctggggggaatgggggggcgtcggcctcaagccaagtgccaagaagagacgaaggtttcttatcaaggcgcctgaaggtccccccagaaaggacaagaaccttcctaatgttattattaacgaaaagaggaatatccacgctgcagcccaccaggtcagagtgctgccttaccccttcactcatcattggcaatttgaacgtaccatccagacccctatcggtagtacttggaatacccagcgggcctttcagaagctgacaacccctaaggttgtcacgaagcctggccatatcattaacccaattaaggctgaggatgtggggtacaggtcaagtagcaggagcgatctgtctgttatccagagaaatccaaagagaatcaccaccagacacaagaagcagctgaagaagtgtagtgtggattag

SEQ ID NO: 166840 - DNA, 2154 bp, Artificial Sequence
  derived and/or modified sequence
atgaggggcaccatgatggagcgggagagcatcaagagcttctggaagcagagcgtgcccctgatggagagaattggcagcggggagaagctggtgctggccgacctgctggagcctgtgaagaccagcagcagcctggccaccgtgaagaagcagctgagccgggtgaagagcaagaagacagtggagctgcccctgaacaaggaggagattgagcgcatccaccgggaggtggccttcaacaagacagcccaggtgctgagcaagtgggaccctgtggtgctgaagaaccggcaggccgagcagctggtgttccccctggagaaggaggagcccgccatcgcccccattgaacatgtgctgagcggctggaaggcccggacccccctggagcaggagatcttcaacctgctgcacaagaacaagcagcctgtgacagaccccctgctgacccctgtggagaaggccagcctgcgggccatgagcctggaggaggccaagatgagaagagctgagctgcagagggcccgggccctgcagagctactatgaggccaaggcccggcgggagaagaagatcaagagcaagaagtaccacaaggtggtgaagaagggcaaggccaagaaggccctgaaggagtttgagcagctgaggaaggtgaacccagctgctgccctggaggagctggagaagattgagaaggccaggatgatggagaggatgagcctgaagcaccagaacagcggcaagtgggccaagagcaaggccatcatggccaagtatgacctggaggcccggcaggccatgcaggagcagctgagcaagaacaaggagctgacccagaagctgcaggtggccagcgagagcgaggaggaggagggcggcacagaagatgtggaggagctgctggtgcctgatgtggtgaatgaggtgcagatgaatgctgatggccccaacccctggatgctgcggagctgcaccagtgacaccaaggaggccgccacccaggaggaccctgagcagctgcctgagctggaggcccacggcgtgtctgagagcgagggggaggagaggcctgtggccgaggaggagatcctgctgcgggagtttgaggagaggaggagcctgaggaagaggtctgagctgagccaggatgctgagcctgctggcagccaggagaccaaggacagcggcagccaggaggtgctgtctgagctgcgggtgctgagccagaagctgaaggagaaccaccagagcaggaagcagaaggccagcagcgagggcaccatcccccaggtgcagcgggaggagcccgcccctgaggaggaggagcccctgctgctgcagaggcctgagcgggtgcagaccctggaggagctggaggagctgggcaaggaggagtgcttccagaacaaggagctgcccaggcctgtgctggagggccagcagagcgagaggacccccaacaacagaccagatgcccccaaggagaagaagaagaaggagcagatgattgacctgcagaacctgctgaccacccagagccccagcgtgaagagcctggccgtgcccaccatcgaggagctggaggatgaggaggagaggaaccaccggcagatgatcaaggaggcctttgctggagatgatgtgatccgggacttcctgaaggagaagcgggaggccgtggaggccagcaagcccaaggatgtggacctgaccctgcccggctggggcgagtggggcggcgtgggcctgaagcccagcgccaagaagagaagacgcttcctgatcaaggcccctgagggcccccccaggaaggacaagaacctgcccaacgtcatcatcaatgagaagaggaacatccatgctgctgcccaccaggtgcgggtgctgccctaccccttcacccaccactggcagtttgagaggaccatccagacccccatcggcagcacctggaacacccagagggccttccagaagctgaccacccccaaggtggtgaccaagccaggccacatcatcaaccccatcaaggcagaagatgtgggctaccgcagcagcagcagaagtgacctgagcgtcatccagaggaaccccaagaggatcaccaccaggcacaagaagcagctgaagaagtgcagcgtggactag

SEQ ID NO: 166841 - DNA, 2316 bp, Artificial Sequence
  derived and/or modified sequence
atgacagccaaccggctggccgagagcctgctggccctgagccagcaggaggagctggccgacctgcccaaggactacctgctgtctgagagtgaagatgaaggagacaatgatggagagaggaagcaccagaagctgctggaggccatcagcagcctggatggcaagaacagaaggaagctggccgagaggtctgaggccagcctgaaggtgtctgagttcaacgtgagcagcgagggcagcggggagaagctggtgctggccgacctgctggagcctgtgaagaccagcagcagcctggccaccgtgaagaagcagctgagccgggtgaagagcaagaagacagtggagctgcccctgaacaaggaggagattgagcgcatccaccgggaggtggccttcaacaagacagcccaggtgctgagcaagtgggaccctgtggtgctgaagaaccggcaggccgagcagctggtgttccccctggagaaggaggagcccgccatcgcccccattgaacatgtgctgagcggctggaaggcccggacccccctggagcaggagatcttcaacctgctgcacaagaacaagcagcctgtgacagaccccctgctgacccctgtggagaaggccagcctgcgggccatgagcctggaggaggccaagatgagaagagctgagctgcagagggcccgggccctgcagagctactatgaggccaaggcccggcgggagaagaagatcaagagcaagaagtaccacaaggtggtgaagaagggcaaggccaagaaggccctgaaggagtttgagcagctgaggaaggtgaacccagctgctgccctggaggagctggagaagattgagaaggccaggatgatggagaggatgagcctgaagcaccagaacagcggcaagtgggccaagagcaaggccatcatggccaagtatgacctggaggcccggcaggccatgcaggagcagctgagcaagaacaaggagctgacccagaagctgcaggtggccagcgagagcgaggaggaggagggcggcacagaagatgtggaggagctgctggtgcctgatgtggtgaatgaggtgcagatgaatgctgatggccccaacccctggatgctgcggagctgcaccagtgacaccaaggaggccgccacccaggaggaccctgagcagctgcctgagctggaggcccacggcgtgtctgagagcgagggggaggagaggcctgtggccgaggaggagatcctgctgcgggagtttgaggagaggaggagcctgaggaagaggtctgagctgagccaggatgctgagcctgctggcagccaggagaccaaggacagcggcagccaggaggtgctgtctgagctgcgggtgctgagccagaagctgaaggagaaccaccagagcaggaagcagaaggccagcagcgagggcaccatcccccaggtgcagcgggaggagcccgcccctgaggaggaggagcccctgctgctgcagaggcctgagcgggtgcagaccctggaggagctggaggagctgggcaaggaggagtgcttccagaacaaggagctgcccaggcctgtgctggagggccagcagagcgagaggacccccaacaacagaccagatgcccccaaggagaagaagaagaaggagcagatgattgacctgcagaacctgctgaccacccagagccccagcgtgaagagcctggccgtgcccaccatcgaggagctggaggatgaggaggagaggaaccaccggcagatgatcaaggaggcctttgctggagatgatgtgatccgggacttcctgaaggagaagcgggaggccgtggaggccagcaagcccaaggatgtggacctgaccctgcccggctggggcgagtggggcggcgtgggcctgaagcccagcgccaagaagagaagacgcttcctgatcaaggcccctgagggcccccccaggaaggacaagaacctgcccaacgtcatcatcaatgagaagaggaacatccatgctgctgcccaccaggtgcgggtgctgccctaccccttcacccaccactggcagtttgagaggaccatccagacccccatcggcagcacctggaacacccagagggccttccagaagctgaccacccccaaggtggtgaccaagccaggccacatcatcaaccccatcaaggcagaagatgtgggctaccgcagcagcagcagaagtgacctgagcgtcatccagaggaaccccaagaggatcaccaccaggcacaagaagcagctgaagaagtgcagcgtggactag

SEQ ID NO: 166842 - DNA, 2154 bp, Artificial Sequence
  derived and/or modified sequence
atgcggggcaccatgatggagcgggagagcatcaagagcttctggaaacaatccgtgccactcatggaaaggattggctcaggagagaagctggtgctcgccgacctgcttgaacccgtgaaaacgtcttcctcactcgccaccgtgaaaaagcaattgtccagggtgaagagtaaaaagaccgtagaacttccgctgaacaaagaggaaattgaaaggatacatagagaagttgcattcaataaaactgcacaggtcctgagtaaatgggacccagttgtgctgaaaaaccgccaggccgagcagttggtgttcccactagaaaaggaggagcctgctattgccccaatagaacacgtcctgtctgggtggaaggcacgaactccccttgagcaagagatattcaacctgctccacaaaaacaagcagcctgtgaccgaccctctgcttacccctgtggagaaggcaagcctgcgggccatgtccctggaggaagctaaaatgcgccgggcggaactgcaaagggcaagagctcttcagtcttactatgaggccaaagcaagacgggagaaaaaaatcaagtctaagaagtaccacaaggttgtgaaaaaaggcaaggcgaaaaaggcactgaaggagtttgagcagctcagaaaggttaatccggccgctgccttggaagagctggagaagatagaaaaggctagaatgatggagagaatgagtctgaaacaccaaaattcagggaagtgggccaaaagcaaagcaatcatggcaaaatacgatctggaggctcggcaggccatgcaagagcaattatcaaagaacaaagaactcacacagaaactccaggttgcctccgagagtgaagaggaggaaggcgggacagaagacgtcgaggaactacttgtcccggacgtcgtcaatgaggtacagatgaatgcagacgggccaaacccatggatgttgcgcagctgtacttcagataccaaggaggcagccacccaggaggatcccgagcagctgcctgaactggaagcacacggcgtgagcgaatctgagggagaagaacgccctgtggccgaagaagaaattttgctgcgcgaatttgaagaaagaagaagtttgaggaagaggtcggagctgagtcaggacgccgagccagccggttctcaggaaacaaaagattccggttcccaggaagttctatctgagttgcgagtcctgtcccaaaaactgaaggagaatcaccaatccagaaaacaaaaggcctcctcagaaggaacaataccacaggtgcagcgcgaagagcccgctccggaggaggaggaacccctgctgctgcaacgtcctgagagggtgcagacactagaggagcttgaagaacttggaaaagaagagtgttttcagaataaggaactgcccaggcccgtgctcgagggccaacagagtgagcggacgcccaacaacaggcctgacgctccaaaagagaagaagaaaaaagagcagatgatcgacctgcagaaccttctgacaacccagtcaccatccgtaaagtctttagcagtgcctacgatagaggaactggaggacgaagaggagcgaaaccaccgtcaaatgatcaaggaagcttttgccggggacgacgttattcgggactttctgaaagaaaagcgagaagccgttgaggcctccaagccaaaggatgtagacctgaccctgcccgggtggggcgaatggggcggcgtggggctcaaacctagcgctaagaagcgaaggcgctttctaatcaaagctcctgaggggcccccgaggaaggataagaacctgccgaatgtaataatcaatgaaaagaggaacatccacgcagccgcgcaccaggtccgcgttctcccctacccttttacccaccattggcagtttgagcgcacaatccagactcccattggttcaacgtggaacacccagagggctttccaaaaacttacgacccctaaagtggtcaccaaacctggccatatcattaacccaataaaagcagaagacgtgggctacagatcctcctccaggagcgacctgtccgtaattcagcggaaccccaagcgtatcacaacacgacataagaaacagttgaagaagtgtagtgtcgattag

SEQ ID NO: 166843 - DNA, 2316 bp, Artificial Sequence
  derived and/or modified sequence
atgaccgccaaccggctggccgagagcctgctggccctgagccagcaggaagaactggcagaccttccgaaggactacttgctgtcagaatccgaagacgagggagacaacgacggagagcggaaacaccagaaactgcttgaagccatttcttccctggacgggaaaaaccgacggaaactggccgagcggtctgaagcaagcttgaaggttagtgagtttaacgtgagtagcgaaggttcaggggagaagctggtcctggccgaccttctcgaacccgttaaaacctcaagtagcttggcgactgtaaagaagcagttgagccgtgtgaagagcaagaagacagtcgagttacccttgaataaggaagagatcgaacggatccaccgggaggtcgcgtttaataagacagctcaggttctgagcaagtgggatcctgtcgtactgaagaataggcaagctgaacagctggtgttccctctggagaaggaggaaccggccatcgccccaatcgaacacgtactgtcaggctggaaggcaagaacacctctggaacaggagatctttaatctgctacacaaaaacaagcagcctgtgacagacccgttgttgacgcctgtcgagaaggcgtcactgcgtgctatgtccctggaggaggctaaaatgcggagagctgagctacagcgggcgcgcgcattgcagtcctactatgaggccaaggcccgccgcgagaagaaaattaagtccaagaagtaccacaaagtagtgaaaaaaggaaaggccaaaaaggcacttaaagaatttgagcagcttcgaaaggtgaacccagcggcagccctggaggaactagagaaaatcgagaaagcacgcatgatggaacgaatgtccctgaagcaccaaaactccggcaagtgggcaaaaagcaaggcgattatggcaaagtacgatctggaggccagacaagcgatgcaggaacaactgtccaagaacaaagaactcacccagaagttgcaggtggcttcggagagtgaggaagaggagggcggaacagaagatgtagaggaactgcttgttcctgatgtggtcaacgaggtccagatgaacgcagatgggcccaacccttggatgcttcgctcgtgcacatccgacaccaaagaggccgcaactcaggaggaccccgaacagctgcccgaactggaggcccatggcgtgtcggagtctgaaggagaggagcggcccgtggcggaagaagagattctgctgagggaatttgaagaacggcgcagcttgcgcaaaagatctgagctctcgcaagatgcagagcccgccggaagccaagagaccaaagactccgggagtcaggaagtcctcagcgaactgcgtgtgctgagccagaagctgaaggagaatcaccagagtcggaagcagaaagccagctctgagggaaccattccacaagtgcagcgggaagaaccagcccccgaagaggaagagccacttctactgcagaggcctgagagggtgcagactttagaagaactcgaggagctgggcaaggaagaatgcttccaaaataaggagctgcctagacccgtcttagagggccaacagtcggaaagaactccaaataaccggccggatgctcccaaagagaagaagaagaaggaacagatgatagaccttcagaacctgctgaccacccagagcccatccgtgaaatctttggccgtccctacaatcgaagaactcgaagacgaagaggaaaggaatcatagacagatgattaaggaagcatttgcaggggatgacgtaatccgtgattttctcaaggaaaagcgagaagctgtcgaagccagtaagccaaaagacgttgatcttacactccccggctggggggagtgggggggcgtgggactcaagcccagtgccaagaagaggcggcgtttcctgatcaaagcccctgagggcccacccagaaaggataagaacctccccaatgtcatcatcaacgaaaagcgtaacatccacgccgccgctcaccaagttcgcgtcctgccatatcctttcacacatcactggcagtttgaaagaacgattcagacgcccataggctcgacctggaatacgcagcgggcgtttcagaaactgaccacacccaaggtggtgactaaacccggacatattataaatcctatcaaagctgaagacgtgggctaccgatcctcatcccgaagcgacctgtctgtgatccaacgaaaccccaaaagaatcactactagacataaaaaacagttgaaaaagtgttcagtggattag

SEQ ID NO: 166844 - DNA, 2154 bp, Artificial Sequence
  derived and/or modified sequence
atgaggggcaccatgatggagcgggagtctatcaaaagcttctggaaacagtctgtccccttaatggagagaattgggagcggggaaaaactggtcctggctgacctgttggaacctgttaaaacctcttccagtttggccactgtcaagaagcagttgtcccgagtgaaatcaaagaagaccgtggagctgccactcaataaggaggagatagaacggatccatcgcgaggtcgcattcaacaagactgcccaggtgcttagtaagtgggaccctgttgtgttgaagaataggcaggcagaacagctggtctttcccctggaaaaggaggagccggcaattgcaccaatcgagcatgtgttgtccgggtggaaagcacggactccactggaacaggagatcttcaacctgcttcataaaaataaacagcccgtgactgacccactgctgacacctgttgaaaaggcatctctgcgggctatgtctctggaggaagcaaagatgcgtcgggctgaattgcagagagccagggctcttcagagttattacgaggcaaaagcacgtcgagagaagaaaatcaagtccaaaaagtatcacaaagtagtgaaaaagggtaaagcgaagaaagccttgaaggagtttgaacagctacggaaggtcaatcctgccgctgcactcgaggaactggaaaaaatcgagaaggcaaggatgatggagagaatgagtttgaaacatcaaaactcagggaaatgggctaaatctaaggccattatggcaaagtacgacctcgaggctaggcaggccatgcaggagcagttgtcaaaaaacaaggagcttacccagaagctgcaggtagcctccgaatctgaggaggaagaggggggaacggaggatgtggaagaactgctggtgcccgatgtggtcaacgaggtacagatgaatgccgatggcccaaacccctggatgttgcggagctgcacttccgacaccaaggaggccgcaacccaggaggatccagagcagctacccgagctggaagcccacggagttagtgagtctgagggcgaagagcggcctgtggctgaggaagaaattttgctgcgcgagtttgaagaaagacgctccctcaggaaacgttcagagctctcccaagacgctgagccagccggatctcaggagactaaagactccgggtcacaagaggtactatcagagctaagagtgttatcacagaaactgaaggaaaaccaccaatcccgaaagcagaaagccagcagcgagggtactatcccgcaggtgcagcgcgaggaacccgcacccgaggaagaggaaccattgctgctgcagcggcctgaacgagttcagactctggaggagctggaggagctcggcaaggaagaatgtttccagaacaaagagctcccaaggccagtgttggaaggccagcagtctgaaagaacacccaacaataggccagatgccccaaaagagaaaaagaaaaaggagcagatgatcgacctacagaatttgttaactacacagtcaccaagtgtcaaatcattagctgtcccaacaatagaggaattggaggatgaggaagagaggaaccacagacagatgattaaagaggcgttcgcaggtgacgacgtgatccgcgatttcctgaaagaaaagcgcgaggccgttgaggccagcaaacctaaagatgtagacctcactctgccagggtggggcgaatgggggggagtgggcctaaagccttccgctaaaaagcggcgacgctttttaataaaggccccagagggcccaccacggaaggataagaatcttcctaacgtgattattaatgagaagcggaatattcacgccgcagctcaccaagtccgcgtgctgccgtaccccttcacgcaccactggcagtttgaacgaaccattcagactccaattggaagtacttggaacacacaaagggcattccagaaattgactactccaaaagtggttacaaagccaggtcatatcattaacccaataaaagcggaggacgttggctaccgatcttcatcccgtagcgatttaagcgtgattcaaaggaaccctaagaggatcactacaaggcacaaaaaacagctgaagaaatgtagcgtggactag

SEQ ID NO: 166845 - DNA, 2316 bp, Artificial Sequence
  derived and/or modified sequence
atgactgccaaccggctagcagagtcactccttgctctatcacaacaggaggagctcgcagacctccctaaagattacctcctgtccgagtcagaggacgagggcgataacgatggcgaacgaaagcaccaaaaactgctggaagccatctcatcactggacggcaaaaatcgtcgtaagttggcagaacggtccgaggccagtttgaaggttagcgagtttaacgtctcatctgagggtagtggcgagaagctagtgctggccgacctgttggaaccagtaaagacttcatcttcactcgcaacagttaagaagcagctttctcgggtgaagtctaagaagactgtggaactgccgctcaacaaggaagagatcgagagaatccatagggaagtggctttcaacaaaactgcccaggtactgtccaagtgggaccctgttgtgttaaagaataggcaagcagaacagcttgtgttccccttagagaaagaggaacccgcaattgcgccaattgagcatgtgctgagcggctggaaggcaaggacccctctggaacaggagattttcaacctgttacataaaaacaaacagccagtaaccgacccactgctgacacctgtggagaaagcttcactgcgcgcaatgagcctcgaggaggccaagatgagacgcgctgagctgcagagggctcgtgccttacagtcctactatgaggcgaaggccaggcgagagaagaagatcaaatctaaaaaataccataaggttgtaaaaaaaggcaaggctaagaaggcgctcaaggaattcgagcaactgaggaaggtaaaccccgctgccgcactcgaggagctggagaagatcgagaaagccagaatgatggaaaggatgtccctgaaacaccagaactcgggcaaatgggccaagtccaaggccattatggcgaagtatgatttggaagcacgtcaggccatgcaagaacaactcagcaagaacaaggaactcacgcaaaaacttcaggtagcaagtgagtccgaagaggaggaaggaggtacagaagacgtggaagagctacttgtgccagacgtagtaaatgaggtgcagatgaatgccgacggcccaaatccatggatgcttcgcagctgcacaagtgatacaaaggaggccgctactcaggaggatcctgagcagctgccagagcttgaagctcatggcgtttcggagtcagagggtgaagaaagacctgtggccgaagaggagatcctcctgcgggagttcgaggaacgacggagcctgagaaagcgcagcgaactgtcccaggacgccgaaccagccggaagtcaagaaacaaaggattccggaagccaggaggtgctgagtgaactacgcgtcctgagtcagaagttaaaagagaatcaccaaagtcgaaagcaaaaagcttcttcagaaggcacaatcccccaggtgcaacgtgaagagccagcacccgaggaggaggagcctttattactgcaaaggcccgagagagtccagactctggaagaactggaagagctcgggaaagaagaatgctttcagaataaagaactccctagaccggttctggaaggccaacagtctgaaagaacgccaaacaatcgccctgacgcaccaaaggagaaaaagaaaaaggaacaaatgatcgatctgcaaaacctgctgaccactcagtccccgtcagttaagtccttggcggttcctacaattgaggaactggaggacgaagaggaacgtaaccaccggcaaatgattaaggaggcattcgccggagatgacgtgatcagagacttcctgaaggaaaagcgcgaggctgtagaagcatctaagccaaaagacgttgacctgaccctgcccggatggggggaatgggggggagtcggcctgaaaccttccgctaagaaacgacgtcgtttcctgataaaggcaccagagggaccacctcgcaaggacaagaacctccccaatgtcatcattaacgaaaagcgcaatatccacgccgctgctcatcaggtcagagtgctgccatacccctttactcaccattggcagttcgagcgaactatccagacgcctatcggtagtacttggaacacacagcgcgcattccaaaagttgacaacacctaaagtggtcacgaagccaggccatatcatcaaccccattaaagccgaggatgtgggctatagaagctcatctcggagcgatttaagcgtcatccagcgaaacccaaaaaggattaccacacgccacaagaagcagctgaagaaatgcagcgtggactag

SEQ ID NO: 166846 - DNA, 2376 bp, Artificial Sequence
  derived and/or modified sequence
gagagaagctggctgctgaaatgactgcgaaccggcttgcagagagccttctggctttgagccaacaggaagaactagcggatttgccaaaagactacctcttgagtgagagtgaagatgagggggacaatgatggagagagaaagcatcaaaagcttctggaagcaatcagttcccttgatggaaagaataggatcaggagaaaagctggtccttgcagatctgcttgagcctgttaaaacttcatcttctttggccactgtgaaaaagcaactgagtagagtcaaatcaaagaagacagtggagttacctctgaacaaagaagagattgaacggatccacagagaagtagcattcaataaaaccgcacaagtcctctccaaatgggaccctgtcgtcctgaagaaccggcaggcagagcagctggtttttcccctggagaaagaggagccagccattgctcccattgaacatgtgctcagtggctggaaggcaagaactcccctggagcaggaaattttcaacctcctccataagaacaagcagccagtgacagaccctttactgacccctgtggaaaaggcctctctccgagccatgagcctagaagaggcaaagatgcgacgagcagagcttcagagggctcgggctctgcagtcctactatgaggccaaggctcgaagagagaagaaaatcaaaagtaaaaagtatcacaaagtcgtgaagaaaggaaaggccaagaaagccctaaaagagtttgagcagctgcggaaggttaatccagctgcagcactagaagaactggaaaaaattgaaaaggccagaatgatggaaagaatgagccttaagcaccaaaacagtgggaaatgggccaagtcaaaggcaattatggccaaatatgacctggaggctcgccaagctatgcaggaacagttgtctaagaacaaagaactgacacagaaactccaggtagcctctgagagtgaggaagaggagggaggcacagaagatgtggaagaactccttgtccctgatgtagtgaatgaagtgcagatgaatgcagatgggccgaatccctggatgctcaggagctgcaccagtgacaccaaagaggctgcaacccaggaggaccctgagcaactgccagagcttgaggcccatggagtttctgaaagtgagggagaagaaagaccagtggcagaagaagaaattttgttgagagaatttgaggaaaggcgatcccttagaaaaagatctgagctcagccaagatgctgagccagcaggcagtcaagaaacaaaagattctggcagccaggaggtgctgtctgaattgagagtactatctcagaaattgaaggaaaaccatcagtccaggaagcaaaaagcaagttcagaggggactattccccaggtccagagagaggaacctgccccagaagaagaggagcccctgttgctacagagaccagagagagtacagacgctggaagagctagaagagctgggaaaagaagaatgttttcaaaataaggagcttcccagacctgtgttagaagggcagcagtcagagaggaccccaaataatcgccctgatgcccctaaggagaagaaaaagaaggagcaaatgatcgacctacagaacctcctaaccacacaatctccctccgtgaagtctttggcagttcccacaatagaggagctggaagatgaagaggagagaaaccataggcagatgataaaggaagcttttgctggggatgatgtcatcagagatttcttgaaagagaagagggaagctgtggaggcgagtaagccaaaggacgtggacctgacactacctggctggggcgagtggggtggtgtgggcctaaagcccagtgccaagaaaagacgccggtttctcattaaagcccctgagggtcctccaagaaaagataagaatttgccaaatgtgattatcaatgagaagcgcaacatccacgcagctgctcatcaggtacgagtgcttccatatccatttacccaccattggcaatttgaaaggaccatccagacccccataggatccacatggaacacccagagggctttccaaaagctgactactcccaaggtcgtcaccaagccaggccatatcattaaccccataaaagcagaagacgtgggctaccggtcttcctcaaggtcggacctgtctgtcatacagaggaatccaaaacgaatcaccacacgtcacaaaaaacagctgaagaaatgctctgtagattgagttgctggaggagtgacagccaggagccctgacttcacttcctttggtccagttttactctgatacagggtggattccaaaactggctcagtacattgcatgtag

SEQ ID NO: 166847 - DNA, 2488 bp, Artificial Sequence
  derived and/or modified sequence
gtccatgtgagagaagctggctgctgaaatgactgcgaaccggcttgcagagagccttctggctttgagccaacaggaagaactagcggatttgccaaaagactacctcttgagtgagagtgaagatgagggggacaatgatggagagagaaagcatcaaaagcttctggaagcaatcagttcccttgatggaaagaataggcggaaattggctgagaggtctgaggctagtctgaaggtgtcagagttcaatgtcagttctgaaggatcaggagaaaagctggtccttgcagatctgcttgagcctgttaaaacttcatcttctttggccactgtgaaaaagcaactgagtagagtcaaatcaaagaagacagtggagttacctctgaacaaagaagagattgaacggatccacagagaagtagcattcaataaaaccgcacaagtcctctccaaatgggaccctgtcgtcctgaagaaccggcaggcagagcagctggtttttcccctggagaaagaggagccagccattgctcccattgaacatgtgctcagtggctggaaggcaagaactcccctggagcaggaaattttcaacctcctccataagaacaagcagccagtgacagaccctttactgacccctgtggaaaaggcctctctccgagccatgagcctagaagaggcaaagatgcgacgagcagagcttcagagggctcgggctctgcagtcctactatgaggccaaggctcgaagagagaagaaaatcaaaagtaaaaagtatcacaaagtcgtgaagaaaggaaaggccaagaaagccctaaaagagtttgagcagctgcggaaggttaatccagctgcagcactagaagaactggaaaaaattgaaaaggccagaatgatggaaagaatgagccttaagcaccaaaacagtgggaaatgggccaagtcaaaggcaattatggccaaatatgacctggaggctcgccaagctatgcaggaacagttgtctaagaacaaagaactgacacagaaactccaggtagcctctgagagtgaggaagaggagggaggcacagaagatgtggaagaactccttgtccctgatgtagtgaatgaagtgcagatgaatgcagatgggccgaatccctggatgctcaggagctgcaccagtgacaccaaagaggctgcaacccaggaggaccctgagcaactgccagagcttgaggcccatggagtttctgaaagtgagggagaagaaagaccagtggcagaagaagaaattttgttgagagaatttgaggaaaggcgatcccttagaaaaagatctgagctcagccaagatgctgagccagcaggcagtcaagaaacaaaagattctggcagccaggaggtgctgtctgaattgagagtactatctcagaaattgaaggaaaaccatcagtccaggaagcaaaaagcaagttcagaggggactattccccaggtccagagagaggaacctgccccagaagaagaggagcccctgttgctacagagaccagagagagtacagacgctggaagagctagaagagctgggaaaagaagaatgttttcaaaataaggagcttcccagacctgtgttagaagggcagcagtcagagaggaccccaaataatcgccctgatgcccctaaggagaagaaaaagaaggagcaaatgatcgacctacagaacctcctaaccacacaatctccctccgtgaagtctttggcagttcccacaatagaggagctggaagatgaagaggagagaaaccataggcagatgataaaggaagcttttgctggggatgatgtcatcagagatttcttgaaagagaagagggaagctgtggaggcgagtaagccaaaggacgtggacctgacactacctggctggggcgagtggggtggtgtgggcctaaagcccagtgccaagaaaagacgccggtttctcattaaagcccctgagggtcctccaagaaaagataagaatttgccaaatgtgattatcaatgagaagcgcaacatccacgcagctgctcatcaggtacgagtgcttccatatccatttacccaccattggcaatttgaaaggaccatccagacccccataggatccacatggaacacccagagggctttccaaaagctgactactcccaaggtcgtcaccaagccaggccatatcattaaccccataaaagcagaagacgtgggctaccggtcttcctcaaggtcggacctgtctgtcatacagaggaatccaaaacgaatcaccacacgtcacaaaaaacagctgaagaaatgctctgtagattgagttgctggaggagtgacagccaggagccctgacttcacttcctttggtccagttttactctgatacagggtggattccaaaactggctcagtacattgcatgtagttaagccacattttaaaaataaaggcattttttaatcta

SEQ ID NO: 166848 - protein, 134 aa, Artificial Sequence
  derived and/or modified sequence
MEFVMKQALGGATKDMGKMLGGDEEKDPDAAKKEEERQEALRQAEEERKAKYAKMEAEREAVRQGIRDKYGIKKKEEREAEAQAAMEANSEGSLTRPKKAIPPGCGDEVEEEDESILDTVIKYLPGPLQDMLKK

SEQ ID NO: 166849 - DNA, 405 bp, Artificial Sequence
  derived and/or modified sequence
atggagttcgtgatgaagcaggccctgggcggagcaaccaaagacatggggaagatgctcggtggggacgaggagaaggacccagacgcagccaaaaaggaggaggagcgacaggaggctttgcgtcaggccgaagaggaacgcaaggccaagtacgcaaaaatggaggctgagcgtgaggccgttcggcagggtattagagataagtacggtatcaagaagaaagaggaacgagaggccgaggcccaggctgcaatggaagccaattccgaaggaagtcttacacggccaaagaaggccattcctccggggtgtggggacgaggtggaggaggaagatgagtctatcctggatacagtgatcaaatacttgcctggcccgctgcaagacatgctgaaaaaatag

SEQ ID NO: 166850 - DNA, 405 bp, Artificial Sequence
  derived and/or modified sequence
atggagtttgtgatgaagcaggccctgggcggggccaccaaggacatgggcaagatgctgggcggagatgaggagaaggaccctgatgctgccaagaaggaggaggagcggcaggaggccctgcggcaggccgaggaggagaggaaggccaagtatgccaagatggaggccgagcgggaggccgtgcggcagggcatccgggacaagtatggcatcaagaagaaggaggagcgggaggccgaggcccaggccgccatggaggccaacagcgagggcagcctgacccggcccaagaaggccatccccccaggctgtggagatgaggtggaggaggaggatgagagcatcctggacaccgtcatcaagtacctgcccggccccctgcaggacatgctgaagaagtag

SEQ ID NO: 166851 - DNA, 405 bp, Artificial Sequence
  derived and/or modified sequence
atggagttcgtgatgaagcaggccctgggcggcgccaccaaggacatgggaaaaatgcttggaggagatgaagagaaagatccggacgcagcaaaaaaggaggaggaaaggcaagaagcgcttagacaggccgaggaagaacggaaagccaagtatgcaaagatggaagccgagcgcgaggccgtgcgccagggcatccgcgacaagtatggcataaaaaaaaaggaggaacgcgaggcagaggctcaggccgctatggaggctaattcggaaggaagcttaactcggccaaaaaaagcaatcccaccgggctgcggcgatgaggtggaggaggaggacgaatccatcctggataccgtgatcaagtacttgcctgggcctctgcaggacatgcttaaaaagtag

SEQ ID NO: 166852 - DNA, 405 bp, Artificial Sequence
  derived and/or modified sequence
atggagttcgtcatgaagcaagctctgggcggtgccaccaaggacatggggaagatgttgggcggagacgaagaaaaagatccagatgctgctaaaaaagaggaagaacgccaagaggcactgcggcaggccgaagaggaaaggaaggccaaatacgcaaagatggaagccgaaagggaagccgtgagacaggggattcgagacaaatacggcatcaaaaaaaaagaagagcgcgaggccgaggcccaggcggctatggaagccaacagcgagggctccctcacacgacctaagaaagcaatcccaccaggctgtggcgatgaagtcgaggaagaagatgagagcatcctggacacggtgatcaaatacctgcctggccctctacaagacatgctgaaaaagtag

SEQ ID NO: 166853 - DNA, 2181 bp, Artificial Sequence
  derived and/or modified sequence
gtcacgctcggacgcgggcggggggcggggagcgcctgcgagtgacgcgccctcctcgcggtgcccttcagccgccgccgcagctcaccgggcgccacatggacccagccggcccgagcgcgccccgccgctgaccgcccgcgccccgggaaggaagaacactcgctcccggccatacttgcgtgtgagttctgacccctggaggagccactgtggaagcagagcaatcgccatggagtttgtgatgaagcaggctctaggaggggccaccaaggacatggggaagatgctggggggtgacgaggagaaggacccagacgccgccaagaaggaggaggagcggcaggaggcgctgcgccaggcggaggaggagcgcaaggccaagtacgccaagatggaggcggagcgcgaggccgtgcgccagggcatccgagacaagtacggcatcaagaagaaggaggagcgcgaggccgaggcccaggccgccatggaggccaactccgaggggagcttgacgcggcccaagaaggccatcccgccgggctgcggggacgaggtggaggaggaggacgagagcatcctggacaccgtcatcaagtacctgcccgggccgctgcaggacatgctcaagaagtagccgcgcgcgggacagcggccccgcggagcccccgcccctccccctacagatcctccgcggaggcccctgagggacgagcagagcgcagcccccacgccgatataagccatagccccaggcccgccctgcccgcgcccgccgcctccctcacccggcaaggggcgcgcgcccccaggacccccccagtccgccccgtgctcctctgcccgcgggtggctggagccccatcgcctgggacgcccctttctcttgctgtttaccgcccacccagcagcgcccgaggccagggccgccgaagggcagccccgcgaccacccctgtgcgcgcgttcgcggcggtgggcgcctgtcgggcccgcactcaggagcacagccatagcagacggggggctgcgggcggggcgagggcggcggggcctgggtccccctcctgcacgcggactccggggttcggatcgctccgccgtgagtatttgcgtccgcacgcggccgctctccgccccccggcctggccccctcgcgcccctgtccatccgtctctgtccgcgtcctttcctctcctctctggaaggttttgcttcttacgaacgccacggccgtgttcacttctaaactaaaggaaacaaagcaataggtttgggggacgcccagcccccacccccgtcaccccgctcttcccaagtcctcgccccccgcccggcctcctagcctctccgcccacgcggctgctgcttctccctggggaggacccctgccctcggccattgaacactgcaccctccacaggagccgcagaggcccgaggcaccggacgctggagaccctgcgcccctgcccagcacctcctccgtgggcagctcctcgggtggggcctgcggggttccctgcgcgcagctggcgcgtgtgtggcctaatccacctggtggccctgcggggcggcatccgagcccctgtttctcctccattcatgtttaatttgcatcacaatttgttgaatctcaggtaaatgaggtctttgcatttaatgagttttatcttgacaggcgccgcctcgcccccgggccctttcgtccacatcaaaaatgcatcaagtctccacgtgtttcgggccagggcgtggcttggcattgaccttcatgaccttacatagctttagagaagccataacgttagactgcaatactaacgaccgacgcccctccgggcagagaccaccgcgcccctctgcgccccagcgacgcggcccgcggggacgtcgctgtccgtcctgctcgccctgtgccctctcactgacttctcccgggtcgtgtcttttaaaaactcctgttttcacaccttacaaagccagctctgagcagacagggcgtcctctcgtagaacctgcgcaccccgttcccagcgcatggcgccccgggccgcgagcttagcttagaccgtggtgtcctctgtccgtctgtcctgcgcctgcgcctcctcctgcatgtcggggcccctgcgtgtgttctctccggatggaatcacagccaataaacaccagtgatttca

SEQ ID NO: 166854 - DNA, 405 bp, Artificial Sequence
  derived and/or modified sequence
atggagttcgtgatgaagcaggccctgggcggcgccaccaaggacatgggcaagatgctgggcggcgacgaggagaaggaccccgacgccgccaagaaggaggaggagagacaggaggccctgagacaggccgaggaggagagaaaggccaagtacgccaagatggaggccgagagagaggccgtgagacagggcatcagagacaagtacggcatcaagaagaaggaggagagagaggccgaggcccaggccgccatggaggccaacagcgagggcagcctgaccagacccaagaaggccatcccccccggctgcggcgacgaggtggaggaggaggacgagagcatcctggacaccgtgatcaagtacctgcccggccccctgcaggacatgctgaagaagtag

SEQ ID NO: 166855 - protein, 461 aa, Artificial Sequence
  derived and/or modified sequence
MRPADLPPRPMEESPASSSAPTETEEPGSSAEVMEEVTTCSFNSPLFRQEDDRGITYRIPALLYIPPTHTFLAFAEKRSTRRDEDALHLVLRRGLRIGQLVQWGPLKPLMEATLPGHRTMNPCPVWEQKSGCVFLFFICVRGHVTERQQIVSGRNAARLCFIYSQDAGCSWSEVRDLTEEVIGSELKHWATFAVGPGHGIQLQSGRLVIPAYTYYIPSWFFCFQLPCKTRPHSLMIYSDDLGVTWHHGRLIRPMVTVECEVAEVTGRAGHPVLYCSARTPNRCRAEALSTDHGEGFQRLALSRQLCEPPHGCQGSVVSFRPLEIPHRCQDSSSKDAPTIQQSSPGSSLRLEEEAGTPSESWLLYSHPTSRKQRVDLGIYLNQTPLEAACWSRPWILHCGPCGYSDLAALEEEGLFGCLFECGTKQECEQIAFRLFTHREILSHLQGDCTSPGRNPSQFKSN

SEQ ID NO: 166856 - protein, 428 aa, Artificial Sequence
  derived and/or modified sequence
MEEVTTCSFNSPLFRQEDDRGITYRIPALLYIPPTHTFLAFAEKRSTRRDEDALHLVLRRGLRIGQLVQWGPLKPLMEATLPGHRTMNPCPVWEQKSGCVFLFFICVRGHVTERQQIVSGRNAARLCFIYSQDAGCSWSEVRDLTEEVIGSELKHWATFAVGPGHGIQLQSGRLVIPAYTYYIPSWFFCFQLPCKTRPHSLMIYSDDLGVTWHHGRLIRPMVTVECEVAEVTGRAGHPVLYCSARTPNRCRAEALSTDHGEGFQRLALSRQLCEPPHGCQGSVVSFRPLEIPHRCQDSSSKDAPTIQQSSPGSSLRLEEEAGTPSESWLLYSHPTSRKQRVDLGIYLNQTPLEAACWSRPWILHCGPCGYSDLAALEEEGLFGCLFECGTKQECEQIAFRLFTHREILSHLQGDCTSPGRNPSQFKSN

SEQ ID NO: 166857 - protein, 352 aa, Artificial Sequence
  derived and/or modified sequence
MEATLPGHRTMNPCPVWEQKSGCVFLFFICVRGHVTERQQIVSGRNAARLCFIYSQDAGCSWSEVRDLTEEVIGSELKHWATFAVGPGHGIQLQSGRLVIPAYTYYIPSWFFCFQLPCKTRPHSLMIYSDDLGVTWHHGRLIRPMVTVECEVAEVTGRAGHPVLYCSARTPNRCRAEALSTDHGEGFQRLALSRQLCEPPHGCQGSVVSFRPLEIPHRCQDSSSKDAPTIQQSSPGSSLRLEEEAGTPSESWLLYSHPTSRKQRVDLGIYLNQTPLEAACWSRPWILHCGPCGYSDLAALEEEGLFGCLFECGTKQECEQIAFRLFTHREILSHLQGDCTSPGRNPSQFKSN

SEQ ID NO: 166858 - DNA, 1386 bp, Artificial Sequence
  derived and/or modified sequence
atgaggcctgctgaccttccccccagaccgatggaggaatcgcctgccagcagtagtgcacctactgaaaccgaagaacccgggtcttccgccgaggttatggaggaggtgactacatgctcattcaatagccccctcttcagacaagaggacgaccggggcatcacctacagaatcccggctctgctgtacatacctcccacccacacctttctggcctttgctgagaagagatctactagacgtgatgaagatgccctccacttagtgttgcggcgcggactaagaatcggacagttggtccagtggggaccactgaaacccctgatggaagccacactaccagggcacaggacgatgaacccctgtccggtttgggaacagaaatctggttgtgtgtttctgttttttatctgtgttcgcgggcatgttaccgagagacagcagattgtttctggccgcaacgcagccaggctgtgttttatttactctcaggacgctgggtgcagctggtcagaagtccgcgacctcaccgaggaggtgatcggttctgaactgaaacactgggcgacatttgcagtgggacctggccacgggattcagcttcagtctggcaggctggtgattccggcgtatacgtattacattccctcctggtttttttgtttccagttgccgtgcaagacacggcctcactcccttatgatttacagcgatgatttgggagtaacatggcaccatgggagactcataagacctatggtcaccgtggaatgtgaggtagccgaggtcacaggccgcgctggccatccggtcctgtattgctctgcccgcactcccaaccgctgtagagccgaagctttaagcaccgaccatggtgaaggtttccagcgcctggctctcagccggcaactttgcgagccaccacacgggtgccagggctcagtagtgagctttcggccactggagattccccatcgctgccaagatagctccagcaaggacgccccgaccattcagcaatcctcacccggttctagtctgcggctggaggaagaggcaggaacaccttcggagagctggcttctctattcccatcccaccagcaggaaacagagggtggacctcggcatctatttgaaccagacacccctcgaggcagcatgctggtcacgtccctggatcctgcactgcgggccatgcggctactcggacctggcagcgctggaggaagaggggctttttggatgtctgttcgaatgtggaactaaacaggaatgcgagcagatcgcctttagactcttcacacatagagagatcctcagccacctgcagggtgactgtacctctccggggcggaatccctctcagttcaaaagcaattag

SEQ ID NO: 166859 - DNA, 1386 bp, Artificial Sequence
  derived and/or modified sequence
atgaggccggctgacctgccgcctaggccaatggaggaatctcctgcaagtagtagcgccccaacggagacagaggaaccgggttcgtcggcggaagtgatggaagaagtgacaacgtgtagcttcaattcgccccttttccgtcaagaagacgatcgcggaatcacctacaggattcccgcccttctgtatattccgcccacacatacattcctcgcctttgccgagaaaaggagtactcggagagatgaggatgcactgcatctggtgttgaggcgcggcctcagaattggtcagctggttcagtgggggccattaaagccactgatggaagctactctgccgggtcacaggacaatgaacccttgcccagtgtgggagcaaaagagtgggtgtgtgttcctgttctttatctgcgtgagaggccatgtgaccgagaggcagcagatcgtttctggacgcaacgctgctcgactgtgcttcatttattcacaagatgctggctgttcttggtccgaagtccgggacttgactgaggaagtaatcggttctgagctgaaacactgggcaacatttgcagtggggcccgggcacggtatacaacttcagagtggcaggctcgtaatcccagcttacacctactatattccctcttggttcttttgtttccagcttccatgcaaaacccgcccacactctctgatgatctattcggacgacctgggagtcacttggcaccacggaagactgattcgtccaatggtgactgtggagtgtgaggttgcagaagttacggggcgggccggacacccagtcctgtattgctccgcacggacccccaatcgctgtagggctgaagctctttccactgaccacggtgagggatttcagcgtctggccctgagtcggcagctgtgtgagcctcctcacggatgccaaggcagcgtggtgtcttttcggcctctcgaaatcccgcataggtgtcaggactctagcagcaaggacgcccctaccattcaacagagtagcccgggctcttccctgagactggaagaggaagccggcacaccgagcgagagctggttgttgtactcccatcctacctctaggaaacagagggtggacctgggaatttacctgaatcagacaccactcgaagctgcctgctggagtcgcccatggatattgcactgcggcccttgcggttatagtgatctggcagcactggaagaggagggcttatttgggtgcttgtttgaatgtggcaccaaacaggagtgcgagcagattgcctttaggctctttacccatcgtgagattctgtcccatttgcagggagattgcacatctcctgggaggaatccttctcagtttaagagcaattag

SEQ ID NO: 166860 - DNA, 1287 bp, Artificial Sequence
  derived and/or modified sequence
atggaggaagtgaccacttgtagtttcaactcaccactgtttcgacaggaggacgatcgggggattacttaccgcattcctgctctgctctatattccacccacccataccttcctcgcgtttgctgagaaaaggtccacacgaagagacgaggacgccctccatctagtgttacgccgcggccttcgcatcgggcaactagtgcagtggggcccgcttaaacctcttatggaagcgacccttccaggtcaccgcacaatgaacccatgccctgtttgggaacagaaatccggctgcgtcttcctgttttttatttgcgtgagagggcacgtaacagaaaggcagcaaattgtctctggtcgaaatgctgctcgattatgttttatctattcacaagacgcaggctgtagttggagtgaagtgcgcgacctgactgaagaggtgatcggaagtgagttgaaacattgggctaccttcgccgtgggtccagggcacggcattcagctgcaatctgggcgcttggttatccccgcctacacgtactatatcccctcctggttcttttgcttccagctaccttgcaaaacgcggccccactctctgatgatatattccgacgaccttggcgttacatggcaccacgggaggctgatacggcccatggtcacggtggagtgcgaagttgccgaggtgacgggtagagcaggacatcctgtgctgtactgctctgccagaacaccaaataggtgtagagcggaagctctgtcaaccgatcatggcgaaggattccaacgcttagctctgagccggcagctttgcgaaccacctcatggatgtcagggatctgtggtgagcttcagacccctcgagatccctcaccgctgtcaggacagctcctcaaaggatgcaccgacaatccaacaatcttccccaggctcttccttgcgcctggaagaagaggccggtacaccgtccgagtcctggctgctttactcccaccctaccagtagaaagcaacgggtggacctaggcatctacctgaatcagactccgctggaggcagcatgttggagccgcccgtggatcctgcactgtggcccctgcggatatagcgaccttgcggcactggaagaggagggactgtttggttgtttatttgagtgtgggaccaagcaggaatgcgaacagattgcctttcgactgttcacccaccgtgagatcctgtcacacttgcagggagattgcactagccctggaagaaatccgtcccagtttaaatccaattag

SEQ ID NO: 166861 - DNA, 1059 bp, Artificial Sequence
  derived and/or modified sequence
atggaagccaccctgcccgggcatcgcaccatgaacccatgcccagtctgggagcagaagtctggctgtgtgtttctgttctttatctgtgtgcgaggacatgtcacggagcgtcagcagattgtgagcggccgtaacgcagccagactatgctttatctattctcaggacgctggctgttcttggtcggaggttcgagatcttacggaagaggtaattggatcagagctcaaacactgggccacattcgccgtggggcctggacacggcatccagttacagtccgggcgtctcgtgatccccgcttatacatattacatcccaagctggtttttttgtttccagttaccatgtaaaacccggcctcattccttgatgatctatagcgacgacttaggagttacatggcaccacggacgattgatccgtcccatggtgaccgtagaatgcgaggtggcagaagtcacaggccgagcgggtcatcccgtcctttattgttccgctcgcactccgaatagatgtagagcagaagccctgtccaccgatcatggcgaaggcttccaacgcctcgccttgtcgcggcagctctgcgaacccccacacggatgccaggggtccgtcgtctcttttcgcccactggaaatcccacatcgttgccaggactcctccagcaaagacgcaccaaccatccagcagtcttcccctggctcctctctgcgcctcgaggaggaggcgggaacccctagcgagtcatggttactctacagccaccccacctctagaaagcagagggtcgacctcggtatctatttgaatcagactcctctggaagcagcatgctggtctcggccttggattctccactgtggcccgtgtggatacagcgacctcgcggcacttgaagaggagggattatttgggtgcctgtttgaatgcggcaccaaacaggaatgcgaacagatcgcattcaggctgttcacacatagggagatcttgagccacttacaaggtgactgcacaagtccaggccgcaatcccagccagtttaagagtaattag

SEQ ID NO: 166862 - DNA, 1386 bp, Artificial Sequence
  derived and/or modified sequence
atgaggcctgctgacctgcccccccggcccatggaggagagccctgccagcagcagcgcccccacagaaacagaggagcccggcagcagcgctgaggtgatggaggaggtgaccacctgcagcttcaacagccccctcttccggcaggaggatgaccggggcatcacctaccgcatcccagccctgctgtacatcccccccacccacaccttcctggcctttgctgagaagaggagcaccaggagagatgaagatgccctgcacctggtgctgcggcggggcctgagaattggccagctggtgcagtggggccccctgaagcccctgatggaggccaccctgcccggccacaggaccatgaacccctgccctgtgtgggagcagaagagcggctgtgtgttcctgttcttcatctgtgtgcggggccacgtgacagagcggcagcagatcgtgtctggaagaaatgctgcccggctgtgcttcatctacagccaggatgctggctgctcctggagcgaggtgcgggacctgacagaggaggtgattggcagcgagctgaagcactgggccacctttgctgtgggccctggccacggcatccagctgcagagcggccgcctggtgatcccagcctacacctactacatccccagctggttcttctgcttccagctgccctgcaagacccggccccacagcctgatgatctacagtgatgacctgggcgtgacctggcaccacggccgcctcatccggcccatggtgacagtggagtgtgaggtggccgaggtgacaggccgggccggccaccctgtgctgtactgcagcgcccggacccccaaccgctgcagagctgaggccctgagcacagaccacggggagggcttccagaggctggccctgagccggcagctgtgtgagcccccccacggctgccagggctctgtggtgtccttccggcccctggagatcccccaccgctgccaggacagcagcagcaaggatgcccccaccatccagcagagcagccctggcagcagcctgcggctggaggaggaggccggcacccccagcgagagctggctgctgtacagccaccccaccagcaggaagcagagggtggacctgggcatctacctgaaccagacccccctggaggccgcctgctggagccggccctggatcctgcactgcggcccctgtggctacagcgacctggccgccctggaggaggagggcctgtttggctgcctgtttgaatgtggcaccaagcaggagtgtgagcagatcgccttccgcctcttcacccaccgggagatcctgagccacctgcagggcgactgcaccagccctggaagaaaccccagccagttcaagagcaactag

SEQ ID NO: 166863 - DNA, 1287 bp, Artificial Sequence
  derived and/or modified sequence
atggaggaggtgaccacctgcagcttcaacagccccctcttccggcaggaggatgaccggggcatcacctaccgcatcccagccctgctgtacatcccccccacccacaccttcctggcctttgctgagaagaggagcaccaggagagatgaagatgccctgcacctggtgctgcggcggggcctgcgcatcggccagctggtgcagtggggccccctgaagcccctgatggaggccaccctgcccggccacaggaccatgaacccctgccctgtgtgggagcagaagagcggctgtgtgttcctgttcttcatctgtgtgcggggccacgtgacagagcggcagcagatcgtgtctggaagaaatgctgcccggctgtgcttcatctacagccaggatgctggctgctcctggagcgaggtgcgggacctgacagaggaggtgattggcagcgagctgaagcactgggccacctttgctgtgggccctggccacggcatccagctgcagagcggccgcctggtgatcccagcctacacctactacatccccagctggttcttctgcttccagctgccctgcaagacccggccccacagcctgatgatctacagtgatgacctgggcgtgacctggcaccacggccgcctcatccggcccatggtgacagtggagtgtgaggtggccgaggtgacaggccgggccggccaccctgtgctgtactgcagcgcccggacccccaaccgctgcagagctgaggccctgagcacagaccatggagagggcttccagaggctggccctgagccggcagctgtgtgagccccctcatggctgccagggctctgtggtgtccttccggcccctggagatcccccaccgctgccaggacagcagcagcaaggatgcccccaccatccagcagagcagccctggcagcagcctgcggctggaggaggaggccggcaccccatctgagagctggctgctgtacagccaccccaccagcaggaagcagagggtggacctgggcatctacctgaaccagacccccctggaggccgcctgctggagccggccctggatcctgcactgcggcccctgtggctacagcgacctggccgccctggaggaggagggcctgtttggctgcctgtttgaatgtggcaccaagcaggagtgtgagcagatcgccttccgcctcttcacccaccgggagatcctgagccacctgcagggcgactgcaccagccctggcaggaaccccagccagttcaagagcaactag

SEQ ID NO: 166864 - DNA, 1059 bp, Artificial Sequence
  derived and/or modified sequence
atggaggccaccctgcccggccacaggaccatgaacccctgccctgtgtgggagcagaagagcggctgtgtgttcctgttcttcatctgtgtgcggggccacgtgacagagcggcagcagatcgtgtctggaagaaatgctgcccggctgtgcttcatctacagccaggatgctggctgctcctggagcgaggtgcgggacctgacagaggaggtgattggcagcgagctgaagcactgggccacctttgctgtgggccctggccacggcatccagctgcagagcggccgcctggtgatcccagcctacacctactacatccccagctggttcttctgcttccagctgccctgcaagacccggccccacagcctgatgatctacagtgatgacctgggcgtgacctggcaccacggccgcctcatccggcccatggtgacagtggagtgtgaggtggccgaggtgacaggccgggccggccaccctgtgctgtactgcagcgcccggacccccaaccgctgcagagctgaggccctgagcacagaccatggagagggcttccagaggctggccctgagccggcagctgtgtgagccccctcatggctgccagggctctgtggtgtccttccggcccctggagatcccccaccgctgccaggacagcagcagcaaggatgcccccaccatccagcagagcagccctggcagcagcctgcggctggaggaggaggccggcaccccatctgagagctggctgctgtacagccaccccaccagcaggaagcagagggtggacctgggcatctacctgaaccagacccccctggaggccgcctgctggagccggccctggatcctgcactgcggcccctgtggctacagcgacctggccgccctggaggaggagggcctgtttggctgcctgtttgaatgtggcaccaagcaggagtgtgagcagatcgccttccgcctcttcacccaccgggagatcctgagccacctgcagggcgactgcaccagccctggcaggaaccccagccagttcaagagcaactag

SEQ ID NO: 166865 - DNA, 1386 bp, Artificial Sequence
  derived and/or modified sequence
atgcggcccgccgacctgcccccccggcccatggaggagagccccgcctcatcttctgccccgacagagaccgaggagcccgggtcaagtgccgaagtaatggaggaagttacaacatgttcctttaacagtcctctgtttcgacaggaagacgatagaggaatcacctataggataccagcgctgctctacatcccccccacccacactttcctcgcatttgccgaaaagagaagtaccaggagggatgaagacgcactccatcttgtgctcaggcgaggtctgcggattggacagttagtgcaatgggggcctctcaagccattgatggaggccaccttgcctggtcatcgcaccatgaacccttgccccgtctgggaacagaaatccggatgcgtatttttgttctttatctgtgtcaggggtcacgtgactgagagacagcagatcgtctcaggtaggaacgcagcgcggctctgtttcatatatagtcaggatgccgggtgcagctggtctgaagtgagggacttgactgaagaagtcattggatcagaactcaagcactgggccacctttgcagtcggccccggacacggaatacagctgcaatccgggaggctagtgataccggcatacacctattacatcccgtcgtggttcttttgcttccagctgccatgcaagaccaggccacatagtctaatgatctactctgacgacctgggggtcacttggcatcacggaagacttatccgacccatggtgacagtggagtgcgaagtagccgaggtgaccggtagagccggccacccagtgctgtactgctccgctaggacgccgaatagatgtcgagcagaagctctctcaactgaccacggggagggtttccagaggttggccttgagtcgacagctgtgtgagcccccgcatggatgtcagggcagcgtggtctcgtttaggccgctggaaattccacaccgatgccaggactcttcatctaaagacgcccccaccatccagcagtcgagccccgggtcgtctctcagattagaggaagaggcaggcacaccttcggagtcttggctcctgtattctcatccgacgtcgaggaagcaaagggttgatcttggtatttacctgaaccagacacccttggaggctgcgtgctggagccggccttggatcttgcattgtggcccatgtgggtatagtgatctagccgctctggaagaggagggcctcttcggctgcctcttcgagtgcgggaccaagcaggaatgtgagcagatcgccttcaggctcttcacccacagagaaattctctctcatctgcagggtgactgcacctccccaggaagaaaccctagccagttcaaaagcaactag

SEQ ID NO: 166866 - DNA, 1386 bp, Artificial Sequence
  derived and/or modified sequence
atgcggcccgccgacctgcccccccggcccatggaggagagccccgctagctctagtgcgcccacagagaccgaagaacccggatcgtcagcggaagtcatggaggaagttaccacctgttccttcaactctcccctgttcaggcaagaggacgatcgtgggataacctacagaatacctgcactgttgtacattcctccgacgcacactttcttagcgttcgcagaaaaacgctctacccggcgagatgaagatgccctacatctggtgctcagacgcggccttcggattggccagcttgtacagtggggccccctgaagccactcatggaagctacgctgcctggccaccgcacgatgaatccatgcccagtgtgggagcagaaatcagggtgcgtattcctgttctttatctgtgttcgaggacacgtgaccgaacgacagcagattgtatcagggaggaacgctgcccgtctgtgcttcatctatagccaggacgctgggtgctcttggtcagaggtgcgggacctgaccgaggaagtcatcggctcggagctgaagcactgggccactttcgctgttggccccggacatggcattcagcttcagagtgggcggctagttatacctgcctacacttattacatcccttcctggtttttttgtttccagctcccatgtaagaccaggccccactcactcatgatctatagtgacgacctcggtgtcacttggcatcatggtaggctgattaggcccatggtcactgtggagtgtgaggtcgccgaagtaaccggaagagccggccacccagtcttgtattgtagcgcgcggactcctaacaggtgccgagccgaagcactgagcacagaccacggcgagggatttcaacggcttgccctcagtcggcaactctgtgagcccccccatggctgccagggatcagtcgtgtctttccgccctctcgagatcccccacaggtgccaggattcgtcctctaaggacgcacctacaatccaacagagctcccccggtagtagcctgcggctggaagaagaggcaggaactccatccgaaagctggctcctgtacagccaccccacatccagaaagcagagagtggacctgggaatctacctgaatcagactcccttggaagcagcttgttggtctagaccttggatcctgcactgtgggccttgcggatactctgatctagccgcgttagaggaggaaggattgttcgggtgtctcttcgaatgcggcacaaagcaggagtgcgaacagattgcctttcgcctcttcactcacagggaaatcctcagccatctccagggcgactgcacctcgcccgggcgcaacccgtcgcaatttaaatctaactag

SEQ ID NO: 166867 - DNA, 1287 bp, Artificial Sequence
  derived and/or modified sequence
atggaggaggtgaccacctgcagcttcaacagccccctgttccggcaggaagacgacagaggaatcacgtaccgcatacctgcgttactctacatacctccaacccatacttttctggcattcgcagagaaacgctcaactaggagggacgaggatgccctgcacctggtattgagaagaggcctccgaattggacagctcgtgcagtggggccctctgaagccactgatggaggcaacactaccaggacacaggaccatgaacccgtgcccagtgtgggagcagaaaagtggctgcgtctttctgttcttcatctgtgtgcgaggacatgtgaccgaacgacagcagatcgttagtgggcggaacgcggctcgactgtgctttatttattctcaggacgctggatgctcttggtccgaagtcagggatcttacggaagaggtcatcggttccgagctgaaacattgggcgactttcgccgtgggcccaggccacggaatccagttacagagcggacgtctcgttattcccgcctatacatactatatcccaagttggtttttctgctttcagctcccatgcaaaaccaggccacacagcctcatgatttatagcgatgatctgggggtgacatggcatcatgggcgattgatcagacccatggttactgtcgaatgcgaggtagcagaagtaacaggacgggctggccaccccgtgctctattgctctgcccgtacccccaacaggtgcagggcagaggcactgagtaccgaccacggagaagggtttcagcgactggctttgagtcgccaactgtgtgaaccaccccatggatgccagggctctgtcgtgtcattccgacctttagagatcccacatagatgtcaggattctagtagcaaggatgcgccgactattcagcagtcatccccgggctcctctctgcggttagaggaagaggccggcacccccagcgaatcatggctgctgtacagccaccctacaagtcggaaacagcgtgttgacctcggtatctacctcaatcagacacctctcgaggccgcctgctggtcaaggccttggatattgcattgtgggccctgcggttattcagatctagccgccttggaggaagaaggtctcttcggatgtctctttgagtgtgggactaaacaagaatgtgaacagatagcatttaggctattcactcaccgggaaatactctctcacttgcagggtgattgtactagccccggacgaaaccctagccaattcaaaagcaactag

SEQ ID NO: 166868 - DNA, 1059 bp, Artificial Sequence
  derived and/or modified sequence
atggaggccaccctgcccggccaccggaccatgaacccctgccccgtctgggaacagaagtctggatgcgtatttctgttcttcatctgtgtgcggggacatgtcacagagcgacagcagatcgtgagcggcagaaatgccgctagactatgctttatatattcacaggacgctggctgctcctggtccgaggtgcgggacctcaccgaggaagtgattggtagtgaattaaagcattgggccaccttcgccgtagggccaggccatggcatccagctccaaagcggtagactggtcatccctgcgtatacctactatatcccttcctggttcttctgcttccagctgccctgtaagactcgcccccacagtttgatgatctactccgacgacctcggggtgacttggcaccacggcaggctgatccgtccgatggttacagtcgaatgtgaagtggccgaggtgacaggacgtgccggccaccctgttctttactgcagtgccaggaccccaaatcggtgtagagctgaagcgttatctacggaccacggggaggggtttcagagactcgcgctctctaggcagctgtgcgaaccacctcacggatgtcagggctctgtggtgtcctttcggcctcttgaaatcccacacaggtgccaggactccagcagtaaggacgcaccgactatacagcaatcgtcccccggaagtagcctgcggctcgaggaagaggccggcaccccctccgaatcatggttgttgtactcccaccccacctctaggaagcagcgggtggaccttggaatctatctgaatcagacacccctcgaagccgcctgctggagcaggccttggatcctgcactgcggaccctgtggatatagcgatcttgccgctctggaggaagagggcctctttggctgtctgtttgagtgtggaactaaacaggagtgcgagcagatagcgttccgcctgttcacacatcgagagattctgtcgcacttgcagggagattgtaccagccccggaagaaatccaagtcagtttaaatccaattag

SEQ ID NO: 166869 - DNA, 1386 bp, Artificial Sequence
  derived and/or modified sequence
atgcgcccagcagatctgcccccacggcctatggaggaaagccctgcaagcagcagcgcccctactgagactgaggagccaggaagtagcgctgaagtgatggaagaagtgaccacttgttcgttcaactctccactgttcagacaggaagacgaccggggaatcacatacagaatccccgcattgctgtatatcccaccaactcacactttccttgcatttgccgaaaaacgcagcacacgacgcgatgaagatgccctgcacttagtgctgaggcgcggtcttcgaatcggacagctcgtgcagtggggccctctcaaaccgctaatggaagccacattacccggtcaccggacgatgaacccatgccctgtgtgggagcagaaatccggctgtgtgttccttttcttcatatgcgtgcgcggacatgtgacagaacggcagcagattgtctctggccgtaatgctgccagattgtgcttcatttactcccaggatgccggttgttcgtggtcagaagtccgagatctcactgaagaggtcatcggctccgaactgaaacactgggccactttcgcagtgggacccggacatggaatccagctccaatcgggcaggctagtgatccccgcttatacatattacataccctcctggttcttctgctttcagctgccatgcaagaccagacctcactccctaatgatctactcggatgatttaggagtaacctggcaccacggaagactgatcagacccatggttacagttgagtgtgaggtggctgaagtgactgggagggccggacaccctgtgctttactgctcggccaggacccccaaccgctgtagggccgaggccctttccactgaccatggtgaggggttccaacgcttagctctctctaggcagctctgcgagcccccacatggttgccagggatctgtcgtgagctttagacctctagagatccctcatcggtgccaggactcatcatccaaggacgcacctacaattcagcaatcctccccaggaagttcactgcgtctggaggaggaagcgggtactcctagcgaatcatggctcctttacagccaccctacttcgcgcaaacagagagtggacctgggtatttatctgaaccagacacctttggaggctgcgtgttggtcacgcccatggattttgcattgcgggccatgtggatactcagatctggctgcactggaagaggagggactattcgggtgtctattcgagtgtggcacgaagcaggagtgcgaacagattgctttcagactcttcacccatcgggaaatcctgtcccatctgcaaggggattgcactagcccagggagaaatcctagccagttcaagtccaactag

SEQ ID NO: 166870 - DNA, 1386 bp, Artificial Sequence
  derived and/or modified sequence
atgaggcccgcagacttgccccctcggcctatggaagagtcccccgcaagcagtagtgctcccactgagaccgaggaacctggttccagcgccgaagtcatggaggaagtcaccacctgttcatttaattcaccactctttagacaggaggacgaccgcggtataacataccggatcccggctttactgtacattccgcctacccacacattcctggccttcgctgagaaacgctccacgcggagggacgaagatgctttgcacctggtgctacgacgcggtttgcggattggccagctcgtgcagtggggccctctcaaacctctgatggaggctaccctgcctggccataggaccatgaatccctgtcctgtttgggaacagaaatcgggctgtgtttttctgttcttcatctgtgtcaggggtcatgttaccgagcgccaacagattgtttctgggaggaacgctgcgagactatgttttatttacagtcaggacgcgggttgctcctggagcgaagtgcgcgatctaacagaggaggttatcggcagcgaacttaaacattgggccacatttgccgtcgggcctggacacggtattcaacttcagtccggtaggcttgtgattcccgcatatacatactacatcccctcatggtttttctgtttccagcttccctgtaaaactagacctcattctctgatgatctactcagatgacctgggggtaacgtggcatcatggacgtctcatccggcctatggttaccgtagagtgcgaagtggctgaagtgaccggcagagccggtcatcccgtgctgtattgctccgccagaacccccaacagatgccgggctgaagcccttagcactgatcacggtgaggggttccagagactagcgctgagtagacagctgtgcgagccaccacacggctgtcagggctccgtggtctcatttcgacccttagagatcccacatcggtgccaggactcatccagtaaggatgctccaacgatccagcagagcagccctggaagtagcctgcggcttgaggaagaggccggtacaccctcggaaagctggcttctgtacagccatcccactagtcgtaaacagagagtcgatctaggtatttaccttaatcagaccccacttgaggccgcttgctggtcacgtccgtggatcttgcactgcggcccatgcggctattctgacctggccgcactggaggaagaaggcctgttcggatgcctcttcgagtgtggtactaagcaagaatgcgagcagattgcctttagactgttcacccatcgcgaaattctgtctcacctccagggcgattgtactagccctggtcgcaatccctcccagttcaaatcaaactag

SEQ ID NO: 166871 - DNA, 1287 bp, Artificial Sequence
  derived and/or modified sequence
atggaggaggtcactacttgctccttcaactctcccctattccgccaggaggatgatcggggaataacctacaggattcctgccctgctatacataccccctactcatactttcttggcctttgcagaaaagaggagtaccagaagggatgaagacgctctgcatcttgtgctgcgacgcggtctgagaattggccagttagtacaatggggaccgctgaagccattgatggaggccacgctgcccggtcatcggacgatgaatccctgccctgtgtgggaacagaaaagcggttgcgtttttcttttcttcatctgcgtgagggggcacgtgaccgaacgtcagcagatcgtcagcgggaggaacgctgctagactgtgttttatctattcccaggacgccggttgtagctggagcgaagtcagagacctcaccgaagaggtgattggatccgaattgaaacactgggcaaccttcgccgtgggcccagggcatggcattcagctgcagtccgggaggctggttatcccagcctatacctactatattccttcttggtttttctgcttccagctgccctgcaagacacgccctcacagcctgatgatctactcagatgatttgggggtcacttggcatcacggcagactgatacggcctatggttaccgtcgaatgcgaggttgctgaggttaccggcagagccggtcacccggtcctgtactgttccgctaggacaccgaataggtgtagggccgaggcactgagcacagaccacggagaaggattccaaaggctcgcactgtcaagacaactgtgtgagcctcctcatggatgccagggtagcgtagtgtcatttcgccctctggagattcctcataggtgtcaggattcctcctctaaggatgcacctaccatccaacagagtagcccaggaagttcccttagattagaagaggaggccggtactccttcagaatcttggctgctatactcccacccaacctcccgaaagcagcgtgttgatttaggcatttatctgaaccagacaccacttgaggccgcttgctggtctcgcccatggatcttgcattgcggtccctgcggctactcggacttggcggctttggaggaggaggggctcttcggctgcttatttgaatgtggaactaaacaagaatgcgagcaaatcgctttcagactttttactcatagagaaattctttcccatcttcaaggagattgtacgtcccctggcaggaatccctcccagttcaaatcaaactag

SEQ ID NO: 166872 - DNA, 1059 bp, Artificial Sequence
  derived and/or modified sequence
atggaagcgaccctacccggacatagaacgatgaatccttgtcccgtatgggagcagaagagtggctgcgtgttcctgtttttcatttgtgttcgaggacatgtcactgaacggcaacagatcgtgtccgggaggaacgctgcccgactctgctttatctattcacaggatgcgggatgcagctggtcagaggttcgcgaccttactgaggaagtgatcggaagcgaactgaagcactgggcgacctttgccgtgggacctgggcacggaatacagcttcagtccgggaggctggtgatccccgcttacacctattacataccaagttggttcttctgctttcagcttccatgcaaaacgcggcctcattccctgatgatctatagcgatgatctcggcgtcacatggcaccatggccgtttgattaggccaatggttactgtcgaatgtgaggtagctgaagtcaccgggagggcgggacacccagtactgtactgcagtgctcgcactccaaacagatgtcgggctgaagctttgtctacagatcatggtgagggctttcagcgcctggcactgtcgagacagctgtgcgagccccctcacgggtgtcagggctctgtggttagcttcaggccactcgagatcccccacagatgccaggattcgagctctaaggatgcccctacgattcagcagtccagccctggcagtagtctgcgcctggaagaggaagctggtacaccgagcgaaagttggctgctctattcacatcctaccagcaggaagcaacgagtggatctgggtatttacctgaaccagaccccacttgaagcagcatgttggtcaaggccctggatccttcattgcgggccatgtggatacagcgatctggctgcactcgaggaagagggactgttcggatgcctctttgagtgtggcactaagcaggagtgcgagcagatcgccttccggctgtttactcaccgagagattctgagtcacctgcaaggagactgtacttctcctggtaggaatccgagtcaattcaagtctaactag

SEQ ID NO: 166873 - DNA, 3519 bp, Artificial Sequence
  derived and/or modified sequence
tttccttttattggcgtttgtaaaatttcttctttttaaaattgttatattttagagacagggtctcgctctgtcacccaggctggagtgcagtggtgcaatcacagctcaccacagcctccaactcctgggctcaaggcatcctcccacgtaggccttccaaagcgctgagattgtaggcataagccaccaggcccagcctattacctttacgttgtacttagtcccagataaaaaatgaccttagatcagtcctttcctctttggctggggagaggggggcttaaattccggtactgtgaaacagaagaatggactcagtgctatgtgacaaatctatgtatgtaaatgtgtgtatatacacacacataaattatatatatgaatatattttcattttcatattttgcaaggagagtagccaatgctctggacctctggtcctttttgtagggtaccctctgaggccgggaacctttgctcaactctcaggctgtccagggaagctttaggcggtgataccgagctacagaccaatataagagctcggggctgtggcactgaagagaggaggcggccgttgggaactgaggtgggcccagggcttgagctgagttggcgagggtggaggtggtgccggtcccacgccgtggtggggaccgagctgcgggctggagggaggggcagcgccgagggggcgggacggggagggctcgcggagtaggccaacggttggccccaaccgccactgactacagcctgcgcccgcctcttttcgttgccgttacctgtttccggcagtcgacacgctcttcgcttctcggggcttgtctccgtgtcctccgtctcagttgtttctccctctctatcctcctctgtctcagtctccccagccttggggccggtgcctcttccgggcttcggcgaatgagacctgcggacctgcccccgcgccccatggaagaatccccggcgtccagctctgccccgacagagacggaggagccggggtccagtgcagaggtcatggaagaagtgacaacatgctccttcaacagccctctgttccggcaggaagatgacagagggattacctaccggatcccagccctgctctacataccccccacccacaccttcctggcctttgcagagaagcgttctacgaggagagatgaggatgctctccacctggtgctgaggcgagggttgaggattgggcagttggtacagtgggggcccctgaagccactgatggaagccacactaccggggcatcggaccatgaacccctgtcctgtatgggagcagaagagtggttgtgtgttcctgttcttcatctgtgtgcggggccatgtcacagagcgtcaacagattgtgtcaggcaggaatgctgcccgcctttgcttcatctacagtcaggatgctggatgttcatggagtgaggtgagggacttgactgaggaggtcattggctcagagctgaagcactgggccacatttgctgtgggcccaggtcatggcatccagctgcagtcagggagactggtcatccctgcgtatacctactacatcccttcctggttcttttgcttccagctaccatgtaaaaccaggcctcattctctgatgatctacagtgatgacctaggggtcacatggcaccatggtagactcattaggcccatggttacagtagaatgtgaagtggcagaggtgactgggagggctggccaccctgtgctatattgcagtgcccggacaccaaacaggtgccgggcagaggcgctcagcactgaccatggtgaaggctttcagagactggccctgagtcgacagctctgtgagcccccacatggttgccaagggagtgtggtaagtttccggcccctggagatcccacataggtgccaggactctagcagcaaagatgcacccaccattcagcagagctctccaggcagttcactgaggctggaggaggaagctggaacaccgtcagaatcatggctcttgtactcacacccaaccagtaggaaacagagggttgacctaggtatctatctcaaccagacccccttggaggctgcctgctggtcccgcccctggatcttgcactgtgggccctgtggctactctgatctggctgctctggaggaggagggcttgtttgggtgtttgtttgaatgtgggaccaagcaagagtgtgagcagattgccttccgcctgtttacacaccgggagatcctgagtcacctgcagggggactgcaccagccctggtaggaacccaagccaattcaaaagcaattaattggcttaggacccaatttccatagatgcaaatggcagttacagacaggttaacagaagctactgaagtctacagataatcaaaaaacttaatattctgttccctaccttttttcacttttcctcctccaaagagcaaaatgaaaattttgccttagctactgcagtggaaagagcactgaactaggagttggaagacaaggatgtggtcctggctctgccactggcttgcttttggaccttggatgtgtcacctgaactctctggacctcaggtttccatctgtaaaatgagagtattggttctaagatttctcatcttctcatccctaggacaagcatagtgcctgcatgcttcatgatcagtaagtcctggctgcataaaggactctgatgtcaaaatggaaaccaggggacttaccttttcacatgacttacccctcatccgagtgtgaggttacaagcaggtgtcatggcaggaaggaagaccagatctgtatgatttgttccatttttaataacaaaaatatccacacccttttaataatgctcagttctgtaggctctctatcctagaggaattgagcaaaacagaagaatcatgaagtctcctaccttctacagccttgtagttctgcttaccttctcttcctcatccagaaagcatcattttctagggagaacaatgagaatctcaatgccagtagtactggataatagtgcgtattgcttctggtggcattaccctgatgatgggctgaagttcatttattagggtggttcctgatgggaaaaggacatggattaggactttaaaacactggacagaatttcccacagtctttgccctcaaggagttcaccagtttatggggctagaagagcgagaaaattcaagaaaataaatgtagctggtgggagactttgtagatgttgggctatatgttggggtgatggtagctcctgatgtaattttcttagttgcatcttcaatatgcctggagtcgtctgtccaaggcttgtccaggcttctgggtttctctcaagtttgtttttctcaggatattgtcctggcccagctactcctttacctgtgagaagatcttcaccattaggaagatctctagacccccagatctcagaatcaggcctatttgtgtaggcccatggaaatcactacttgtgaagtagagatgcctttttgtctaa

SEQ ID NO: 166874 - DNA, 2468 bp, Artificial Sequence
  derived and/or modified sequence
cccacgtaggccttccaaagcgctgagattgtaggcataagccaccaggcccagcctattacctttacgttgtacttagtcccagataaaaaatgaccttagatcagtcctttcctctttggctggggagaggggggcttaaattccggtactgtgaaacagaagaatggactcagtgctatgtgacaaatctatgtatgtaaatgtgtgtatatacacacacataaattatatatatgaatatattttcattttcatattttgcaaggagagtagccaatgctctggacctctggtcctttttgtagggtaccctctgaggccgggaacctttgctcaactctcaggctgtccagggaagctttaggcggtgataccgagctacagaccaatataagagctcggggctgtggcactgaagagaggaggcggccgttgggaactgagtctccccagccttggggccggtgcctcttccgggcttcggcgaatgagacctgcggacctgcccccgcgccccatggaagaatccccggcgtccagctctgccccgacagagacggaggagccggggtccagtgcagaggtcatggaagaagtgacaacatgctccttcaacagccctctgttccggcaggaagatgacagagggattacctaccggatcccagccctgctctacataccccccacccacaccttcctggcctttgcagagaagcgttctacgaggagagatgaggatgctctccacctggtgctgaggcgagggttgaggattgggcagttggtacagtgggggcccctgaagccactgatggaagccacactaccggggcatcggaccatgaacccctgtcctgtatgggagcagaagagtggttgtgtgttcctgttcttcatctgtgtgcggggccatgtcacagagcgtcaacagattgtgtcaggcaggaatgctgcccgcctttgcttcatctacagtcaggatgctggatgttcatggagtgaggtgagggacttgactgaggaggtcattggctcagagctgaagcactgggccacatttgctgtgggcccaggtcatggcatccagctgcagtcagggagactggtcatccctgcgtatacctactacatcccttcctggttcttttgcttccagctaccatgtaaaaccaggcctcattctctgatgatctacagtgatgacctaggggtcacatggcaccatggtagactcattaggcccatggttacagtagaatgtgaagtggcagaggtgactgggagggctggccaccctgtgctatattgcagtgcccggacaccaaacaggtgccgggcagaggcgctcagcactgaccatggtgaaggctttcagagactggccctgagtcgacagctctgtgagcccccacatggttgccaagggagtgtggtaagtttccggcccctggagatcccacataggtgccaggactctagcagcaaagatgcacccaccattcagcagagctctccaggcagttcactgaggctggaggaggaagctggaacaccgtcagaatcatggctcttgtactcacacccaaccagtaggaaacagagggttgacctaggtatctatctcaaccagacccccttggaggctgcctgctggtcccgcccctggatcttgcactgtgggccctgtggctactctgatctggctgctctggaggaggagggcttgtttgggtgtttgtttgaatgtgggaccaagcaagagtgtgagcagattgccttccgcctgtttacacaccgggagatcctgagtcacctgcagggggactgcaccagccctggtaggaacccaagccaattcaaaagcaattaattggcttaggacccaatttccatagatgcaaatggcagttacagacaggttaacagaagctactgaagtctacagataatcaaaaaacttaatattctgttccctaccttttttcacttttcctcctccaaagagcaaaatgaaaattttgccttagctactgcagtggaaagagcactgaactaggagttggaagacaaggatgtggtcctggctctgccactggcttgcttttggaccttggatgtgtcacctgaactctctggacctcaggtttccatctgtaaaatgagagtattggttctaagatttctcatcttctcatccctaggacaagcatagtgcctgcatgcttcatgatcagtaagtcctggctgcataaaggactctgatgtcaaaatggaaaccaggggacttaccttttcacatgacttacccctcatccgagtgtgaggttacaagcaggtgtcatggcaggaaggaagaccagatctgtatgatttgttccatttttaataacaaaaatatccacacccttttaataatgctcagttctgtaggctctctatcctagaggaattgagcaaaacag

SEQ ID NO: 166875 - DNA, 2049 bp, Artificial Sequence
  derived and/or modified sequence
agagaggaggcggccgttgggaactgagtctccccagccttggggccggtgcctcttccgggcttcggcgaatgagacctgcggacctgcccccgcgccccatggaagaatccccggcgtccagctctgccccgacagagacggaggagccggggtccagtgcagaggtcatggaagaagtgacaacatgctccttcaacagccctctgttccggcaggaagatgacagagggattacctaccggatcccagccctgctctacataccccccacccacaccttcctggcctttgcagagaagcgttctacgaggagagatgaggatgctctccacctggtgctgaggcgagggttgaggattgggcagttggtacagtgggggcccctgaagccactgatggaagccacactaccggggcatcggaccatgaacccctgtcctgtatgggagcagaagagtggttgtgtgttcctgttcttcatctgtgtgcggggccatgtcacagagcgtcaacagattgtgtcaggcaggaatgctgcccgcctttgcttcatctacagtcaggatgctggatgttcatggagtgaggtgagggacttgactgaggaggtcattggctcagagctgaagcactgggccacatttgctgtgggcccaggtcatggcatccagctgcagtcagggagactggtcatccctgcgtatacctactacatcccttcctggttcttttgcttccagctaccatgtaaaaccaggcctcattctctgatgatctacagtgatgacctaggggtcacatggcaccatggtagactcattaggcccatggttacagtagaatgtgaagtggcagaggtgactgggagggctggccaccctgtgctatattgcagtgcccggacaccaaacaggtgccgggcagaggcgctcagcactgaccatggtgaaggctttcagagactggccctgagtcgacagctctgtgagcccccacatggttgccaagggagtgtggtaagtttccggcccctggagatcccacataggtgccaggactctagcagcaaagatgcacccaccattcagcagagctctccaggcagttcactgaggctggaggaggaagctggaacaccgtcagaatcatggctcttgtactcacacccaaccagtaggaaacagagggttgacctaggtatctatctcaaccagacccccttggaggctgcctgctggtcccgcccctggatcttgcactgtgggccctgtggctactctgatctggctgctctggaggaggagggcttgtttgggtgtttgtttgaatgtgggaccaagcaagagtgtgagcagattgccttccgcctgtttacacaccgggagatcctgagtcacctgcagggggactgcaccagccctggtaggaacccaagccaattcaaaagcaattaattggcttaggacccaatttccatagatgcaaatggcagttacagacaggttaacagaagctactgaagtctacagataatcaaaaaacttaatattctgttccctaccttttttcacttttcctcctccaaagagcaaaatgaaaattttgccttagctactgcagtggaaagagcactgaactaggagttggaagacaaggatgtggtcctggctctgccactggcttgcttttggaccttggatgtgtcacctgaactctctggacctcaggtttccatctgtaaaatgagagtattggttctaagatttctcatcttctcatccctaggacaagcatagtgcctgcatgcttcatgatcagtaagtcctggctgcataaaggactctgatgtcaaaatggaaaccaggggacttaccttttcacatgacttacccctcatccgagtgtgaggttacaagcaggtgtcatggcaggaaggaagaccagatctgtatgatttgttccatttttaataacaaaaatatccacacccttttaataatgctcagttctgtaggctctctatcctagaggaattgagcaaaacag

SEQ ID NO: 166876 - DNA, 1632 bp, Artificial Sequence
  derived and/or modified sequence
cttcgcttctcggggcttgtctccgtgtcctccgtctcagttgtttctccctctctatcctcctctgtctcagtctccccagccttggggccggtgcctcttccgggcttcggcgaatgagacctgcggacctgcccccgcgccccatggaagaatccccggcgtccagctctgccccgacagagacggaggagccggggtccagtgcagtgggggcccctgaagccactgatggaagccacactaccggggcatcggaccatgaacccctgtcctgtatgggagcagaagagtggttgtgtgttcctgttcttcatctgtgtgcggggccatgtcacagagcgtcaacagattgtgtcaggcaggaatgctgcccgcctttgcttcatctacagtcaggatgctggatgttcatggagtgaggtgagggacttgactgaggaggtcattggctcagagctgaagcactgggccacatttgctgtgggcccaggtcatggcatccagctgcagtcagggagactggtcatccctgcgtatacctactacatcccttcctggttcttttgcttccagctaccatgtaaaaccaggcctcattctctgatgatctacagtgatgacctaggggtcacatggcaccatggtagactcattaggcccatggttacagtagaatgtgaagtggcagaggtgactgggagggctggccaccctgtgctatattgcagtgcccggacaccaaacaggtgccgggcagaggcgctcagcactgaccatggtgaaggctttcagagactggccctgagtcgacagctctgtgagcccccacatggttgccaagggagtgtggtaagtttccggcccctggagatcccacataggtgccaggactctagcagcaaagatgcacccaccattcagcagagctctccaggcagttcactgaggctggaggaggaagctggaacaccgtcagaatcatggctcttgtactcacacccaaccagtaggaaacagagggttgacctaggtatctatctcaaccagacccccttggaggctgcctgctggtcccgcccctggatcttgcactgtgggccctgtggctactctgatctggctgctctggaggaggagggcttgtttgggtgtttgtttgaatgtgggaccaagcaagagtgtgagcagattgccttccgcctgtttacacaccgggagatcctgagtcacctgcagggggactgcaccagccctggtaggaacccaagccaattcaaaagcaattaattggcttaggacccaatttccatagatgcaaatggcagttacagacaggttaacagaagctactgaagtctacagataatcaaaaaacttaatattctgttccctaccttttttcacttttcctcctccaaagagcaaaatgaaaattttgccttagctactgcagtggaaagagcactgaactaggagttggaagacaaggatgtggtcctggctctgccactggcttgcttttggaccttggatgtgtcacctgaactctctggacctcaggtttccatctgtaaaatgagagtattggttctaagatttctcatcttctcatccctaggacaagcatag

SEQ ID NO: 166877 - DNA, 1386 bp, Artificial Sequence
  derived and/or modified sequence
atgagacccgccgacctgccccccagacccatggaggagagccccgccagcagcagcgcccccaccgagaccgaggagcccggcagcagcgccgaggtgatggaggaggtgaccacctgcagcttcaacagccccctgttcagacaggaggacgacagaggcatcacctacagaatccccgccctgctgtacatcccccccacccacaccttcctggccttcgccgagaagagaagcaccagaagagacgaggacgccctgcacctggtgctgagaagaggcctgagaatcggccagctggtgcagtggggccccctgaagcccctgatggaggccaccctgcccggccacagaaccatgaacccctgccccgtgtgggagcagaagagcggctgcgtgttcctgttcttcatctgcgtgagaggccacgtgaccgagagacagcagatcgtgagcggcagaaacgccgccagactgtgcttcatctacagccaggacgccggctgcagctggagcgaggtgagagacctgaccgaggaggtgatcggcagcgagctgaagcactgggccaccttcgccgtgggccccggccacggcatccagctgcagagcggcagactggtgatccccgcctacacctactacatccccagctggttcttctgcttccagctgccctgcaagaccagaccccacagcctgatgatctacagcgacgacctgggcgtgacctggcaccacggcagactgatcagacccatggtgaccgtggagtgcgaggtggccgaggtgaccggcagagccggccaccccgtgctgtactgcagcgccagaacccccaacagatgcagagccgaggccctgagcaccgaccacggcgagggcttccagagactggccctgagcagacagctgtgcgagcccccccacggctgccagggcagcgtggtgagcttcagacccctggagatcccccacagatgccaggacagcagcagcaaggacgcccccaccatccagcagagcagccccggcagcagcctgagactggaggaggaggccggcacccccagcgagagctggctgctgtacagccaccccaccagcagaaagcagagagtggacctgggcatctacctgaaccagacccccctggaggccgcctgctggagcagaccctggatcctgcactgcggcccctgcggctacagcgacctggccgccctggaggaggagggcctgttcggctgcctgttcgagtgcggcaccaagcaggagtgcgagcagatcgccttcagactgttcacccacagagagatcctgagccacctgcagggcgactgcaccagccccggcagaaaccccagccagttcaagagcaactag

SEQ ID NO: 166878 - DNA, 1287 bp, Artificial Sequence
  derived and/or modified sequence
atggaggaggtgaccacctgcagcttcaacagccccctgttcagacaggaggacgacagaggcatcacctacagaatccccgccctgctgtacatcccccccacccacaccttcctggccttcgccgagaagagaagcaccagaagagacgaggacgccctgcacctggtgctgagaagaggcctgagaatcggccagctggtgcagtggggccccctgaagcccctgatggaggccaccctgcccggccacagaaccatgaacccctgccccgtgtgggagcagaagagcggctgcgtgttcctgttcttcatctgcgtgagaggccacgtgaccgagagacagcagatcgtgagcggcagaaacgccgccagactgtgcttcatctacagccaggacgccggctgcagctggagcgaggtgagagacctgaccgaggaggtgatcggcagcgagctgaagcactgggccaccttcgccgtgggccccggccacggcatccagctgcagagcggcagactggtgatccccgcctacacctactacatccccagctggttcttctgcttccagctgccctgcaagaccagaccccacagcctgatgatctacagcgacgacctgggcgtgacctggcaccacggcagactgatcagacccatggtgaccgtggagtgcgaggtggccgaggtgaccggcagagccggccaccccgtgctgtactgcagcgccagaacccccaacagatgcagagccgaggccctgagcaccgaccacggcgagggcttccagagactggccctgagcagacagctgtgcgagcccccccacggctgccagggcagcgtggtgagcttcagacccctggagatcccccacagatgccaggacagcagcagcaaggacgcccccaccatccagcagagcagccccggcagcagcctgagactggaggaggaggccggcacccccagcgagagctggctgctgtacagccaccccaccagcagaaagcagagagtggacctgggcatctacctgaaccagacccccctggaggccgcctgctggagcagaccctggatcctgcactgcggcccctgcggctacagcgacctggccgccctggaggaggagggcctgttcggctgcctgttcgagtgcggcaccaagcaggagtgcgagcagatcgccttcagactgttcacccacagagagatcctgagccacctgcagggcgactgcaccagccccggcagaaaccccagccagttcaagagcaactag

SEQ ID NO: 166879 - DNA, 1059 bp, Artificial Sequence
  derived and/or modified sequence
atggaggccaccctgcccggccacagaaccatgaacccctgccccgtgtgggagcagaagagcggctgcgtgttcctgttcttcatctgcgtgagaggccacgtgaccgagagacagcagatcgtgagcggcagaaacgccgccagactgtgcttcatctacagccaggacgccggctgcagctggagcgaggtgagagacctgaccgaggaggtgatcggcagcgagctgaagcactgggccaccttcgccgtgggccccggccacggcatccagctgcagagcggcagactggtgatccccgcctacacctactacatccccagctggttcttctgcttccagctgccctgcaagaccagaccccacagcctgatgatctacagcgacgacctgggcgtgacctggcaccacggcagactgatcagacccatggtgaccgtggagtgcgaggtggccgaggtgaccggcagagccggccaccccgtgctgtactgcagcgccagaacccccaacagatgcagagccgaggccctgagcaccgaccacggcgagggcttccagagactggccctgagcagacagctgtgcgagcccccccacggctgccagggcagcgtggtgagcttcagacccctggagatcccccacagatgccaggacagcagcagcaaggacgcccccaccatccagcagagcagccccggcagcagcctgagactggaggaggaggccggcacccccagcgagagctggctgctgtacagccaccccaccagcagaaagcagagagtggacctgggcatctacctgaaccagacccccctggaggccgcctgctggagcagaccctggatcctgcactgcggcccctgcggctacagcgacctggccgccctggaggaggagggcctgttcggctgcctgttcgagtgcggcaccaagcaggagtgcgagcagatcgccttcagactgttcacccacagagagatcctgagccacctgcagggcgactgcaccagccccggcagaaaccccagccagttcaagagcaactag

SEQ ID NO: 166880 - protein, 155 aa, Artificial Sequence
  derived and/or modified sequence
MMSTEQMQPLELSEDRLDKLDPRCSHLDDLSDQFIKDCDLKKKPRKGKNVQATLNVESDQKKPRRKDTPALHIPPFIPGVFSEHLIKRYDVQERHPKGKMIPVLHNTDLEQKKPRRKDTPALHMSPFAAGVTLLRDERPKAIVEDDEKDGDKIAI

SEQ ID NO: 166881 - DNA, 468 bp, Artificial Sequence
  derived and/or modified sequence
atgatgagcaccgagcagatgcagcccctggagctgagcgaggacagactggacaagctggaccccagatgcagccacctggacgacctgagcgaccagttcatcaaggactgcgacctgaagaagaagcccagaaagggcaagaacgtgcaggccaccctgaacgtggagagcgaccagaagaagcccagaagaaaggacacccccgccctgcacatcccccccttcatccccggcgtgttcagcgagcacctgatcaagagatacgacgtgcaggagagacaccccaagggcaagatgatccccgtgctgcacaacaccgacctggagcagaagaagcccagaagaaaggacacccccgccctgcacatgagccccttcgccgccggcgtgaccctgctgagagacgagagacccaaggccatcgtggaggacgacgagaaggacggcgacaagatcgccatctag

SEQ ID NO: 166882 - DNA, 468 bp, Artificial Sequence
  derived and/or modified sequence
atgatgagcaccgaacaaatgcagccccttgagcttagtgaggatagactggacaagttggatcctcgatgcagtcacctggatgatctgagtgaccagttcattaaggattgtgatctcaagaaaaaaccacgtaagggaaaaaatgtgcaagctacccttaacgtggagagcgaccagaaaaaaccccgaagaaaagacactcctgcactccacatccctccattcattcctggcgtgttctctgaacaccttataaaaaggtatgacgtacaggagcggcaccccaaaggcaagatgatccccgtgttgcataacaccgacctcgagcagaagaaaccacgcagaaaggacacccccgctctgcacatgagcccttttgcggctggcgttaccttgctccgggacgagaggcctaaagcaatagtcgaagacgacgagaaggacggggacaaaatagccatatag

SEQ ID NO: 166883 - DNA, 468 bp, Artificial Sequence
  derived and/or modified sequence
atgatgagcacagagcagatgcagcccctggagctgtctgaggaccggctggacaagctggacccccgctgcagccacctggatgacctgagtgaccagttcatcaaggactgtgacctgaagaagaagcccaggaagggcaagaatgtgcaggccaccctgaatgtggagagtgaccagaagaagcccaggaggaaggacaccccagccctgcacatcccccccttcatccctggggtcttcagcgagcacctgatcaagagatatgatgtgcaggagcggcaccccaagggcaagatgatccctgtgctgcacaacacagacctggagcagaagaagcccaggaggaaggacaccccagccctgcacatgagcccctttgctgctggggtgaccctgctgagagatgagcggcccaaggccatcgtggaggatgatgagaaggatggagacaagatcgccatctag

SEQ ID NO: 166884 - DNA, 468 bp, Artificial Sequence
  derived and/or modified sequence
atgatgagcaccgagcagatgcagcccctggagctgagcgaggaccggctagataaacttgatccccgctgctctcacttggacgatctgtcagaccagtttattaaggactgcgatcttaagaaaaagccgagaaaaggaaagaacgtccaagctacactgaatgttgagtctgaccagaagaaaccaaggcgcaaggacactccggctctgcacattccaccattcataccaggagtgttcagcgagcacctgatcaaaaggtatgatgtgcaggagcgccaccctaagggcaaaatgatccctgtgctgcataacactgatctggagcagaaaaaacctagacgcaaagacacccccgcactccacatgtctccatttgccgctggggtcaccctactacgcgacgagcgacccaaggccattgtcgaagatgatgagaaggacggagataagatagccatttag

SEQ ID NO: 166885 - DNA, 468 bp, Artificial Sequence
  derived and/or modified sequence
atgatgagcacggagcagatgcagccactggaattgagcgaagatcggctcgacaagctcgatccgaggtgtagtcatcttgacgatctgtcggaccagtttattaaagattgcgacctgaagaagaagcctcggaaaggtaagaacgtccaagctacactgaacgtcgaaagcgaccagaaaaagcctagaaggaaggataccccagctcttcacattccgccatttatccccggagttttttccgagcatctgatcaaaaggtacgatgtccaggagcggcatcccaaaggaaaaatgatacctgtattacacaacactgacctggaacagaagaagccgagaagaaaagacacccctgcattacacatgtcccctttcgctgctggcgtaacactactcagagatgagcgcccaaaggctatcgtagaggatgacgagaaggatggtgacaaaatagcgatatag

SEQ ID NO: 166886 - DNA, 2268 bp, Artificial Sequence
  derived and/or modified sequence
gtaagtagatatgtgtgaagtctctagaagagtgtctggcattttggtagccttacataaatgttagcagtagctacccttctcttcctcctcatgatagtactttgagaagcagcaatagtgattgaaagtactctggatttaaacttaaatagctttgagagtcgaaattagctgtggcctctcttgggcatatcacttaacttcttgtgcctcagtttccatatttacaaaatcaggccaaaaaaaatctatcgcatgggaattcaatgatgtagctggtttgtctgaatttctctggtgtgcacaccggaaactcaaagcacgactctatactgtacttttgtaatgtacaatgattgccgtggagagcagcgatggagatgttagtcctctttccttctccatcccccttgccctggtgcctgtgaaacagagcatccccatggcaacagcagcagctggtccctagataagaggagctggagccggccagcagcagccactgccgcagaggagccaggcccagcctcggtgagcacacacgccctccctgtctctcgccttcgcttccctgcatctgcgctgattgtgctggagaagaaatacatccacccaccctcctttgatgatgtccactgagcaaatgcagccactggaactctcagaagacagactggacaagctagaccctcgttgcagccacttagatgatctttcagaccagttcattaaggactgtgatctcaaaaagaagcctagaaagggaaaaaatgtacaggccaccctgaatgttgagtcagaccaaaaaaaaccaaggaggaaagatacaccggcgctgcacatcccacctttcataccaggtgtgttttcagaacatttaattaaaagatacgatgttcaagagagacatccaaagggcaaaatgatccctgttcttcataacactgacctggaacagaaaaagccaaggagaaaagacacacctgccctgcacatgtccccctttgcagcaggtgtgacattgctcagggacgagagacccaaagcaatcgtggaagatgacgaaaaggatggtgacaagatagctatttaaagatagttcccctgagaccacttgtaaataggttagattggttccctgtggtgacctagagaaaaaatagacttgtttctgctctcatttttgtcatcgtctgacttgaagattcagacaccttctccccaggagatgtatgccatcaaattgccagtcacctctttgtctctctcttctttctgagtatggtttctattctgtgttttgaatttttattttctaatgcagtggaaaagaaacagatcatcctaaatgaggaggtaacagggaaagcactggggttcggtttctgcatcttctggatcaattcacggaacagagatcgtggattacatgggctccttcttggtttttgctgctgggcaggacttgacttagcattatccaagcaccagtccaagtggggttccctgttgccagttagagaggtgagaatgtttggactctaactcaccgattgctttgcagacaaaggtcttttatttctcctgtcctatcttaagagtccaaatgtctctggtgatgttcctaagacccttgtcccagatactctaaatgtgaatgtatgagctgggggagtcaacccagcccaccatgccttggctgatgataccagaggcagagagtgctggtctgtctgggaagcttagcaatgtatcttcaaatttatttttgtttttaaaaatatttcttaaacatgctgtcccaacatttgtgagttgtgtcacaagtgagtcattatcaatggtagataaaatatcaatgtttgtgatgaatttactgtaaaaaaattaaggtcaatgaaagccattctgttatttttagcattctcacttatttagactctattacactttcttggatgagaggggagagtgtggtgttagctagtgagcagaggtctgtatattgtccttgccccagcctgcaatctgtggatgcccaggggaaggcatacaggcctcatccaccaggcaatagacaggagagaggtgagaactatttttagaaggaggaaaagtagatacgcaaattgtcacaactaagagtgataatttggtagctctgtatgtatgctggttccaactgtttaatcccttctgtctttctgttctcacaaagatggaaaagatacaagagcttgccggaaataaagctacatctatcca

SEQ ID NO: 166887 - protein, 902 aa, Artificial Sequence
  derived and/or modified sequence
MSEFRIHHDVNELLSLLRVHGGDGAEVYIDLLQKNRTPYVTTTVSAHSAKVKIAEFSRTPEDFLKKYDELKSKNTRNLDPLVYLLSKLTEDKETLQYLQQNAKERAELAAAAVGSSTTSINVPAAASKISMQELEELRKQLGSVATGSTLQQSLELKRKMLRDKQNKKNSGQHLPIFPAWVYERPALIGDFLIGAGISTDTALPIGTLPLASQESAVVEDLLYVLVGVDGRYVSAQPLAGRQSRTFLVDPNLDLSIRELVHRILPVAASYSAVTRFIEEKSSFEYGQVNHALAAAMRTLVKEHLILVSQLEQLHRQGLLSLQKLWFYIQPAMRTMDILASLATSVDKGECLGGSTLSLLHDRSFSYTGDSQAQELCLYLTKAASAPYFEVLEKWIYRGIIHDPYSEFMVEEHELRKERIQEDYNDKYWDQRYTIVQQQIPSFLQKMADKILSTGKYLNVVRECGHDVTCPVAKEIIYTLKERAYVEQIEKAFNYASKVLLDFLMEEKELVAHLRSIKRYFLMDQGDFFVHFMDLAEEELRKPVEDITPPRLEALLELALRMSTANTDPFKDDLKIDLMPHDLITQLLRVLAIETKQEKAMAHADPTELALSGLEAFSFDYIVKWPLSLIINRKALTRYQMLFRHMFYCKHVERQLCSVWISNKTAKQHSLHSAQWFAGAFTLRQRMLNFVQNIQYYMMFEVMEPTWHILEKNLKSASNIDDVLGHHTGFLDTCLKDCMLTNPELLKVFSKLMSVCVMFTNCMQKFTQSMKLDGELGGQTLEHSTVLGLPAGAEERARKELARKHLAEHADTVQLVSGFEATINKFDKNFSAHLLDLLARLSIYSTSDCEHGMASVISRLDFNGFYTERLERLSAERSQKATPQVPVLRGPPAPAPRVAVTAQ

SEQ ID NO: 166888 - protein, 495 aa, Artificial Sequence
  derived and/or modified sequence
MVEEHELRKERIQEDYNDKYWDQRYTIVQQQIPSFLQKMADKILSTGKYLNVVRECGHDVTCPVAKEIIYTLKERAYVEQIEKAFNYASKVLLDFLMEEKELVAHLRSIKRYFLMDQGDFFVHFMDLAEEELRKPVEDITPPRLEALLELALRMSTANTDPFKDDLKIDLMPHDLITQLLRVLAIETKQEKAMAHADPTELALSGLEAFSFDYIVKWPLSLIINRKALTRYQMLFRHMFYCKHVERQLCSVWISNKTAKQHSLHSAQWFAGAFTLRQRMLNFVQNIQYYMMFEVMEPTWHILEKNLKSASNIDDVLGHHTGFLDTCLKDCMLTNPELLKVFSKLMSVCVMFTNCMQKFTQSMKLDGELGGQTLEHSTVLGLPAGAEERARKELARKHLAEHADTVQLVSGFEATINKFDKNFSAHLLDLLARLSIYSTSDCEHGMASVISRLDFNGFYTERLERLSAERSQKATPQVPVLRGPPAPAPRVAVTAQ

SEQ ID NO: 166889 - protein, 772 aa, Artificial Sequence
  derived and/or modified sequence
MQELEELRKQLGSVATGSTLQQSLELKRKMLRDKQNKKNSGQHLPIFPAWVYERPALIGDFLIGAGISTDTALPIGTLPLASQESAVVEDLLYVLVGVDGRYVSAQPLAGRQSRTFLVDPNLDLSIRELVHRILPVAASYSAVTRFIEEKSSFEYGQVNHALAAAMRTLVKEHLILVSQLEQLHRQGLLSLQKLWFYIQPAMRTMDILASLATSVDKGECLGGSTLSLLHDRSFSYTGDSQAQELCLYLTKAASAPYFEVLEKWIYRGIIHDPYSEFMVEEHELRKERIQEDYNDKYWDQRYTIVQQQIPSFLQKMADKILSTGKYLNVVRECGHDVTCPVAKEIIYTLKERAYVEQIEKAFNYASKVLLDFLMEEKELVAHLRSIKRYFLMDQGDFFVHFMDLAEEELRKPVEDITPPRLEALLELALRMSTANTDPFKDDLKIDLMPHDLITQLLRVLAIETKQEKAMAHADPTELALSGLEAFSFDYIVKWPLSLIINRKALTRYQMLFRHMFYCKHVERQLCSVWISNKTAKQHSLHSAQWFAGAFTLRQRMLNFVQNIQYYMMFEVMEPTWHILEKNLKSASNIDDVLGHHTGFLDTCLKDCMLTNPELLKVFSKLMSVCVMFTNCMQKFTQSMKLDGELGGQTLEHSTVLGLPAGAEERARKELARKHLAEHADTVQLVSGFEATINKFDKNFSAHLLDLLARLSIYSTSDCEHGMASVISRLDFNGFYTERLERLSAERSQKATPQVPVLRGPPAPAPRVAVTAQ

SEQ ID NO: 166890 - DNA, 1488 bp, Artificial Sequence
  derived and/or modified sequence
atggtggaggagcacgagctgagaaaggagagaatccaggaggactacaacgacaagtactgggaccagagatacaccatcgtgcagcagcagatccccagcttcctgcagaagatggccgacaagatcctgagcaccggcaagtacctgaacgtggtgagagagtgcggccacgacgtgacctgccccgtggccaaggagatcatctacaccctgaaggagagagcctacgtggagcagatcgagaaggccttcaactacgccagcaaggtgctgctggacttcctgatggaggagaaggagctggtggcccacctgagaagcatcaagagatacttcctgatggaccagggcgacttcttcgtgcacttcatggacctggccgaggaggagctgagaaagcccgtggaggacatcaccccccccagactggaggccctgctggagctggccctgagaatgagcaccgccaacaccgaccccttcaaggacgacctgaagatcgacctgatgccccacgacctgatcacccagctgctgagagtgctggccatcgagaccaagcaggagaaggccatggcccacgccgaccccaccgagctggccctgagcggcctggaggccttcagcttcgactacatcgtgaagtggcccctgagcctgatcatcaacagaaaggccctgaccagataccagatgctgttcagacacatgttctactgcaagcacgtggagagacagctgtgcagcgtgtggatcagcaacaagaccgccaagcagcacagcctgcacagcgcccagtggttcgccggcgccttcaccctgagacagagaatgctgaacttcgtgcagaacatccagtactacatgatgttcgaggtgatggagcccacctggcacatcctggagaagaacctgaagagcgccagcaacatcgacgacgtgctgggccaccacaccggcttcctggacacctgcctgaaggactgcatgctgaccaaccccgagctgctgaaggtgttcagcaagctgatgagcgtgtgcgtgatgttcaccaactgcatgcagaagttcacccagagcatgaagctggacggcgagctgggcggccagaccctggagcacagcaccgtgctgggcctgcccgccggcgccgaggagagagccagaaaggagctggccagaaagcacctggccgagcacgccgacaccgtgcagctggtgagcggcttcgaggccaccatcaacaagttcgacaagaacttcagcgcccacctgctggacctgctggccagactgagcatctacagcaccagcgactgcgagcacggcatggccagcgtgatcagcagactggacttcaacggcttctacaccgagagactggagagactgagcgccgagagaagccagaaggccaccccccaggtgcccgtgctgagaggcccccccgcccccgcccccagagtggccgtgaccgcccagtag

SEQ ID NO: 166891 - DNA, 2319 bp, Artificial Sequence
  derived and/or modified sequence
atgcaggagctggaggagctgagaaagcagctgggcagcgtggccaccggcagcaccctgcagcagagcctggagctgaagagaaagatgctgagagacaagcagaacaagaagaacagcggccagcacctgcccatcttccccgcctgggtgtacgagagacccgccctgatcggcgacttcctgatcggcgccggcatcagcaccgacaccgccctgcccatcggcaccctgcccctggccagccaggagagcgccgtggtggaggacctgctgtacgtgctggtgggcgtggacggcagatacgtgagcgcccagcccctggccggcagacagagcagaaccttcctggtggaccccaacctggacctgagcatcagagagctggtgcacagaatcctgcccgtggccgccagctacagcgccgtgaccagattcatcgaggagaagagcagcttcgagtacggccaggtgaaccacgccctggccgccgccatgagaaccctggtgaaggagcacctgatcctggtgagccagctggagcagctgcacagacagggcctgctgagcctgcagaagctgtggttctacatccagcccgccatgagaaccatggacatcctggccagcctggccaccagcgtggacaagggcgagtgcctgggcggcagcaccctgagcctgctgcacgacagaagcttcagctacaccggcgacagccaggcccaggagctgtgcctgtacctgaccaaggccgccagcgccccctacttcgaggtgctggagaagtggatctacagaggcatcatccacgacccctacagcgagttcatggtggaggagcacgagctgagaaaggagagaatccaggaggactacaacgacaagtactgggaccagagatacaccatcgtgcagcagcagatccccagcttcctgcagaagatggccgacaagatcctgagcaccggcaagtacctgaacgtggtgagagagtgcggccacgacgtgacctgccccgtggccaaggagatcatctacaccctgaaggagagagcctacgtggagcagatcgagaaggccttcaactacgccagcaaggtgctgctggacttcctgatggaggagaaggagctggtggcccacctgagaagcatcaagagatacttcctgatggaccagggcgacttcttcgtgcacttcatggacctggccgaggaggagctgagaaagcccgtggaggacatcaccccccccagactggaggccctgctggagctggccctgagaatgagcaccgccaacaccgaccccttcaaggacgacctgaagatcgacctgatgccccacgacctgatcacccagctgctgagagtgctggccatcgagaccaagcaggagaaggccatggcccacgccgaccccaccgagctggccctgagcggcctggaggccttcagcttcgactacatcgtgaagtggcccctgagcctgatcatcaacagaaaggccctgaccagataccagatgctgttcagacacatgttctactgcaagcacgtggagagacagctgtgcagcgtgtggatcagcaacaagaccgccaagcagcacagcctgcacagcgcccagtggttcgccggcgccttcaccctgagacagagaatgctgaacttcgtgcagaacatccagtactacatgatgttcgaggtgatggagcccacctggcacatcctggagaagaacctgaagagcgccagcaacatcgacgacgtgctgggccaccacaccggcttcctggacacctgcctgaaggactgcatgctgaccaaccccgagctgctgaaggtgttcagcaagctgatgagcgtgtgcgtgatgttcaccaactgcatgcagaagttcacccagagcatgaagctggacggcgagctgggcggccagaccctggagcacagcaccgtgctgggcctgcccgccggcgccgaggagagagccagaaaggagctggccagaaagcacctggccgagcacgccgacaccgtgcagctggtgagcggcttcgaggccaccatcaacaagttcgacaagaacttcagcgcccacctgctggacctgctggccagactgagcatctacagcaccagcgactgcgagcacggcatggccagcgtgatcagcagactggacttcaacggcttctacaccgagagactggagagactgagcgccgagagaagccagaaggccaccccccaggtgcccgtgctgagaggcccccccgcccccgcccccagagtggccgtgaccgcccagtag

SEQ ID NO: 166892 - DNA, 2709 bp, Artificial Sequence
  derived and/or modified sequence
atgtctgaattccggatccaccacgacgtgaatgaactgttaagtctactgcgcgtgcacggaggggatggggcggaggtgtacatcgatctcctccagaaaaaccgcaccccgtatgtcactaccaccgtgtctgctcattcagcgaaagtgaaaattgccgaatttagtcgcacacccgaggacttccttaagaaatacgatgagctgaagagtaaaaatactagaaacctggatcccctggtgtatctgctgagcaaattaactgaggacaaagagacccttcagtacctgcaacagaatgcaaaggagcgggctgaactagcggccgccgccgtgggctcgtctacaacctctattaatgtcccggcagcagcaagcaagataagcatgcaggaactcgaggagctgagaaaacaactgggatctgtggcaaccggcagcactctgcagcagtctctcgagctgaagcgaaagatgctccgagacaaacagaataagaaaaacagcgggcagcatttgcctatatttccggcgtgggtgtatgagagacctgctcttataggagacttcctcattggcgccgggatcagcacggacacggcactacctatcggtaccctcccgctggcgtcccaggagtccgccgtggttgaagacttgctgtatgtgcttgttggcgtcgacggcaggtatgtttccgcccagccactggctggacgacaatcccggaccttcttagtagacccaaaccttgatctgtccatccgggaactggtgcatagaatcctgccagtcgctgcctcgtatagcgcagtgacaagatttatagaggaaaagagcagcttcgagtacgggcaagtgaatcacgccctggctgcagctatgcgcactctagtgaaggaacaccttatcttagtgtcccaactggaacagctgcacagacaaggactgctaagccttcagaaactttggttctacatacagcccgccatgaggacgatggacattttggcatccctagccacaagtgtcgacaaaggcgagtgcctaggcggcagcacgcttagcctgctgcatgataggtcattcagttacacaggagactctcaggctcaagaactgtgcctttatctcaccaaggcggcgagtgcaccgtactttgaagtgctggagaagtggatctatagagggatcattcacgatccttattcagagtttatggtcgaggagcatgagctccgaaaagagcgaatccaggaggattacaacgataagtactgggatcagcgatacacgattgtccagcagcaaatcccttccttcctgcagaaaatggccgacaagattctctcaaccgggaaatacctgaacgtggtgagagagtgcggccatgacgtgacttgcccggttgccaaggaaatcatttacacattgaaggagagggcctatgtggagcagatcgaaaaggccttcaattacgcttcaaaggtattgctcgattttctgatggaagaaaaagagcttgtagctcatctccgctctattaaaagatacttcctcatggaccaaggggactttttcgttcacttcatggatctggccgaagaagaactgaggaagccagtggaagacataacaccccctcgcttggaggccctcctggagttagctctgaggatgtccacagccaataccgatccctttaaagacgacctgaaaatcgatctgatgccacacgatcttatcacccagctcttaagggtgctggccatcgaaaccaagcaagaaaaggctatggcccacgcagaccccacagaattagcactttcaggactggaggcattttctttcgactatattgtaaagtggccgctctcgcttatcatcaatcgcaaggcactgaccaggtaccaaatgctcttccgacatatgttttactgcaaacacgttgagcgacaactttgtagcgtctggataagcaataaaactgccaagcagcattccctgcacagcgcccaatggtttgcgggcgctttcacattgcggcagcggatgctgaactttgtgcagaatatacagtactatatgatgtttgaagtgatggagcctacctggcatatcctggaaaagaatctgaagagtgcatcaaacatcgatgacgtactggggcatcacactggcttcttggacacctgtttgaaagactgtatgctcacaaacccagagctgttgaaggttttttccaaattgatgagcgtgtgcgtgatgtttaccaactgcatgcagaaatttacgcagagtatgaagctggacggggagctaggcggccagactctggaacacagtacagtgctgggcttgcccgctggagccgaagagcgtgctcggaaagagttggcacggaagcatttggctgagcacgccgatacggtgcagctcgtgtcgggctttgaggccacaatcaataaatttgacaaaaactttagtgctcacctactggatctgctagcacggctgagtatatactcaacgtcagactgcgaacatggtatggcctccgtgatctccaggttggatttcaatggcttctacaccgagcgcttagaaaggctgagtgcagagagatctcagaaagccacacctcaagttcccgtgctcagagggccccctgcaccggcgccaagagtcgccgtgactgcgcagtag

SEQ ID NO: 166893 - DNA, 1488 bp, Artificial Sequence
  derived and/or modified sequence
atggtggaagagcacgagttgagaaaagagaggattcaagaggactataacgacaaatactgggaccagagatacacaatcgtgcagcagcagatcccctctttccttcagaagatggctgataagatcctgtcaactggtaaatatttgaacgttgtacgtgagtgcggacacgatgtcacctgtcctgtggcaaaggaaataatatacactctgaaggaacgagcctacgtagagcaaatcgaaaaggccttcaactatgcttccaaagtactccttgactttttgatggaggaaaaggaactagttgcacacttgaggtccatcaaacgatattttctgatggaccagggagatttttttgtccatttcatggacttagccgaggaagagttaaggaaacctgttgaggatatcactccaccaagactggaagcccttttggagctggccttgcgtatgagcacagccaacaccgatcccttcaaagacgatctcaaaatagatctaatgcctcacgaccttatcacacagctgcttcgggtactcgcaatagaaacaaagcaggaaaaggccatggcccatgcggatccaaccgagctagctctctcagggctcgaagccttctccttcgactatatcgtgaaatggccactatcccttatcattaatcggaaggcattaacacgctatcagatgttgttccgccatatgttctactgtaagcacgtggaaaggcagctttgtagcgtgtggattagcaacaagaccgcaaaacagcactcgctgcatagtgcccaatggttcgctggagccttcaccctgaggcaacgaatgctaaatttcgtgcagaacattcaatactacatgatgttcgaggtgatggagccaacctggcatatcctcgaaaagaatttgaaaagtgctagcaatatcgacgacgtacttggccatcacaccggatttctggatacatgtttaaaggattgcatgctcaccaacccagagctcctcaaggtgttttcaaaactcatgagtgtctgtgtgatgttcactaattgtatgcagaagtttacccagtcgatgaagcttgatggcgagctcggagggcagaccttggaacattcaactgtgcttggtttgccagccggagccgaagaaagagctcgcaaagaattggccaggaagcacctggccgagcatgcagatacagtgcagcttgtctctggatttgaggctaccatcaataagtttgacaaaaacttctccgctcacttgctagatctccttgctcggttatccatctattcaacttcagattgtgagcacggaatggccagcgtgatttcaaggttagactttaatggcttctacactgagagactggagcgcctttcggctgaacgctcccaaaaggccaccccacaagtccctgtgctccggggacccccggctcccgcccccagagtggcagtgaccgctcagtag

SEQ ID NO: 166894 - DNA, 2709 bp, Artificial Sequence
  derived and/or modified sequence
atgtcagagttccgcattcaccacgatgttaacgagcttctgagtttactccgagttcacgggggggatggcgcggaagtatacattgacttgcttcagaaaaatcgtacaccttacgtgacaactacggtgtctgctcattctgcaaaagttaagattgccgaattctccagaacaccagaagactttctgaagaagtatgatgagctcaagtccaaaaataccaggaatctggacccgttagtgtacttgctcagtaagttaacggaggataaagagactcttcagtacctgcagcagaacgccaaggaaagggcagaactggccgccgcggccgtcggatcgtctactacctccattaacgtccccgcagctgcctcaaagatcagtatgcaagagttagaagagctcaggaaacagctgggctcggtcgccaccggctctaccctccaacagtccttggaattgaaaaggaagatgctaagggataagcagaataagaagaatagtgggcagcatctgcctatcttccctgcatgggtgtatgaacgtcctgccctgattggtgatttcctcatcggggctggaatatcaactgatacagccttgcccatcggcaccttgcctctggcaagccaggagagcgcagttgtcgaggatctcctgtacgtgctggtgggcgtggatggccgatacgttagtgcccaacccctcgccggacgccaaagccgcactttccttgtggaccctaatttggacctgagcatccgcgagctggtacatagaatacttcccgtggctgcctcctactcggccgtgacccggttcatcgaagagaaaagcagctttgaatacggtcaagtcaaccatgcactggcagcggccatgaggactctggtgaaagaacacctcatcctggtttcccagctggagcaactccaccggcaaggactgctgtctctccagaaattatggttctacatacagcccgccatgaggaccatggacatcctggccagcttggcaacctccgtggacaagggcgaatgtcttggcggatccacactgtctttgctgcatgacagatcattctcctacacgggcgattcccaggctcaggagctctgcctgtatctcaccaaagccgcttctgcaccctacttcgaagtgctcgaaaaatggatttatcggggtatcatacacgacccatatagcgagttcatggttgaggaacacgaactgcgcaaagagaggattcaggaagattacaatgacaaatactgggatcagagatatactatagtgcagcagcagatccctagcttcctgcaaaagatggctgataagatcctcagtactggtaagtacctgaatgtggtgagagagtgtggccacgacgtaacttgccccgttgctaaggaaatcatatacacgcttaaagagagggcctatgtcgagcagatcgaaaaagccttcaattatgcatctaaggttcttctcgatttcctgatggaagaaaaggagctcgttgctcatttgagaagtattaagcggtactttctgatggatcagggagactttttcgttcattttatggacttagcggaagaggagctaagaaaaccggtggaggacattactccaccccgcctggaagccctgctggaacttgctttgcggatgtctaccgccaataccgacccattcaaggacgaccttaaaatagatttaatgccgcacgatctgattactcagctgctgagagtcctggctatcgagacaaagcaagagaaggccatggcacacgccgaccctacagagcttgccttatctgggctcgaagcgtttagtttcgactatatcgtcaaatggcctctgtctctgatcattaatcgaaaggccctcacccgctatcagatgctctttagacacatgttttactgtaaacatgtggagagacagctttgtagcgtttggatcagtaacaagacagccaaacaacattctctgcatagcgcacagtggtttgctggcgcattcacactgagacagcgcatgctgaactttgttcaaaatatccagtactacatgatgtttgaagtgatggaacccacctggcacatcctcgaaaagaatctaaagagtgctagcaacatcgacgacgttctgggacaccataccggattcctcgacacctgtttgaaagactgtatgcttactaatcccgagctactgaaggtgttttctaagctgatgtctgtatgtgtgatgttcactaactgcatgcagaagtttacacagtccatgaaactggacggggagctcggcggtcagaccttggaacacagcaccgtcctaggactcccagctggggccgaagagcgcgccagaaaggaactggctcggaaacatctcgctgagcatgctgacaccgtccagctagtctccggctttgaggccacaataaataaatttgacaaaaacttttcggcacacctcttggacttgttggctcgcctgtccatctactccacatctgactgtgaacacggaatggctagtgtcatctctcgcctggacttcaatggattttatacagaacgcctcgagaggctttccgccgaacgaagccagaaagccacaccccaagtgccagtcctccgggggccgccagctcctgctccccgtgtagccgtaaccgcccagtag

SEQ ID NO: 166895 - DNA, 2319 bp, Artificial Sequence
  derived and/or modified sequence
atgcaggagctcgaggaactaaggaagcagctgggcagtgttgccacaggttccacactgcagcagagtctggagttaaagagaaagatgctgcgggataaacagaacaaaaaaaactccgggcagcacttgcccatctttccggcctgggtctatgagcgccctgctcttatcggggacttccttattggagccggaatatccactgacactgccctaccaataggcaccctgccactggctagtcaagagagcgccgtggtagaggatttgctgtatgtacttgtgggcgttgacggcagatacgtgtctgcccagccactcgccggccggcaatctcggacttttctggtagatcccaatctggatctttccatccgcgagttggtacaccgcatactacctgtggctgcatcctatagcgcagtgactagatttattgaagaaaagagttcctttgaatacgggcaggtgaatcacgcactggccgcagccatgcgaaccctcgtcaaggaacacctcattctggtcagtcagctggagcagctgcatcgccagggcctcctctctctgcaaaaactatggttttatatacagcctgctatgcggaccatggacattctggcaagcctggcgaccagcgtggacaaaggagagtgtttgggcggatcaacacttagcctcctgcacgaccggagcttcagctacacaggtgactctcaggcccaagaactgtgcctttaccttacaaaagcagcctccgccccatattttgaagtgctggaaaagtggatatatcgtggcattatccacgatccatattcagaatttatggtcgaggaacatgagttgcgtaaagagaggatccaggaggattacaacgacaagtactgggaccaacgatataccattgtccagcaacaaataccatccttcctgcagaaaatggcggacaaaattctgagcactggaaagtacctgaacgttgtaagagagtgcgggcatgacgtgacgtgccctgtagctaaagagatcatttacacactgaaggaaagggcttacgtcgagcaaatagagaaggcctttaattatgccagcaaggttctactggactttctaatggaagagaaggagctcgtggcccatctgcgctccatcaagcgctactttcttatggatcagggggatttttttgtgcacttcatggacctcgcggaagaggaactgcgcaagcctgttgaggacatcactcctcccaggttggaggcgctgctcgagctcgcgttgcgtatgtcaaccgctaacaccgacccctttaaagacgacctgaagattgatcttatgccacacgacctaattacccaacttctgcgtgtgctggcaatcgagactaagcaggagaaagcaatggctcatgctgatcctactgagctggccctgagcgggctggaggccttctctttcgactacatcgtgaagtggccccttagtcttatcatcaacaggaaggccctcacacgctaccagatgttgttccggcatatgttttattgcaagcatgttgaaaggcaactatgttcagtgtggatatcaaataaaactgctaaacagcacagccttcactccgcacagtggttcgcgggcgccttcactcttcggcaacgcatgctcaatttcgtgcagaacatccaatactatatgatgtttgaggttatggagcccacatggcacatcttggagaaaaacttgaagtctgcctccaacattgacgacgtgctgggccatcacaccggatttctagatacttgcctgaaagactgcatgctgacgaatcccgagctgctgaaggtgttttctaagttgatgtctgtatgtgtaatgtttaccaactgtatgcagaagttcacccaatctatgaagctggacggagagctcggcggtcagacgttggagcacagtactgtcttgggactccccgctggagccgaggagcgtgcgcggaaagaattggctaggaagcacctagcagagcacgcggacaccgttcagctggtatctggcttcgaagctaccatcaacaaattcgataagaacttttctgcccacctgctggatttgctggccaggctgtcgatatattctacaagcgactgtgagcacggcatggctagcgtgatttcccgattggacttcaacggcttctataccgagcgcttagaacgcctttccgcggaaagatcccaaaaggccaccccacaggtccctgtgctgcgtggaccgccagctccagcgcccagagtcgccgtgactgcccagtag

SEQ ID NO: 166896 - DNA, 2685 bp, Artificial Sequence
  derived and/or modified sequence
ctggtggggtctgtcggcttctcttcagtgcgatatatttaaatggataaaaatatgttagttcccaaagaattgtattatgtctattacgtcaagataccgttgttgaaatattttcaaaaaatacattagtgatgtggaaatgttatttctttactaatggaccaaataaaatctggtataatgggcacctttaaagaaagcaccttcacacttgaagtgcgtaaatgatgtttgaagttgttcagatgatgacgtggagatgtctggtttctgtcaatgttggccccgcctaccccacacgagcatcattttgggtgtcagggccccacgcaccccacacgagcatcattttgttgcctgggctcatcatggaaggaaatgctaaattccaaaaagaggtgggtgcagataaagacaaatcagtttcccacctatctctgcggaccgtacattctccctgagcccaggttaaatactccgttccagagcgaggtttgtaggtttgttggttttcttttttttttttttctttttttttttgaggcagagtctcgctccattgccaggctggagtgcagtggcatgatctcggctcgctgcaacccccacctcccaggttcaagcgattcccctgccttaacctcccaagtagctgggactacaggtgcacaccaccacgcccagctgattttttgtattttagtagagacggggtttcactgtgttggccaggatggtcttgatctcttgacttcgtgatctgcccacctcagcctcccaaagtgctggggttacaggcgtgagccactgtgcccggcccctaggttcgttttagccgagaagtgttggggttacaggcgtgagccaccgtgcccggcccctaggttcgttttagcccacagttgagaagtaactggtagattaggctcggcccttgtggaacgttacttggaagtgtgctggcctctgttaatgtccctgcgcgctgccggcctggagaagtgtcgcctgcctcaggcgcccttgctttgcctgtgaccgaagcgctccctgtggttttagtgagtttatggtcgaggagcacgagctgcggaaggagaggatccaggaggattacaacgacaagtactgggaccagcggtacaccatcgtccagcagcagatcccgtccttcctgcagaaaatggcggacaagatcctcagcacaggaaaatatctaaatgtggtcagagagtgtggccatgacgtcacctgcccggtggctaaagagatcatctacacgttaaaagagcgggcgtatgtggagcagatcgagaaggcgtttaactacgccagcaaggtgctgctggacttcctgatggaggagaaggagctggtggctcacctcaggtccatcaagcgctacttcctcatggaccagggcgacttcttcgtgcacttcatggacctcgcggaggaggagctccggaagccggtggaggacatcacgccccctcgcctggaagcgctcctggagctggcgctgcgcatgagcacggccaacactgaccccttcaaggacgacctcaagatcgacctgatgccccatgacctcatcactcagctcttgcgcgtcctggccatcgagaccaagcaggagaaggcgatggcgcacgccgaccccacggagctggcgctgagcggcctggaggccttctctttcgactacatcgtcaagtggcccctttcgctcatcatcaacaggaaagccctcactcgctaccagatgctcttcaggcacatgttctactgcaagcacgtggagcggcagctctgcagcgtctggatcagcaacaaaaccgccaagcagcactcgctgcactccgcccagtggtttgctggggctttcactctgcggcagcgaatgctcaacttcgtccagaatattcaatactacatgatgtttgaagtgatggaaccgacctggcacatcctggagaaaaacctgaaatccgcctccaacattgacgacgtccttggccaccacacaggcttcctggacacctgcctgaaggactgcatgctcaccaaccccgagctgctgaaggtcttctccaagctcatgtctgtgtgcgtcatgttcaccaactgcatgcagaaatttacacagagcatgaaattagatggcgagctgggcgggcagacgctggagcacagcaccgtcctggggctgcccgcaggggccgaggagcgggcccggaaggagctcgccaggaagcacctggctgagcacgcagacactgtgcagctggtgtccggcttcgaggccaccatcaacaagtttgacaagaacttctcagcccacctgctggacctcctggcccggctgagcatctatagcaccagtgactgtgagcacggcatggccagcgtcatctccaggcttgacttcaatggtttctacacggagcgcctggagcgcctgtctgcagagaggagccagaaggccaccccccaagtgcctgtcctgcgggggcccccggctcctgcacccagggtcgcagtcaccgcacagtgagccctggctgtgacaggaaggaagggtgtggggtcagcagggactggtgcaaatgggtccagaattttcaaatcgaatgctctgtgttctgtctttgcagtttaaatataaagcaggaatgattg

SEQ ID NO: 166897 - DNA, 3198 bp, Artificial Sequence
  derived and/or modified sequence
ccactggatcctacaactactttttccctcttttgctcacgcacctcgaagaactggtgctcccgcgggaagcgcacggggcgcgcaacgaagcgaaagggcgcggccccagccgcgggatcccgctctacaggcagcggctccgccgccccgggccccgcagcgaggcgggcgcacagcgcggggggcaactgcatcaccccgggcgcgggcgggcgcagcctgtcggccaccgtccgcgagccgagccggacgtgacgtcacgctcacttccgccgccgtcgggggctgcgcgggggctgtggctccgggactgcggagaacatattgtgatgttcgtgcctcagagctaaaactatgagtgaatttcggattcaccatgacgtcaatgaactgcttagcctgctgcgtgtccacggaggagatggggctgaggtctacattgacctgcttcaaaagaacaggaccccgtacgtcactaccactgtctctgctcacagtgccaaggttaaaattgcagagttttctcgtactccagaagactttctaaagaaatatgatgaactgaaatctaaaaatacaaggaaccttgacccgctggtgtacctgttgtcaaagctcacggaagacaaagagactctgcagtacttacaacagaatgcaaaagaaagagctgagcttgcagccgctgctgtgggcagcagtaccaccagcatcaacgtccctgccgcggcctccaagatctccatgcaggagcttgaggaactgaggaagcagcttggcagcgtggccacaggctccacgctgcagcagtctctggaacttaaaagaaagatgcttcgagacaagcagaacaaaaaaaattcaggccagcacctccccatcttcccagcatgggtgtatgagagacctgccctgatcggggatttcctgattggtgctggcatcagcacagacaccgctttgccgataggcacgttgcccctggcctcgcaggagtcggccgtggtggaggacctgctgtacgtgctggtgggcgtggacgggaggtacgtcagtgctcagcccctggctgggaggcagagccggaccttcctcgtggaccccaacctggacctgtccatcagggagctggtgcacaggatcctcccagtggccgccagctactccgctgtgaccaggttcattgaagagaagtcttccttcgagtacgggcaggtgaaccacgccctggcggccgccatgcgcaccctggtgaaggagcacctgattctggtgtcacagctggagcagctgcacaggcagggcctcctttcgctgcagaagctctggttctacatccagccagccatgcgcaccatggacatcctggcctccctcgccacctcggtggacaaaggcgaatgtcttggggggtccacgctgagcctgctccacgacaggagcttcagctacacaggggacagccaggcgcaggagctatgcctgtacctaaccaaggcggccagtgctccctacttcgaggttctggagaagtggatctacaggggcatcatccacgacccatacagtgagtttatggtcgaggagcacgagctgcggaaggagaggatccaggaggattacaacgacaagtactgggaccagcggtacaccatcgtccagcagcagatcccgtccttcctgcagaaaatggcggacaagatcctcagcacaggaaaatatctaaatgtggtcagagagtgtggccatgacgtcacctgcccggtggctaaagagatcatctacacgttaaaagagcgggcgtatgtggagcagatcgagaaggcgtttaactacgccagcaaggtgctgctggacttcctgatggaggagaaggagctggtggctcacctcaggtccatcaagcgctacttcctcatggaccagggcgacttcttcgtgcacttcatggacctcgcggaggaggagctccggaagccggtggaggacatcacgccccctcgcctggaagcgctcctggagctggcgctgcgcatgagcacggccaacactgaccccttcaaggacgacctcaagatcgacctgatgccccatgacctcatcactcagctcttgcgcgtcctggccatcgagaccaagcaggagaaggcgatggcgcacgccgaccccacggagctggcgctgagcggcctggaggccttctctttcgactacatcgtcaagtggcccctttcgctcatcatcaacaggaaagccctcactcgctaccagatgctcttcaggcacatgttctactgcaagcacgtggagcggcagctctgcagcgtctggatcagcaacaaaaccgccaagcagcactcgctgcactccgcccagtggtttgctggggctttcactctgcggcagcgaatgctcaacttcgtccagaatattcaatactacatgatgtttgaagtgatggaaccgacctggcacatcctggagaaaaacctgaaatccgcctccaacattgacgacgtccttggccaccacacaggcttcctggacacctgcctgaaggactgcatgctcaccaaccccgagctgctgaaggtcttctccaagctcatgtctgtgtgcgtcatgttcaccaactgcatgcagaaatttacacagagcatgaaattagatggcgagctgggcgggcagacgctggagcacagcaccgtcctggggctgcccgcaggggccgaggagcgggcccggaaggagctcgccaggaagcacctggctgagcacgcagacactgtgcagctggtgtccggcttcgaggccaccatcaacaagtttgacaagaacttctcagcccacctgctggacctcctggcccggctgagcatctatagcaccagtgactgtgagcacggcatggccagcgtcatctccaggcttgacttcaatggtttctacacggagcgcctggagcgcctgtctgcagagaggagccagaaggccaccccccaagtgcctgtcctgcgggggcccccggctcctgcacccagggtcgcagtcaccgcacagtgagccctggctgtgacaggaaggaagggtgtggggtcagcagggactggtgcaaatgggtccagaattttcaaatcgaatgctctgtgttctgtctttgcagtttaaatataaagcaggaatgattgactcagc

SEQ ID NO: 166898 - DNA, 2709 bp, Artificial Sequence
  derived and/or modified sequence
atgtctgagttccgcatccaccatgatgtgaatgagctgctgagcctgctgcgggtgcacggcggagatggagctgaggtgtacatcgacctgctgcagaagaacagaacaccctacgtgaccaccaccgtgtctgcccacagcgccaaggtgaagattgctgagttcagcaggaccccagaggacttcctgaagaagtatgatgagctgaagagcaagaacaccaggaacctggaccccctggtgtacctgctgagcaagctgacagaggacaaggagaccctgcagtacctgcagcagaatgccaaggagcgggcagagctggccgctgctgctgtgggcagcagcaccaccagcatcaacgtgcctgctgctgccagcaagatctccatgcaggagctggaggagctgaggaagcagctgggctctgtggccaccggcagcaccctgcagcagagcctggagctgaagaggaagatgctgcgggacaagcagaacaagaagaacagcggccagcacctgcccatcttccctgcctgggtgtatgaaagacctgccctgattggagacttcctgattggagctggcatcagcacagacacagccctgcccatcggcaccctgcccctggccagccaggagagcgctgtggtggaggacctgctgtatgtgctggtgggcgtggatggccgctacgtgtctgcccagcccctggccggccggcagagcaggaccttcctggtggaccccaacctggacctgagcatccgggagctggtgcaccgcatcctgcctgtggccgccagctacagcgctgtgacccgcttcatcgaggagaagagcagctttgaatatggccaggtgaaccacgccctggccgccgccatgaggaccctggtgaaggagcacctgatcctggtgtcccagctggagcagctgcaccggcagggcctgctgagcctgcagaagctgtggttctacatccagcctgccatgaggaccatggacatcctggccagcctggccacctctgtggacaagggagaatgtctgggcggcagcaccctgagcctgctgcatgaccgctccttctcctacacaggagacagccaggcccaggagctgtgcctgtacctgaccaaggccgccagcgccccctactttgaggtgctggagaagtggatctaccggggcatcatccatgacccctacagcgagttcatggtggaggagcacgagctgaggaaggagcgcatccaggaggactacaatgacaagtactgggaccagcgctacaccatcgtgcagcagcagatccccagcttcctgcagaagatggctgacaagatcctgagcacaggcaagtacctgaatgtggtgcgggagtgtggccatgatgtgacctgccctgtggccaaggagatcatctacaccctgaaggagcgggcctacgtggagcagatcgagaaggccttcaactatgccagcaaggtgctgctggacttcctgatggaggagaaggagctggtggcccacctgcggagcatcaagcgctacttcctgatggaccagggcgacttctttgtgcacttcatggacctggccgaggaggagctgaggaagcctgtggaggacatcaccccaccccggctggaggccctgctggagctggccctgaggatgagcacagccaacacagaccccttcaaggatgacctgaagattgacctgatgcctcatgacctgatcacccagctgctgcgggtgctggccatcgagaccaagcaggagaaggccatggcccatgctgaccccacagagctggccctgagcggcctggaggccttctcctttgactacatcgtgaagtggcccctgagcctcatcatcaacaggaaggccctgacccgctaccagatgctgttccgccacatgttctactgcaagcacgtggagcggcagctgtgcagcgtgtggatcagcaacaagacagccaagcagcacagcctgcacagcgcccagtggtttgctggggccttcaccctgcggcagaggatgctgaactttgtgcagaacatccagtactacatgatgtttgaggtgatggagcccacctggcacatcctggagaagaacctgaagagcgccagcaacattgatgatgtgctgggccaccacacaggcttcctggacacctgcctgaaggactgcatgctgaccaaccctgagctgctgaaggtgttcagcaagctgatgtctgtgtgtgtgatgttcaccaactgcatgcagaagttcacccagagcatgaagctggatggagagctgggcggccagaccctggagcacagcacagtgctgggcctgcctgctggagctgaggagcgggccaggaaggagctggccaggaagcacctggccgagcacgccgacacagtgcagctggtgtctggctttgaggccaccatcaacaagtttgacaagaacttcagcgcccacctgctggacctgctggcccggctgagcatctacagcaccagtgactgtgagcacggcatggccagcgtcatcagccggctggacttcaacggcttctacacagagcggctggagcggctgtctgctgagaggagccagaaggccaccccccaggtgcctgtgctgcggggccccccagccccagccccccgggtggccgtgacagcccagtag

SEQ ID NO: 166899 - DNA, 1488 bp, Artificial Sequence
  derived and/or modified sequence
atggtggaggagcacgagctgaggaaggagcgcatccaggaggactacaatgacaagtactgggaccagcgctacaccatcgtgcagcagcagatccccagcttcctgcagaagatggctgacaagatcctgagcacaggcaagtacctgaatgtggtgagagaatgtggccatgatgtgacctgccctgtggccaaggagatcatctacaccctgaaggagcgggcctacgtggagcagatcgagaaggccttcaactatgccagcaaggtgctgctggacttcctgatggaggagaaggagctggtggcccacctgcggagcatcaagcgctacttcctgatggaccagggcgacttctttgtgcacttcatggacctggccgaggaggagctgaggaagcctgtggaggacatcaccccaccccggctggaggccctgctggagctggccctgaggatgagcacagccaacacagaccccttcaaggatgacctgaagattgacctgatgcctcatgacctgatcacccagctgctgcgggtgctggccatcgagaccaagcaggagaaggccatggcccacgccgaccccacagagctggccctgagcggcctggaggccttctcctttgactacatcgtgaagtggcccctgagcctcatcatcaacaggaaggccctgacccgctaccagatgctgttccgccacatgttctactgcaagcacgtggagcggcagctgtgcagcgtgtggatcagcaacaagacagccaagcagcacagcctgcacagcgcccagtggtttgctggggccttcaccctgcggcagaggatgctgaactttgtgcagaacatccagtactacatgatgtttgaggtgatggagcccacctggcacatcctggagaagaacctgaagagcgccagcaacattgatgatgtgctgggccaccacacaggcttcctggacacctgcctgaaggactgcatgctgaccaaccctgagctgctgaaggtgttcagcaagctgatgtctgtgtgtgtgatgttcaccaactgcatgcagaagttcacccagagcatgaagctggatggagagctgggcggccagaccctggagcacagcacagtgctgggcctgcctgctggagctgaggagcgggccaggaaggagctggccaggaagcacctggccgagcacgccgacacagtgcagctggtgtctggctttgaggccaccatcaacaagtttgacaagaacttcagcgcccacctgctggacctgctggcccggctgagcatctacagcaccagtgactgtgaacatggcatggccagcgtcatcagccggctggacttcaacggcttctacacagagcggctggagcggctgtctgctgagaggagccagaaggccaccccccaggtgcctgtgctgcggggccccccagccccagccccccgggtggccgtgacagcccagtag

SEQ ID NO: 166900 - DNA, 2319 bp, Artificial Sequence
  derived and/or modified sequence
atgcaggagctggaggagctgaggaagcagctgggctctgtggccaccggcagcaccctgcagcagagcctggagctgaagaggaagatgctgcgggacaagcagaacaagaagaacagcggccagcacctgcccatcttccctgcctgggtgtatgaaagacctgccctgattggagacttcctgattggagctggcatcagcacagacacagccctgcccatcggcaccctgcccctggccagccaggagagcgctgtggtggaggacctgctgtatgtgctggtgggcgtggatggccgctacgtgtctgcccagcccctggccggccggcagagcaggaccttcctggtggaccccaacctggacctgagcatccgggagctggtgcaccgcatcctgcctgtggccgccagctacagcgctgtgacccgcttcatcgaggagaagagcagctttgaatatggccaggtgaaccacgccctggccgccgccatgaggaccctggtgaaggagcacctgatcctggtgtcccagctggagcagctgcaccggcagggcctgctgagcctgcagaagctgtggttctacatccagcctgccatgaggaccatggacatcctggccagcctggccacctctgtggacaagggagaatgtctgggcggcagcaccctgagcctgctgcatgaccgctccttctcctacacaggagacagccaggcccaggagctgtgcctgtacctgaccaaggccgccagcgccccctactttgaggtgctggagaagtggatctaccggggcatcatccatgacccctacagcgagttcatggtggaggagcacgagctgaggaaggagcgcatccaggaggactacaatgacaagtactgggaccagcgctacaccatcgtgcagcagcagatccccagcttcctgcagaagatggctgacaagatcctgagcacaggcaagtacctgaatgtggtgcgggagtgtggccatgatgtgacctgccctgtggccaaggagatcatctacaccctgaaggagcgggcctacgtggagcagatcgagaaggccttcaactatgccagcaaggtgctgctggacttcctgatggaggagaaggagctggtggcccacctgcggagcatcaagcgctacttcctgatggaccagggcgacttctttgtgcacttcatggacctggccgaggaggagctgaggaagcctgtggaggacatcaccccaccccggctggaggccctgctggagctggccctgaggatgagcacagccaacacagaccccttcaaggatgacctgaagattgacctgatgcctcatgacctgatcacccagctgctgcgggtgctggccatcgagaccaagcaggagaaggccatggcccatgctgaccccacagagctggccctgagcggcctggaggccttctcctttgactacatcgtgaagtggcccctgagcctcatcatcaacaggaaggccctgacccgctaccagatgctgttccgccacatgttctactgcaagcacgtggagcggcagctgtgcagcgtgtggatcagcaacaagacagccaagcagcacagcctgcacagcgcccagtggtttgctggggccttcaccctgcggcagaggatgctgaactttgtgcagaacatccagtactacatgatgtttgaggtgatggagcccacctggcacatcctggagaagaacctgaagagcgccagcaacattgatgatgtgctgggccaccacacaggcttcctggacacctgcctgaaggactgcatgctgaccaaccctgagctgctgaaggtgttcagcaagctgatgtctgtgtgtgtgatgttcaccaactgcatgcagaagttcacccagagcatgaagctggatggagagctgggcggccagaccctggagcacagcacagtgctgggcctgcctgctggagctgaggagcgggccaggaaggagctggccaggaagcacctggccgagcacgccgacacagtgcagctggtgtctggctttgaggccaccatcaacaagtttgacaagaacttcagcgcccacctgctggacctgctggcccggctgagcatctacagcaccagtgactgtgagcacggcatggccagcgtcatcagccggctggacttcaacggcttctacacagagcggctggagcggctgtctgctgagaggagccagaaggccaccccccaggtgcctgtgctgcggggccccccagccccagccccccgggtggccgtgacagcccagtag

SEQ ID NO: 166901 - DNA, 2709 bp, Artificial Sequence
  derived and/or modified sequence
atgagcgagttccggatccaccacgacgtgaacgagctgctgagcctcctcagagtccatgggggcgacggcgctgaagtgtacattgacctgttgcagaaaaacaggacaccgtacgtgacgaccactgtctccgcacatagcgccaaggtcaagatagccgagttctcacgaacgcccgaggacttcctgaaaaagtacgatgagctgaaatcgaagaacactcgaaaccttgatcctctggtatatctgctcagtaaactgacagaagataaagaaactttacagtatttacagcagaacgcaaaagaacgcgccgaactagcagctgctgcagtcggcagcagcaccacaagcatcaacgttccggctgccgccagcaagatctcgatgcaagagctggaggaattgcggaagcagctggggtccgtcgctactggctctacactgcaacagtcccttgagctgaaacgaaaaatgcttcgggataaacagaataagaagaatagcggtcagcacttgcctattttccccgcctgggtctatgagagacctgctctgatcggcgacttcctcataggcgctggtatctctaccgatactgccctgcccatcggaactttacctctcgcttcgcaggaatccgccgtcgtcgaagatttactatatgtattggttggagtggacggccgctacgtttcagcccagcccctggccgggcgacaatctagaaccttcctggttgatcccaacctggatctgtcaattagggagctcgtgcatcgaatcctgcctgtggctgcttcctactctgctgtcaccagatttatagaagagaagtcgagcttcgaatatggccaggtgaaccacgctcttgccgccgccatgcgaactttggtgaaagaacatttaattctcgtgagccagctcgaacagctgcacaggcagggacttctgtccctgcaaaagctgtggttctatattcaacccgcgatgaggactatggacatactggcatccctcgcaacaagcgtggataagggagagtgtcttggaggctctactttgagtctgctgcacgacagaagtttcagctatactggtgactctcaggcccaggagctttgcctctacttgaccaaagcggcaagcgccccctactttgaagtcctggaaaagtggatatatcgagggattatccatgacccatattctgagtttatggtcgaggaacacgagctgagaaaggaaaggatccaagaagattataacgacaagtactgggatcagcgttataccattgtccagcaacaaattccatcttttctgcagaaaatggccgacaagattctctctacagggaagtatctgaatgtcgtaagagaatgcggtcacgatgtaacttgcccagtggcaaaagagatcatctacactctgaaggaaagagcctacgtcgagcagattgaaaaagcattcaattacgccagtaaagtgttgctggactttctgatggaggagaaggagctggtggcccacctgagaagcattaagaggtatttcttaatggaccagggcgatttttttgtccattttatggatctagcagaagaagagctccgtaaacccgttgaagacatcaccccccccaggctggaggcactgctggaactcgcgttgaggatgagcaccgccaatacagatcctttcaaagatgatctgaagatagatctgatgccccatgacttaattacacagctgctcagagtattagcaatcgagaccaaacaggagaaagctatggcgcatgccgaccccactgagttggccctgtctggtcttgaagcattctcctttgattacatagttaaatggcctctgtcactcatcattaaccgcaaagccctgactcgctatcagatgctctttaggcacatgttctactgtaagcacgtcgagcggcagctttgctccgtctggatctccaacaagacagctaagcaacatagcctccactctgcccagtggttcgctggtgccttcactctgcgccagagaatgctaaattttgtacagaatatccagtactacatgatgtttgaggtgatggaacctacatggcacatcctggagaaaaacctcaagtctgcatccaatattgatgatgtccttggccatcacaccggcttccttgacacatgccttaaggattgcatgctgactaatcctgagcttttgaaggtctttagtaagctgatgagcgtttgcgtcatgttcaccaattgcatgcaaaaattcacccagtccatgaagctagatggagaacttggtggtcaaacactggaacactccacagtcctgggcctccccgccggcgcagaggagagggctcgaaaggaactagctcggaaacatctcgccgagcatgccgatacagtgcagttggtgtctggcttcgaggccacaattaataagttcgataagaacttttccgctcacctgctagatctgctcgctagactgagtatatactccacgtctgattgtgaacatggaatggcctcggttattagcagactggacttcaacgggttttataccgagaggttagagcggctgagtgctgagcgatcgcagaaggcaacgccacaggtgcccgtcctgcgcggcccccctgcccctgctccaagagtcgctgttactgcccaatag

SEQ ID NO: 166902 - DNA, 1488 bp, Artificial Sequence
  derived and/or modified sequence
atggtggaggagcacgagctgcggaaggagcggatccaggaggactataacgataagtactgggatcagcgttacaccatcgtgcaacagcagattccatcttttcttcagaagatggctgataagattctctccaccgggaagtacctcaatgtggtgcgtgaatgcgggcacgatgtgacttgccccgtggccaaggaaatcatttacaccctcaaagagagagcctacgttgagcagattgagaaggcattcaattacgcatcaaaagtccttttagactttctcatggaggagaaagagttggtggcccacctccgaagcataaagagatactttctcatggatcaaggcgatttctttgtgcattttatggacctagcggaggaagaattgcggaagcctgtggaggatatcaccccccctaggttggaggccttgctcgagctcgcccttaggatgagcaccgccaacaccgacccttttaaggacgatctcaaaatcgacttaatgccccacgacctaatcacccaattgcttagagtgctagctattgagacaaaacaagaaaaagctatggcgcatgcagatcctacggagctcgcactgtcagggttggaagcattttccttcgattacatcgtgaaatggccactctcgttaatcataaaccgcaaggccctgacaagatatcagatgttgtttagacacatgttctactgcaaacacgtagagcggcagctttgcagcgtgtggatatctaataagaccgcaaaacagcacagcctgcattccgcccaatggttcgccggagctttcaccctaagacagcgcatgctgaatttcgtgcagaatatccaatactatatgatgtttgaggtgatggagcccacttggcatatcttggaaaagaatctcaaaagcgcctccaacatcgatgatgtgctagggcatcataccggctttctcgacacgtgcctgaaagactgtatgttgactaacccagagctgctgaaagtgttctcaaagctcatgagtgtatgcgtcatgttcacgaactgtatgcagaagttcacacagtcgatgaagctggacggggagcttgggggacagacactggagcatagtactgtgcttggacttccagctggcgcagaggaacgtgcacgcaaggagctggcgcgaaagcacctggccgaacacgccgacacggttcagttagtgagcggatttgaagccaccatcaacaaatttgacaagaatttcagtgcccatctgttggacttgctggctcgcctttcaatttattctaccagcgactgtgaacatggaatggcctccgtaataagccgcctggactttaacgggttctatacggaaaggctcgagagactgtccgccgagaggtcccagaaggccacgccacaagtgcctgtgttgagaggcccccctgcgcccgctccccgggtggctgtgaccgcacagtag

SEQ ID NO: 166903 - DNA, 2709 bp, Artificial Sequence
  derived and/or modified sequence
atgagcgagttccggatccaccacgacgtgaacgagctgctgagcctgcttcgagtccatggaggtgatggtgcagaggtgtacattgacctcctgcaaaaaaatcgcactccatacgtgactaccacagtttctgcccactccgctaaagtgaaaattgcggaattctcgcggaccccagaggactttctgaagaaatatgacgaattgaagtccaagaacacacgtaatctggaccctttggtgtatttattgtctaaactgactgaagataaggagacgttacagtacctgcaacaaaacgcaaaggagagggctgaactcgctgccgccgcggtggggagttccaccacgagcatcaatgttccggctgccgcctctaagatttccatgcaggaactcgaagagctgcggaagcagttaggctcagtggcgacagggtcgaccctgcaacagtctctggaacttaagagaaaaatgctccgagacaaacagaacaagaagaactcgggccaacatctgcccattttccccgcatgggtgtatgaaagacctgcacttattggcgatttcttgatcggggctgggatttcgacggacaccgctctgcctattggcaccttgccactggccagccaggaatcagctgtagtggaagatttactatatgttctggtcggcgtggatggccgctatgtttccgctcagcctctggccgggagacaaagccgaacattcctggtggacccgaacctcgatctgtccatcagggagctggtacaccgcatcctaccagtggccgccagctactctgccgtgacgcgctttatcgaagaaaaatcctcgtttgagtatggacaggttaaccacgccctagccgccgccatgagaaccctggtcaaggaacatttgatcttggtgtcccagctggagcaactgcatcggcagggcctgctgagcctgcagaaattgtggttctacatacagccagccatgcgaactatggacatactggcctccttggccacttcggtggataagggcgaatgcctgggtggtagcacacttagtctgctacatgatcgctcgttcagctacaccggcgactctcaagcacaggaactttgtctgtacctaaccaaagctgcatcagccccttacttcgaggtcctagagaaatggatctaccgcggcatcattcacgatccttattccgaattcatggtcgaagagcacgagttaagaaaggagcggatccaggaggactacaatgataaatattgggatcagcggtatacgatagttcaacagcaaataccaagctttctgcagaagatggccgacaaaatcctgtccactggaaaatacctcaatgtggtgcgggaatgtggacatgatgtaacctgccctgttgccaaagaaattatctatacattgaaggagagagcttatgtggagcagattgaaaaagcgtttaactacgcatcaaaagtcctcctggattttttaatggaggagaaagagttagtggcccatctgcgtagtatcaaaaggtacttcctgatggaccagggagacttcttcgtgcatttcatggacctcgccgaggaggaattgagaaagcccgttgaggatatcacccccccgcgactagaggctctgttggaattggcacttaggatgagtacggctaataccgatccattcaaagacgatctaaaaatcgatcttatgccgcacgacctgataacacagctcctgagggtgctggctatagagacaaaacaggagaaagctatggcccacgccgacccaactgagcttgccctatccggcctcgaggctttcagctttgactatattgtaaagtggcctttgtcgctgatcataaatcggaaagccctcacaaggtaccagatgttgtttcggcacatgttttactgcaaacatgtagaacgccaactgtgcagtgtctggatttccaacaagactgccaagcaacacagccttcactccgctcaatggttcgccggggccttcacacttcgccaacgtatgctgaacttcgtgcaaaacatccagtactacatgatgttcgaagttatggagcctacatggcatattctcgagaaaaatctgaagtcagcatcaaatattgacgacgtgctggggcaccacaccgggtttcttgacacctgcttaaaggactgtatgctgaccaacccagaactcctgaaagtgttttccaaactgatgtccgtttgcgtgatgtttaccaactgtatgcagaaattcacccagtcaatgaagttggacggtgagctgggcggccagaccctggaacactcaaccgtgctggggttgcctgccggggccgaagagcgcgcaagaaaagagctggcgcgcaagcacctagccgagcatgccgatactgtgcagctggtcagtggctttgaggcaacaataaataaatttgacaaaaatttctccgcacacctcctcgacctcctggccagactcagtatctattcgacatccgactgcgaacacggaatggccagcgtcatctcccgattggattttaacgggttctacactgaaagactggagcgattgtccgctgagcgcagtcagaaggctacgccgcaggtcccggtgctgcggggtcctcccgcccccgcaccgcgagtagccgtgaccgctcagtag

SEQ ID NO: 166904 - DNA, 2319 bp, Artificial Sequence
  derived and/or modified sequence
atgcaggagctggaggagctgcggaagcagctgggcagcgtggccacaggatctactttgcagcaatcactggagcttaaacgtaagatgttgcgggataagcagaacaagaagaatagcggccaacaccttcccatctttccagcatgggtgtacgagcggccagctcttattggtgactttcttatcggcgcgggtatttccaccgacactgcactcccaattggaacactccccctggctagccaagaatccgcggtggtggaggacctgttgtacgtcttggtgggtgtcgacggacgctatgtgagtgctcagccactcgccggtagacaatctaggacctttctggtggatcctaacttagacctatccatacgagagcttgtgcaccgtattcttcccgtagccgcgagctatagcgcagtgacccgcttcatcgaagaaaagagttcttttgaatatggacaagtgaatcacgccctagccgctgctatgaggacgctggtcaaggagcaccttatactcgtgagccagttggagcagcttcatagacaaggattgctgtcactgcagaagttgtggttttatattcagcccgcgatgcgcactatggatatcctggccagcctggcaacaagcgtcgacaaaggcgagtgtctggggggaagcacactatccctactccacgacaggtcttttagttacaccggagatagccaggctcaggagctttgtttatacttaacaaaagctgcctccgccccatattttgaagtgcttgagaagtggatttacagaggaattatccacgatccatactctgaatttatggtggaggaacacgaactacgtaaggaaaggatccaggaggactacaacgacaagtactgggatcaacgctatactatcgtccaacagcagattccaagttttctccagaagatggctgacaaaatcctgtctacaggtaagtacctcaacgttgtgagggagtgcggtcacgacgtcacctgtcccgtggccaaagagattatctacacactgaaggagagggcctacgtcgagcagattgaaaaagcgtttaattatgcttctaaggtcctgttggactttctgatggaagagaaggaattagtagctcatctaaggtccatcaaacgctatttcctgatggaccagggcgatttttttgttcatttcatggacctggcagaggaggagctgaggaaacctgtggaagatattacgccccctaggctagaagctctcttagagctcgccctcaggatgagcactgccaatactgatccgtttaaagacgatctgaaaatcgatctcatgccacacgacctgattactcagttgctcagagtactggctatagagaccaaacaggaaaaggcaatggcgcacgcagacccaaccgagctcgctctgtccggcttggaggccttcagttttgactacattgtgaaatggccactgtccctcattataaatcgcaaggccctgacccgctatcagatgctgttcagacacatgttttactgtaagcacgttgaaaggcagctgtgctcagtctggatctccaataagacagctaagcagcacagtctgcattccgcccagtggtttgctggcgcttttacgctgagacaaaggatgctgaactttgtgcagaacattcagtattatatgatgtttgaggtcatggaacccacctggcacatcttggagaagaatctaaagtcagcctctaatatcgatgacgtcctgggacatcatacaggcttcctcgacacctgcctgaaagactgtatgctcacgaatccagagttgctgaaggtcttttctaagctgatgagcgtgtgcgtgatgttcaccaattgtatgcaaaaattcactcagtcaatgaaactcgacggtgagcttggcggacaaactcttgaacattccactgtcctggggctgcctgccggcgctgaggagcgggcacggaaagaactggcaagaaaacatctggccgagcacgcggacacggtgcagttggtgagtggtttcgaggccaccatcaataagtttgacaaaaacttttctgctcacctgttggatctgctggccaggctttcaatctacagcacaagcgactgcgaacatggaatggcctccgtgatctctcggctggatttcaacgggttttacacagagcggctggagcgtttgagcgccgagcggagccagaaggctacgcctcaagtgcccgtactccgggggcctcctgctcctgcacctcgcgttgctgtcaccgctcagtag

SEQ ID NO: 166905 - DNA, 2709 bp, Artificial Sequence
  derived and/or modified sequence
atgtctgagttcaggattcaccacgacgtgaatgagctgctgtccctgctccgcgtgcatggtggggatggagcggaggtgtatattgacttgctgcagaagaatagaaccccttacgtgacgacaaccgtgtccgcccactcagcgaaggttaagatcgctgagtttagtcggacccccgaagatttccttaagaagtatgatgaattgaaatccaagaacactaggaatctcgaccctctcgtgtacctgctgagcaagttgaccgaagacaaggaaaccctccaatacctgcagcagaacgcaaaggaacgcgcagagcttgctgccgcagctgtcggctcttccactacttcgatcaacgttccagccgcagcctcaaaaatctccatgcaggagctagaggaactccggaaacagctcggctccgtcgccactggctctactttacaacagtctctcgaactgaaacgaaaaatgctacgcgataaacaaaacaaaaaaaatagcggacagcatctgccaatatttcctgcttgggtgtacgagcgtccagccctaatcggagattttctgatcggggcagggatctccaccgacaccgccctccccattggaactctgcccctcgcctcgcaggagagcgcagtcgtagaggatctcctgtacgtgttagttggagtcgacgggaggtatgtctcagcacagccactggctggacgccaatcgagaacttttctcgtggacccaaacctggatctcagtattcgtgagctggttcaccgaattttgccagtggcggcttcttactccgccgtgacaaggttcatagaggagaaatcaagttttgagtatggccaggttaatcacgctcttgcagcagctatgcgaaccttggtcaaggagcacttgatccttgtgtcccagctggaacagctgcaccgccaaggcctgctgtccctgcagaaactatggttctacatccagcctgctatgcgaaccatggatattcttgcttctttggctacatccgtggataagggagaatgcctggggggatccaccctttccctcctccatgaccggtcctttagttatacaggcgattcccaggcacaggaattgtgtctgtaccttaccaaggctgcatccgccccttacttcgaggtgttggagaaatggatttacaggggaattatacacgatccttacagtgaattcatggtggaagagcacgagctgcgcaaggagagaatacaggaagactacaatgataaatactgggatcaacgctataccatcgtgcagcagcagatccccagctttttgcagaaaatggccgacaagattctgtctaccggaaaatatctcaacgtcgtgcgagagtgcgggcacgacgttacctgccccgtcgctaaagaaattatttacactttgaaggagcgggcttatgttgagcagatagagaaggcgtttaattacgcttctaaggtacttcttgacttcctcatggaagagaaggagctcgtcgcccacctcaggagtatcaagaggtacttccttatggatcagggcgacttctttgtgcactttatggatctggccgaagaggaactgcggaaacccgtggaggatataacccccccacgcctggaggcactcttggaactcgccctgcgtatgtctacagccaacaccgaccccttcaaagacgacttaaaaattgacctgatgccacacgacctgattactcagcttttgagagtgctggccattgagactaaacaagaaaaggccatggcgcatgccgaccctacagaactcgcattatcaggcctggaagcattttcgtttgattatatcgtcaagtggcccttaagccttatcattaaccggaaagcgcttacgaggtaccagatgctgtttcggcatatgttctactgtaagcatgtggagagacagctttgcagtgtttggatcagtaataagacagccaaacagcactctttgcattctgcccagtggttcgcaggggcttttactttgcggcaacgcatgttgaacttcgtacaaaacatacagtactatatgatgtttgaggtcatggaacctacatggcacattctcgagaagaatctgaaatccgccagtaacatagacgatgtcctgggtcaccatacaggcttcctcgatacttgcctgaaggactgcatgttgaccaatcctgagctgctgaaagttttttcaaagctgatgagtgtgtgcgtcatgttcacaaactgtatgcaaaagtttactcagtccatgaagttggatggcgagttgggcggtcagactcttgaacactcaacggttttagggctgccagctggtgccgaggagcgcgctcggaaggaactggccaggaagcacctcgctgagcacgccgatacggtgcagctcgtcagtgggtttgaagccaccattaacaagttcgataagaatttctctgcccacctcctagatcttttggcccgtctctcaatatactccacatctgattgcgaacatggaatggcatctgtaattagcaggcttgacttcaacggcttctatacagagagactcgaacgcctgtcagccgaacgcagccagaaggctacgccacaggtcccagtcctcaggggcccacccgcaccggcaccacgggtcgctgtaacggcgcagtag

SEQ ID NO: 166906 - DNA, 2749 bp, Artificial Sequence
  derived and/or modified sequence
acgctcacttccgccgccgtcgggggctgcgcgggggctgtggctccgggactgcggttaaaattgcagagttttctcgtactccagaagactttctaaagaaatatgatgaactgaaatctaaaaatacaaggaaccttgacccgctggtgtacctgttgtcaaagctcacggaagacaaagagactctgcagtacttacaacagaatgcaaaagaaagagctgagcttgcagccgctgctgtgggcagcagtaccaccagcatcaacgtccctgccgcggcctccaagatctccatgcaggagcttgaggaactgaggaagcagcttggcagcgtggccacaggctccacgctgcagcagtctctggaacttaaaagaaagatgcttcgagacaagcagaacaaaaaaaattcaggccagcacctccccatcttcccagcatgggtgtatgagagacctgccctgatcggggatttcctgattggtgctggcatcagcacagacaccgctttgccgataggcacgttgcccctggcctcgcaggagtcggccgtggtggaggacctgctgtacgtgctggtgggcgtggacgggaggtacgtcagtgctcagcccctggctgggaggcagagccggaccttcctcgtggaccccaacctggacctgtccatcagggagctggtgcacaggatcctcccagtggccgccagctactccgctgtgaccaggttcattgaagagaagtcttccttcgagtacgggcaggtgaaccacgccctggcggccgccatgcgcaccctggtgaaggagcacctgattctggtgtcacagctggagcagctgcacaggcagggcctcctttcgctgcagaagctctggttctacatccagccagccatgcgcaccatggacatcctggcctccctcgccacctcggtggacaaaggcgaatgtcttggggggtccacgctgagcctgctccacgacaggagcttcagctacacaggggacagccaggcgcaggagctatgcctgtacctaaccaaggcggccagtgctccctacttcgaggttctggagaagtggatctacaggggcatcatccacgacccatacagtgagtttatggtcgaggagcacgagctgcggaaggagaggatccaggaggattacaacgacaagtactgggaccagcggtacaccatcgtccagcagcagatcccgtccttcctgcagaaaatggcggacaagatcctcagcacaggaaaatatctaaatgtggtcagagagtgtggccatgacgtcacctgcccggtggctaaagagatcatctacacgttaaaagagcgggcgtatgtggagcagatcgagaaggcgtttaactacgccagcaaggtgctgctggacttcctgatggaggagaaggagctggtggctcacctcaggtccatcaagcgctacttcctcatggaccagggcgacttcttcgtgcacttcatggacctcgcggaggaggagctccggaagccggtggaggacatcacgccccctcgcctggaagcgctcctggagctggcgctgcgcatgagcacggccaacactgaccccttcaaggacgacctcaagatcgacctgatgccccatgacctcatcactcagctcttgcgcgtcctggccatcgagaccaagcaggagaaggcgatggcgcacgccgaccccacggagctggcgctgagcggcctggaggccttctctttcgactacatcgtcaagtggcccctttcgctcatcatcaacaggaaagccctcactcgctaccagatgctcttcaggcacatgttctactgcaagcacgtggagcggcagctctgcagcgtctggatcagcaacaaaaccgccaagcagcactcgctgcactccgcccagtggtttgctggggctttcactctgcggcagcgaatgctcaacttcgtccagaatattcaatactacatgatgtttgaagtgatggaaccgacctggcacatcctggagaaaaacctgaaatccgcctccaacattgacgacgtccttggccaccacacaggcttcctggacacctgcctgaaggactgcatgctcaccaaccccgagctgctgaaggtcttctccaagctcatgtctgtgtgcgtcatgttcaccaactgcatgcagaaatttacacagagcatgaaattagatggcgagctgggcgggcagacgctggagcacagcaccgtcctggggctgcccgcaggggccgaggagcgggcccggaaggagctcgccaggaagcacctggctgagcacgcagacactgtgcagctggtgtccggcttcgaggccaccatcaacaagtttgacaagaacttctcagcccacctgctggacctcctggcccggctgagcatctatagcaccagtgactgtgagcacggcatggccagcgtcatctccaggcttgacttcaatggtttctacacggagcgcctggagcgcctgtctgcagagaggagccagaaggccaccccccaagtgcctgtcctgcgggggcccccggctcctgcacccagggtcgcagtcaccgcacagtgagccctggctgtgacaggaaggaagggtgtggggtcagcagggactggtgcaaatgggtccagaattttcaaatcgaatgctctgtgttctgtctttgcagtttaaatataaagcaggaatgattgactcagctc

SEQ ID NO: 166907 - DNA, 1488 bp, Artificial Sequence
  derived and/or modified sequence
atggtggaagaacacgaactgagaaaggagcggatacaggaggactataatgacaaatattgggatcaacggtacaccattgtgcagcagcagattccatcctttcttcagaagatggccgacaagatcctatcaacaggaaagtatctgaatgttgtaagggaatgtggccatgatgtgacatgccccgtggccaaggagatcatttataccttaaaagagcgtgcctacgtagagcaaattgaaaaagcttttaattatgctagtaaagttctgcttgatttcctgatggaggaaaaggagctggttgcccatttacggagtatcaaacggtacttcctcatggaccagggagacttttttgtgcattttatggacctcgcagaggaagagctgaggaagcctgttgaagacataaccccgccaaggttagaagcactgctggagctggctcttcgaatgtcaactgctaacactgacccattcaaggacgatttaaaaatcgatctgatgccccacgatttaatcacccagttactgcgcgtgctcgctatcgagactaaacaggaaaaggcaatggcgcatgcagatccaaccgaactcgctttatcgggtctagaagcatttagttttgactatatcgtaaagtggcccctgtctcttatcattaatcgcaaagctttgactcggtaccagatgttatttaggcacatgttttattgcaagcatgttgagcgccaattgtgttccgtgtggatcagtaacaaaaccgccaaacagcactcccttcattccgcccagtggttcgccggtgctttcacactaaggcagaggatgcttaacttcgtgcagaacatccagtactatatgatgttcgaggtgatggagccaacctggcacatcctggagaaaaacctaaagagtgcttctaatatagacgacgtcctgggccatcacacaggattcttagacacgtgcttgaaggattgcatgttaaccaatccagaactgctgaaagtttttagcaagctgatgtctgtgtgtgtaatgtttaccaattgtatgcagaaattcacccagtcaatgaagctggacggcgagctcgggggacagaccttggagcattccactgtcttaggcctgcccgctggcgctgaagagcgtgcgagaaaggaactggctcgtaagcacctcgctgagcacgctgatactgtgcaactggtctcggggttcgaggccactattaacaagtttgataagaatttctctgcgcatttactggacttactggcacggctctccatatacagtacctcagactgtgaacacgggatggcttcagtgatctctcgcctggatttcaacgggttctacactgagcgcctggaacggctgagtgcggagcgctcacagaaggctaccccgcaggttcccgtgctgagggggcctccagctccagcccctagagtcgcagttacggctcaatag

SEQ ID NO: 166908 - DNA, 2709 bp, Artificial Sequence
  derived and/or modified sequence
atgtccgagttcagaattcaccacgacgttaatgaactgttgagtcttctgagggtccatgggggagatggcgcagaggtgtacattgacctgctgcagaagaaccgaacaccatacgtgaccaccacagtgagtgctcatagcgcgaaagtcaagattgcagagttctcaagaacccctgaggactttctcaaaaaatacgacgagctcaagtccaagaacaccagaaatctcgatccactcgtctacttgctctccaaactgaccgaggacaaggaaacactgcaatatttgcagcagaacgcgaaggaaagagccgaactggcagccgcagctgttggtagttccactacaagcataaatgtgcccgcagctgcatccaaaatcagcatgcaggagttggaggagctgcggaaacagctgggatccgtggcaaccgggtctaccttacagcagtcgcttgaacttaaacgcaagatgcttcgagacaaacaaaataagaagaattccggccagcatttgcctatctttccggcatgggtatatgagcggcctgctcttattggcgacttcttgatcggggcaggcatttcaactgacaccgccctgcctatcggaacattgcccttggcgtctcaagagtcagcagtcgtcgaggatctgctgtatgttctagttggagtggatggacggtatgtgtctgcacagcccctggccggtaggcagtcaaggacgttcctggtggatcctaacctcgatctctctattcgggagcttgtacatcggatcctcccagtcgccgcaagttactccgcagtgactagatttattgaggagaaaagtagtttcgagtatgggcaggtgaaccacgcacttgccgctgcaatgaggaccctcgtcaaggaacatctgatcttggtctcacagctggaacagctgcatcgacagggtctcctgagcttgcagaagctgtggttttatattcagccagctatgaggaccatggacattctagctagtcttgcaacaagtgtggacaaaggagagtgccttggcggttccaccctgtccctgttgcatgacagatcttttagttacacgggcgactcgcaagctcaggaactgtgcctctaccttaccaaagccgcttccgctccctatttcgaggtgctggagaagtggatctaccgagggatcattcacgacccttattctgagttcatggtggaggagcatgaactgaggaaggaacgcatacaggaggattacaacgacaaatactgggaccaacgatacaccatagttcagcaacaaataccatcatttctgcagaagatggcagacaagatccttagtaccggaaagtatctcaatgtggttagagagtgcgggcatgatgttacttgccctgttgcaaaggaaatcatttacacactcaaagaaagggcctacgtcgaacaaatagaaaaagcgttcaattacgcctccaaagtgctgttggactttctcatggaagaaaaggagttagtcgctcatctgaggtccattaagagatattttctcatggatcagggggatttttttgtgcatttcatggatctggctgaggaagagttgcgtaaaccagtggaggacattacccctccgcgtcttgaggccctgctggagctggcattgaggatgagtaccgccaatacagatccttttaaagatgatcttaagatcgatctgatgccccacgacctcatcacgcagctgcttagggtcctggccattgaaaccaagcaagagaaagccatggcccacgctgacccaacagagcttgcactgtcagggctagaagcattctcctttgattacatagtgaagtggcccctatctctgattatcaaccggaaggcactcacacgatatcagatgctgtttaggcacatgttctactgtaagcacgtggagcgacaactgtgctccgtgtggatctctaacaaaaccgcaaagcagcatagcctgcattctgcccagtggtttgcgggtgctttcacactgaggcagagaatgctgaacttcgtgcaaaacattcagtattatatgatgttcgaagtcatggagccgacctggcacatcttggaaaagaatctgaaatcagccagtaacattgacgatgttctgggccaccatacagggtttctcgatacctgtctgaaggattgtatgctcaccaaccccgaacttcttaaagtgttctcaaagctcatgtctgtatgtgtcatgttcaccaattgcatgcaaaagttcacacaaagcatgaagctggacggagagctgggagggcagacattggagcacagcactgtgctgggtctgccagcaggagcagaagagcgggcacgaaaagagttagcacggaagcatttggcggaacatgccgacacagtgcagctcgtgtccgggttcgaagccactatcaataagttcgataagaatttcagtgcccatctactcgacttgttggcacggctcagcatatactcaaccagcgactgcgagcatggaatggcttccgtgatttcacgcctcgactttaacggcttttatacagaacgtctcgaaaggctcagtgccgagcggtcgcagaaggctacaccacaggttccagtccttcggggacctcccgctcctgcccctcgggttgccgttacggctcagtag

SEQ ID NO: 166909 - DNA, 2319 bp, Artificial Sequence
  derived and/or modified sequence
atgcaggaacttgaagagttacggaaacagctcggaagcgtcgctacaggttctactctccaacagagtctcgagctgaaaagaaaaatgctaagggacaaacagaacaagaagaactccggccagcatttgcctatattccctgcgtgggtttacgagcgccctgctctgattggcgacttcttgatcggtgccggtatttccacagacaccgcgctgcccattgggacgcttcccctggctagtcaggagtctgcagtcgtcgaggatctgctctacgttctagtgggggtcgatggcaggtatgtgagtgcgcagccgctggctgggagacagagtcgaaccttcctggtcgaccccaatctggatttgagcattagagaactagtacaccgtatcctgccagtggctgcgtcatattctgccgtcacgaggtttatagaagagaaaagctcattcgagtacggtcaagtaaatcatgctctagccgcagcaatgcggacactcgtcaaagagcacctgatcctcgtcagtcagctggagcagcttcatagacaggggctcttatctttgcagaaactttggttctacattcagcccgcaatgcgcactatggatattctggcttctctagcgacttcagttgacaaaggcgagtgcttggggggatcaaccctttcccttctccacgaccgtagcttttcatatactggcgattcccaggcccaggaactttgtctttatctgacaaaggcagccagcgccccatactttgaagtgttagaaaaatggatctaccgaggtattatacacgacccttactccgagtttatggtggaggaacacgaacttagaaaagagcggattcaggaagactacaacgacaagtattgggaccaacgttacacaatcgtacaacagcagattcccagcttcctgcaaaaaatggcagacaaaatcctctcaaccggcaagtatttgaacgtggtgcgagaatgcggccatgatgtcacttgtcccgtggccaaggaaatcatttacactttgaaggagagagcctacgtggagcagatcgagaaggccttcaattatgcttctaaggtgctgctggattttctgatggaggagaaagagctggtggcccacctgaggtctatcaagcggtactttctgatggaccagggagactttttcgtccacttcatggacctggccgaagaagagttgcgaaaacccgtggaggacatcactcccccaaggctcgaggccctcttggaactggccctcaggatgagtacggccaacaccgatcctttcaaggacgacctgaaaattgacctaatgccacacgacctcataacccagttgctccgggtgctcgccattgagacaaaacaggaaaaagccatggctcacgcggaccctaccgagctggcactttctgggttagaagccttcagcttcgattacatagtaaaatggccattgtctctgattattaatcgaaaagccttgacgagatatcaaatgctgtttaggcatatgttttactgtaagcatgttgagcgtcagctttgttcagtatggattagtaacaaaactgccaaacagcactcactgcactctgcacagtggtttgccggagcttttacattgcggcagcgcatgttgaacttcgttcagaatattcagtattacatgatgttcgaagtgatggagccgacctggcacatcctcgagaaaaatctgaagagcgcaagtaacattgacgacgttcttggccatcacaccggattcctcgatacatgtctaaaagattgcatgctgaccaaccctgaactccttaaggtgttctctaagttgatgtctgtctgtgtgatgttcaccaactgtatgcaaaaatttacccagagtatgaaactggacggcgagttgggtggacagaccctggaacacagtacagttctgggcctcccagcaggcgcagaggagagggccaggaaagaactggctagaaagcacctggccgagcatgccgatacagtgcaacttgtcagcgggttcgaggccacgattaacaaattcgacaagaacttcagcgcacatttgctggatttgctagccagactgagcatctatagtacgagtgattgcgagcatggcatggcatccgtcatttcgcggctggacttcaacggcttttacacagaaagactcgaacgcctgtcagcagaacgctctcaaaaggcaaccccccaagtccctgtgttgcgaggccctccagcgccagcgcctcgggtggccgttaccgcacagtag

SEQ ID NO: 166910 - DNA, 2884 bp, Artificial Sequence
  derived and/or modified sequence
ggagaacatattgtgatgttcgtgcctcagagctaaaactatgagtgaatttcggattcaccatgacgtcaatgaactgcttagcctgctgcgtgtccacggaggagatggggctgaggtctacattgacctgcttcaaaagaacaggaccccgtacgtcactaccactgtctctgctcacagtgccaaggttaaaattgcagagttttctcgtactccagaagactttctaaagaaatatgatgaactgaaatctaaaaatacaaggaaccttgacccgctggtgtacctgttgtcaaagctcacggaagacaaagagactctgcagtacttacaacagaatgcaaaagaaagagctgagcttgcagccgctgctgtgggcagcagtaccaccagcatcaacgtccctgccgcggcctccaagatctccatgcaggagcttgaggaactgaggaagcagcttggcagcgtggccacaggctccacgctgcagcagtctctggaacttaaaagaaagatgcttcgagacaagcagaacaaaaaaaattcaggccagcacctccccatcttcccagcatgggtgtatgagagacctgccctgatcggggatttcctgattggtgctggcatcagcacagacaccgctttgccgataggcacgttgcccctggcctcgcaggagtcggccgtggtggaggacctgctgtacgtgctggtgggcgtggacgggaggtacgtcagtgctcagcccctggctgggaggcagagccggaccttcctcgtggaccccaacctggacctgtccatcagggagctggtgcacaggatcctcccagtggccgccagctactccgctgtgaccaggttcattgaagagaagtcttccttcgagtacgggcaggtgaaccacgccctggcggccgccatgcgcaccctggtgaaggagcacctgattctggtgtcacagctggagcagctgcacaggcagggcctcctttcgctgcagaagctctggttctacatccagccagccatgcgcaccatggacatcctggcctccctcgccacctcggtggacaaaggcgaatgtcttggggggtccacgctgagcctgctccacgacaggagcttcagctacacaggggacagccaggcgcaggagctatgcctgtacctaaccaaggcggccagtgctccctacttcgaggttctggagaagtggatctacaggggcatcatccacgacccatacagtgagtttatggtcgaggagcacgagctgcggaaggagaggatccaggaggattacaacgacaagtactgggaccagcggtacaccatcgtccagcagcagatcccgtccttcctgcagaaaatggcggacaagatcctcagcacaggaaaatatctaaatgtggtcagagagtgtggccatgacgtcacctgcccggtggctaaagagatcatctacacgttaaaagagcgggcgtatgtggagcagatcgagaaggcgtttaactacgccagcaaggtgctgctggacttcctgatggaggagaaggagctggtggctcacctcaggtccatcaagcgctacttcctcatggaccagggcgacttcttcgtgcacttcatggacctcgcggaggaggagctccggaagccggtggaggacatcacgccccctcgcctggaagcgctcctggagctggcgctgcgcatgagcacggccaacactgaccccttcaaggacgacctcaagatcgacctgatgccccatgacctcatcactcagctcttgcgcgtcctggccatcgagaccaagcaggagaaggcgatggcgcacgccgaccccacggagctggcgctgagcggcctggaggccttctctttcgactacatcgtcaagtggcccctttcgctcatcatcaacaggaaagccctcactcgctaccagatgctcttcaggcacatgttctactgcaagcacgtggagcggcagctctgcagcgtctggatcagcaacaaaaccgccaagcagcactcgctgcactccgcccagtggtttgctggggctttcactctgcggcagcgaatgctcaacttcgtccagaatattcaatactacatgatgtttgaagtgatggaaccgacctggcacatcctggagaaaaacctgaaatccgcctccaacattgacgacgtccttggccaccacacaggcttcctggacacctgcctgaaggactgcatgctcaccaaccccgagctgctgaaggtcttctccaagctcatgtctgtgtgcgtcatgttcaccaactgcatgcagaaatttacacagagcatgaaattagatggcgagctgggcgggcagacgctggagcacagcaccgtcctggggctgcccgcaggggccgaggagcgggcccggaaggagctcgccaggaagcacctggctgagcacgcagacactgtgcagctggtgtccggcttcgaggccaccatcaacaagtttgacaagaacttctcagcccacctgctggacctcctggcccggctgagcatctatagcaccagtgactgtgagcacggcatggccagcgtcatctccaggcttgacttcaatggtttctacacggagcgcctggagcgcctgtctgcagagaggagccagaaggccaccccccaagtgcctgtcctgcgggggcccccggctcctgcacccagggtcgcagtcaccgcacagtgagccctggctgtgacaggaaggaagggtgtggggtcagcagggactggtgcaaatgggtccagaattttcaaatcgaatgctctgtgttctgtctttgcagtttaaatataaagcaggaatgattgactcagctca

SEQ ID NO: 166911 - DNA, 2709 bp, Artificial Sequence
  derived and/or modified sequence
atgagcgagttcagaatccaccacgacgtgaacgagctgctgagcctgctgagagtgcacggcggcgacggcgccgaggtgtacatcgacctgctgcagaagaacagaaccccctacgtgaccaccaccgtgagcgcccacagcgccaaggtgaagatcgccgagttcagcagaacccccgaggacttcctgaagaagtacgacgagctgaagagcaagaacaccagaaacctggaccccctggtgtacctgctgagcaagctgaccgaggacaaggagaccctgcagtacctgcagcagaacgccaaggagagagccgagctggccgccgccgccgtgggcagcagcaccaccagcatcaacgtgcccgccgccgccagcaagatcagcatgcaggagctggaggagctgagaaagcagctgggcagcgtggccaccggcagcaccctgcagcagagcctggagctgaagagaaagatgctgagagacaagcagaacaagaagaacagcggccagcacctgcccatcttccccgcctgggtgtacgagagacccgccctgatcggcgacttcctgatcggcgccggcatcagcaccgacaccgccctgcccatcggcaccctgcccctggccagccaggagagcgccgtggtggaggacctgctgtacgtgctggtgggcgtggacggcagatacgtgagcgcccagcccctggccggcagacagagcagaaccttcctggtggaccccaacctggacctgagcatcagagagctggtgcacagaatcctgcccgtggccgccagctacagcgccgtgaccagattcatcgaggagaagagcagcttcgagtacggccaggtgaaccacgccctggccgccgccatgagaaccctggtgaaggagcacctgatcctggtgagccagctggagcagctgcacagacagggcctgctgagcctgcagaagctgtggttctacatccagcccgccatgagaaccatggacatcctggccagcctggccaccagcgtggacaagggcgagtgcctgggcggcagcaccctgagcctgctgcacgacagaagcttcagctacaccggcgacagccaggcccaggagctgtgcctgtacctgaccaaggccgccagcgccccctacttcgaggtgctggagaagtggatctacagaggcatcatccacgacccctacagcgagttcatggtggaggagcacgagctgagaaaggagagaatccaggaggactacaacgacaagtactgggaccagagatacaccatcgtgcagcagcagatccccagcttcctgcagaagatggccgacaagatcctgagcaccggcaagtacctgaacgtggtgagagagtgcggccacgacgtgacctgccccgtggccaaggagatcatctacaccctgaaggagagagcctacgtggagcagatcgagaaggccttcaactacgccagcaaggtgctgctggacttcctgatggaggagaaggagctggtggcccacctgagaagcatcaagagatacttcctgatggaccagggcgacttcttcgtgcacttcatggacctggccgaggaggagctgagaaagcccgtggaggacatcaccccccccagactggaggccctgctggagctggccctgagaatgagcaccgccaacaccgaccccttcaaggacgacctgaagatcgacctgatgccccacgacctgatcacccagctgctgagagtgctggccatcgagaccaagcaggagaaggccatggcccacgccgaccccaccgagctggccctgagcggcctggaggccttcagcttcgactacatcgtgaagtggcccctgagcctgatcatcaacagaaaggccctgaccagataccagatgctgttcagacacatgttctactgcaagcacgtggagagacagctgtgcagcgtgtggatcagcaacaagaccgccaagcagcacagcctgcacagcgcccagtggttcgccggcgccttcaccctgagacagagaatgctgaacttcgtgcagaacatccagtactacatgatgttcgaggtgatggagcccacctggcacatcctggagaagaacctgaagagcgccagcaacatcgacgacgtgctgggccaccacaccggcttcctggacacctgcctgaaggactgcatgctgaccaaccccgagctgctgaaggtgttcagcaagctgatgagcgtgtgcgtgatgttcaccaactgcatgcagaagttcacccagagcatgaagctggacggcgagctgggcggccagaccctggagcacagcaccgtgctgggcctgcccgccggcgccgaggagagagccagaaaggagctggccagaaagcacctggccgagcacgccgacaccgtgcagctggtgagcggcttcgaggccaccatcaacaagttcgacaagaacttcagcgcccacctgctggacctgctggccagactgagcatctacagcaccagcgactgcgagcacggcatggccagcgtgatcagcagactggacttcaacggcttctacaccgagagactggagagactgagcgccgagagaagccagaaggccaccccccaggtgcccgtgctgagaggcccccccgcccccgcccccagagtggccgtgaccgcccagtag

SEQ ID NO: 166912 - protein, 3230 aa, Artificial Sequence
  derived and/or modified sequence
MQSSPSPAHPQLPVLQTQMVSDGMTGSNPVSPASSSSPASSGAGGISPQHIAQDSSLDGPPGPPDGATVPLEGFSLSQAADLANKGPKWEKSHAEIAEQAKHEAEIETRIAELRKEGFWSLKRLPKVPEPPRPKGHWDYLCEEMQWLSADFAQERRWKRGVARKVVRMVIRHHEEQRQKEERARREEQAKLRRIASTMAKDVRQFWSNVEKVVQFKQQSRLEEKRKKALDLHLDFIVGQTEKYSDLLSQSLNQPLTSSKAGSSPCLGSSSAASSPPPPASRLDDEDGDFQPQEDEEEDDEETIEVEEQQEGNDAEAQRREIELLRREGELPLEELLRSLPPQLLEGPSSPSQTPSSHDSDTRDGPEEGAEEEPPQVLEIKPPPSAVTQRNKQPWHPDEDDEEFTANEEEAEDEEDTIAAEEQLEGEVDHAMELSELAREGELSMEELLQQYAGAYAPGSGSSEDEDEDEVDANSSDCEPEGPVEAEEPPQEDSSSQSDSVEDRSEDEEDEHSEEEETSGSSASEESESEESEDAQSQSQADEEEEDDDFGVEYLLARDEEQSEADAGSGPPTPGPTTLGPKKEITDIAAAAESLQPKGYTLATTQVKTPIPLLLRGQLREYQHIGLDWLVTMYEKKLNGILADEMGLGKTIQTISLLAHLACEKGNWGPHLIIVPTSVMLNWEMELKRWCPSFKILTYYGAQKERKLKRQGWTKPNAFHVCITSYKLVLQDHQAFRRKNWRYLILDEAQNIKNFKSQRWQSLLNFNSQRRLLLTGTPLQNSLMELWSLMHFLMPHVFQSHREFKEWFSNPLTGMIEGSQEYNEGLVKRLHKVLRPFLLRRVKVDVEKQMPKKYEHVIRCRLSKRQRCLYDDFMAQTTTKETLATGHFMSVINILMQLRKVCNHPNLFDPRPVTSPFITPGICFSTASLVLRATDVHPLQRIDMGRFDLIGLEGRVSRYEADTFLPRHRLSRRVLLEVATAPDPPPRPKPVKMKVNRMLQPVPKQEGRTVVVVNNPRAPLGPVPVRPPPGPELSAQPTPGPVPQVLPASLMVSASPAGPPLIPASRPPGPVLLPPLQPNSGSLPQVLPSPLGVLSGTSRPPTPTLSLKPTPPAPVRLSPAPPPGSSSLLKPLTVPPGYTFPPAAATTTSTTTATATTTAVPAPTPAPQRLILSPDMQARLPSGEVVSIGQLASLAQRPVANAGGSKPLTFQIQGNKLTLTGAQVRQLAVGQPRPLQRNVVHLVSAGGQHHLISQPAHVALIQAVAPTPGPTPVSVLPSSTPSTTPAPTGLSLPLAANQVPPTMVNNTGVVKIVVRQAPRDGLTPVPPLAPAPRPPSSGLPAVLNPRPTLTPGRLPTPTLGTARAPMPTPTLVRPLLKLVHSPSPEVSASAPGAAPLTISSPLHVPSSLPGPASSPMPIPNSSPLASPVSSTVSVPLSSSLPISVPTTLPAPASAPLTIPISAPLTVSASGPALLTSVTPPLAPVVPAAPGPPSLAPSGASPSASALTLGLATAPSLSSSQTPGHPLLLAPTSSHVPGLNSTVAPACSPVLVPASALASPFPSAPNPAPAQASLLAPASSASQALATPLAPMAAPQTAILAPSPAPPLAPLPVLAPSPGAAPVLASSQTPVPVMAPSSTPGTSLASASPVPAPTPVLAPSSTQTMLPAPVPSPLPSPASTQTLALAPALAPTLGGSSPSQTLSLGTGNPQGPFPTQTLSLTPASSLVPTPAQTLSLAPGPPLGPTQTLSLAPAPPLAPASPVGPAPAHTLTLAPASSSASLLAPASVQTLTLSPAPVPTLGPAAAQTLALAPASTQSPASQASSLVVSASGAAPLPVTMVSRLPVSKDEPDTLTLRSGPPSPPSTATSFGGPRPRRQPPPPPRSPFYLDSLEEKRKRQRSERLERIFQLSEAHGALAPVYGTEVLDFCTLPQPVASPIGPRSPGPSHPTFWTYTEAAHRAVLFPQQRLDQLSEIIERFIFVMPPVEAPPPSLHACHPPPWLAPRQAAFQEQLASELWPRARPLHRIVCNMRTQFPDLRLIQYDCGKLQTLAVLLRQLKAEGHRVLIFTQMTRMLDVLEQFLTYHGHLYLRLDGSTRVEQRQALMERFNADKRIFCFILSTRSGGVGVNLTGADTVVFYDSDWNPTMDAQAQDRCHRIGQTRDVHIYRLISERTVEENILKKANQKRMLGDMAIEGGNFTTAYFKQQTIRELFDMPLEEPSSSSVPSAPEEEEETVASKQTHILEQALCRAEDEEDIRAATQAKAEQVAELAEFNENDGFPAGEGEEAGRPGAEDEEMSRAEQEIAALVEQLTPIERYAMKFLEASLEEVSREELKQAEEQVEAARKDLDQAKEEVFRLPQEEEEGPGAGDESSCGTGGGTHRRSKKAKAPERPGTRVSERLRGARAETQGANHTPVISAHQTRSTTTPPRCSPARERVPRPAPRPRPTPASAPAAIPALVPVPVSAPVPISAPNPITILPVHILPSPPPPSQIPPCSSPACTPPPACTPPPAHTPPPAQTCLVTPSSPLLLGPPSVPISASVTNLPLGLRPEAELCAQALASPESLELASVASSETSSLSLVPPKDLLPVAVEILPVSEKNLSLTPSAPSLTLEAGSIPNGQEQEAPDSAEGTTLTVLPEGEELPLCVSESNGLELPPSAASDEPLQEPLEADRTSEELTEAKTPTSSPEKPQELVTAEVAAPSTSSSATSSPEGPSPARPPRRRTSADVEIRGQGTGRPGQPPGPKVLRKLPGRLVTVVEEKELVRRRRQQRGAASTLVPGVSETSASPGSPSVRSMSGPESSPPIGGPCEAAPSSSLPTPPQQPFIARRHIELGVTGGGSPENGDGALLAITPPAVKRRRGRPPKKNRSPADAGRGVDEAPSSTLKGKTNGADPVPGPETLIVADPVLEPQLIPGPQPLGPQPVHRPNPLLSPVEKRRRGRPPKARDLPIPGTISSAGDGNSESRTQPPPHPSPLTPLPPLLVCPTATVANTVTTVTISTSPPKRKRGRPPKNPPSPRPSQLPVLDRDSTSVLESCGLGRRRQPQGQGESEGSSSDEDGSRPLTRLARLRLEAEGMRGRKSGGSMVVAVIQDDLDLADSGPGGLELTPPVVSLTPKLRSTRLRPGSLVPPLETEKLPRKRAGAPVGGSPGLAKRGRLQPPSPLGPEGSVEESEAEASGEEEEGDGTPRRRPGPRRLVGTTNQGDQRILRSSAPPSLAGPAVSHRGRKAKT

SEQ ID NO: 166913 - protein, 3072 aa, Artificial Sequence
  derived and/or modified sequence
MQSSPSPAHPQLPVLQTQMVSDGMTGSNPVSPASSSSPASSGAGGISPQHIAQDSSLDGPPGPPDGATVPLEGFSLSQAADLANKGPKWEKSHAEIAEQAKHEAEIETRIAELRKEGFWSLKRLPKVPEPPRPKGHWDYLCEEMQWLSADFAQERRWKRGVARKVVRMVIRHHEEQRQKEERARREEQAKLRRIASTMAKDVRQFWSNVEKVVQFKQQSRLEEKRKKALDLHLDFIVGQTEKYSDLLSQSLNQPLTSSKAGSSPCLGSSSAASSPPPPASRLDDEDGDFQPQEDEEEDDEETIEVEEQQEGNDAEAQRREIELLRREGELPLEELLRSLPPQLLEGPSSPSQTPSSHDSDTRDGPEEGAEEEPPQVLEIKPPPSAVTQRNKQPWHPDEDDEEFTANEEEAEDEEDTIAAEEQLEGEVDHAMELSELAREGELSMEELLQQYAGAYAPGSGSSEDEDEDEVDANSSDCEPEGPVEAEEPPQEDSSSQSDSVEDRSEDEEDEHSEEEETSGSSASEESESEESEDAQSQSQADEEEEDDDFGVEYLLARDEEQSEADAGSGPPTPGPTTLGPKKEITDIAAAAESLQPKGYTLATTQVKTPIPLLLRGQLREYQHIGLDWLVTMYEKKLNGILADEMGLGKTIQTISLLAHLACEKGNWGPHLIIVPTSVMLNWEMELKRWCPSFKILTYYGAQKERKLKRQGWTKPNAFHVCITSYKLVLQDHQAFRRKNWRYLILDEAQNIKNFKSQRWQSLLNFNSQRRLLLTGTPLQNSLMELWSLMHFLMPHVFQSHREFKEWFSNPLTGMIEGSQEYNEGLVKRLHKVLRPFLLRRVKVDVEKQMPKKYEHVIRCRLSKRQRCLYDDFMAQTTTKETLATGHFMSVINILMQLRKVCNHPNLFDPRPVTSPFITPGICFSTASLVLRATDVHPLQRIDMGRFDLIGLEGRVSRYEADTFLPRHRLSRRVLLEVATAPDPPPRPKPVKMKVNRMLQPVPKQEGRTVVVVNNPRAPLGPVPVRPPPGPELSAQPTPGPVPQVLPASLMVSASPAGPPLIPASRPPGPVLLPPLQPNSGSLPQAGEVVSIGQLASLAQRPVANAGGSKPLTFQIQGNKLTLTGAQVRQLAVGQPRPLQMPPTMVNNTGVVKIVVRQAPRDGLTPVPPLAPAPRPPSSGLPAVLNPRPTLTPGRLPTPTLGTARAPMPTPTLVRPLLKLVHSPSPEVSASAPGAAPLTISSPLHVPSSLPGPASSPMPIPNSSPLASPVSSTVSVPLSSSLPISVPTTLPAPASAPLTIPISAPLTVSASGPALLTSVTPPLAPVVPAAPGPPSLAPSGASPSASALTLGLATAPSLSSSQTPGHPLLLAPTSSHVPGLNSTVAPACSPVLVPASALASPFPSAPNPAPAQASLLAPASSASQALATPLAPMAAPQTAILAPSPAPPLAPLPVLAPSPGAAPVLASSQTPVPVMAPSSTPGTSLASASPVPAPTPVLAPSSTQTMLPAPVPSPLPSPASTQTLALAPALAPTLGGSSPSQTLSLGTGNPQGPFPTQTLSLTPASSLVPTPAQTLSLAPGPPLGPTQTLSLAPAPPLAPASPVGPAPAHTLTLAPASSSASLLAPASVQTLTLSPAPVPTLGPAAAQTLALAPASTQSPASQASSLVVSASGAAPLPVTMVSRLPVSKDEPDTLTLRSGPPSPPSTATSFGGPRPRRQPPPPPRSPFYLDSLEEKRKRQRSERLERIFQLSEAHGALAPVYGTEVLDFCTLPQPVASPIGPRSPGPSHPTFWTYTEAAHRAVLFPQQRLDQLSEIIERFIFVMPPVEAPPPSLHACHPPPWLAPRQAAFQEQLASELWPRARPLHRIVCNMRTQFPDLRLIQYDCGKLQTLAVLLRQLKAEGHRVLIFTQMTRMLDVLEQFLTYHGHLYLRLDGSTRVEQRQALMERFNADKRIFCFILSTRSGGVGVNLTGADTVVFYDSDWNPTMDAQAQDRCHRIGQTRDVHIYRLISERTVEENILKKANQKRMLGDMAIEGGNFTTAYFKQQTIRELFDMPLEEPSSSSVPSAPEEEEETVASKQTHILEQALCRAEDEEDIRAATQAKAEQVAELAEFNENDGFPAGEGEEAGRPGAEDEEMSRAEQEIAALVEQLTPIERYAMKFLEASLEEVSREELKQAEEQVEAARKDLDQAKEEVFRLPQEEEEGPGAGDESSCGTGGGTHRRSKKAKAPERPGTRVSERLRGARAETQGANHTPVISAHQTRSTTTPPRCSPARERVPRPAPRPRPTPASAPAAIPALVPVPVSAPVPISAPNPITILPVHILPSPPPPSQIPPCSSPACTPPPACTPPPAHTPPPAQTCLVTPSSPLLLGPPSVPISASVTNLPLGLRPEAELCAQALASPESLELASVASSETSSLSLVPPKDLLPVAVEILPVSEKNLSLTPSAPSLTLEAGSIPNGQEQEAPDSAEGTTLTVLPEGEELPLCVSESNGLELPPSAASDEPLQEPLEADRTSEELTEAKTPTSSPEKPQELVTAEVAAPSTSSSATSSPEGPSPARPPRRRTSADVEIRGQGTGRPGQPPGPKVLRKLPGRLVTVVEEKELVRRRRQQRGAASTLVPGVSETSASPGSPSVRSMSGPESSPPIGGPCEAAPSSSLPTPPQQPFIARRHIELGVTGGGSPENGDGALLAITPPAVKRRRGRPPKKNRSPADAGRGVDEAPSSTLKGKTNGADPVPGPETLIVADPVLEPQLIPGPQPLGPQPVHRPNPLLSPVEKRRRGRPPKARDLPIPGTISSAGDGNSESRTQPPPHPSPLTPLPPLLVCPTATVANTVTTVTISTSPPKRKRGRPPKNPPSPRPSQLPVLDRDSTSVLESCGLGRRRQPQGQGESEGSSSDEDGSRPLTRLARLRLEAEGMRGRKSGGSMVVAVIQDDLDLADSGPGGLELTPPVVSLTPKLRSTRLRPGSLVPPLETEKLPRKRAGAPVGGSPGLAKRGRLQPPSPLGPEGSVEESEAEASGEEEEGDGTPRRRPGPRRLVGTTNQGDQRILRSSAPPSLAGPAVSHRGRKAKT

SEQ ID NO: 166914 - protein, 3168 aa, Artificial Sequence
  derived and/or modified sequence
MQSSPSPAHPQLPVLQTQMVSDGMTGSNPVSPASSSSPASSGAGGISPQHIAQDSSLDGPPGPPDGATVPLEGFSLSQAADLANKGPKWEKSHAEIAEQAKHEAEIETRIAELRKEGFWSLKRLPKVPEPPRPKGHWDYLCEEMQWLSADFAQERRWKRGVARKVVRMVIRHHEEQRQKEERARREEQAKLRRIASTMAKDVRQFWSNVEKVVQFKQQSRLEEKRKKALDLHLDFIVGQTEKYSDLLSQSLNQPLTSSKAGSSPCLGSSSAASSPPPPASRLDDEDGDFQPQEDEEEDDEETIEVEEQQEGNDAEAQRREIELLRREGELPLEELLRSLPPQLLEGPSSPSQTPSSHDSDTRDGPEEGAEEEPPQVLEIKPPPSAVTQRNKQPWHPDEDDEEFTANEEEAEDEEDTIAAEEQLEGEVDHAMELSELAREGELSMEELLQQYAGAYAPGSGSSEDEDEDEVDANSSDCEPEGPVEAEEPPQEDSSSQSDSVEDRSEDEEDEHSEEEETSGSSASEESESEESEDAQSQSQADEEEEDDDFGVEYLLARDEEQSEADAGSGPPTPGPTTLGPKKEITDIAAAAESLQPKGYTLATTQVKTPIPLLLRGQLREYQHIGLDWLVTMYEKKLNGILADEMGLGKTIQTISLLAHLACEKGNWGPHLIIVPTSVMLNWEMELKRWCPSFKILTYYGAQKERKLKRQGWTKPNAFHVCITSYKLVLQDHQAFRRKNWRYLILDEAQNIKNFKSQRWQSLLNFNSQRRLLLTGTPLQNSLMELWSLMHFLMPHVFQSHREFKEWFSNPLTGMIEGSQEYNEGLVKRLHKVLRPFLLRRVKVDVEKQMPKKYEHVIRCRLSKRQRCLYDDFMAQTTTKETLATGHFMSVINILMQLRKVCNHPNLFDPRPVTSPFITPGICFSTASLVLRATDVHPLQRIDMGRFDLIGLEGRVSRYEADTFLPRHRLSRRVLLEVATAPDPPPRPKPVKMKVNRMLQPVPKQEGRTVVVVNNPRAPLGPVPVRPPPGPELSAQPTPGPVPQVLPASLMVSASPAGPPLIPASRPPGPVLLPPLQPNSGSLPQVLPSPLGVLSGTSRPPTPTLSLKPTPPAPVRLSPAPPPGSSSLLKPLTVPPGYTFPPAAATTTSTTTATATTTAVPAPTPAPQRLILSPDMQARLPSGEVVSIGQLASLAQRPVANAGGSKPLTFQIQGNKLTLTGAQVRQLAVGQPRPLQMPPTMVNNTGVVKIVVRQAPRDGLTPVPPLAPAPRPPSSGLPAVLNPRPTLTPGRLPTPTLGTARAPMPTPTLVRPLLKLVHSPSPEVSASAPGAAPLTISSPLHVPSSLPGPASSPMPIPNSSPLASPVSSTVSVPLSSSLPISVPTTLPAPASAPLTIPISAPLTVSASGPALLTSVTPPLAPVVPAAPGPPSLAPSGASPSASALTLGLATAPSLSSSQTPGHPLLLAPTSSHVPGLNSTVAPACSPVLVPASALASPFPSAPNPAPAQASLLAPASSASQALATPLAPMAAPQTAILAPSPAPPLAPLPVLAPSPGAAPVLASSQTPVPVMAPSSTPGTSLASASPVPAPTPVLAPSSTQTMLPAPVPSPLPSPASTQTLALAPALAPTLGGSSPSQTLSLGTGNPQGPFPTQTLSLTPASSLVPTPAQTLSLAPGPPLGPTQTLSLAPAPPLAPASPVGPAPAHTLTLAPASSSASLLAPASVQTLTLSPAPVPTLGPAAAQTLALAPASTQSPASQASSLVVSASGAAPLPVTMVSRLPVSKDEPDTLTLRSGPPSPPSTATSFGGPRPRRQPPPPPRSPFYLDSLEEKRKRQRSERLERIFQLSEAHGALAPVYGTEVLDFCTLPQPVASPIGPRSPGPSHPTFWTYTEAAHRAVLFPQQRLDQLSEIIERFIFVMPPVEAPPPSLHACHPPPWLAPRQAAFQEQLASELWPRARPLHRIVCNMRTQFPDLRLIQYDCGKLQTLAVLLRQLKAEGHRVLIFTQMTRMLDVLEQFLTYHGHLYLRLDGSTRVEQRQALMERFNADKRIFCFILSTRSGGVGVNLTGADTVVFYDSDWNPTMDAQAQDRCHRIGQTRDVHIYRLISERTVEENILKKANQKRMLGDMAIEGGNFTTAYFKQQTIRELFDMPLEEPSSSSVPSAPEEEEETVASKQTHILEQALCRAEDEEDIRAATQAKAEQVAELAEFNENDGFPAGEGEEAGRPGAEDEEMSRAEQEIAALVEQLTPIERYAMKFLEASLEEVSREELKQAEEQVEAARKDLDQAKEEVFRLPQEEEEGPGAGDESSCGTGGGTHRRSKKAKAPERPGTRVSERLRGARAETQGANHTPVISAHQTRSTTTPPRCSPARERVPRPAPRPRPTPASAPAAIPALVPVPVSAPVPISAPNPITILPVHILPSPPPPSQIPPCSSPACTPPPACTPPPAHTPPPAQTCLVTPSSPLLLGPPSVPISASVTNLPLGLRPEAELCAQALASPESLELASVASSETSSLSLVPPKDLLPVAVEILPVSEKNLSLTPSAPSLTLEAGSIPNGQEQEAPDSAEGTTLTVLPEGEELPLCVSESNGLELPPSAASDEPLQEPLEADRTSEELTEAKTPTSSPEKPQELVTAEVAAPSTSSSATSSPEGPSPARPPRRRTSADVEIRGQGTGRPGQPPGPKVLRKLPGRLVTVVEEKELVRRRRQQRGAASTLVPGVSETSASPGSPSVRSMSGPESSPPIGGPCEAAPSSSLPTPPQQPFIARRHIELGVTGGGSPENGDGALLAITPPAVKRRRGRPPKKNRSPADAGRGVDEAPSSTLKGKTNGADPVPGPETLIVADPVLEPQLIPGPQPLGPQPVHRPNPLLSPVEKRRRGRPPKARDLPIPGTISSAGDGNSESRTQPPPHPSPLTPLPPLLVCPTATVANTVTTVTISTSPPKRKRGRPPKNPPSPRPSQLPVLDRDSTSVLESCGLGRRRQPQGQGESEGSSSDEDGSRPLTRLARLRLEAEGMRGRKSGGSMVVAVIQDDLDLADSGPGGLELTPPVVSLTPKLRSTRLRPGSLVPPLETEKLPRKRAGAPVGGSPGLAKRGRLQPPSPLGPEGSVEESEAEASGEEEEGDGTPRRRPGPRRLVGTTNQGDQRILRSSAPPSLAGPAVSHRGRKAKT

SEQ ID NO: 166915 - protein, 59 aa, Artificial Sequence
  derived and/or modified sequence
MQSSPSPAHPQLPVLQTQMVSDGMTGSNPVSPASSSSPASSGAGGISPQHIAQDSSLDG

SEQ ID NO: 166916 - DNA, 10491 bp, Artificial Sequence
  derived and/or modified sequence
aacttgggcagaggtcaggggtcacgcgaggtcagtccgtcgggagggctagggagatggtcacgaaacctgaagtcaagagttaaggcttgttggcttctggtgtgattcccttcagtacggcggcaccgtggaagtgcagactttcacagggggtgtggtctcagctcacacaggtgctccagaggctggtggacctgagcggaggctgggacgccctggtgggccccgggccctggaaggcgggtcccggtggccggtggcccagaatgaggccagctcccagcatgccctgcagccggacgccagcccctcggccagcagtactggtgataacaacccagtcattcttcaggcatccaagggggagcctgggagtgggaccatgcagagcagcccctcccctgctcaccctcagctcccagtcctacagacacagatggtgtcggacggcatgacaggcagcaatcctgtgtcccctgcctcatccagttccccagcctctagtggggcaggcggcatctccccgcagcacatagctcaagattcctcactggatggacctccaggccccccagatggtgccacagtgcccctggaggggttcagcttatcccaggctgctgacctggctaacaagggcccgaagtgggagaagagccatgccgaaattgcagaacaggccaagcatgaggccgagatcgagactcggattgctgagctgcggaaggagggtttctggtcactgaagaggctgcctaaggtgccagagccccctcgccccaaaggtcactgggactatttgtgcgaagagatgcagtggctctctgctgactttgctcaggagcgccgttggaaacggggtgtggcccggaaggtggtgcgcatggtgatccggcaccacgaggagcagcggcagaaagaggaacgggcccggagggaggagcaggccaagctgcgtcgaattgcttccaccatggccaaggatgtcaggcagttctggagcaatgtggagaaggtggtgcaattcaagcaacagtcccggcttgaggaaaagcgcaaaaaagccctggacctgcatttggacttcattgtggggcaaactgaaaagtactcggaccttctgtctcagagcctcaaccagccattaacctccagcaaagcaggctcttccccttgcctcggctcttcctcagctgcctccagtcctccaccccctgcttctcgcctggatgatgaagatggggactttcaaccccaagaggatgaggaagaggatgatgaggaaacgattgaagttgaagaacaacaggaaggcaatgatgcagaggcccagaggcgtgagattgagctgcttcgccgtgagggagaattgccactggaagagctgctccgttcccttccccctcagctgttggaagggccttccagcccctctcaaaccccctcatctcatgatagtgacacccgagatgggcctgaagaaggtgctgaagaagagccccctcaggtgttggagataaagcccccaccctctgctgtcacacagcgcaacaaacagccttggcatccagatgaagatgatgaagagtttactgccaacgaagaggaagcggaggatgaagaggatactatagcagctgaggaacagttggaaggggaggtggatcatgccatggagctgagcgagttggctcgagaaggtgagctttccatggaggagctattgcagcagtatgcaggagcctatgccccaggctctgggagcagtgaagatgaggatgaagatgaggttgatgctaatagctctgactgtgaaccagaggggcccgtggaagcggaagagcctcctcaggaggatagtagcagtcagtcagactctgtggaggaccggagtgaggatgaggaagatgaacattcagaggaggaagaaacaagtggaagttcagcatcagaggaatctgagtctgaagagtctgaggatgcccaatcacagagccaagcagatgaagaggaggaagatgatgattttggggtggagtacttgcttgccagggatgaagagcagagtgaggcagatgcaggcagtgggcctcctactccagggcccactactctaggtccaaagaaagaaattactgacattgctgcagcagctgaaagtctccagcccaagggttacacgctggccacgacccaggtaaagacgcccattcccctgcttctgcggggccagctccgggagtaccagcacattgggctagactggctggttaccatgtatgagaagaagcttaatggcattcttgctgatgagatggggcttgggaagaccatccagaccatctctctgcttgcccacttggcttgtgagaaaggtaactggggtccccatttaatcattgttcccaccagcgtgatgttgaactgggagatggagttgaaacgttggtgccccagctttaaaatcctcacttactatggagcccagaaagagaggaagctcaagcggcagggctggaccaagcccaatgcctttcatgtgtgtatcacatcttacaagctggtgctgcaggaccaccaggccttccgtcgcaagaactggcgctatctcattctggatgaggcgcagaacatcaagaacttcaagtcacagcgctggcagtcactcctcaacttcaacagccagagacgcctgctcctgacaggaactcccttgcagaacagcctcatggagctgtggtccttgatgcactttttgatgccccatgtcttccagtctcatcgcgagttcaaggagtggttctctaatcccctaactggcatgattgagggcagccaagagtataatgaaggtctagtcaaacgcctccacaaggttttgaggccttttttactgcgccgagttaaggtggatgttgagaagcagatgcccaaaaagtacgagcatgttatccgctgcaggctctccaagcgtcaacgctgtctctatgatgacttcatggcacagaccacaactaaggagacactagccacaggccatttcatgagcgtcatcaacattttgatgcagctgagaaaagtttgcaatcatccaaatctgttcgaccctcgaccggttacctcccctttcatcaccccaggcatctgcttcagcaccgcctctctggtgctaagggccacggatgtccatcccctccagcggatagacatgggtcgatttgaccttattggcctggaaggtcgtgtctctcgatatgaggcagacacatttctgccccggcaccgcctctctcgccgggtactgttagaagtggctactgctcctgaccccccaccccggcccaagccagtcaagatgaaggtcaacaggatgctgcagccagtacctaagcaagaaggccggacagtggtggtggtgaacaacccacgggcgcccctgggccctgtcccagttcgacctcctccaggtcctgagctctcagcccagcccacccctggcccagtcccccaagtgctgccagcatcactgatggtttcagcctcacctgccgggcccccgcttattcctgcatctcggcctcctggccctgtcctcttgcctccactgcagcccaacagtggttctctcccccaggtgttgccatcccccctgggggtcctgagtgggacctcacggcctcccacgccaaccttgtccctaaagccaacaccacctgccccagttcgcctgagcccagccccacctccaggctcctctagcctgttgaagcccctgacagtgccaccaggctacaccttccctcctgctgctgccaccaccacttctaccaccacggcaactgctaccaccacagcagtgccagctccgactcctgcaccacagcgcctcattctatctcccgatatgcaggctcgcctgccctcaggcgaagtggtcagcatcgggcagttagcctcactggcacaacgtccagtggctaatgcagggggaagcaaacctctcaccttccaaatccagggcaacaagctgactttgactggtgcccaggtgcgccagcttgctgtggggcagccccgcccgctgcaaaggaatgtggtgcacctcgtgtcagcaggggggcagcaccatctcatcagccagcctgcccatgtggccctcatccaggccgtggccccgacccctggccctacccctgtctctgtgctgccttcttcgacccccagcaccacccctgcccctactggcctcagccttccgcttgctgctaaccaggtgccaccaaccatggtgaataatacaggcgtggtgaagattgtagtgagacaagcccctcgggatggactgactcctgttcctccattggccccagcaccccggcctccgagctctgggcttccagctgtgttgaatccacgccccacgttaacccctggccggctacccacacctactctgggtactgctcgagcccccatgcccacacccactctggtgaggcctcttctcaagctggtccacagtccttcacctgaagtcagtgcttcagcccccggagctgcccccttgaccatctcttctcctctccacgtgccatcctcactccctgggccagcctcttctccaatgccaattcccaactcctctccccttgctagtcctgtgtcctctacagtctcagttccattgtcatcttcactccccatctctgtccccaccacacttcctgccccagcctcggctccactcaccatccccatctcagcccccttgactgtttctgcttcgggcccagctctgttgaccagtgtgactccaccattggcacctgttgtcccagcggctcctggacctccctccttggcaccatctggtgcttccccgtcagcatcagccttgactctaggtttggccacagctccatccctgtcttcatctcagacacctggtcaccctctgttgttggctcccacctcttcacatgttccagggttgaactcaaccgtggccccagcatgctcacctgtcctggtgccagcttcggctctggccagtccttttccgtcagcaccaaatccagctccagctcaggcttcccttctggctccagcatcttctgcatctcaggctctagccacccctctggctcctatggcggctccacagacagcaattctggctccttctccagctcctcctctggctcctcttccggtcctggcaccatcgccaggtgctgctcctgtcctggcttcatcacagactccggttccagttatggctccatcgtctactccaggaacctctttagcctcagcttcaccggtaccagctccaacccctgtgttggctccatcatcaactcaaactatgctaccagccccggttccgtcacctctcccgagcccggcttctacgcagacactggccctagccccagctttagcacccactcttggaggctcatctccatctcagacactctctttgggaacggggaacccccagggaccctttccaactcagacattgtcattaactccagcatcatccctggtaccaactccagcccagacactgtctttggcaccaggaccaccactgggtccaactcagacgctgtctctggctccagcaccccctctggctccagcttctccagtgggcccagccccagctcacacgctgactttggctccagcatcgtcatctgcttcactcctggccccagcttcagtgcagacactgaccttgagccctgccccagttcctaccctgggcccggccgcagctcagaccttggcgctggccccagcctccacacagtccccagcttcccaggcatcttcccttgtggtttcggcatctggtgccgctcccttgcctgtcaccatggtatcccggctgcctgtttccaaggatgagcctgacacactgacattgcgctctggtccccccagccctccctccactgctacctcgtttggtggcccccggcctcgacgccagccccccccaccacctcgttcccctttttatctggactccctggaggaaaagcggaagcggcagcggtctgaacgcctggaacggattttccaacttagtgaggctcatggggccctggcacctgtgtatgggactgaagtcctggatttctgtaccctgccccaacctgttgccagccccatcggccctcgttctcctggccccagccaccccaccttttggacttataccgaggctgcccaccgggctgtactgtttccccagcagcgactagaccagctgtcagaaatcattgagaggttcatctttgtcatgcctcctgtggaggcacctcccccttccctgcatgcctgccacccacctccttggctggccccacgtcaggcagccttccaggagcaattggcctctgagctctggccccgggctcgtcctttgcaccgtattgtgtgtaacatgcgcacccagttccctgacttaagactcatccagtatgattgcggaaagttgcagacgttggcagtgctgttgcggcagctcaaggcagagggccaccgagtgctcatcttcacccagatgacccgaatgctggatgtattggagcagtttctcacctaccatggccatctctacctgcgcctggatggatctactagagttgaacagagacaggccttgatggaacggttcaatgcagacaaacgcatattctgcttcatcctttcaactcggagtgggggtgtgggcgtgaacctgacaggagcagacactgttgttttttatgacagcgactggaatcccaccatggatgctcaggcccaggaccgctgtcaccgaattggccagacccgggatgtccacatatataggcttatcagtgaacggacagtggaggagaacatcctaaaaaaggcaaatcagaagagaatgttgggggacatggccattgagggaggcaacttcaccacagcctatttcaaacagcagaccatccgagagctgtttgatatgcccctggaggaaccttctagctcatccgtgccctctgcccctgaagaggaggaagagactgtggccagcaagcagactcatattctggagcaggcattgtgtcgggcagaagatgaagaggatatccgtgcagccacccaggccaaggctgaacaggtggctgagcttgcagaatttaatgagaacgatgggtttcctgctggtgagggagaggaagctggccggcctggggctgaggatgaggagatgtcccgggctgagcaggaaattgctgccctcgtagaacagctgacccccattgagcgctatgccatgaaattcctggaggcctcactggaggaggtgagccgagaggagctcaaacaggcagaagagcaagtggaagctgcccgcaaagacctggaccaagccaaggaggaggtgttccgcctaccccaagaggaggaggaggggccgggggctggggatgagagttcctgtgggactggtggaggcacccaccggcgcagtaaaaaggccaaagcccctgagaggccggggactcgtgtcagtgagcgtcttcgtggagcccgggctgagactcaaggggcaaaccacactcctgtcatatccgcccatcaaactcgcagcaccaccacaccaccccgctgcagtcctgccagggagcgagttcccaggccagcacctaggcctcgacccactccagcttcagctccggctgcaattcctgcccttgttcctgtcccagtttctgccccagtacccatttcagccccaaatccaataaccattctccctgtccatatcttgccttctcctccccctccttcacagattcctccttgttcttctcctgcctgcacccctcctcctgcctgtacccctccaccagctcatacaccgcctccagcccaaacctgtcttgtaactccttcctctcctctcttgcttggtccaccttctgtgcccatctctgcctcagtcactaatctccccttgggcttgaggcctgaggcagagctgtgtgcccaggcattggcatctccagagtccctggagctggcttctgtggccagttcagaaacctcctcactttctcttgtgccccctaaagatctgttgccagttgctgtggagatcctgcctgtgtcagagaagaacctttctctcaccccttctgcacccagcctgaccttggaggctggcagcatccccaatggtcaagagcaggaggcaccagattctgctgaggggaccacccttacagtgctgcctgaaggtgaggagttgcccctgtgtgtgagtgagagcaatggcctggagctcccaccctcagcagcatctgatgagccacttcaggagccactggaggctgacaggacctcggaagagctgacagaggccaagaccccaacctccagcccagagaagccacaggaactcgttacagctgaggttgcagctccatccacctcatcttcagccacttcctcgcctgagggtccttcacctgcccgacctcctcggcgtcgcaccagtgctgatgtggaaattaggggtcaagggactggtcggccaggacaaccaccaggccccaaagtgcttcgaaagctgccaggacggctggtaactgtggtagaggaaaaggaactggtgcggcggcggcggcagcagcggggagctgccagcaccctagtgcctggggtctctgagactagtgccagcccgggaagcccgtctgtccgcagcatgtcagggccagaatcctcccctcccattggtgggccctgtgaagctgctccttcatcctcactgcccactccaccccagcagcccttcattgctcgccgtcacattgagctgggggtgactggtggtggcagccccgagaatggagacggagcactgctcgccatcaccccacctgctgtgaaacgtcggagggggaggccccccaagaagaacaggtctccagcagatgctgggagaggtgtggatgaggcaccctcatccaccttgaagggaaaaaccaatggggctgacccagtccctgggcctgagaccctaattgttgcagatcctgtcctggaaccacagcttattcctgggccccagcctcttggaccccagccagttcacagacccaatcccctcctgtcacctgtggagaaaagaaggcgaggacgaccccctaaagcacgagatttgcccatccctgggaccatttcctctgcaggggatggcaactccgaaagtcggacacagccacccccacacccatcacccctaaccccactcccaccactgctagtttgtcccactgctactgttgccaacactgtcaccactgtcaccatttcaacgtccccacccaaacggaagaggggccgacctcccaagaatcctccatcacctcggcccagccagctccccgtcttggaccgtgacagcacttctgttctcgagagctgtggattggggaggcgacggcaaccccagggccaaggggagagtgagggtagttcctctgatgaggatggaagccgccccctcacccgcctggcccgccttcggcttgaagcagaaggaatgcgaggacggaagagtggagggtccatggtggtggctgtaattcaggatgacctggacttagcagatagcgggccaggcgggttggaattgacaccacctgtggtctcactaaccccaaaactgcgctcgacccggctgcgtccagggtctctagtccccccactagagactgagaagttgcctcgcaaacgagcaggggccccagttggtgggagtcctgggctggcaaagcggggccgcctacagcccccaagtcccctggggcctgagggttcagtagaggagtctgaggctgaagcctcaggtgaggaggaggaaggggatgggaccccacgccgacgtcctggcccccgccggcttgttgggaccaccaaccaaggggaccagcgcatcctgcgcagcagcgcccctccctccctggctggccctgctgttagtcacagaggccgcaaggccaagacgtgagtgggctgcccctccacctaggctttccaccgtggccactccctccatgaccaggcctgactctgttaaccactacttgaagtcttgagggggaaagcctccagggagacataggggccttctcccttcttcccaccaaagtagggggtaggcaactggttgtcatggaaatggggatcatcacagtccccttccccttcaccccacgtggctgggcagtgttaagggtggcaagatagtctctgtccccacccccttgtacttgattccccagctgtctttcacacagccccccacccttaggggaagggggaggggcttctctacaatgaggtttttttcttttttttttttttttaagaagaaaaaataataaacttagtttctgtatgagcaaaaaaaaaaaaaaaaaa

SEQ ID NO: 166917 - DNA, 555 bp, Artificial Sequence
  derived and/or modified sequence
atgttctgcctgctgcacctgtgcttctacctggccaacttcgccagcagcatcaagagaacccacgccgtgaacggctgctgcggcctgcagatgatcgccctgtgggcccagagcagcggcaacgccgacgccagagtggaggagatcctggccggcgaggagagaagactggccgccctgctgggcagccagggcatgagattctgggtgtgcctggccgcctgcagagccatgtggggcctggccgccagaagaggcagagccgaggacagcagcagcagccccgtggacgccagcaagttcccctggagaggcggccagcacagaaccaccatgatgccctgcctgctgagagtgggcgtgttcagaccctgccacgtgagacccaccggcgaccccagctgcgacgtgcagccccccagactgggcttcagcagagtgcccgacacccaggtggccttctacggcagcggccactgggaccccacccccttcagcgtgcacagctgcttcttcaacttccaggtgagaaagatcatcttcctgctgtag

SEQ ID NO: 166918 - DNA, 618 bp, Artificial Sequence
  derived and/or modified sequence
atgagagagcccctgatccccccctgcaaggccgccagcctgagcgagcaggagcaggtgagaggcgagtgcggcatgatgaccgcccagggcatcctgggccccagaggcaagagcaagctgcccgtgctgcccgaccccagactgatctgcagatacatgtgcagctgcagagagatccccggcgtgatcagcacccccgtgccccacagcgccggcccccaggtgaccagattccacagccccagccccccccacatcagcgagctgagccagaccctgcacgcccccttccagggcagctggcccagaccctgccacgccctgagcggccccagagccatggtgcccaaccagctgcaccccggcaccccctgccccgcccacgtgccccacagctgcaccatgcccgccggcacctgccccctgttcaccggcgcccccgccgccgccgaggccggcctgaaccccggccccgccctgagagcccccaccagctgcagcagcagcacctggcccaagcccttcatgaccgtgtgcctgctgcccaccagcagcatgctgaccagccccggcaccggcggctgcatcagagccagaatcctggagcccgcctag

SEQ ID NO: 166919 - DNA, 618 bp, Artificial Sequence
  derived and/or modified sequence
atgcgggaacctctgattcctccctgtaaagcggctagtcttagcgagcaggaacaggtgcggggagagtgtggcatgatgaccgcccaggggatccttggcccgaggggtaaatccaaattgcctgtgctgcctgacccccggttaatctgcagatacatgtgtagttgtagggaaattcccggagttatatcaacccctgtaccacatagcgcaggtcctcaggtgacaaggtttcacagtccatctccaccgcacataagcgagctttcgcagactctgcatgcacccttccaaggatcatggcccagaccctgccacgccctcagcggcccacgcgctatggttcctaaccaattgcacccagggacaccatgtcctgctcacgttcctcactcttgcaccatgcccgctgggacctgtcccctattcactggggcccccgcagccgctgaggcgggtctgaatcctggcccagcactaagggctccaacttcttgctccagttcaacctggccgaagccattcatgactgtgtgcctgctcccaacgtcttctatgctaaccagccctggcactggaggctgcatccgggcacggattctggaaccagcctag

SEQ ID NO: 166920 - DNA, 618 bp, Artificial Sequence
  derived and/or modified sequence
atgagggagcccctcatccccccctgcaaggccgccagcctgtctgagcaggagcaggtgagaggagaatgtggcatgatgacagcccagggcatcctgggcccccggggcaagagcaagctgcctgtgctgcctgaccccaggctcatctgccgctacatgtgcagctgccgggagatccctggggtcatcagcacccctgtgccccacagcgctggcccccaggtgacccgcttccacagccccagccccccccacatcagcgagctgagccagaccctgcacgcccccttccagggctcctggccccggccctgccacgccctgagcggcccccgggccatggtgcccaaccagctgcaccctggcaccccctgcccagcccacgtgccccacagctgcaccatgcctgctggcacctgccccctcttcaccggggccccagctgctgctgaggccggcctgaaccctggccctgccctgcgggcccccaccagctgcagcagcagcacctggcccaagcccttcatgacagtgtgcctgctgcccaccagctccatgctgaccagccctggcactggaggctgcatccgggcccgcatcctggagcccgcctag

SEQ ID NO: 166921 - DNA, 618 bp, Artificial Sequence
  derived and/or modified sequence
atgcgggagcccctgatccccccctgcaaggccgccagcctgagcgagcaggagcaggttcgcggcgagtgtggcatgatgactgcacagggcatcctcggccctagaggaaagagcaagctaccggtgttgccagatccacgattgatatgtcgctacatgtgcagctgcagagaaatcccaggggtgattagtaccccagtgccccactccgctggccctcaggtgactagattccactcaccctctcccccgcacatcagcgagctgtcccagaccctgcacgcaccgtttcaggggagttggcctcgtccctgccatgctttgtctggcccaagagcgatggttcccaaccagctgcaccctggtactccctgtcctgcacatgtccctcattcctgtaccatgcccgccggcacctgcccactgttcaccggtgcgccggctgcagctgaggccgggctgaatcctggtcccgccttgagggcccctacctcttgtagcagtagcacttggccaaaaccctttatgacggtgtgcctgctccccacgagttctatgctgacttccccaggaacaggcggatgtatcagggcgaggatactcgagcccgcatag

SEQ ID NO: 166922 - DNA, 618 bp, Artificial Sequence
  derived and/or modified sequence
atgcgcgagcctctgattcccccatgcaaagcagcctcgctctccgaacaggaacaggtccgcggtgaatgtggaatgatgaccgcgcagggaattctgggaccacgcggaaagagtaaactgccggtgcttcctgaccctcggttaatttgtaggtacatgtgttcttgtcgagagattccaggagttatatccacgcccgtgccacactccgcaggaccacaggtgacaagatttcacagcccatcgccaccccacatctctgaactttcccagaccctgcacgccccattccaaggtagttggcctagaccatgccacgcactcagcggacccagggcaatggttccaaatcagctgcatcccggtactccctgcccggctcacgtgcctcattcctgcaccatgcctgccggaacctgtccactgttcactggagcaccagctgcagccgaagctggtctaaacccaggaccagccctgcgggctcccacctcctgttccagcagcacatggcccaaaccgttcatgacagtctgcctgctccccacctcaagtatgttgacctctcctggaacgggaggctgtatacgggcaagaatcttggaacctgcttag

SEQ ID NO: 166923 - DNA, 9693 bp, Artificial Sequence
  derived and/or modified sequence
atgcagtctagtcccagccccgcccatcctcagcttcctgtactgcagacccagatggttagcgacgggatgaccggttccaacccggtgtctcccgcttctagtagcagccctgcttcatctggtgcaggaggaatttccccacagcatatcgctcaggactccagcttagacggcccgcctggtcccccagacggggccactgtgcccctcgagggcttttccctgtcacaagcggccgatttagctaataaaggccccaagtgggagaaatctcacgctgagatcgcggaacaagccaaacacgaagccgagattgaaacacgaattgccgaattgcgtaaggagggattttggagcttgaagcgacttcccaaggtgcctgagccgcccagacccaagggccattgggattacctctgtgaggaaatgcagtggctgagtgcggactttgctcaggaacgccgctggaagcgaggagttgcccgaaaggtggtgcgaatggtcattagacaccacgaggagcaacgtcaaaaggaagaaagagccaggcgcgaggaacaggcaaaactgcgcagaatcgccagcacgatggctaaagacgttcgtcaattttggtcgaatgtggagaaggtagtgcagttcaagcagcagtcccgcttagaagagaaaaggaagaaggcgctggaccttcatcttgatttcatcgtgggtcagacagaaaaatactccgatttgctgtcacagtctttaaatcaacccttaaccagcagcaaggctggttcctccccgtgcctgggatctagctcagctgcttctagtccccctcccccagcgtcccgactagacgatgaggacggggactttcagccacaggaggatgaggaagaagatgacgaagagacaattgaggtcgaggaacaacaggaaggcaatgacgccgaagcccagcgacgggaaatcgaactactgcggcgagagggtgagctgcctttggaggagttgctgagatccctcccaccgcaactactggagggacctagtagcccttcccaaacccccagctctcatgattccgacacgagggacggtcccgaggaaggagctgaggaggagccccctcaagtattggaaatcaagccaccaccgagtgctgtcactcagcgcaacaaacagccgtggcacccagacgaagacgacgaagagtttaccgccaatgaggaggaagctgaagacgaggaggataccatcgctgcggaggaacagctggagggcgaagtcgaccacgccatggaattgtctgagctcgctagggagggcgagctcagtatggaggagcttctgcaacagtacgcaggggcctacgctcccggcagcgggtcgtccgaggacgaggacgaggacgaagtggatgcaaatagctccgattgcgaaccagagggcccggttgaagccgaggagccacctcaggaggattccagcagccagtcagattccgttgaggataggtcagaggacgaagaagatgagcattcagaggaggaggagacttctggctcttctgcctctgaagaaagtgaaagtgaggagagtgaggacgcccaatcccaaagtcaggcggatgaagaggaagaggatgacgacttcggcgtggagtatctgttagctagggacgaggaacagagtgaagccgacgcgggctcaggcccgcctactccaggtcccacgacccttggaccaaaaaaggagataaccgatatagcagcagccgcagagtccctccagccaaaaggctacacactggctactactcaggtgaagacccccattccactactgctccgcggccagctccgagagtatcagcatatcgggctggattggcttgtgactatgtatgagaaaaaactgaatggaattctggcagatgaaatggggctcggaaaaacaattcagacaatttccctgctggcgcatctggcatgcgagaaaggtaattggggcccacacctgattatcgtcccaacctcggtcatgctcaactgggagatggagcttaagcgctggtgcccgagtttcaaaatacttacatactacggcgctcagaaagaaagaaaactgaagcgccaaggctggacgaagccaaacgccttccacgtgtgcatcacgagctataaacttgtcctgcaggatcaccaggcattcagacggaaaaattggaggtacctgatcttggacgaggctcaaaacatcaagaattttaagagccaacgctggcagagtctcctgaacttcaactcacagagacgattgcttttgactggaacaccgctccagaactcactcatggaactctggagcctgatgcatttcctcatgcctcatgtgttccagtcgcaccgcgagtttaaagaatggttctcaaatcccctgactggcatgatcgaggggagccaggaatataacgaggggttagttaagaggctgcacaaggtgctgaggcccttcttactgcgccgcgtcaaagtcgacgtcgaaaaacaaatgccaaaaaagtacgagcatgttattcggtgccgactcagcaaaagacagcggtgcctgtatgatgattttatggcacagacaactactaaggagacccttgctacaggccattttatgtctgttataaatattttaatgcaactgcgaaaggtgtgtaaccacccaaatttgttcgaccctcgccccgtaacctctcctttcataacaccgggcatctgcttcagcaccgcctctttagtgcttcgcgctactgacgttcatcccctccagcgcatcgatatggggaggttcgacctcatagggttggagggtcgtgtctccagatacgaagccgatacctttctaccacgccatcgattgtctagacgagtgcttctggaagtcgcaacagcccccgacccacctccccgacccaaaccagtcaagatgaaagttaataggatgctccagcccgtaccaaagcaggagggtagaaccgttgtggtagtgaacaaccctcgcgcaccacttggccccgtgccagtgcgaccccctccagggcctgaattgtccgcccaaccaacgcccggccccgtgcctcaagttcttccagcctccctcatggtgagcgcgtcaccggccggtccaccactgattcccgccagccgtcctcctggcccagtgttgctgccacctttgcagccaaatagcggtagcttaccacaggttctcccatcccctcttggcgtccttagtggcacctccaggccccccaccccgaccctttccttgaagcccacaccgcctgcccctgtaaggctatcacctgctccacctcccgggtcatcatctctcctcaagcctctgactgttcctcccggctacacattcccacccgcagccgctacaacaactagtaccactaccgccacggcaaccacaaccgccgtccctgccccaaccccagcccctcagagactgattctctcaccggatatgcaagcccggctcccttccggagaggtagtctccatcgggcagcttgcttccctggcccagaggcctgtggctaacgccggcggcagcaagcctctcaccttccagattcaggggaacaagctgaccctgaccggtgcacaggtgagacagcttgcagtagggcagccacggcccctccagcgcaatgtggtacacctcgtgtcagcaggaggccagcaccacctgatcagtcagcctgcccacgtggcgctgatacaggctgtggcccccacgcccggccctacgcctgtatccgtgctgccttcgagcacaccatccacaactccagctccaacaggcttgtcattgccccttgcggccaatcaggtgccccccactatggttaataacacaggggtagtgaaaatcgtcgtccgacaggcaccccgagatggcctcactccggtgcccccactcgcgcctgctccacgtcctccgagttcaggattaccagctgtcctgaatccccggccgaccctgacgccagggagactccccacccctacgttggggacggctagagcacctatgcctacccccacattggttagaccgcttttgaagctagttcattcgcctagtccagaggtgagtgcttctgcaccgggcgctgcccctttgaccattagctccccacttcacgttccttccagcctgcctggccccgcttcatcccctatgcccatccctaactcatcgccattggcatctcccgtcagttccactgtcagtgtgcccctgtcctcatcattgcctatatcagtgccgactactctcccagctccggcctcagcacctctgaccattccgatctctgcccctctgacagtctctgcttcaggccctgctctgctgacaagtgtcacaccccctctggcccctgtcgtaccggcagccccaggcccgccctcgctggcgccttctggcgcgtcgccatcggcaagcgctctcacattgggcctggccacggcaccttctctgagtagttcccaaaccccgggacaccccctgctattggcgcccacaagcagtcatgtgcctgggctgaactctacagttgcgcctgcgtgttctccagtgttagtccccgctagtgcactcgcatccccattcccaagcgctcccaaccctgcacctgcccaggctagcctcctagctccggcaagctctgcatcacaggcgctggcaactcctctggccccaatggcagctccccaaacagccatcttggccccatctccagcacctcctctggcaccccttcctgtattggctccgtctcctggagctgctccggttctggccagtagccagacccctgtgccagttatggccccaagctctacaccaggcacgagtctggccagcgcttctccagtgccagcccctaccccggtcctggccccttctagcacccagacgatgctgcctgctcctgtcccctctccgcttccctctccagcgagcactcagacgctggctctggctccagcactcgctcccaccttaggtgggagtagccctagccagacgctcagcctgggcacgggcaaccctcagggccccttccccactcaaactttatccctcacccccgcctcatcccttgttccaacacccgcccaaacactttcccttgcccctggcccccccctaggccctactcagacgctgtctttggcccccgcgcctccccttgccccagcttcaccagtggggcctgcacccgcgcatacccttaccctggcgcccgcttcttcttctgcttctttgttggctcctgcaagcgtgcagacactaacgctgtccccagctcccgtccctacactcggcccggcagctgcccagaccttggcattggccccggcgagcacccagtccccagcgagccaggcctcttcgctggttgtttccgcttcaggtgcagcccccctgcctgtgaccatggtgtcacgactgcctgtctccaaagatgaacctgacactctgacacttcgcagtggccccccctcacctccttccaccgccacttcttttggcgggccaaggccacgcaggcagccccctcctccacctcggagtccattttatctggattccctggaggagaaaagaaaaagacagagatccgaaagactcgagcgaatctttcagttgagcgaagcccacggggccctggcgcctgtgtacggaacggaagtgctcgacttctgcaccctgcctcagcctgtcgcaagccctatcggcccacgatccccagggccctcccatcctacattttggacctataccgaggccgctcaccgcgccgttctgttcccccaacaacgcctcgaccagctgtccgaaataattgagagattcatcttcgtgatgcctcctgtcgaggcccccccaccttccctgcatgcttgccatccaccaccctggctggcacctagacaggccgccttccaggagcagttagcttctgagctttggcccagagctagacccttgcaccgaatcgtatgcaatatgcggactcagttccccgacctccgcttaatccagtatgattgcggcaaactgcagaccctggctgtgctgttgcgtcagctgaaagccgagggacatcgcgtcctgatctttacgcagatgaccaggatgctggacgtgcttgaacagttccttacctatcacggtcacctctacctaagattggatggatccacacgggtagagcagcggcaagctctcatggagaggtttaacgctgacaagcgaattttctgtttcatcctgtcaacccgatccggaggcgttggggtcaacttgacaggcgccgacaccgtggtgttttacgattctgactggaaccccacaatggacgcccaggcacaagatcgctgtcatcgaattggccaaacacgggacgtccacatatatcgtctcatctctgaacgtactgttgaggaaaacatcttgaaaaaggcgaatcagaagcggatgctgggagatatggctattgagggcgggaactttacaaccgcgtattttaaacaacagaccatcagagagttgttcgatatgcctctggaagagccttcctcaagcagcgtccccagtgccccagaggaggaggaggaaaccgtcgccagcaagcagacacacatcttggagcaggccctttgtcgggccgaagacgaggaggatattagagccgcaactcaggcgaaggctgagcaggtggccgagctcgcggagtttaatgagaacgatggctttcctgccggggagggagaagaagccggccggccaggggcggaggacgaggaaatgtccagagctgaacaggagatagccgctttagttgaacagctgactccaatagagagatacgctatgaaatttctggaagctagtctcgaagaggttagtcgggaggagcttaagcaggctgaggagcaggtggaggccgctagaaaagacctggatcaggccaaagaggaggtcttccgcttgccccaagaggaggaggagggcccaggggctggagacgagtcatcatgtgggactgggggagggactcaccgacggtccaagaaagcgaaggcaccagaaaggcccgggactcgagtttcagaaaggttgcgtggggctcgggcagagacacaaggggcaaatcacacaccagtcattagcgctcatcagaccaggtccacaacgacaccacctagatgttcaccagcgagggaacgtgtgccaagacctgctccccgacctcggcctaccccagcatccgctccagcagctatacctgccctggtgccggtgccagtaagcgcaccagttccaatcagtgcccccaacccaattacaatactgcctgttcacatcctgccttcacccccaccccccagccagattcctccttgctccagtccagcgtgtacacctccacctgcatgtactcctccgccagcccataccccaccacctgcccaaacctgtctcgtgacaccttcaagtcctcttctcctcggtcctccatccgtgcccatcagcgcatcagtgaccaacctccctctcggactccgtccggaggccgagttatgcgcacaagccctggctagtcccgaaagccttgaactggcttcagtggcttcttccgagacatcgagcttgagccttgtgccccccaaggacctcctgccggtcgctgtcgagatccttccggtcagcgaaaaaaacctatcactcaccccatcggcaccatcactgactctggaggccggcagcatccccaacggacaggagcaggaagcgccagattccgccgaagggaccacattgactgtgctccccgagggggaagagctcccgttatgtgtctcggaatccaacggcctggagctccccccctccgctgccagcgatgaacctcttcaggagcccctcgaagccgaccgcacaagcgaagaactgacagaggccaaaacacctacctcctcaccagagaagccacaagaactggtcacagccgaggttgcagccccctcgaccagctcatctgccacatcaagtcctgaaggtcccagccccgctagaccccctcggcgtagaacttctgctgacgtggaaatcaggggtcagggtacaggccgccctgggcagccgccaggccccaaggtcctccggaaactgcctggtagactggtaacggtcgtggaggagaaagagctggtaagaaggaggagacagcagcggggcgctgcatcaacgctagtccctggggtctccgaaacctctgcctctcccgggtcaccaagtgtgcggtcaatgagtgggccggaaagctcgccaccgatcggcggcccatgcgaggcagcccccagctccagtctcccgacgcctccacagcagcccttcattgcccggcgacacatagaactcggcgtcacgggcgggggttccccagagaacggggatggggcgttactggctatcaccccccctgctgttaagcggcgccgcggccgcccgccaaaaaagaacaggtcacctgctgacgcagggcggggcgtagacgaagctccgtcatctaccttaaaaggcaagacgaacggtgctgaccccgttcccgggccagagaccctcattgtggccgatcctgtcctggagcctcagttaatcccaggcccacagcccctggggcctcagccagtgcacagacctaatccgctactgtcccctgtcgagaagcgtcgccggggaagacctcctaaagcgcgagatctacccatccctggaaccatttccagcgctggagacgggaactcagagtccagaacacagcctccgccacacccgtccccactcacccctcttccccctctgctcgtgtgccccacggcaaccgttgcaaacaccgtcacaaccgtaactattagcacatctccacccaagaggaaaagagggcgcccacctaagaatcccccctccccacgcccctcccagctcccagtgttggatagggatagtacatctgttctcgaaagctgcggactcgggcggcggcggcagccccagggtcagggcgagtccgaaggctcctcctcagatgaagacggatctagacccttgactaggctcgctcgtctgagactggaagctgagggcatgcggggccggaaatccggggggtccatggtggtggccgttattcaagatgatctcgacctggcggattcaggcccaggtggcctcgaactgacccccccagtagtttctctgacacccaaactcaggtctaccagactcagacccggctctctagtgccccccctcgagacagaaaagctgccacgcaagagagcgggtgctccagtggggggttcccctggtctggccaagaggggccggctgcagcccccgagtcccttaggacccgagggctctgtcgaggaatccgaagccgaggcctccggcgaagaagaagagggcgatgggactccaagacggcggcccggccctcggagattggtcggaacgacaaatcagggcgaccagagaatcctgcggtcaagcgcacctccttcactggcagggcccgccgtgagccatcgtggtcgcaaggccaagacttag

SEQ ID NO: 166924 - DNA, 9219 bp, Artificial Sequence
  derived and/or modified sequence
atgcagagtagtccctccccagcccatcctcagctaccggtgttgcagacgcaaatggtctccgacgggatgactggatccaaccctgtctcaccagcatcctcttcctccccagcttccagcggtgcaggcggaattagcccacaacacatcgcccaagacagctcgctggatggcccgcctggtcctcctgatggcgcaacggttcctttggaaggcttcagcctgtcccaggccgccgaccttgctaacaagggccctaagtgggagaagtctcacgctgaaattgctgaacaggccaaacatgaagcagaaatcgagacacgcattgctgagctgcgcaaagaggggttttggtcactcaagagacttcccaaagtgccagagccccctcgcccaaaagggcattgggattatctgtgcgaggaaatgcagtggctgtccgcagatttcgcccaggagagacgttggaagcgcggtgtcgctaggaaggtggttcgcatggttattaggcaccacgaagaacaacggcagaaggaggagcgcgctaggcgtgaagaacaagccaaactgcgtaggatagcctccaccatggcaaaggacgtgagacagttctggtctaatgtcgaaaaggtagtacagtttaagcaacagagtcggctagaagagaaacggaaaaaagcccttgacttgcaccttgattttatagtgggccagactgaaaagtatagcgatctgctgagccaatctctcaatcagcctctcactagtagtaaggccggcagctctccatgtttggggagttcttcggccgcatcctccccgccacctcccgcttcacgcctggatgacgaagacggagatttccaaccacaagaagatgaagaagaggacgacgaagaaacaattgaggttgaggagcaacaggaagggaacgatgcagaagcacagaggcgggagatcgaactgctccgcagagaaggcgagctgccactcgaagagttgctgaggagtctgcccccccagttgctggagggcccgtcgtcccctagtcaaacccccagcagccatgactccgatacgcgcgacgggcccgaagagggtgccgaggaggagcctcctcaggtattggagattaagcctcccccatccgcagtgacccaacgcaacaagcagccctggcaccctgatgaagatgacgaagagtttacagctaatgaagaggaggctgaggacgaggaggacacgatagcggccgaggaacagctcgagggcgaagtggaccacgcaatggagttaagcgagctagcacgggagggagaactgtccatggaagaactcctgcagcagtatgcaggggcctacgccccaggtagtggctctagcgaagatgaggatgaggacgaggtggacgccaacagctccgactgcgaaccagagggtcctgtcgaagctgaggagccaccccaagaggattcaagctcgcagagcgatagcgtggaggataggtcagaagacgaggaggacgaacatagcgaagaagaggaaaccagtggttctagtgcaagcgaagaatcagaatccgaggaatctgaagacgcacagagccagtcacaggcagacgaggaggaggaggatgatgatttcggggtagagtacctgctagcccgggacgaggagcagtccgaagccgacgctggtagcgggcctcccacccctggcccaactactctcggacctaagaaagagattactgacatcgccgccgcagccgagagccttcagccaaaagggtacacacttgcaactacccaggtgaagaccccaatcccactgctactgagagggcagctcagggaataccagcacattggcctggactggctggtcacaatgtatgaaaaaaaactgaacggtatcctggctgacgagatggggcttggcaagaccatccaaaccatctccctacttgcccatttggcttgcgagaagggcaactgggggcctcacctgattattgttcctacctccgtcatgctaaactgggagatggaactcaaaaggtggtgcccttctttcaaaatcctgacctactacggcgcacagaaagagaggaagctgaaaagacaaggatggacaaaaccaaatgcattccacgtgtgtattacatcatacaaattagtcctgcaggaccaccaagccttccgacggaaaaactggaggtacctgatcttggatgaggcacaaaacatcaagaatttcaagtcccagcggtggcagagtctactgaactttaattcccagagaagattgttgcttaccgggaccccgctgcagaactccttgatggaactgtggagcctcatgcactttttgatgccccatgtttttcagagccaccgcgaatttaaagaatggttttccaaccccctcaccggcatgatcgaaggctcccaggaatacaatgaaggcttggtgaagcgccttcacaaggtgctgagacccttcctgctaaggcgcgttaaagtggatgtggagaagcagatgcctaaaaagtacgaacacgtgatccgttgcaggctctcaaagagacaacgctgtttatatgacgactttatggcccagaccacaaccaaggaaaccctcgcgacaggccacttcatgtccgttatcaatatacttatgcagctgaggaaagtgtgtaaccatcctaatttgtttgacccaaggcccgtgacctcgccattcattactcccgggatatgctttagtactgcaagtctggttctcagagccacagacgtccaccctctgcaaagaatcgacatgggccgctttgatcttattggcctggaaggccgcgtctccaggtacgaagctgatacttttctccctagacacaggctaagccggagagttctactggaagtcgcaacggcgccggacccacctcctaggcccaaaccagtaaaaatgaaagtaaacagaatgttacagccagtgcctaagcaggaagggagaacagtcgtggtcgtgaacaaccctagggcaccacttggacctgtccccgtgagacctcctcctggccctgaactgtctgctcagcctacaccgggaccagtgccacaggtgctgcccgcatcactgatggtgagcgccagccctgctggacctcctctcattcctgccagcagaccccctggacccgttctgctcccacccctgcagcccaattccggctccttgcctcaagcgggcgaggtggtgagtatcggccagttggccagcttggcccaacgtcccgtcgccaacgcaggggggtccaagcctctaacttttcagatccagggtaataagctaacgctgactggcgcccaagtccggcagttggccgtgggccagccacgaccactccagatgccccctaccatggttaacaataccggggtggtgaagatagtagtcagacaggcaccgcgggacggcctgaccccagttcccccgctcgctccagctccccggcccccttcgtcggggctgcccgcagttctaaatccacggcccaccttgacccctggaaggcttcctacgcccacattaggcaccgcgcgcgcaccgatgccaacacccaccttggtccgtccactcctgaagcttgttcactccccctctcctgaggtatccgccagcgcccctggagctgcccccctgacaatcagttcccctctacatgttccctcaagcctgcccgggcctgcaagcagtcccatgccaatcccgaacagctctccactagcatcacctgtatcatcaacagtgagcgtgccactgtcctcttctctgcctatttccgtccctacaacactgccagctcctgccagtgcgcctctgactattccaatcagcgcccccctgacagtaagtgcgtcgggacctgccctcttgacttctgtcactccccccctcgctccggttgtacctgccgctcctggacccccttcactggctccttcaggtgcaagcccaagtgcctctgctctgaccctcgggttagccactgccccctccctaagtagttcccaaactcccggacaccctctcctcctggctcccacaagctctcacgttccggggctgaactcaacagtggcccctgcttgtagcccagtgttggtaccagctagtgcgttggcatccccttttccatcagctccaaatcccgcacctgctcaggcctcccttttagcaccagcctctagcgctagccaagcccttgccacaccccttgcaccaatggccgctccccagacagcaatactggccccatcacccgccccacccttggcccctttgcctgtccttgccccatcccctggggcggctcctgtcctggcatcaagtcaaaccccagttccagtgatggcaccaagttcaactcccggtaccagccttgcatctgcttctccggtgcccgcgccaaccccagtgctggctcccagctcgactcagacaatgttacctgccccggttccctcgccactcccctccccagcctcaacccagactctggccctggctccggccctggcgccgacccttggcggttcctcccccagtcagacgctctccctcggcacagggaatcctcagggacccttcccaacccagactctcagcttaactcccgcctcaagcttagtacccacaccggcgcaaacactctcccttgcccctggaccacccctgggccccacccaaaccctcagtcttgcaccagcacctccactcgcacccgcatcccccgttggccccgcgcctgcccacacacttactctggcccccgccagctcttcagcaagtctgttagcacccgcctccgtgcagaccctgaccctttccccggcccccgttcctacgctgggccccgcagccgcgcaaacactggcactcgctcctgcctctacgcaatccccagcaagtcaagccagctctttagtagtaagcgccagtggagctgctccgctgcccgtgacgatggtgtctcgcctgccagtgagcaaagacgagcctgacacgttgactctccgctcgggcccccctagtcccccaagcaccgccacttcttttggtggaccccggccaagaaggcagcctccgccgcccccccgctcacctttctacctggactccctagaggagaaacgaaaacgacagagatctgaacgcctggagaggatcttccagcttagtgaggcacatggagctctggctccggtatacgggaccgaggtgttggatttctgcactttaccacagccggttgcatcccctatcggacccaggagccctgggccttcccatcctacgttttggacatatactgaagcagcccaccgggcggtgctgttcccccagcaaagactcgatcagctgtcggagatcattgaacgctttatcttcgtgatgcctcctgtggaagcgcccccgccttctctgcatgcctgccaccctcctccatggttggcacctagacaagcagccttccaggaacagctggcttccgagctgtggccgcgcgcgcggccgctgcatcggatcgtgtgtaatatgcgaacccagttccctgatctccggcttatccagtatgattgtggaaagcttcaaactctggccgttctcttgaggcaactcaaggctgagggacatagagtgctcatttttacacagatgactcgaatgctggacgttctcgaacagtttctgacttatcacggtcacctatacctgcgactggacgggagtacccgcgtggagcagaggcaggcgctcatggaacgattcaatgcagacaagcggatcttctgcttcattctgagcacacggtccggcggagtcggagttaacctgaccggggccgacacggtggtgttctatgacagcgactggaacccaaccatggacgcccaggcacaggatcgctgtcataggataggccaaactcgggacgttcacatatacaggttgatctcagagcgaacagtggaggaaaacatcctgaagaaagccaaccagaaaagaatgttaggcgatatggccattgaaggtgggaattttacaactgcctacttcaagcagcaaactattcgtgagcttttcgacatgccattggaagagccttcgtcaagctctgttccttctgcaccggaggaagaagaggaaacagttgcgagcaagcaaacacatatccttgaacaagccctctgtagagccgaggacgaggaggacatccgggccgcgacccaggctaaggcagagcaggtggccgagctggctgaattcaatgaaaacgacggatttcccgcaggtgaaggcgaagaggccggcagacccggcgcagaggacgaagaaatgagtcgcgccgagcaggagattgctgcactggtcgagcagttgacacctatagagcgctacgcaatgaagttccttgaagcatctcttgaagaggtatcaagggaggaacttaagcaggccgaggagcaggttgaggctgcccggaaggacctcgatcaggccaaggaggaagtattccggttgccgcaggaagaagaagaaggtcccggcgcgggagacgagagctcctgtgggacaggtggtggcacccataggcgcagcaaaaaagcaaaggctccagagcgtcctggcactagagtcagcgagaggctccgaggcgctcgcgccgaaacacagggtgccaaccatacacctgtcatctccgcacaccagaccagaagtacaactacaccccctaggtgctcgcctgccagggagagagtcccccggcccgcccctaggccgaggcccacgcctgcttccgcacctgcagccattccagccctggttccggtaccagtctctgctcctgttccaattagtgcccctaaccccataaccattctcccagtacacattctgccatctcccccacccccatctcagatccctccttgctcctctccagcttgcacccctcctcccgcctgcacccctccgccggcacacactcctccccccgctcagacttgcctggtgacaccgagcagcccactgttactaggtcctccctctgtccccatcagtgcatctgtcaccaatctgccactggggttgcgcccagaagctgagttgtgcgcccaagccctcgcaagccctgagtctttagagttagcctctgtagctagttcagaaacttcctcactgagccttgtcccccctaaagacctgctgcctgtggccgtggagatcctgcctgtaagcgaaaaaaacctgtcccttactcccagcgcccctagcctcacccttgaggctgggtccatccccaatggccaggaacaggaggcccctgactccgccgagggcactactctgactgttctgccggaaggcgaagaattgcccctctgcgtctctgaatccaatggcctcgaattgccgccctccgccgccagtgacgagccactgcaagaaccattagaagcagaccgcacttcagaggaacttaccgaggccaaaaccccaacaagcagccccgaaaaacctcaggagttagttacggcggaggtggccgctcctagtacgtcaagctctgctacctcctctccagaggggccctccccggcaagaccgcctcgtcggaggacgagtgccgatgtggagataaggggacaaggaacgggcagaccgggccagcctcctggtcccaaggtgctgagaaaacttcctgggagactcgtgactgtagtggaggagaaggagctcgtccgcaggcggcggcagcagaggggggccgcctccaccttggtgcctggggtgtccgaaaccagtgcatcccccggctctccttccgtcagaagtatgagtgggccagagtcctcccctcccatcggtggaccatgcgaggccgctccatcctccagtctccccacaccacctcagcaaccattcatcgcgcgcagacatattgaacttggggtgactggcggcgggtctccagagaatggcgatggcgcactgcttgccattacgccacccgccgtcaaaaggagacgcgggagacctcccaagaagaacagaagccctgctgatgcgggcaggggcgttgacgaggcgccgagctctactctgaagggaaagacaaatggagcagaccctgttcccggcccagaaacgttgattgtggcagatccggtgttggaaccgcagcttatcccaggtccacagccactcgggccacagcctgttcacagaccaaatccccttctttccccggttgagaagcgccgcagaggtaggccgccaaaggcccgtgacctgcccatccctggaaccatctccagcgctggcgatggaaactccgagtccagaacccagcctccccctcatccatcacccctgacgccactgcctcccctgttagtgtgccctacagctactgtcgctaacacagtgaccacggtcaccatctcaacaagcccccccaaacgaaaacggggtagaccaccgaagaatcctccttctcccagaccctcccagctacccgtcctggatcgagacagcacatcagtattggaaagctgtggcctgggcaggcgcagacagccccagggacagggcgagtcggagggatcatcatcagacgaagatgggtctaggccgctaacaagactcgcaagactgcggctggaggctgaaggaatgcgcggtcgaaagagcgggggctcgatggtggtagctgtgattcaggacgacttagatctggctgactctggaccaggaggtctcgagctgacaccgccggtcgtgtccctcacccctaagctcaggtcgactaggctcaggcccggaagtctcgttcctccgttagagactgagaaactgccacgaaagagggccggcgcgcccgtgggagggtctccaggtctggccaaacgggggagactgcaacccccctcccctctggggcctgaaggatcggtggaagagagcgaggccgaggctagcggcgaagaggaggaaggagacggcactccacgtaggcgccctggcccaaggcggctggtgggcactaccaaccagggtgatcagcgaatattgcggtcatcagctccgccatcactcgccggccctgctgtgtctcacagggggcggaaggccaaaacatag

SEQ ID NO: 166925 - DNA, 9507 bp, Artificial Sequence
  derived and/or modified sequence
atgcagagtagcccgagccccgctcacccacagcttccggtgctacagacccagatggtgtccgacggaatgaccggatctaacccagtgagccctgcctccagcagttctccagcttctagcggcgccggcggcatatctccccagcacatcgctcaggattctagcctcgatggccctcccggacctcctgatggagctactgtgcctctcgaagggttctcattgtcgcaggccgccgacctggctaacaagggcccgaagtgggaaaaaagccatgcagaaatcgccgaacaggctaagcacgaagctgaaatcgaaacccggatagccgagctgcggaaggaaggattctggtccttaaaacgactgcctaaggttcctgagcctcctcggcccaagggacattgggattatctatgtgaggagatgcagtggctgtctgcagattttgctcaggagcgacggtggaaaagaggcgtagctcgaaaggtggtgcgtatggtaattcggcatcatgaggaacagcggcaaaaagaagagcgggcacggagagaggagcaggccaaacttcgccgcatcgcatcaacaatggccaaagacgtgcgccaattctggtcaaacgtggaaaaggtggtgcagtttaaacagcagagccggctggaagagaagagaaagaaggcgctcgaccttcatcttgacttcatagttggccagacagagaagtattcggatctcctgtcccagagccttaatcagccgttaacatccagcaaggcgggatcttccccgtgcttgggttccagttccgcagcctctagtcctccgccccccgccagccgcctggatgacgaagacggagatttccaaccccaggaagatgaggaagaggatgacgaggaaaccattgaagtggaggagcagcaggaaggtaatgacgcagaggcgcagcgtagagagatcgaactgctacggcgtgaaggtgagctgcccttagaagaactcttgcgctctctccccccacagctactcgagggaccatcaagcccatcacagaccccctcctcacatgattctgacacaagggacggacccgaggagggggccgaggaggagccaccacaagtcctcgaaattaaaccccccccctctgcggtgacccagcggaacaaacaaccctggcaccctgatgaagacgacgaggaattcaccgccaacgaagaagaagctgaagacgaggaggacacaattgccgccgaggaacaacttgagggggaagtcgatcacgccatggagctgtcagagctcgcccgcgagggggagctaagcatggaggagctcctccagcagtacgcgggagcatacgctcctggtagcggctcttctgaggacgaagatgaggacgaagtggacgccaactcctcggattgtgagcccgaagggcccgttgaggccgaggagcctccacaggaggattcttccagtcagtctgacagtgtggaagacagatcagaagatgaggaagacgagcactccgaagaggaggagacctcaggatcctcagcaagtgaggagagcgaatctgaagaatcagaggatgctcagtcccagagtcaggcagatgaagaggaggaagacgacgatttcggtgtggagtaccttctggctcgcgacgaggaacagtctgaggctgatgctggatccgggccccccacccctggtcctaccaccctgggacccaagaaggagatcactgacatagccgccgcagctgagagcctccagcctaaaggatacaccctcgccacaacacaagtcaagacccctatcccactccttcttaggggtcagctgagagaataccagcacattggtttagattggctcgtcaccatgtatgagaaaaaactcaacggaattctcgcagacgaaatgggactcggcaaaacgattcaaacgatttcactgctagcccaccttgcgtgcgagaaaggcaactgggggccccacctaatcatcgtccctacatcagttatgcttaattgggagatggagctgaagcgctggtgcccatccttcaagatcctcacatattacggagcgcaaaaggagcgcaaactgaaaagacagggctggaccaagccaaacgcttttcatgtgtgtatcacgtcatacaaattggttctgcaggatcatcaggctttcagacggaagaattggagatatttaatactggacgaggcacagaacattaagaacttcaagtcacagcgctggcagagtttgctgaatttcaactctcagcgaaggttgctgctcacaggaacccccctccagaactccttaatggaattgtggagcctgatgcacttccttatgccgcacgtcttccagtcccaccgtgagttcaaggaatggttctcaaacccgcttaccgggatgatcgaagggtctcaggagtataatgagggcctggttaagcgcttgcacaaggttcttcgacctttcctgcttagacgagttaaggttgacgtcgaaaagcagatgccaaaaaaatacgaacatgtcatccggtgtagactgtcaaagaggcagaggtgcctctacgatgacttcatggcccagacaacgacaaaagagactcttgcaaccggccattttatgagcgtaataaacattttaatgcaactgcgaaaggtttgtaatcaccccaacctgtttgatcctagaccagtgacctcacccttcattactcctgggatctgcttttctactgccagcctggtgctgcgtgccactgatgtacacccattgcagaggattgatatgggcagatttgacctcatcgggctggaagggagggttagcagatacgaggcagatacctttctgccccgacatagacttagccggcgtgtcttgctggaggtcgcgaccgctcctgatcccccccccagaccaaaacccgtgaaaatgaaggtgaaccgaatgctgcagccagtccctaaacaagagggaaggaccgtcgttgtggtgaacaatccccgggctcccttgggccctgtaccggtgcggcctcctcctgggccggagctgtctgcccagcctacccccgggcccgtgccgcaggtgctgcccgcctcactgatggttagtgcttctcccgctggcccaccactcattcccgcaagccgccccccaggacccgttctgctcccccctctccagcctaacagtgggtccctccctcaggtgctgccttctccactgggcgtgttgtcaggcacttcccggccccccactccaactcttagtctgaagccaaccccccccgcacctgtgagactaagccctgcgcctccaccgggttcctcctccttgctgaagccattgaccgtgcctccaggttatacgtttccacccgctgctgctacaaccactagcaccacgaccgcaaccgccactacaacggcagtccctgccccaaccccagccccccagcgtctcatcctgtcacccgacatgcaggcaaggctgccttcaggagaagtcgtctccattggccagctggctagccttgctcagagaccagtagctaacgcaggcggatcaaaaccactaaccttccaaattcaaggtaacaaacttacattgactggagcccaggttaggcagctagcagtcgggcagccaagaccgctgcaaatgccccctacaatggttaacaacacaggtgtagtcaagatcgtggtcaggcaggcgcctagggacggactcacaccggtgcctcctctagctcccgcccctaggcctccctctagtggcctgcctgcagttctgaatcctcgtcctacgctgacccctggtcgcctgccaacgcccacgcttggaactgccagagcccctatgcccactcctactctggttcggcctttactgaaactggttcatagcccttcgccagaggtgtcggccagtgcacccggagcagcccccctcaccatctcctctccgctgcatgtccccagctcactcccaggacccgcctcttctcctatgcctatccctaattcaagtcccctcgcatctcctgtgagctccactgtatccgtacccctgtcatcaagtctccctatatcagttcctacaactctccctgctcccgccagcgctcccctgacaattcccattagcgcgccccttacagtgtcagcttcagggcctgcactgttgacttccgtgacaccacccctggctcccgtagtgcctgcggcacccggaccaccgagcctagcccctagcggggcgtcaccatccgcatcagccctgacactggggcttgcaacagcaccgtccctgagttcctcccagacacctgggcaccctctgctcctcgctcccacgtcatcccatgtccccggtctcaatagcacggttgcccccgcatgctctcccgtgctcgtgccagcctctgcgctcgcctcccccttcccatccgcacctaacccagcgccggcccaggcctcactgctcgcgcccgcctcatcagccagccaggcactggctacacccctagcacctatggcagcaccgcagactgccattttggcaccatcacccgcaccacccttggccccactccccgtactcgccccgtcccctggcgcagcgccggttttggcttcatcacaaacccctgttcctgttatggcacccagtagtacacccgggacctccttggcttctgcctctcctgtgccagctcccacacctgtcctggctccttcatccactcagacaatgcttccagcgcccgtgccttcccctttaccgagcccagcatcaacacaaacactggctttagctcctgcccttgcgcccaccctgggaggaagctctccaagccaaacactttcactgggaaccggaaacccccaaggacctttccctacccagaccctgtctcttacccccgcctcaagtctcgtcccaacccctgcacagaccctgagcctggcgcccgggccaccactcggcccaactcaaaccttgtccttggcacctgcaccgcctcttgccccagcttcccccgtggggccagcccccgctcataccctgacattggctccagcctcctcaagcgcttcgctgcttgcccccgcttctgttcagacactgactctcagcccagctccggtccctacccttggaccggccgccgcccagacccttgccctggctcccgcttcgacacagtctccggccagccaggcatccagtcttgtggtgtcggcttcaggcgcagctccactgccagttaccatggtgtcacgcctgccggttagtaaagacgaaccggacacgttgacccttcgttcagggcctccatcccccccgagcactgcaacgtcttttggaggaccccgcccacggcggcagcccccgccccccccgcgatcccctttctacctggattccctcgaagagaagcgcaaaaggcagagaagcgagcggttggaaagaatttttcagttgtctgaagcccatggagctctggcaccagtgtatggcacagaggtactcgacttttgtactctgcctcagccagtggccagccctatcggaccccgttcccccgggccaagccatcccacattctggacttatactgaagccgcccatcgggccgttttgtttccccagcagcggctggatcaactcagcgagattattgaacggtttatattcgtgatgcctcccgttgaagcgccccccccatcactccatgcgtgtcatccccccccgtggcttgcgccccgacaggcagcctttcaagagcagttggccagcgagctctggcctcgcgcacggccattgcataggatcgtatgcaacatgcggacacaatttcccgacctgagactgattcagtacgactgtggtaaattgcagacccttgccgttctcctccgccaactgaaggccgaagggcatagagtcttgatattcactcagatgactagaatgctggacgtgctggaacaattcctgacatatcacggtcacctctacctgagactagacggttctacaagggtggagcaacgacaggccctgatggaaagatttaatgcggacaaacgcattttttgcttcatccttagtactagatctggcggcgtgggcgtcaacttgactggagccgacactgtagttttctacgactctgactggaacccaaccatggatgcccaagcccaggaccgctgccaccgtataggacagacaagagacgttcacatctaccgactgatctcagaaagaacggtggaagagaatattctgaagaaggccaatcagaaaagaatgcttggtgatatggcgatcgagggggggaactttaccaccgcatactttaagcagcagaccatccgcgaactattcgatatgccattggaggagcccagctctagctctgtgcctagcgcaccagaggaggaggaggagactgttgcatctaagcagacacatatccttgagcaggccctgtgtcgcgcggaggatgaagaggacattcgtgctgccacgcaggctaaagccgagcaggtcgcagagctggctgagttcaacgagaacgacggttttcctgcaggagagggcgaggaagcgggaaggccgggcgctgaggatgaggagatgtcccgcgcagagcaggaaatcgcggccctagtggaacagcttacccccatcgagaggtacgctatgaagttcctagaagcgtcactggaggaggtgagccgcgaggagctgaagcaggcagaggagcaggtggaggccgccagaaaggatctggatcaggctaaggaggaggttttccgcctgcctcaggaggaggaggaaggacctggggcgggcgatgagagtagctgcggcaccggaggaggcacgcaccgccggtcaaaaaaggccaaagctccagaaaggccaggcaccagagtctcggaacggttacgaggcgcacgcgctgagactcagggcgcaaaccatactcctgttattagtgctcaccagacacggtcaactactactcctcctcgctgttcgcccgcccgggaacgggtcccacgtcctgccccaagacctcgcccaactccggcttccgctcctgcagcaattcccgccctggtcccagtgccagtgtcagctcccgtgcctatctctgcccctaacccgattacaattctgccggtccacatcctccctagtcccccgccaccaagccaaattccgccatgctcctcgcccgcgtgcactcctcccccagcctgcaccccccctcccgctcacacaccaccgccagctcagacatgcttggtgaccccttcgtctcctctgttgctggggccaccttccgtgcccatctctgcaagtgtgactaacttgccactgggcctaaggcccgaagccgagctctgcgcgcaggccctcgccagccctgagtctcttgaactggcgtctgtggcgtcatcggagacatcctccctgagtctagtcccacccaaggacctgctgcctgtggccgtcgaaatcctgcccgtgtctgaaaaaaacctatctctgactccgtccgcacctagtctaactctggaggcaggcagtatacccaacggtcaggagcaggaggctcccgactcggccgagggtacaacgttaaccgttctccctgagggagaggagctcccgctgtgcgtatccgagagtaatggactggagcttcccccttccgccgcctcagatgaaccgctccaagaaccactagaggccgataggacatccgaagagcttacagaggccaagactccgacgtcctcccccgagaagccccaggagctcgtgaccgctgaggtggcagctccttcaaccagttctagtgccacatcctccccggagggacccagccccgccagaccccctagacggaggactagcgccgacgtggaaatcaggggtcaggggacgggtcggccaggacaaccaccaggcccaaaggtgcttcgtaagctgcccggtcgactggtcaccgtggtcgaggaaaaagagcttgttcggaggcgccgccagcaacgcggcgcggcatccacactggtccctggggtttctgagacttcagcctctccagggagcccaagcgtgaggtccatgagcgggccagagtcatcccccccaatcggtgggccttgtgaagcggccccttcctcatctctgccgacacctccccaacagccatttatcgccagacgtcacatcgagttaggcgtgactggaggaggtagtcccgagaacggagacggagctctcctggccataacgccccccgcggtcaaacgtcgccgggggagaccaccgaaaaagaaccgctcgccagctgatgcagggagaggcgtggacgaggcacccagcagcaccctgaagggcaagacaaacggcgccgaccccgtgcctggaccagaaaccctgatagttgccgaccccgttctagaaccacagctgattcctggtccccagcccctgggcccccagccggtccacaggcctaatcccctgctgtcaccagtggagaaacgccggagagggaggccacctaaggccagagacctgccaatcccggggaccattagcagcgctggggacggaaatagtgaaagtcggacacagccgccccctcatccgagccccttgacacccttgccgccactccttgtttgccccacagccacagttgctaacactgtgaccacggtaaccatcagcacctccccaccaaagaggaagagaggacgaccgcccaaaaacccaccaagtccgcggccctcacagcttccagtgttggaccgcgattcaaccagcgtgctcgaatcctgtgggttggggaggcgcagacagcctcagggacagggagagtccgaaggatcaagctctgacgaggacggcagccggcccctcactcgactcgctcggctgagacttgaagccgaaggcatgcgggggcgaaagtccggcgggtctatggtcgtagctgtaattcaggacgatctggatctcgcggattctggacctgggggtctggagctgacccctccggtagtgtcacttactcctaaactgagatccactcgcctgcggcccggctcacttgtgccccctctggagactgagaagctgcctcgcaaaagagcaggagcccctgtcggaggctctcccggtctggctaagcgcggacggttgcagccaccctcccctttgggcccggaaggctcagtggaggaatctgaggctgaagcttccggagaggaggaggaaggtgacggcacgcccagacgaagacccggccctagacggctggttggcactaccaatcagggtgaccagcgtatcctacgttccagtgcaccaccatcacttgcgggacccgccgtcagccaccgcggccgcaaggcgaaaacgtag

SEQ ID NO: 166926 - DNA, 180 bp, Artificial Sequence
  derived and/or modified sequence
atgcagagcagccctagtcctgcccacccccagctgcctgtccttcaaacccaaatggtctccgacggaatgactggctccaacccagtctcaccagcaagtagcagtagccccgcctcaagtggagcgggaggcatatccccacaacatattgcgcaagatagtagtctagacggatag

SEQ ID NO: 166927 - DNA, 9693 bp, Artificial Sequence
  derived and/or modified sequence
atgcagagcagccccagccctgcccacccccagctgcctgtgctgcagacccagatggtgtctgatggcatgacaggcagcaaccctgtgtccccagccagcagcagcagccctgccagcagtggagctgggggcatcagcccccagcacatcgcccaggacagcagcctggatggccccccaggccccccagatggagccaccgtgcccctggagggcttcagcctgagccaggccgctgacctggccaacaagggccccaagtgggagaagagccacgccgagattgctgagcaggccaagcatgaggccgagattgagaccagaattgctgagctgaggaaggagggcttctggagcctgaagaggctgcccaaggtgcctgagcccccccggcccaagggccactgggactacctgtgtgaggagatgcagtggctgtctgctgactttgcccaggagcggcgctggaagaggggcgtggccaggaaggtggtgaggatggtgatccgccaccacgaggagcagaggcagaaggaggagcgggcccggcgggaggagcaggccaagctgcggcgcatcgccagcaccatggccaaggatgtgcggcagttctggagcaatgtggagaaggtggtgcagttcaagcagcagagccggctggaggagaagaggaagaaggccctggacctgcacctggacttcatcgtgggccagacagagaagtacagcgacctgctgagccagagcctgaaccagcccctgaccagcagcaaggccggcagcagcccctgcctgggcagcagcagcgctgccagcagccccccacctccagccagccggctggatgatgaagatggagacttccagccccaggaggatgaggaggaggatgatgaggagaccatcgaggtggaggagcagcaggagggcaatgatgctgaggcccagaggcgggagattgagctgctgcggcgggagggggagctgcccctggaggagctgctgcggagcctgcccccccagctgctggagggccccagcagccccagccagacccccagcagccatgacagcgacaccagagatggccctgaggagggcgctgaggaggagcccccccaggtgctggagatcaagcccccacccagcgctgtgacccagaggaacaagcagccctggcacccagatgaagatgatgaggagttcaccgccaatgaggaggaggctgaagatgaggaggacaccatcgctgctgaggagcagctggagggggaggtggaccacgccatggagctgtctgagctggcccgggagggggagctgtccatggaggagctgctgcagcagtatgctggggcctatgcccctggcagcggcagcagtgaagatgaagatgaagatgaggtggatgccaacagcagtgactgtgagcctgagggccctgtggaggccgaggagcccccccaggaggacagcagcagccagagcgacagcgtggaggacagaagtgaagatgaggaggatgagcacagcgaggaggaggagaccagcggcagcagcgccagcgaggagagcgagagcgaggagagtgaagatgcccagagccagagccaggctgatgaggaggaggaggatgatgactttggagtggagtacctgctggccagagatgaggagcagagcgaggctgatgctggcagcggcccccccaccccaggccccaccaccctgggccccaagaaggagatcacagacattgctgctgctgctgagagcctgcagcccaagggctacaccctggccaccacccaggtgaagacccccatccccctgctgctgcggggccagctgcgggagtaccagcacatcggcctggactggctggtgaccatgtatgagaagaagctgaatggcatcctggctgatgagatgggcctgggcaagaccatccagaccatcagcctgctggcccacctggcctgtgagaagggcaactggggcccccacctgatcatcgtgcccacctctgtgatgctgaactgggagatggagctgaagcgctggtgccccagcttcaagatcctgacctactatggagcccagaaggagaggaagctgaagaggcagggctggaccaagcccaatgccttccacgtgtgcatcaccagctacaagctggtgctgcaggaccaccaggccttccggaggaagaactggagatacctgatcctggatgaggcccagaacatcaagaacttcaagagccagcgctggcagagcctgctgaacttcaacagccagaggcggctgctgctgaccggcacccccctgcagaacagcctgatggagctgtggagcctgatgcacttcctgatgcctcatgtgttccagagccaccgggagttcaaggagtggttcagcaaccccctgaccggcatgattgagggcagccaggagtacaatgaaggcctggtgaagaggctgcacaaggtgctgcggcccttcctgctgcggcgggtgaaggtggatgtggagaagcagatgcccaagaagtatgaacatgtgatccgctgccgcctgagcaagaggcagcgctgcctgtatgatgacttcatggcccagaccaccaccaaggagaccctggccaccggccacttcatgtctgtcatcaacatcctgatgcagctgaggaaggtgtgcaaccaccccaacctgtttgaccccaggcctgtgaccagccccttcatcaccccaggcatctgcttcagcacagccagcctggtgctgcgggccacagatgtgcaccccctgcagagaattgacatgggccgctttgacctgattggcctggagggccgggtgagccgctatgaggccgacaccttcctgcccaggcaccggctgagcagaagagtgctgctggaggtggccacagccccagaccccccaccccggcccaagcctgtgaagatgaaggtgaacaggatgctgcagcctgtgcccaagcaggagggccgcacagtggtggtggtgaacaacccccgggcccccctgggccctgtgcctgtgcggcccccacctggccctgagctgagcgcccagcccaccccaggccctgtgccccaggtgctgcctgccagcctgatggtgtctgccagccctgctggccccccactcatcccagccagccggcccccaggccctgtgctgctgccccccctgcagcccaacagcggcagcctgccccaggtgctgcccagccccctgggcgtgctgagcggcaccagcaggcctcccacccccaccctgagcctgaagcccaccccaccagcccctgtgcggctgagccctgcccctcctcctggcagcagcagcctgctgaagcccctgactgtgcccccaggctacaccttccccccagctgctgccaccaccaccagcaccaccacagccacagccaccaccacagctgtgcctgcccccaccccagccccccagaggctcatcctgagcccagacatgcaggcccggctgcccagcggggaggtggtgtccatcggccagctggccagcctggcccagaggcctgtggccaatgccggcggcagcaagcccctgaccttccagatccagggcaacaagctgaccctgactggagcccaggtgcggcagctggccgtgggccagccccggcccctgcagagaaatgtggtgcacctggtgtctgctgggggccagcaccacctgatcagccagcctgcccacgtggccctgatccaggccgtggcccccaccccaggccccacccctgtgtctgtgctgcccagcagcacccccagcaccaccccagcccccaccggcctgagcctgcccctggccgccaaccaggtgccccccaccatggtgaacaacacaggagtggtgaagatcgtggtgcggcaggcccccagagatggcctgacccctgtgccccccctggccccagcccccaggcctcccagcagcggcctgcctgctgtgctgaacccccggcccaccctgaccccaggccgcctgcccacccccaccctgggcacagcccgggcccccatgcccacccccaccctggtgcggcccctgctgaagctggtgcacagccccagccctgaggtgtctgccagcgcccctggggccgcccccctgaccatcagcagccccctgcacgtgcccagcagcctgcccggccctgccagcagccccatgcccatccccaacagcagccccctggccagccctgtgagcagcacagtgtctgtgcccctgagcagcagcctgcccatctctgtgcccaccaccctgcctgccccagccagcgcccccctgaccatccccatcagcgcccccctgactgtgtctgccagcggccctgccctgctgacctctgtgaccccacccctggcccctgtggtgcctgctgcccctggcccccccagcctggcccccagcggggccagccccagcgccagcgccctgaccctgggcctggccacagcccccagcctgagcagcagccagaccccaggccaccccctgctgctggcccccaccagcagccacgtgcccggcctgaacagcacagtggccccagcctgcagccctgtgctggtgcctgccagcgccctggccagccccttccccagcgcccccaacccagccccagcccaggccagcctgctggccccagccagcagcgccagccaggccctggccacccccctggcccccatggccgccccccagacagccatcctggcccccagccctgccccacccctggcccccctgcctgtgctggcccccagccctggggccgcccctgtgctggccagcagccagacccctgtgcctgtgatggcccccagcagcaccccaggcaccagcctggccagcgccagccctgtgcctgcccccacccctgtgctggcccccagcagcacccagaccatgctgcctgcccctgtgcccagccccctgcccagccctgccagcacccagaccctggccctggccccagccctggcccccaccctgggcggcagcagccccagccagaccctgagcctgggcaccggcaacccccagggccccttccccacccagaccctgagcctgaccccagccagcagcctggtgcccaccccagcccagaccctgagcctggcccctggcccccccctgggccccacccagaccctgagcctggccccagccccacccctggccccagccagccctgtgggccctgccccagcccacaccctgaccctggccccagccagcagcagcgccagcctgctggccccagcctctgtgcagaccctgaccctgagccctgcccctgtgcccaccctgggccctgctgctgcccagaccctggccctggccccagccagcacccagagccctgccagccaggccagcagcctggtggtgtctgccagcggggccgcccccctgcctgtgaccatggtgtcccggctgcctgtgtccaaggatgagccagacaccctgaccctgcggagcggcccccccagcccccccagcacagccaccagctttggaggcccccggccccggcggcagcccccacctccacccaggagccccttctacctggacagcctggaggagaagaggaagaggcagaggtctgagcggctggagcgcatcttccagctgtctgaggcccatggagccctggcccctgtgtatggaacagaggtgctggacttctgcaccctgccccagcctgtggccagccccatcggccccaggagccctggccccagccaccccaccttctggacctacacagaggccgcccacagagctgtgctcttcccccagcagaggctggaccagctgtctgagatcatcgagcgcttcatctttgtgatgcctcctgtggaggcccccccacccagcctgcacgcctgccaccccccaccctggctggccccccggcaggccgccttccaggagcagctggccagcgagctgtggccccgggcccggcccctgcaccgcatcgtgtgcaacatgaggacccagttcccagacctgcggctcatccagtatgactgtgggaagctgcagaccctggccgtgctgctgcggcagctgaaggccgagggccaccgggtgctgatcttcacccagatgaccaggatgctggatgtgctggagcagttcctgacctaccacggccacctgtacctgcggctggatggcagcaccagggtggagcagaggcaggccctgatggagcgcttcaatgctgacaagaggatcttctgcttcatcctgagcaccaggtctgggggcgtgggcgtgaacctgaccggggctgacacagtggtgttctatgacagcgactggaaccccaccatggatgcccaggcccaggaccgctgccacagaattggccagaccagagatgtgcacatctaccgcctcatcagcgagaggacagtggaggagaacatcctgaagaaggccaaccagaagaggatgctgggggacatggccattgaaggaggcaacttcaccacagcctacttcaagcagcagaccatccgggagctgtttgacatgcccctggaggagcccagcagcagctctgtgcccagcgcccctgaggaggaggaggagaccgtggccagcaagcagacccacatcctggagcaggccctgtgcagagcagaagatgaggaggacatccgggccgccacccaggccaaggccgagcaggtggccgagctggccgagttcaatgaaaatgatggcttccctgctggggagggggaggaggccggccggcctggagcagaagatgaggagatgagcagagctgagcaggagattgctgccctggtggagcagctgacccccatcgagagatatgccatgaagttcctggaggccagcctggaggaggtgtcccgggaggagctgaagcaggccgaggagcaggtggaggccgccaggaaggacctggaccaggccaaggaggaggtgttccggctgccccaggaggaggaggagggccctggagctggagatgagagcagctgtggcaccggcggcggcacccaccggcgcagcaagaaggccaaggcccctgagaggcctggcaccagggtgtctgagcggctgcggggggcccgggcagagacccagggcgccaaccacacccctgtgatcagcgcccaccagaccaggagcaccaccaccccaccccgctgcagccctgcccgggagcgggtgcccaggcctgccccccggccccggcccaccccagccagcgccccagctgccatcccagccctggtgcctgtgcctgtgtctgcccctgtgcccatcagcgcccccaaccccatcaccatcctgcctgtgcacatcctgcccagccccccaccacccagccagatccccccctgcagcagccctgcctgcaccccacctccagcctgcaccccacctccagcccacaccccacctccagcccagacctgcctggtgacccccagcagccccctgctgctgggccccccatctgtgcccatcagcgcctctgtgaccaacctgcccctgggcctgcggcctgaggccgagctgtgtgcccaggccctggccagccctgagagcctggagctggcctctgtggccagcagcgagaccagcagcctgagcctggtgccccccaaggacctgctgcctgtggccgtggagatcctgcctgtgtctgagaagaacctgagcctgaccccatctgcccccagcctgaccctggaggccggcagcatccccaacggccaggagcaggaggccccagattctgctgagggcaccaccctgactgtgctgcctgagggggaggagctgcccctgtgtgtgtctgagagcaatggcctggagctgcccccatctgctgccagtgatgagcccctgcaggagcccctggaggccgacaggaccagcgaggagctgacagaggccaagacccccaccagcagccctgagaagccccaggagctggtgacagctgaggtggccgcccccagcaccagcagcagcgccaccagcagccctgagggccccagccctgcccggcccccaagaagaaggaccagcgcagatgtggagatccggggccagggcaccggccggcccggccagcccccaggccccaaggtgctgaggaagctgcccggccgcctggtgacagtggtggaggagaaggagctggtgagaagaagacggcagcagagaggagctgccagcaccctggtgcctggggtgtctgagaccagcgccagccctggcagccccagcgtgcgctccatgagcggccctgagagcagcccccccatcggcggcccctgtgaggccgcccccagcagcagcctgcccaccccaccccagcagcccttcatcgcccggcggcacatcgagctgggcgtgactggaggcggcagcccagaaaatggagatggagccctgctggccatcaccccacctgctgtgaagagaagaagaggccggccccccaagaagaacagaagccctgcagatgctggccggggcgtggatgaggcccccagcagcaccctgaagggcaagaccaacggggctgaccctgtgcccggccctgagaccctcatcgtggccgaccctgtgctggagccccagctgatccctggcccccagcccctgggcccccagcctgtgcaccggcccaaccccctgctgagccctgtggagaagagaagaagaggccggccccccaaggcccgggacctgcccatccctggcaccatcagcagcgctggagatggcaacagcgagagcaggacccagcccccaccccaccccagccccctgacccccctgccccccctgctggtgtgccccacagccaccgtggccaacacagtgaccaccgtgaccatcagcaccagcccccccaagaggaagaggggccggccccccaagaacccccccagcccccggcccagccagctgcctgtgctggaccgggacagcacctctgtgctggagagctgtggcctgggcagaagacggcagccccagggccagggcgagagcgagggcagcagcagtgatgaagatggcagccggcccctgacccggctggcccggctgcggctggaggccgagggcatgaggggcaggaagagcggcggctccatggtggtggccgtcatccaggatgacctggacctggccgacagcggccctgggggcctggagctgaccccacctgtggtgtccctgacccccaagctgcggagcacccggctgcggcccggcagcctggtgccccccctggagacagagaagctgcccaggaagagagctggggcccctgtgggcggcagccctggcctggccaagaggggccgcctgcagccccccagccccctgggccctgagggctctgtggaggagagcgaggccgaggccagcggggaggaggaggagggagatggcacccccaggagaagacctggcccccggcggctggtgggcaccaccaaccagggcgaccagaggatcctgcggagcagcgccccacccagcctggccggccctgctgtgagccaccggggcaggaaggccaagacctag

SEQ ID NO: 166928 - DNA, 9219 bp, Artificial Sequence
  derived and/or modified sequence
atgcagagcagccccagccctgcccacccccagctgcctgtgctgcagacccagatggtgtctgatggcatgacaggcagcaaccctgtgtccccagccagcagcagcagccctgccagcagtggagctgggggcatcagcccccagcacatcgcccaggacagcagcctggatggccccccaggccccccagatggagccaccgtgcccctggagggcttcagcctgagccaggccgctgacctggccaacaagggccccaagtgggagaagagccacgccgagattgctgagcaggccaagcatgaggccgagattgagaccagaattgctgagctgaggaaggagggcttctggagcctgaagaggctgcccaaggtgcctgagcccccccggcccaagggccactgggactacctgtgtgaggagatgcagtggctgtctgctgactttgcccaggagcggcgctggaagaggggcgtggccaggaaggtggtgaggatggtgatccgccaccacgaggagcagaggcagaaggaggagcgggcccggcgggaggagcaggccaagctgcggcgcatcgccagcaccatggccaaggatgtgcggcagttctggagcaatgtggagaaggtggtgcagttcaagcagcagagccggctggaggagaagaggaagaaggccctggacctgcacctggacttcatcgtgggccagacagagaagtacagcgacctgctgagccagagcctgaaccagcccctgaccagcagcaaggccggcagcagcccctgcctgggcagcagcagcgctgccagcagccccccacctccagccagccggctggatgatgaagatggagacttccagccccaggaggatgaggaggaggatgatgaggagaccatcgaggtggaggagcagcaggagggcaatgatgctgaggcccagaggcgggagattgagctgctgcggcgggagggggagctgcccctggaggagctgctgcggagcctgcccccccagctgctggagggccccagcagccccagccagacccccagcagccatgacagcgacaccagagatggccctgaggagggcgctgaggaggagcccccccaggtgctggagatcaagcccccacccagcgctgtgacccagaggaacaagcagccctggcacccagatgaagatgatgaggagttcaccgccaatgaggaggaggctgaagatgaggaggacaccatcgctgctgaggagcagctggagggggaggtggaccacgccatggagctgtctgagctggcccgggagggggagctgtccatggaggagctgctgcagcagtatgctggggcctatgcccctggcagcggcagcagtgaagatgaagatgaagatgaggtggatgccaacagcagtgactgtgagcctgagggccctgtggaggccgaggagcccccccaggaggacagcagcagccagagcgacagcgtggaggacagaagtgaagatgaggaggatgagcacagcgaggaggaggagaccagcggcagcagcgccagcgaggagagcgagagcgaggagagtgaagatgcccagagccagagccaggctgatgaggaggaggaggatgatgactttggagtggagtacctgctggccagagatgaggagcagagcgaggctgatgctggcagcggcccccccaccccaggccccaccaccctgggccccaagaaggagatcacagacattgctgctgctgctgagagcctgcagcccaagggctacaccctggccaccacccaggtgaagacccccatccccctgctgctgcggggccagctgcgggagtaccagcacatcggcctggactggctggtgaccatgtatgagaagaagctgaatggcatcctggctgatgagatgggcctgggcaagaccatccagaccatcagcctgctggcccacctggcctgtgagaagggcaactggggcccccacctgatcatcgtgcccacctctgtgatgctgaactgggagatggagctgaagcgctggtgccccagcttcaagatcctgacctactatggagcccagaaggagaggaagctgaagaggcagggctggaccaagcccaatgccttccacgtgtgcatcaccagctacaagctggtgctgcaggaccaccaggccttccggaggaagaactggagatacctgatcctggatgaggcccagaacatcaagaacttcaagagccagcgctggcagagcctgctgaacttcaacagccagaggcggctgctgctgaccggcacccccctgcagaacagcctgatggagctgtggagcctgatgcacttcctgatgcctcatgtgttccagagccaccgggagttcaaggagtggttcagcaaccccctgaccggcatgattgagggcagccaggagtacaatgaaggcctggtgaagaggctgcacaaggtgctgcggcccttcctgctgcggcgggtgaaggtggatgtggagaagcagatgcccaagaagtatgaacatgtgatccgctgccgcctgagcaagaggcagcgctgcctgtatgatgacttcatggcccagaccaccaccaaggagaccctggccaccggccacttcatgtctgtcatcaacatcctgatgcagctgaggaaggtgtgcaaccaccccaacctgtttgaccccaggcctgtgaccagccccttcatcaccccaggcatctgcttcagcacagccagcctggtgctgcgggccacagatgtgcaccccctgcagagaattgacatgggccgctttgacctgattggcctggagggccgggtgagccgctatgaggccgacaccttcctgcccaggcaccggctgagcagaagagtgctgctggaggtggccacagccccagaccccccaccccggcccaagcctgtgaagatgaaggtgaacaggatgctgcagcctgtgcccaagcaggagggccgcacagtggtggtggtgaacaacccccgggcccccctgggccctgtgcctgtgcggcccccacctggccctgagctgagcgcccagcccaccccaggccctgtgccccaggtgctgcctgccagcctgatggtgtctgccagccctgctggccccccactcatcccagccagccggcccccaggccctgtgctgctgccccccctgcagcccaacagcggcagcctgccccaggccggggaggtggtgtccatcggccagctggccagcctggcccagaggcctgtggccaatgccggcggcagcaagcccctgaccttccagatccagggcaacaagctgaccctgactggagcccaggtgcggcagctggccgtgggccagccccggcccctgcagatgccacccaccatggtgaacaacacaggagtggtgaagatcgtggtgcggcaggcccccagagatggcctgacccctgtgccccccctggccccagcccccaggcctcccagcagcggcctgcctgctgtgctgaacccccggcccaccctgaccccaggccgcctgcccacccccaccctgggcacagcccgggcccccatgcccacccccaccctggtgcggcccctgctgaagctggtgcacagccccagccctgaggtgtctgccagcgcccctggggccgcccccctgaccatcagcagccccctgcacgtgcccagcagcctgcccggccctgccagcagccccatgcccatccccaacagcagccccctggccagccctgtgagcagcacagtgtctgtgcccctgagcagcagcctgcccatctctgtgcccaccaccctgcctgccccagccagcgcccccctgaccatccccatcagcgcccccctgactgtgtctgccagcggccctgccctgctgacctctgtgaccccacccctggcccctgtggtgcctgctgcccctggcccccccagcctggcccccagcggggccagccccagcgccagcgccctgaccctgggcctggccacagcccccagcctgagcagcagccagaccccaggccaccccctgctgctggcccccaccagcagccacgtgcccggcctgaacagcacagtggccccagcctgcagccctgtgctggtgcctgccagcgccctggccagccccttccccagcgcccccaacccagccccagcccaggccagcctgctggccccagccagcagcgccagccaggccctggccacccccctggcccccatggccgccccccagacagccatcctggcccccagccctgccccacccctggcccccctgcctgtgctggcccccagccctggggccgcccctgtgctggccagcagccagacccctgtgcctgtgatggcccccagcagcaccccaggcaccagcctggccagcgccagccctgtgcctgcccccacccctgtgctggcccccagcagcacccagaccatgctgcctgcccctgtgcccagccccctgcccagccctgccagcacccagaccctggccctggccccagccctggcccccaccctgggcggcagcagccccagccagaccctgagcctgggcaccggcaacccccagggccccttccccacccagaccctgagcctgaccccagccagcagcctggtgcccaccccagcccagaccctgagcctggcccctggcccccccctgggccccacccagaccctgagcctggccccagccccacccctggccccagccagccctgtgggccctgccccagcccacaccctgaccctggccccagccagcagcagcgccagcctgctggccccagcctctgtgcagaccctgaccctgagccctgcccctgtgcccaccctgggccctgctgctgcccagaccctggccctggccccagccagcacccagagccctgccagccaggccagcagcctggtggtgtctgccagcggggccgcccccctgcctgtgaccatggtgtcccggctgcctgtgtccaaggatgagccagacaccctgaccctgcggagcggcccccccagcccccccagcacagccaccagctttggaggcccccggccccggcggcagcccccacctccacccaggagccccttctacctggacagcctggaggagaagaggaagaggcagaggtctgagcggctggagcgcatcttccagctgtctgaggcccatggagccctggcccctgtgtatggaacagaggtgctggacttctgcaccctgccccagcctgtggccagccccatcggccccaggagccctggccccagccaccccaccttctggacctacacagaggccgcccacagagctgtgctcttcccccagcagaggctggaccagctgtctgagatcatcgagcgcttcatctttgtgatgcctcctgtggaggcccccccacccagcctgcacgcctgccaccccccaccctggctggccccccggcaggccgccttccaggagcagctggccagcgagctgtggccccgggcccggcccctgcaccgcatcgtgtgcaacatgaggacccagttcccagacctgcggctcatccagtatgactgtgggaagctgcagaccctggccgtgctgctgcggcagctgaaggccgagggccaccgggtgctgatcttcacccagatgaccaggatgctggatgtgctggagcagttcctgacctaccacggccacctgtacctgcggctggatggcagcaccagggtggagcagaggcaggccctgatggagcgcttcaatgctgacaagaggatcttctgcttcatcctgagcaccaggtctgggggcgtgggcgtgaacctgaccggggctgacacagtggtgttctatgacagcgactggaaccccaccatggatgcccaggcccaggaccgctgccacagaattggccagaccagagatgtgcacatctaccgcctcatcagcgagaggacagtggaggagaacatcctgaagaaggccaaccagaagaggatgctgggggacatggccattgaaggaggcaacttcaccacagcctacttcaagcagcagaccatccgggagctgtttgacatgcccctggaggagcccagcagcagctctgtgcccagcgcccctgaggaggaggaggagaccgtggccagcaagcagacccacatcctggagcaggccctgtgcagagcagaagatgaggaggacatccgggccgccacccaggccaaggccgagcaggtggccgagctggccgagttcaatgaaaatgatggcttccctgctggggagggggaggaggccggccggcctggagcagaagatgaggagatgagcagagctgagcaggagattgctgccctggtggagcagctgacccccatcgagagatatgccatgaagttcctggaggccagcctggaggaggtgtcccgggaggagctgaagcaggccgaggagcaggtggaggccgccaggaaggacctggaccaggccaaggaggaggtgttccggctgccccaggaggaggaggagggccctggagctggagatgagagcagctgtggcaccggcggcggcacccaccggcgcagcaagaaggccaaggcccctgagaggcctggcaccagggtgtctgagcggctgcggggggcccgggcagagacccagggcgccaaccacacccctgtgatcagcgcccaccagaccaggagcaccaccaccccaccccgctgcagccctgcccgggagcgggtgcccaggcctgccccccggccccggcccaccccagccagcgccccagctgccatcccagccctggtgcctgtgcctgtgtctgcccctgtgcccatcagcgcccccaaccccatcaccatcctgcctgtgcacatcctgcccagccccccaccacccagccagatccccccctgcagcagccctgcctgcaccccacctccagcctgcaccccacctccagcccacaccccacctccagcccagacctgcctggtgacccccagcagccccctgctgctgggccccccatctgtgcccatcagcgcctctgtgaccaacctgcccctgggcctgcggcctgaggccgagctgtgtgcccaggccctggccagccctgagagcctggagctggcctctgtggccagcagcgagaccagcagcctgagcctggtgccccccaaggacctgctgcctgtggccgtggagatcctgcctgtgtctgagaagaacctgagcctgaccccatctgcccccagcctgaccctggaggccggcagcatccccaacggccaggagcaggaggccccagattctgctgagggcaccaccctgactgtgctgcctgagggggaggagctgcccctgtgtgtgtctgagagcaatggcctggagctgcccccatctgctgccagtgatgagcccctgcaggagcccctggaggccgacaggaccagcgaggagctgacagaggccaagacccccaccagcagccctgagaagccccaggagctggtgacagctgaggtggccgcccccagcaccagcagcagcgccaccagcagccctgagggccccagccctgcccggcccccaagaagaaggaccagcgcagatgtggagatccggggccagggcaccggccggcccggccagcccccaggccccaaggtgctgaggaagctgcccggccgcctggtgacagtggtggaggagaaggagctggtgagaagaagacggcagcagagaggagctgccagcaccctggtgcctggggtgtctgagaccagcgccagccctggcagccccagcgtgcgctccatgagcggccctgagagcagcccccccatcggcggcccctgtgaggccgcccccagcagcagcctgcccaccccaccccagcagcccttcatcgcccggcggcacatcgagctgggcgtgactggaggcggcagcccagaaaatggagatggagccctgctggccatcaccccacctgctgtgaagagaagaagaggccggccccccaagaagaacagaagccctgcagatgctggccggggcgtggatgaggcccccagcagcaccctgaagggcaagaccaacggggctgaccctgtgcccggccctgagaccctcatcgtggccgaccctgtgctggagccccagctgatccctggcccccagcccctgggcccccagcctgtgcaccggcccaaccccctgctgagccctgtggagaagagaagaagaggccggccccccaaggcccgggacctgcccatccctggcaccatcagcagcgctggagatggcaacagcgagagcaggacccagcccccaccccaccccagccccctgacccccctgccccccctgctggtgtgccccacagccaccgtggccaacacagtgaccaccgtgaccatcagcaccagcccccccaagaggaagaggggccggccccccaagaacccccccagcccccggcccagccagctgcctgtgctggaccgggacagcacctctgtgctggagagctgtggcctgggcagaagacggcagccccagggccagggcgagagcgagggcagcagcagtgatgaagatggcagccggcccctgacccggctggcccggctgcggctggaggccgagggcatgaggggcaggaagagcggcggctccatggtggtggccgtcatccaggatgacctggacctggccgacagcggccctgggggcctggagctgaccccacctgtggtgtccctgacccccaagctgcggagcacccggctgcggcccggcagcctggtgccccccctggagacagagaagctgcccaggaagagagctggggcccctgtgggcggcagccctggcctggccaagaggggccgcctgcagccccccagccccctgggccctgagggctctgtggaggagagcgaggccgaggccagcggggaggaggaggagggagatggcacccccaggagaagacctggcccccggcggctggtgggcaccaccaaccagggcgaccagaggatcctgcggagcagcgccccacccagcctggccggccctgctgtgagccaccggggcaggaaggccaagacctag

SEQ ID NO: 166929 - DNA, 9507 bp, Artificial Sequence
  derived and/or modified sequence
atgcagagcagccccagccctgcccacccccagctgcctgtgctgcagacccagatggtgtctgatggcatgacaggcagcaaccctgtgtccccagccagcagcagcagccctgccagcagtggagctgggggcatcagcccccagcacatcgcccaggacagcagcctggatggccccccaggccccccagatggagccaccgtgcccctggagggcttcagcctgagccaggccgctgacctggccaacaagggccccaagtgggagaagagccacgccgagattgctgagcaggccaagcatgaggccgagattgagaccagaattgctgagctgaggaaggagggcttctggagcctgaagaggctgcccaaggtgcctgagcccccccggcccaagggccactgggactacctgtgtgaggagatgcagtggctgtctgctgactttgcccaggagcggcgctggaagaggggcgtggccaggaaggtggtgaggatggtgatccgccaccacgaggagcagaggcagaaggaggagcgggcccggcgggaggagcaggccaagctgcggcgcatcgccagcaccatggccaaggatgtgcggcagttctggagcaatgtggagaaggtggtgcagttcaagcagcagagccggctggaggagaagaggaagaaggccctggacctgcacctggacttcatcgtgggccagacagagaagtacagcgacctgctgagccagagcctgaaccagcccctgaccagcagcaaggccggcagcagcccctgcctgggcagcagcagcgctgccagcagccccccacctccagccagccggctggatgatgaagatggagacttccagccccaggaggatgaggaggaggatgatgaggagaccatcgaggtggaggagcagcaggagggcaatgatgctgaggcccagaggcgggagattgagctgctgcggcgggagggggagctgcccctggaggagctgctgcggagcctgcccccccagctgctggagggccccagcagccccagccagacccccagcagccatgacagcgacaccagagatggccctgaggagggcgctgaggaggagcccccccaggtgctggagatcaagcccccacccagcgctgtgacccagaggaacaagcagccctggcacccagatgaagatgatgaggagttcaccgccaatgaggaggaggctgaagatgaggaggacaccatcgctgctgaggagcagctggagggggaggtggaccacgccatggagctgtctgagctggcccgggagggggagctgtccatggaggagctgctgcagcagtatgctggggcctatgcccctggcagcggcagcagtgaagatgaagatgaagatgaggtggatgccaacagcagtgactgtgagcctgagggccctgtggaggccgaggagcccccccaggaggacagcagcagccagagcgacagcgtggaggacagaagtgaagatgaggaggatgagcacagcgaggaggaggagaccagcggcagcagcgccagcgaggagagcgagagcgaggagagtgaagatgcccagagccagagccaggctgatgaggaggaggaggatgatgactttggagtggagtacctgctggccagagatgaggagcagagcgaggctgatgctggcagcggcccccccaccccaggccccaccaccctgggccccaagaaggagatcacagacattgctgctgctgctgagagcctgcagcccaagggctacaccctggccaccacccaggtgaagacccccatccccctgctgctgcggggccagctgcgggagtaccagcacatcggcctggactggctggtgaccatgtatgagaagaagctgaatggcatcctggctgatgagatgggcctgggcaagaccatccagaccatcagcctgctggcccacctggcctgtgagaagggcaactggggcccccacctgatcatcgtgcccacctctgtgatgctgaactgggagatggagctgaagcgctggtgccccagcttcaagatcctgacctactatggagcccagaaggagaggaagctgaagaggcagggctggaccaagcccaatgccttccacgtgtgcatcaccagctacaagctggtgctgcaggaccaccaggccttccggaggaagaactggagatacctgatcctggatgaggcccagaacatcaagaacttcaagagccagcgctggcagagcctgctgaacttcaacagccagaggcggctgctgctgaccggcacccccctgcagaacagcctgatggagctgtggagcctgatgcacttcctgatgcctcatgtgttccagagccaccgggagttcaaggagtggttcagcaaccccctgaccggcatgattgagggcagccaggagtacaatgaaggcctggtgaagaggctgcacaaggtgctgcggcccttcctgctgcggcgggtgaaggtggatgtggagaagcagatgcccaagaagtatgaacatgtgatccgctgccgcctgagcaagaggcagcgctgcctgtatgatgacttcatggcccagaccaccaccaaggagaccctggccaccggccacttcatgtctgtcatcaacatcctgatgcagctgaggaaggtgtgcaaccaccccaacctgtttgaccccaggcctgtgaccagccccttcatcaccccaggcatctgcttcagcacagccagcctggtgctgcgggccacagatgtgcaccccctgcagagaattgacatgggccgctttgacctgattggcctggagggccgggtgagccgctatgaggccgacaccttcctgcccaggcaccggctgagcagaagagtgctgctggaggtggccacagccccagaccccccaccccggcccaagcctgtgaagatgaaggtgaacaggatgctgcagcctgtgcccaagcaggagggccgcacagtggtggtggtgaacaacccccgggcccccctgggccctgtgcctgtgcggcccccacctggccctgagctgagcgcccagcccaccccaggccctgtgccccaggtgctgcctgccagcctgatggtgtctgccagccctgctggccccccactcatcccagccagccggcccccaggccctgtgctgctgccccccctgcagcccaacagcggcagcctgccccaggtgctgcccagccccctgggcgtgctgagcggcaccagcaggcctcccacccccaccctgagcctgaagcccaccccaccagcccctgtgcggctgagccctgcccctcctcctggcagcagcagcctgctgaagcccctgactgtgcccccaggctacaccttccccccagctgctgccaccaccaccagcaccaccacagccacagccaccaccacagctgtgcctgcccccaccccagccccccagaggctcatcctgagcccagacatgcaggcccggctgcccagcggggaggtggtgtccatcggccagctggccagcctggcccagaggcctgtggccaatgccggcggcagcaagcccctgaccttccagatccagggcaacaagctgaccctgactggagcccaggtgcggcagctggccgtgggccagccccggcccctgcagatgccacccaccatggtgaacaacacaggagtggtgaagatcgtggtgcggcaggcccccagagatggcctgacccctgtgccccccctggccccagcccccaggcctcccagcagcggcctgcctgctgtgctgaacccccggcccaccctgaccccaggccgcctgcccacccccaccctgggcacagcccgggcccccatgcccacccccaccctggtgcggcccctgctgaagctggtgcacagccccagccctgaggtgtctgccagcgcccctggggccgcccccctgaccatcagcagccccctgcacgtgcccagcagcctgcccggccctgccagcagccccatgcccatccccaacagcagccccctggccagccctgtgagcagcacagtgtctgtgcccctgagcagcagcctgcccatctctgtgcccaccaccctgcctgccccagccagcgcccccctgaccatccccatcagcgcccccctgactgtgtctgccagcggccctgccctgctgacctctgtgaccccacccctggcccctgtggtgcctgctgcccctggcccccccagcctggcccccagcggggccagccccagcgccagcgccctgaccctgggcctggccacagcccccagcctgagcagcagccagaccccaggccaccccctgctgctggcccccaccagcagccacgtgcccggcctgaacagcacagtggccccagcctgcagccctgtgctggtgcctgccagcgccctggccagccccttccccagcgcccccaacccagccccagcccaggccagcctgctggccccagccagcagcgccagccaggccctggccacccccctggcccccatggccgccccccagacagccatcctggcccccagccctgccccacccctggcccccctgcctgtgctggcccccagccctggggccgcccctgtgctggccagcagccagacccctgtgcctgtgatggcccccagcagcaccccaggcaccagcctggccagcgccagccctgtgcctgcccccacccctgtgctggcccccagcagcacccagaccatgctgcctgcccctgtgcccagccccctgcccagccctgccagcacccagaccctggccctggccccagccctggcccccaccctgggcggcagcagccccagccagaccctgagcctgggcaccggcaacccccagggccccttccccacccagaccctgagcctgaccccagccagcagcctggtgcccaccccagcccagaccctgagcctggcccctggcccccccctgggccccacccagaccctgagcctggccccagccccacccctggccccagccagccctgtgggccctgccccagcccacaccctgaccctggccccagccagcagcagcgccagcctgctggccccagcctctgtgcagaccctgaccctgagccctgcccctgtgcccaccctgggccctgctgctgcccagaccctggccctggccccagccagcacccagagccctgccagccaggccagcagcctggtggtgtctgccagcggggccgcccccctgcctgtgaccatggtgtcccggctgcctgtgtccaaggatgagccagacaccctgaccctgcggagcggcccccccagcccccccagcacagccaccagctttggaggcccccggccccggcggcagcccccacctccacccaggagccccttctacctggacagcctggaggagaagaggaagaggcagaggtctgagcggctggagcgcatcttccagctgtctgaggcccatggagccctggcccctgtgtatggaacagaggtgctggacttctgcaccctgccccagcctgtggccagccccatcggccccaggagccctggccccagccaccccaccttctggacctacacagaggccgcccacagagctgtgctcttcccccagcagaggctggaccagctgtctgagatcatcgagcgcttcatctttgtgatgcctcctgtggaggcccccccacccagcctgcacgcctgccaccccccaccctggctggccccccggcaggccgccttccaggagcagctggccagcgagctgtggccccgggcccggcccctgcaccgcatcgtgtgcaacatgaggacccagttcccagacctgcggctcatccagtatgactgtgggaagctgcagaccctggccgtgctgctgcggcagctgaaggccgagggccaccgggtgctgatcttcacccagatgaccaggatgctggatgtgctggagcagttcctgacctaccacggccacctgtacctgcggctggatggcagcaccagggtggagcagaggcaggccctgatggagcgcttcaatgctgacaagaggatcttctgcttcatcctgagcaccaggtctgggggcgtgggcgtgaacctgaccggggctgacacagtggtgttctatgacagcgactggaaccccaccatggatgcccaggcccaggaccgctgccacagaattggccagaccagagatgtgcacatctaccgcctcatcagcgagaggacagtggaggagaacatcctgaagaaggccaaccagaagaggatgctgggggacatggccattgaaggaggcaacttcaccacagcctacttcaagcagcagaccatccgggagctgtttgacatgcccctggaggagcccagcagcagctctgtgcccagcgcccctgaggaggaggaggagaccgtggccagcaagcagacccacatcctggagcaggccctgtgcagagcagaagatgaggaggacatccgggccgccacccaggccaaggccgagcaggtggccgagctggccgagttcaatgaaaatgatggcttccctgctggggagggggaggaggccggccggcctggagcagaagatgaggagatgagcagagctgagcaggagattgctgccctggtggagcagctgacccccatcgagagatatgccatgaagttcctggaggccagcctggaggaggtgtcccgggaggagctgaagcaggccgaggagcaggtggaggccgccaggaaggacctggaccaggccaaggaggaggtgttccggctgccccaggaggaggaggagggccctggagctggagatgagagcagctgtggcaccggcggcggcacccaccggcgcagcaagaaggccaaggcccctgagaggcctggcaccagggtgtctgagcggctgcggggggcccgggcagagacccagggcgccaaccacacccctgtgatcagcgcccaccagaccaggagcaccaccaccccaccccgctgcagccctgcccgggagcgggtgcccaggcctgccccccggccccggcccaccccagccagcgccccagctgccatcccagccctggtgcctgtgcctgtgtctgcccctgtgcccatcagcgcccccaaccccatcaccatcctgcctgtgcacatcctgcccagccccccaccacccagccagatccccccctgcagcagccctgcctgcaccccacctccagcctgcaccccacctccagcccacaccccacctccagcccagacctgcctggtgacccccagcagccccctgctgctgggccccccatctgtgcccatcagcgcctctgtgaccaacctgcccctgggcctgcggcctgaggccgagctgtgtgcccaggccctggccagccctgagagcctggagctggcctctgtggccagcagcgagaccagcagcctgagcctggtgccccccaaggacctgctgcctgtggccgtggagatcctgcctgtgtctgagaagaacctgagcctgaccccatctgcccccagcctgaccctggaggccggcagcatccccaacggccaggagcaggaggccccagattctgctgagggcaccaccctgactgtgctgcctgagggggaggagctgcccctgtgtgtgtctgagagcaatggcctggagctgcccccatctgctgccagtgatgagcccctgcaggagcccctggaggccgacaggaccagcgaggagctgacagaggccaagacccccaccagcagccctgagaagccccaggagctggtgacagctgaggtggccgcccccagcaccagcagcagcgccaccagcagccctgagggccccagccctgcccggcccccaagaagaaggaccagcgcagatgtggagatccggggccagggcaccggccggcccggccagcccccaggccccaaggtgctgaggaagctgcccggccgcctggtgacagtggtggaggagaaggagctggtgagaagaagacggcagcagagaggagctgccagcaccctggtgcctggggtgtctgagaccagcgccagccctggcagccccagcgtgcgctccatgagcggccctgagagcagcccccccatcggcggcccctgtgaggccgcccccagcagcagcctgcccaccccaccccagcagcccttcatcgcccggcggcacatcgagctgggcgtgactggaggcggcagcccagaaaatggagatggagccctgctggccatcaccccacctgctgtgaagagaagaagaggccggccccccaagaagaacagaagccctgcagatgctggccggggcgtggatgaggcccccagcagcaccctgaagggcaagaccaacggggctgaccctgtgcccggccctgagaccctcatcgtggccgaccctgtgctggagccccagctgatccctggcccccagcccctgggcccccagcctgtgcaccggcccaaccccctgctgagccctgtggagaagagaagaagaggccggccccccaaggcccgggacctgcccatccctggcaccatcagcagcgctggagatggcaacagcgagagcaggacccagcccccaccccaccccagccccctgacccccctgccccccctgctggtgtgccccacagccaccgtggccaacacagtgaccaccgtgaccatcagcaccagcccccccaagaggaagaggggccggccccccaagaacccccccagcccccggcccagccagctgcctgtgctggaccgggacagcacctctgtgctggagagctgtggcctgggcagaagacggcagccccagggccagggcgagagcgagggcagcagcagtgatgaagatggcagccggcccctgacccggctggcccggctgcggctggaggccgagggcatgaggggcaggaagagcggcggctccatggtggtggccgtcatccaggatgacctggacctggccgacagcggccctgggggcctggagctgaccccacctgtggtgtccctgacccccaagctgcggagcacccggctgcggcccggcagcctggtgccccccctggagacagagaagctgcccaggaagagagctggggcccctgtgggcggcagccctggcctggccaagaggggccgcctgcagccccccagccccctgggccctgagggctctgtggaggagagcgaggccgaggccagcggggaggaggaggagggagatggcacccccaggagaagacctggcccccggcggctggtgggcaccaccaaccagggcgaccagaggatcctgcggagcagcgccccacccagcctggccggccctgctgtgagccaccggggcaggaaggccaagacctag

SEQ ID NO: 166930 - DNA, 180 bp, Artificial Sequence
  derived and/or modified sequence
atgcagagcagccccagccctgcccacccccagctgcctgtgctgcagacccagatggtgtctgatggcatgacaggcagcaaccctgtgtccccagccagcagcagcagccctgccagcagtggagctgggggcatcagcccccagcacatcgcccaggacagcagcctggatggatag

SEQ ID NO: 166931 - DNA, 9693 bp, Artificial Sequence
  derived and/or modified sequence
atgcagagcagccccagccccgcccacccccagctgcccgtgctgcagactcaaatggtttctgacggcatgaccggaagtaaccccgtgagcccagcatcctcgtcaagtccggcttcgagtggggccggcgggatcagcccccagcacatagcccaggattccagtctagatgggccgcctgggcctcccgacggtgcaactgtgccattagaaggcttttcactgtctcaggcagctgatttggccaataagggtccgaagtgggaaaagtctcacgcagagattgccgagcaggctaaacacgaggccgaaattgaaacaaggattgccgaactccggaaggagggattctggtcactcaagagactgcccaaggtccccgagccgcctcggccgaagggccactgggactatctgtgtgaagagatgcagtggcttagcgccgattttgctcaggagcggaggtggaagcggggcgtagcccgaaaagtggtgagaatggtgatacggcaccacgaagaacagcggcagaaggaggaacgggcgagaagagaggagcaggcaaagcttcgcaggattgcctctacaatggccaaggatgtgcgtcagttttggagcaatgttgagaaggttgtccagttcaaacagcagtcccgcctagaagaaaagaggaaaaaagccttagacttgcatctggattttatcgttggacaaaccgaaaagtactctgaccttctgtctcagtcactcaaccaacccctaacctcatccaaagccggtagttctccctgtctcggcagttcctcggcagcaagttctccgcctcctccagctagccgcctggacgacgaagacggagacttccagccccaagaggatgaggaggaagacgatgaggaaacgattgaggtggaagagcaacaggagggaaacgacgccgaagcacagcgaagggaaatcgagttactacggagagaaggggagttgcctctggaagagctcctccgatcattgccgccccagcttcttgagggtccaagcagcccctcccaaaccccgtcttcccacgacagtgacacccgagacggacccgaagagggggccgaggaagagccgcctcaggtgctggagataaagccccctccgtctgcagttactcagcgcaacaagcagccttggcacccagacgaggatgacgaggaatttactgcaaatgaggaagaggcagaagacgaggaggacaccattgccgctgaggaacagctggagggtgaggtggaccacgctatggagctgtccgaactcgcacgggaaggggaactttcaatggaagagctgctgcagcagtacgctggcgcctacgcacccggttctggtagctcagaggatgaagatgaagacgaagttgacgctaacagtagtgactgcgagccagagggccctgtggaggccgaggaacctccccaggaggactcctcttcacagtccgattccgttgaggatcgaagcgaagacgaggaggatgagcacagcgaggaggaagaaacttctggatccagcgcctcggaagagagcgaatctgaggaaagtgaggatgcccaatctcagtcgcaggcagacgaagaagaggaggacgacgacttcggagtggaatatttactggctcgggatgaggaacagtccgaggccgatgccggttccgggcctcccacacccggtccgaccacgctggggccaaagaaagagatcaccgacatcgccgcggcagccgaatctttgcagccaaaaggctacactctcgccactactcaggtgaaaacccctatccctctgctgttgcgcggacagttgagagagtaccagcacattggactggactggctggtcacgatgtacgaaaaaaaactcaatgggatcctagcggacgaaatgggtcttggcaagactatccagactatctcacttcttgctcatctcgcctgtgagaagggaaattggggtccacacctaattatagtgccaactagtgtgatgctgaattgggaaatggaactaaaaagatggtgcccaagcttcaaaatactaacatattatggcgcccagaaggagcgaaaactcaaacgacagggatggactaagccgaatgccttccatgtttgtatcaccagctataaactggtgttacaggaccatcaagccttcagacggaagaattggcgatatttgattctggatgaggcccagaatatcaagaattttaagtcccagcggtggcagagcctgttaaacttcaactcacagcgccgcttactgctgacagggacaccactgcagaactccctcatggagctatggtccttaatgcacttcctaatgcctcatgtgttccagtcccaccgggagttcaaggaatggttttccaacccgttaaccgggatgatagaggggtctcaagagtacaatgagggtttggtgaagcgactccacaaggtgctacgaccgttcctgctccggcgagtaaaagtcgatgttgaaaaacaaatgccaaagaagtatgagcatgtcattcgctgtaggctgagcaagcgacagcgatgtctttacgatgacttcatggcacagaccaccacaaaggagacgctagccaccggccacttcatgtccgtcatcaacatcttaatgcagctgcggaaagtctgcaatcacccgaacctgttcgaccctcggcccgttacctcacccttcataacccccggaatctgtttttctacggccagcttggttctaagggctacagacgttcacccactgcaacgcatcgatatgggtagatttgacctaatcggactcgaaggtcgagttagcagatacgaggcagatacatttctgcctcggcatcggctttcacggagagttctgctggaggttgctaccgcacctgatccccctccacggcctaaacccgtcaaaatgaaagtgaacaggatgctacagccagtacccaagcaggagggaagaacggtggtggtggttaataaccctcgagcgccactggggccagttccagtccgccctccccccggtcctgagttaagtgcacaacctactcccggccccgtaccacaggttcttcccgctagcctgatggttagtgccagccccgctgggccccctctgattcccgcttctcgaccacctggacccgtcctgctgcccccattgcagcccaattccgggagcctgcctcaggtcctgccatcaccactgggtgtactctctgggacatctagaccacctactcctaccctcagcctgaagccaacacctcccgcccccgtccgactttcgcccgcacctccccctggttccagttcccttctaaagccgctgactgtgccgccagggtataccttccctcctgccgccgctaccacaacaagtacaactactgccaccgcaaccaccaccgctgtgcctgcgcctacccccgcgccacaacggcttattttgagtcctgatatgcaggcgcgcctgccaagcggagaggtggtgtcaatagggcagctcgcctcactggctcagagaccggtagccaatgccgggggcagtaagcctttgaccttccagattcagggcaacaagcttacactgaccggtgcccaggttagacagttggccgtcggccaaccacgacctctgcaaagaaacgtcgtgcacctcgtctccgcgggggggcaacatcatctgataagccagccagctcacgtggctttgattcaggccgtggctccaacgcctggcccaacaccagtgagcgtgctgccttcatccacgccctccactactcccgccccaactgggctgtcactgcctttggcagccaaccaggttccaccaactatggttaacaatactggtgttgttaagattgtggttaggcaagccccacgagacggcctgactccggtgcctcctctggcccctgcccctagacctccctcaagcgggcttcccgcagtgctgaatccacggcctaccctgactccggggaggttaccgacgcccacactgggaactgctcgggcaccgatgcccactcctacattggtgcgtcccttgctaaagttggttcactccccctcacccgaagtgagcgcttccgctcctggagctgcccccctgacgattagctcaccactgcatgtccccagcagcttgccgggccccgcatccagccctatgcctattcccaattcttcccccctcgccagtcctgtgagcagtaccgtgagtgtccccctgtccagcagcctccctatcagtgtgccaactactctgccggcacctgctagcgcccccctgaccatccctatcagcgccccccttaccgtatccgcctccggcccagcgctgctaacctccgtgactcctcctctcgcaccggtcgtcccggctgcacccggccctccctctctggcaccaagtggcgcaagtccaagcgcttccgcgttgacattgggattggccactgcacccagcctctcatcttcacaaacccccgggcatcctctgctgctggcccccacctcaagccacgtgccgggcctgaatagcaccgtggctcccgcctgcagcccggtcttggtccctgcaagcgccctcgctagccctttccccagcgcacctaatcctgcccccgctcaggcctccctgctagcccctgcgagcagcgccagccaggcactagcaaccccgctggctccaatggccgcaccccagaccgccatcctggcaccttctcctgcacccccccttgcccccctgccggtcctggccccctcgcccggagccgctcctgttctggctagtagccagacacccgttccggtgatggccccaagcagcacacccggcacttcattggctagcgcatccccggtacccgctcctactccagtgctcgctcccagctctacccagacaatgctccccgctcctgtgccgagtcccctgcccagccctgcttctactcaaacactggccctcgcccccgctctcgcccccaccctagggggctctagtcccagccaaacacttagcctggggacaggtaatccacaggggccctttccaacccagaccctgagtctgaccccagcaagtagcctcgtcccaactcctgctcagaccttgagcctggcccctgggccccctcttggtccaacccagacactgtcccttgctcccgcacctccgctggctcctgcatctcccgtgggacccgctcccgcacatacattgacgctcgcgcccgcaagctcatctgcatcattgctggccccagcttctgtgcagacgctgactctgtcgcctgcgccagtcccaactctggggcctgccgccgcccaaactctggccctggcacccgcaagtacccagtctcccgccagccaagcgagcagccttgtggtctccgcttcaggggctgccccactccccgttacaatggttagccggctgccggtaagcaaggacgaacctgatacccttacactgcggagtggaccaccctctccaccgagcacagccactagctttggaggccctagacctaggagacagcctccacctccaccacgcagccccttttacttggattctttggaggagaagaggaagcgccagcgttccgagcgcctcgaacgaatcttccagctgagcgaggcccatggagccctggcgcccgtgtacggcacagaagtcctagacttctgtacattgccacagccagtggcttcccccattgggcctcgctcaccagggcctagtcacccaactttctggacgtataccgaagctgcacatagggctgtgctgttcccccagcagaggctggaccaactgagcgagatcatcgagcggtttattttcgtgatgccgcctgtggaggctccccctccctccctgcatgcctgccacccgccaccatggctggcaccccgacaagctgcatttcaggaacaactggctagcgaactgtggccccgtgccaggccccttcaccgaattgtgtgtaacatgcgaacccagtttccagacctgagacttatccagtatgactgcggtaaactgcagaccctcgctgtgttgcttagacagctcaaggcggagggacatagagtcttaatctttacccagatgacccgaatgctagatgtgttggagcaatttctcacttatcatggccatctctatctaagactggatggttcaacccgcgtcgagcaaagacaggctctgatggagcggtttaatgccgacaaaagaattttctgctttatcttgtccacccgctctgggggagttggtgtgaacctgactggcgctgacactgtggtgttctacgactcagattggaaccccactatggatgcgcaagcgcaggacagatgccaccggatcggtcagacacgcgacgttcacatctacagattaatttcagaacgtacggtggaagaaaatattttaaaaaaagccaaccagaagcgtatgctgggcgacatggctatcgagggtggcaactttaccactgcttattttaagcagcagaccatacgcgagctcttcgacatgccattagaggagccgagctcttcatctgtgcctagcgcacctgaggaggaagaggaaacagttgcctcaaagcagactcacatactcgaacaggcactatgtcgtgctgaggatgaggaggatattagggccgcaacccaggcaaaggccgagcaggtagccgagcttgccgagttcaatgagaatgatggcttcccagccggggaaggggaagaggctgggagaccaggcgctgaggacgaagagatgagcagggctgagcaggagattgccgctctggtcgagcaactgacacctattgaaagatatgcaatgaaatttctagaggccagcttggaggaggtgtccagagaggagctgaaacaggcggaggagcaggtagaggccgccaggaaggatttggaccaggctaaggaagaggtgttccgcctgccccaggaggaggaggaaggcccaggcgctggtgacgaatctagttgcggaacagggggaggcactcatagaagaagtaagaaggccaaagcccctgagcgtccgggcaccagggtgagcgagcgcctgaggggagcccgggccgaaacccaaggcgctaaccatactccggtcattagcgcccaccaaacccgcagtaccaccactcctccgaggtgtagccccgctagagagcgcgtgccaaggcccgcgccgcggcccaggccaacgcctgcgtcggccccggcagcgatacctgcgctcgtgcctgtgccagtgtcagctcctgtccctatcagcgcaccaaatcctattactatcctgccagtccacatattgcccagccctccacccccgtctcagattccaccttgctcaagccctgcctgcacccctccccccgcgtgcactccgcccccggcccacactccacctcccgcacagacctgtctcgttacaccctcaagtcctctcttgctcggcccacccagtgtaccaatcagtgctagtgtgaccaatctgccgctgggactgcgccccgaggctgaattgtgtgcccaggccctcgcatctcccgaatcgctggagctggccagcgtcgcttcctcagagacaagctcattgtccctcgtgcccccaaaggacctgctacccgtcgccgttgagatcctgcctgtgtccgaaaaaaatttgtcactgactccatcagccccgagcctgactctggaggctggcagtattcccaatggtcaagagcaagaggccccagactctgccgaaggaaccacactcacagtgctgccagagggggaagagctgcccctgtgcgtgagcgagtcaaacgggctagaactgcctccctcggcagcgtcagatgaaccgctccaggagccattagaagccgatagaaccagtgaggagttgacagaggccaaaactcccacctcttccccggagaaacctcaggagctggtgacagcagaggtcgccgcaccatccacatcaagtagtgcgactagctcccctgaaggtcctagcccagcaagaccaccaagacgccggacctccgcagatgtggagataagaggccaggggactgggcgccctggccaaccccccggtccaaaagtgctgagaaaactgccgggaaggttagtgacagttgtggaggagaaagagctggttcggcggagaaggcagcagcgcggagccgcaagtacacttgtgcccggtgtgtcagagacaagcgcttccccaggttctccgagtgtacgatcgatgagtggtccagagtcatctcctccaattggaggaccttgcgaggccgccccaagttctagtctcccaactcccccccagcagccttttatcgcgcgacggcacatagaactgggagtaactggcggagggagccccgaaaatggcgacggtgctttgctggcaattacacccccagcagtcaaacggagacgaggccggcctcctaagaagaaccggtctccagcagacgccggccgaggtgttgatgaagcccccagcagtacgcttaaggggaagacaaatggcgcagacccagtcccagggcccgagacactaattgtcgcggatcccgtcctggagcctcagcttatcccggggccacagcccttaggcccacagcctgttcatcggcccaacccgttactgtccccggtcgagaaaaggcgtcgcggtagaccacctaaggcccgcgaccttcctattcccggtactatttcttcagccggagatggcaacagcgagtcccgcactcaacccccaccccacccatctcctttaactccgcttccgccactgcttgtttgtccaaccgcgacagtcgccaacacggtcacgactgtgaccatttcgacaagtccgccaaagaggaagaggggtagacccccgaagaacccaccctcaccacgtcccagtcaactaccggtcttagacagagattccacctccgtactggagagttgcggtctcggccgcaggcggcagcctcagggtcaaggtgagtccgaggggagcagtagcgacgaagacggtagtagaccattgactagactggcccgactgaggttggaagccgaggggatgcgtggtagaaaaagcggcgggagtatggttgtcgccgtgatccaagacgatctggatttagctgatagcgggccagggggactggaactgaccccaccagtggtgtccctcacaccaaagttgcggtctacaagattgcggccaggctctctcgtgcctccactcgagacagagaaactgccgcggaagcgggccggggcaccagtgggagggtcgccaggtttggccaagcgaggaaggctgcaaccccccagtccactgggccccgagggcagcgtagaagagagcgaagcggaggccagtggtgaggaggaggaaggcgacggcactcctaggagaaggcctggcccgcgtaggcttgtgggcacaacgaatcagggcgaccagaggattttgaggagcagtgccccacctagccttgcagggccagcagtgtcgcacaggggtagaaaagctaagacctag

SEQ ID NO: 166932 - DNA, 9219 bp, Artificial Sequence
  derived and/or modified sequence
atgcagagcagccccagccccgcccacccccagctgcccgtgctgcagactcagatggttagcgacgggatgactggatccaacccagtaagccctgccagctcaagttcaccagcatcttctggtgccggtgggatctcacctcaacacatagcccaggactctagcttggatggaccacctggcccgccagatggagcgactgttcctctggaaggtttttcactctcccaggccgcagacctggccaataaaggacctaaatgggagaagtctcacgctgaaatcgccgagcaggccaaacatgaggccgagatcgagaccaggattgctgaactgcgcaaggaggggttctggtcgctgaaaaggctccccaaggtgccggagcctccaagaccaaaggggcattgggactacctctgcgaagaaatgcagtggctgtccgcggacttcgctcaggaaaggcgctggaaacgcggagttgcaaggaaggtggtaagaatggtgatccgccatcacgaggagcaacggcaaaaggaggagagagcacgtcgcgaagaacaggcaaagctgcgccgaatcgcatcaaccatggcgaaagacgtccgccagttctggagcaatgtcgaaaaggttgtccagttcaaacaacagagtaggctggaggaaaagaggaagaaagctctggacttacatctggacttcatcgtagggcagaccgaaaagtacagcgacctgttgtcacagagcctgaaccaacccttgacatcaagcaaggccgggagctcgccatgcctcggctctagtagcgctgcttcatcacctcctccaccggcctcccggttggacgacgaagacggagacttccagccgcaggaagacgaagaagaggacgacgaggaaactattgaagttgaagagcaacaggaagggaatgatgctgaggcccagaggcgggagatagaacttcttagaagagagggcgagctcccactcgaggagctgctccgctcactcccaccccagctgctggagggaccgtcttcgccctcacagactccctccagtcacgacagcgacacccgagacgggccagaggagggtgcggaagaggaacccccgcaggtcctggaaatcaagccgcctcctagcgccgtgacgcagcgaaataaacagccttggcatcccgatgaagatgatgaggaattcactgctaacgaggaggaagcagaggatgaagaggatactatcgccgccgaggaacagctcgagggtgaagtggatcacgcaatggagttgagtgagctagctagagaaggcgaactgtccatggaggaactcctgcagcagtacgcgggggcctatgctcctggttccgggtcctcagaggacgaggatgaggacgaagttgacgcaaatagcagcgactgtgagcctgagggccctgtcgaggcagaggaaccgccacaggaagactcttccagtcagagcgattctgttgaagatcggagcgaggatgaggaggatgagcattctgaagaggaagaaacgtccggctccagtgcctcagaggaaagcgagtctgaggaaagtgaggatgcccaaagccaaagccaagcggatgaggaggaggaagacgatgacttcggtgtagagtatcttctagcgagagatgaggagcagagcgaggccgatgccggcagtgggcctcccactccaggcccaactactctcggtcctaagaaggaaataacggatatcgccgctgctgcagagtctctgcagccaaagggctacactcttgccactacacaggtgaagactcccatccccctgctactgcgtggtcagctgagagagtaccaacacattggtctcgattggctcgtgactatgtacgaaaagaaacttaacggaatcttggccgacgagatgggcttaggaaagacgattcagactatttctctgttagcacatttagcttgcgaaaaaggcaactgggggccccacttaattattgtgccaacatctgttatgctcaattgggagatggaactgaaacgatggtgccctagctttaagatccttacatactatggagcacaaaaagaaagaaagctcaaacgacaggggtggaccaaaccaaatgccttccacgtttgtatcacctcctataaattggtgttacaggatcaccaagccttccgcaggaagaactggcggtatctgatcctggacgaagcccagaatatcaaaaacttcaaatcacaaagatggcaatctctactgaattttaatagtcagcgacggctgctactcactggtacacctctccaaaactctttgatggagctgtggtcactcatgcactttctgatgccccatgtctttcaaagtcaccgtgagtttaaggaatggttcagtaacccattgacaggcatgattgaagggtcccaggaatacaacgaaggcctcgtgaaaagactacataaagtgctgagacccttcctactgagaagggtcaaggtggacgtcgagaagcaaatgcctaaaaaatacgagcacgtaattcgctgtaggctgagcaagaggcagagatgcctttacgacgactttatggcacagaccactacaaaggagaccctagccacgggacactttatgtctgtgataaacatcctcatgcagctgaggaaggtgtgtaaccatccgaacctgttcgatcccagacctgtgactagcccatttatcacccctggaatctgtttttctacagcaagtctcgttctgagagcgacagacgttcacccactacagaggattgatatgggcagattcgatttgatcggcctggaggggcgtgtgtcacgatacgaagccgataccttcctgccacgacaccgtctttccaggagggttctgctggaggtggcgacagcacctgaccccccgccccgtccaaagccagtgaaaatgaaagtcaacaggatgctgcagcctgtacccaaacaggagggacgtacagtagtggtggtcaataaccctcgtgctccccttggccctgtcccagtgcgccccccaccgggccccgaactgagcgcccagccaacaccaggacccgtgccccaagtcctcccagcttctctcatggtctctgcaagcccagctgggccccctctcatacccgcaagtagaccccccggcccggtgctgctaccccctctgcagcccaacagtggaagcctgcctcaggcaggcgaggttgtcagcatcggacaactggcttcactagcgcaacggcccgtagctaatgctggcggcagcaaacctctgacatttcaaatccaggggaacaagttgacactcaccggtgcacaagttcggcaactggccgtgggccagccaagacctctgcagatgccaccaactatggtgaacaatactggtgtcgtgaaaatcgttgtccggcaagcccctcgggatgggctgactcccgtgccccccctggcacctgcccctagacctccaagctcaggactgcccgcagtgcttaaccctaggcctaccctcacacccggacgactgcccacccctaccctgggcaccgctcgagcccctatgcctacacctactctggttaggcccctcctcaaactggttcattctcctagccccgaagtaagcgccagtgctcctggtgccgctccgctcaccatctcctctccccttcacgtacctagctctctcccaggaccagcctcttcacctatgcccatcccaaattcctcccccctggcatccccggtgtcttctaccgtctctgtcccgttatctagcagtctgcccattagcgtgcccacaacgctgcccgctccagcgtctgccccattaacaatcccaatctcggctcccttgactgtgtccgcctccggaccagcacttctgaccagcgttacaccaccactggctcctgtggtcccggctgcccccggaccaccgtccctggcccctagcggcgccagtccaagtgcgtctgccctgactctagggctggccacagcacccagcctgagctcgagccagactcccggacatccgctgttgttggcccccacctcaagccatgttccaggactgaactccaccgtcgcccctgcctgctctcccgtcctagtgcccgcatcagccctggctagcccctttccctccgcacccaaccccgctcctgcccaggcatccctgctcgcgcccgcaagcagcgcaagtcaggctctagcaacccctctggccccgatggccgctccccaaacagccatcctggcccctagccccgccccacctctggcgccgttacctgttctggcaccctctccaggcgctgcccccgttctggccagttcccagaccccagttcctgttatggcacccagctctacccccggaactagcctcgcatctgccagcccagtgcctgcccctacacccgtgttggcccctagcagtactcagaccatgctgcctgcacctgtgccatctccccttccctctccagcaagcactcagacccttgccctggccccagcactggctcccactcttggaggctcctccccctcccagaccctttcgcttggaacaggcaatccccagggtccgtttcccactcaaacgctgtcattgacccccgcttcttcgctcgtgcccacacctgctcagactctgagtttggcgcccgggccacctctcggtcccacacagacattatccctggcgccagcaccgcccttggcccccgccagcccagtgggccccgccccagcccacacactgacactggccccagcttccagtagtgcttctctgctggctccagcctctgtccaaactctcacattgtccccagcccctgtgcccaccctggggcccgcagccgcccagactctcgccctcgcccctgcaagcacccaatctcctgcctcccaggctagctccctcgttgtgagcgcttctggggccgctcccttgcccgtcaccatggtgtcaaggctgcctgtgtctaaagatgagccagatacccttacactgcggtcaggtcccccgagtcctccgtcaacagcaactagtttcggtggaccccggccaagaaggcagcctccacctcctccaaggagtcccttctacctggatagcctggaggagaaacgcaaacggcagaggtccgaaagactggaacgaatctttcaactgtctgaggcccacggcgccctcgcacccgtttatggtaccgaagtgctcgacttttgcactcttccccagcctgtcgccagccctatcggtccccgaagccctggaccttcccatcctactttttggacctacaccgaggcagctcatcgcgccgttttattcccccaacaaaggttggatcaactttcagaaataatcgagcgatttatttttgtgatgcctccggttgaggcgccgcctccctcacttcacgcttgtcaccctcccccttggctagccccccgccaagccgcgttccaggagcaactggccagtgagctgtggcctcgggcccgcccactgcacagaatcgtatgcaatatgagaacacagtttcccgatctgcggctgatacagtatgattgtggcaaattgcagactctcgcagttttgctgcggcagctaaaggctgaagggcaccgcgtcctgatctttacacagatgaccagaatgttggatgtgctagagcagtttctgacataccacggacatctgtatctgaggttggatggatcaactcgggtcgagcagcgccaggccctgatggagcggtttaacgcagataagcggatattttgttttattctttccacacgaagcggcggcgtgggagtgaacctgaccggcgccgacactgtggtcttttacgactcagattggaaccccaccatggatgcacaggcacaggacaggtgccacaggattgggcagacccgggatgtccatatctacagactaatttcggaaagaactgtcgaagagaacattcttaagaaagccaatcagaaacggatgctgggcgatatggccattgagggcggcaactttaccacagcttactttaagcagcagactattcgtgaattattcgatatgccactagaggaacctagctcctcaagcgtgccttccgctccggaggaggaagaagaaaccgtcgcctcaaaacagactcacattctcgagcaagcactgtgtcgagcagaagatgaagaggacatccgggctgctacacaggcgaaagcagaacaagtggctgaacttgcagagtttaacgaaaatgacgggtttcctgctggtgaaggggaagaggcaggtaggcctggcgcagaagatgaggaaatgtctcgagccgagcaggagatagccgccctcgtcgagcagcttacccccattgaaaggtacgctatgaagtttttggaggcatccctagaagaggtcagcagagaggagctaaagcaggctgaagaacaggtcgaagccgcacggaaggacctggatcaggcaaaagaagaggtttttaggctccctcaggaggaggaagaggggccaggcgcgggcgacgagtccagttgtgggacgggcggcgggactcatcgacgatctaaaaaagctaaggctccagagaggcccggtaccagagtgtcggagaggctgcgcggggcaagagccgagacccagggggcaaatcatacccctgtgatcagcgcccaccagacaaggtctacaaccaccccacccaggtgctctcccgcgcgtgagcgtgtcccacgtcccgcaccacgcccgaggcccactccagcgtctgctcccgcagctatacctgcactggtccctgtacctgtgagcgctcccgtcccgatcagtgcccccaatccgattacgatcctgcctgttcacattcttcctagcccccctccaccttcacagattcctccatgcagcagccccgcatgtacccccccaccagcctgtacgcccccacctgctcatacccccccccccgcccaaacatgcttagtcaccccttccagtccgttgttgctcggccccccaagtgtcccgataagtgcttccgtgacaaatctcccactgggattacgccccgaagcagagctttgcgcccaggccttagcctcacctgaaagcttggagctcgcgagtgttgccagctcagaaaccagcagtctttccctcgtgcctcccaaagatctcctaccggtagcggtggagattttacccgtctcagaaaagaaccttagcctgacaccatccgcgccttctctcactctggaagccgggtcaatcccgaacggtcaggaacaagaggcaccggatagtgccgaagggacaactttgacagtattacctgagggtgaggaactgccactgtgtgtgtctgaatctaatggcctggaactcccccccagcgctgcatctgacgagcctctgcaggaacctcttgaggccgacagaacgagtgaggagctgaccgaggctaaaacgccaacctcgagccctgaaaagccccaggagcttgtgacagcagaggtagcagccccaagtactagctccagtgccacttcctcgcccgaagggccatcacccgcccggcctcctcggcggcgaacttctgccgatgttgagatccgtggacagggaacgggacgccccggtcagccacctggacctaaggttctcaggaaattgccaggcaggctcgtaaccgtggttgaagaaaaagaactcgtgagacgcagacgccagcagcgcggggccgcctctaccctcgtccccggcgtctcagaaacctccgccagtcctggatccccctccgtgaggagcatgtctggacccgaaagctcaccacccatcggaggtccctgtgaggctgcaccgagttcttccttacccactccgccccagcagccttttatcgcacgtcgccatatcgaactgggggtaacagggggtgggtcacccgagaatggcgacggggccttgctggcaattacgccaccagcggttaaaaggcgcagagggaggccacctaaaaaaaatcgcagtcccgctgatgccggcaggggcgttgatgaggcaccatcaagcacacttaaagggaaaactaatggggcggaccccgtgcctggaccagagaccctgattgtagctgacccagtcctcgaaccacagctgatccccggcccccagcctctcggcccccagcccgttcacagaccgaaccccctactatcgcccgtggaaaaaaggcgccgcggccgcccccctaaggctcgcgacctgccaatcccaggtactatatctagcgctggcgacgggaacagtgagtcccgtacccagcccccgccgcacccatccccgctgacaccactgccgcccttgctcgtgtgcccgaccgctacagtcgccaacacagtgactacagttaccatttctacttcaccaccgaaacgcaaacgaggaaggcctcctaagaacccacccagtcctagaccttctcagttacctgttctcgaccgagacagcacatctgttttagagtcatgtgggctggggcggagaagacagcctcagggccagggggagtctgaagggagtagctctgatgaggatggctcccggcctctgacaagactggcacggctgagactggaggcggaaggcatgaggggtagaaagtctggcggctccatggttgtggcagtcatccaggacgacttggaccttgcagattcgggtccaggagggttggagctgaccccgcctgtggtctctcttacaccaaagcttcgctctaccagactcaggccagggtccctggtaccccccctggaaactgagaaactcccaagaaagcgtgcaggcgcacctgtgggcggatcccccgggctagctaagagaggccggttgcaacccccctccccgttgggtccagagggctccgtagaagaaagcgaagctgaagcatccggggaggaggaggagggcgatggcacccctagacgaaggcctggaccccgccggctggtgggaaccaccaatcaaggcgatcagcggatcctgcggtccagtgcacccccctctttagctggccccgcagtgtcacataggggtagaaaggctaaaacttag

SEQ ID NO: 166933 - DNA, 9507 bp, Artificial Sequence
  derived and/or modified sequence
atgcagagcagccccagccccgcccacccccagctgcccgtgctgcagacacaaatggtaagtgacgggatgaccgggtcaaaccccgtatcgcccgcatcaagctcaagtcccgcctcttctggcgctggtggaatatctccccagcatatcgctcaggacagcagtctagacggaccccctgggcctcccgacggagccacagttccactggaaggcttctcactgagccaggccgccgatctggccaataaaggtcccaagtgggagaagtctcacgcagagatcgcggagcaggcaaaacatgaagcagagatagaaacccggatcgccgagttgaggaaagaaggattctggagtttaaagcggctcccaaaggttcctgagccgccccgccccaaagggcattgggactacctgtgcgaagagatgcaatggcttagcgccgacttcgcccaggaacggaggtggaagcggggagtggccagaaaagtggtccgaatggtgattcgccaccacgaggaacagagacagaaggaggaacgggctcgtagggaggaacaagcaaagttgaggcggattgcgtctactatggcaaaagacgtgaggcaattctggtccaacgtggagaaagtggtccagttcaagcaacagtctagactggaagagaagcgtaaaaaagcattggatctgcaccttgacttcatcgtaggtcagacagaaaaatattcagacctcctgtcccagtcattgaatcaacctctgacaagttcaaaggcaggctccagtccgtgccttggaagctcatcagccgcgagctccccccctcctcctgcttccagattagacgatgaagacggggactttcagccccaggaggacgaggaggaggacgatgaggagaccattgaagttgaggaacagcaggagggtaatgacgccgaggctcagcgacgtgagattgagctcctaagacgggagggtgagttgcccttggaggaattactacggtctctgccacctcagcttctcgagggccctagtagtccttctcagactccctctagccacgattccgacactcgcgacggcccggaagagggcgcagaggaggagcctccacaggttctggagatcaagcccccaccgagcgcagtcacccagagaaacaagcagccatggcatcccgacgaagacgatgaagagttcaccgccaatgaagaggaagcggaagatgaagaggatacgatagcggccgaagagcagttggaaggggaggtggaccacgcgatggagctgtctgagctcgcccgtgaaggtgaactgagtatggaagaactactacagcaatatgctggagcctatgcccccggaagcggctcctccgaggacgaggacgaagatgaggttgatgccaattcatcggactgcgagcctgagggacctgtcgaggccgaagagcccccgcaggaagattccagcagtcagtctgacagcgtggaagacaggagcgaagacgaagaagacgagcatagcgaagaagaagagacaagcggcagtagtgcatccgaagagagtgagtctgaagagtctgaagatgcccaaagccagtcccaagctgatgaggaagaggaagacgatgatttcggggtggagtacctgctggcacgcgatgaggagcaatctgaggcggatgccggctccggaccccccacccccggaccaaccaccttgggccctaaaaaggagatcaccgacatcgctgctgcagccgagagcctccagccgaaggggtatacgcttgccactacccaggtaaaaaccccgattccactgcttctgcgaggacagctgcgggaataccaacacatcgggctggactggctcgtgactatgtacgaaaagaaactgaatggcatccttgctgacgaaatgggactgggtaagacaattcagaccatcagcctgcttgcacatcttgcctgcgagaaaggcaattggggccctcatctcatcattgtgccaacctcggtgatgctcaactgggagatggaattgaagaggtggtgtccatcctttaaaatcctgacatactacggcgcccagaaggaacggaagctcaaaaggcagggctggaccaaaccaaacgctttccatgtatgcattacatcatacaagctcgttctgcaggatcatcaggcctttcggcgaaagaattggagatacctcatactggatgaagcccagaacattaagaatttcaagtcacagcgatggcagagtctgcttaatttcaattctcagcgcaggcttttgctgacagggacacctctgcagaactccctaatggagttgtggtctctaatgcattttctgatgccacatgtgttccagtcccatcgtgagttcaaagagtggttttccaaccctctgacaggtatgatcgaaggatcccaggagtataacgagggtttagtgaagcgactccacaaggttctgaggccgttccttcttaggagagtgaaggtagatgtggaaaagcagatgcccaagaagtatgaacatgtgattaggtgtagacttagtaaaagacagcgctgtttgtacgacgacttcatggcacagaccactacgaaggagaccctggcaacagggcactttatgagcgtcattaacatcctgatgcaacttcgcaaagtgtgcaatcatccaaacctgtttgacccacgtcccgtcacgtcccctttcattactccagggatttgcttcagcacagcttccctcgtcctgcgtgctacagatgtccatccccttcagagaatcgacatgggtcgatttgacttgattggtctggaaggcagagtgagccggtacgaggcagacaccttcctgccccgtcacagactcagccggagggtgctgctggaagtggccacagccccggatcctccaccaagaccgaagcccgtgaagatgaaggtcaatcgtatgctgcagcccgtcccgaaacaggagggtcgtacagttgttgtcgtcaataacccacgcgctcctctcggacctgtcccagttcgccccccccccggtcccgagttgtcagcccagcccacgcccgggcctgtgccccaagtactccctgcttcccttatggtatcagcctctcctgccggtccacccctgatacctgcctcaaggccacctggcccagtgttactccctcccctgcagcctaactccggtagtttgccccaggtgttgccaagtcctctgggagtgctgtccggtacctcgagaccgcccaccccaactctctccctcaagccaaccccaccagccccggtgcggctaagcccagctccccctcccggctcttcaagccttctaaagcctctgaccgtgcctcccggctacaccttccctcccgctgccgcaacaacaacctccacgactactgctactgccactacaactgcagtgcctgccccgactcctgccccacagagattgattctgtcaccagacatgcaggccagactgcctagcggcgaagtagtatcaattgggcagctcgccagcttggcacaacggcccgtcgctaacgccggcgggtccaagcctttgacttttcagattcagggcaacaagctgacactgactggcgcccaggtacggcagttggccgtgggccagcctaggccgttgcagatgccacctactatggtgaacaatacaggcgtcgtcaaaattgtcgtgcggcaggcgccgagagacggcttgacgccggtgcctcctctggcacccgccccacgaccaccctcctccggcctaccagccgttcttaacccccgcccaacactgaccccgggaagactccctactcctacactgggaacagcacgggctccaatgccgaccccaacccttgtgcgaccgctactgaagctggtgcactctccatccccagaggtcagcgcttcagcccctggagctgctcccctgaccatcagtagccccctgcacgttccttcctcgctgccggggccagcaagttcccctatgcctattccaaatagcagccctcttgcctctcctgtgtcaagcactgtaagcgtgcccttgtctagttcacttcctatatcggtccctaccactctgcccgcccctgcttccgcccccttaacaattccaattagcgccccacttacagtctcagcctccggcccagccctcctcacctcagtgacacctcctttagctcccgtcgtgccagcagcccctgggcccccctcacttgccccttcgggagcgtcaccctctgcgagcgcactgactctggggctggccactgcaccttccctgtcctcaagccaaacacctgggcaccctttgcttttagcccctacttcctcccacgtgcctggcctcaatagtaccgtcgcccctgcctgctcccccgtcctagtcccagcaagtgcccttgctagcccctttccaagcgctccaaatcccgcccccgcccaggcgagccttctggctcctgcctcaagtgcatcacaggctctggcaactcctcttgcgccaatggccgcaccgcagacagcaattcttgctccatccccggcaccacctctcgctcccctgccagtcctcgccccttccccaggagcagcaccagtgctcgcatctagccagacacccgtaccagttatggcgcccagctcgactcccggtacctccctggcaagtgcctcccccgtccctgccccaaccccagtgctggctcccagttccacccagaccatgctgcctgcaccggtgccctcccctctgccaagccccgctagcacacagactcttgccctcgcccctgctctggcaccaactctgggcggttcttcgcccagccaaacgctgtccctaggcacgggtaaccctcaagggcctttcccaacacaaactctaagtctcactccagcgagctcacttgtcccaactcctgcccagactctgtcactggcccccggcccccccttgggccccactcagacccttagcctggcccccgctcccccactagcacccgcttccccggttggtcccgccccagcgcatacgttaaccctggcaccagcctcctcatccgccagccttctggccccggccagtgtgcagaccctgaccctgagccctgcccccgtgccaactttaggccccgctgctgctcagaccctggccttggcccccgcctctacccagagcccagctagtcaggcctctagcctggtggtgtcagcttcaggtgccgccccgctacccgtgacgatggtgagccgccttccagtgagcaaagacgagcccgataccctgacactcagaagcgggcctcccagcccgccctccactgctacaagtttcggcggaccccggccccgccgacagcccccgcctccgccccgttctcctttctatttggacagccttgaagagaaacggaagcgacagagatcggaacgtttagagagaatttttcaactgagtgaggctcatggtgctcttgctccggtctatggaaccgaggttttggatttctgtacacttccgcagcccgtggcctcccctatcggccctcgctcgcccggacctagtcatccgacgttctggacttacacagaagccgcccaccgcgccgtactgttcccgcagcagaggttggaccaattgtcagagatcattgaaagattcatcttcgttatgcccccggtcgaagccccaccccccagcctgcacgcatgccatcccccaccttggctcgctccacgtcaagctgctttccaggagcagcttgctagcgaattgtggcctagagccaggcccctgcatcgaatcgtgtgtaatatgagaacacagttccccgacctgagactgatccagtacgattgcggaaagctccagactcttgccgtgctcttgcggcagttaaaggcagagggccatcgggtgttgatctttactcagatgacacggatgttagacgtactggagcagttccttacatatcatggccatctctatctcaggctcgacggcagcactcgtgtagagcagcgccaagccctgatggaacggttcaacgccgataagcgaatcttctgcttcattctttccaccagatctggaggagtcggagtgaacctgactggcgctgacaccgtcgtgttctacgattcagattggaatcctaccatggacgcccaggctcaagatagatgccaccggatcggccagacgagagatgtccatatttaccggctcattagtgagcgtacagtggaggaaaatatcctgaaaaaggctaaccaaaaacgaatgctcggagacatggcgattgagggaggcaactttactacggcctactttaaacagcaaaccatcagggagctattcgatatgcccctggaagagcccagctcctcatccgttcccagcgcacccgaagaagaagaagagaccgtggcttcaaagcagacccacatcctggaacaggccttatgcagggctgaagacgaagaagatatacgcgccgcaacccaggcgaaagctgaacaggtcgcggagctcgcggaattcaacgagaacgatggatttccagccggtgagggcgaagaggctggccggcctggcgccgaagatgaggaaatgtctagggctgagcaggaaatcgccgctttagtggaacagctcacccctattgagaggtacgccatgaagttcttggaggcaagcctggaggaagtgtctagggaggagctgaagcaggctgaggagcaggtggaggcagcacgcaaagatctggatcaagcgaaggaagaagtattccggctgcctcaggaagaagaagagggaccaggagcaggcgatgagtcatcttgcgggaccggtggtggaactcacaggcgaagcaagaaggccaaggcacccgagcgtccagggacccgcgtcagcgaacgacttcgaggagcaagggccgagactcagggtgcgaatcacaccccagtgatcagcgcacaccagacccgctctaccacaacaccacccagatgcagccctgcgcgtgaacgggtccccagacccgcccctaggcctcgacccacccccgcgagtgctccagccgccatccccgcactggtgcctgtgcctgtctctgcccctgtgccgatctctgctcctaaccccatcaccatactgcctgtccatattcttccttctcctccccctccctcccagatccccccctgctcctccccagcctgtacacctcctccggcatgcacaccaccgcctgcccatacaccacctcccgcacagacatgtcttgtcacaccatcatcacctctcctcctcggccccccctccgtgcctatctcagcttcagtgaccaacctaccccttggcctgcgacctgaggctgaactgtgtgctcaggcgctggcgtccccggaatcattggagctggcctcagtggcgagttcagagacatcctcactctctctggtgccgccaaaagatctgctcccagtcgcggtggagatcctccccgtctctgagaaaaatctgagtcttacaccttcagccccttccctgacgttggaggcaggctcaattccaaatggacaggaacaggaagccccggacagcgcagagggcaccacactcacagttctgccggaaggcgaagaacttccactgtgcgtgtccgagtccaatggcttagagctgcccccctctgcagcctccgatgagcccctccaagagccactcgaagcagatagaacaagtgaggaacttacagaagctaaaaccccaacctccagtcctgagaagccccaagaactggttaccgcggaagtggcagctccatcaacttcttcttctgccactagcagtcctgagggcccatccccagcacgcccaccacgacggcgaacaagcgcagatgtggaaattcgcgggcagggcacagggcggcctggtcagccgcccggccccaaggtccttcgaaaactgcccggccgcctggtcacagtggtggaggagaaggagcttgtcagaagacggcggcagcagagaggagcagcctccaccttagtgcccggtgtgtccgagacttcagctagtccagggagcccttctgtgcggtccatgtccggtcctgagagcagccctcccatcggaggcccctgtgaggccgcaccaagctcatctcttccgactcccccacagcagccatttatcgctagaaggcatatcgaactcggagtgacgggaggaggtagtccagagaacggagatggggctctgctggcgatcacgccacccgccgttaaaaggagacgtggccgccctcccaagaaaaatcgcagccctgctgacgcggggaggggtgttgacgaagccccatctagtaccctcaaggggaaaacgaatggcgcagaccctgttcctggacccgaaacacttattgtggcagatcccgtgctcgaaccacagctgatcccaggtccacagccactggggcctcaaccagttcaccgtcctaacccactgctttctccggtggagaagcgcaggcgaggtcgccctcctaaagcccgcgacctacctatcccaggaaccataagttctgctggcgatggaaactccgaatccagaactcagcccccaccccacccttctccgttgactcctctgccaccgttactggtttgccctacagccacagtggccaacacggttacaacagttaccatctctacaagtccccccaagaggaaacgcgggagaccccccaagaaccccccatcaccacgaccatctcaattacctgtgctggacagggatagcacttccgttctggagagttgcggactggggagaaggagacagcctcagggacaaggtgagagtgagggttcatcttccgatgaggatggctcgcgaccactgactagactcgcccgactccgcctggaagccgagggtatgcgcggacgcaagtctggaggctcaatggtcgtggccgtaattcaggatgatctggacctggccgactctggccctggcggattggaactcactcctcctgtcgtgtccctgacccccaagctgagaagcacccggttgcggcccggttctctggtgcccccgctggagaccgagaaactgcctcgaaaacgtgcaggggctccggtgggggggagccccggattagccaaacgcggccgcttgcaaccaccctcacctctgggcccggagggatccgtggaggaatccgaagcagaggcctctggggaggaggaggagggcgacgggacgcctagacggcggcccggccctcgccgactggtcggaaccacgaatcagggtgaccagcgtatccttaggagctccgcacccccaagccttgctggacctgcagttagccatcgcggacgaaaggccaagacttag

SEQ ID NO: 166934 - DNA, 180 bp, Artificial Sequence
  derived and/or modified sequence
atgcagagcagccccagccccgcccacccccagctgcccgtgctgcagacccagatggtgagcgacggcatgactggcagtaaccctgtcagccctgcctcctctagctccccagcctcatcgggggctggtggcattagccctcaacacatcgctcaggattcctctttggatgggtag

SEQ ID NO: 166935 - DNA, 9693 bp, Artificial Sequence
  derived and/or modified sequence
atgcagtcttccccaagtcctgcccacccacaactgcccgtattgcagacgcagatggtcagcgacggcatgaccgggtctaaccctgtatcccctgcttctagtagctcaccggcttcatccggcgcagggggtatttccccacagcacattgctcaagactcttccctcgatgggcctccgggaccacccgacggagcgaccgtgccactggagggctttagcctttcccaggcggcagacctggccaataaggggccaaagtgggagaaatctcatgccgagatcgccgagcaggccaaacacgaagccgaaattgaaactcggatcgccgagctcaggaaggaggggttctggtcattgaaaagactgcccaaggtgcccgagcctccccgaccaaaaggacactgggattacctttgtgaagagatgcagtggctatctgccgacttcgctcaggaacgccgatggaaaaggggagtcgcgcgtaaagtggtcagaatggtgatccgccaccatgaggagcagaggcagaaagaggagcgagcccgtcgtgaggagcaggcaaagctcagacgcattgcttctacgatggctaaagatgttcgacagttctggagcaacgtggagaaagtggtgcaattcaagcaacagagtcgcctcgaagagaagcgcaagaaagcacttgatctgcaccttgactttatagtgggtcaaactgagaagtacagcgatttgttgtctcagagcttaaaccagccgcttacatcaagcaaggccggatcaagtccttgcctgggttcttcaagcgccgcatcatctccgcctcctccagctagcagactggatgatgaggatggcgacttccaacctcaagaggacgaagaggaggatgacgaagaaaccatcgaggtggaggagcagcaggagggaaatgacgcggaggcgcagaggagggaaattgaactcctccggagagaaggcgagctgccgttggaagaactcttacgcagcctacctccacagctgctcgagggaccctcttctccctctcagacgccatcgagccatgacagcgataccagggacggtcccgaagagggcgcagaagaggaaccgcctcaagtcttagagatcaaacccccaccaagcgctgtaacccaaaggaataagcagccttggcatcccgatgaggacgatgaggaatttacagccaacgaagaggaggctgaggacgaggaggataccatcgcagccgaagaacagttagaaggcgaggtggatcacgcaatggagctgtcggagttggctcgtgaaggcgaattgagtatggaagaactcttgcagcagtacgctggcgcttatgcgccaggcagtgggagttctgaagacgaagatgaggacgaagtcgatgctaattcatccgactgcgagcccgaggggcctgttgaggccgaagagccacctcaggaagattccagcagccagagtgactcagtggaggatcggtctgaagacgaagaagatgaacattcagaggaagaggaaacgtctggaagctctgccagcgaagagagcgagtccgaggaatcagaagacgcccagtcacagtcccaagccgatgaggaggaagaagatgacgattttggggtggaatacctgctggccagagatgaggagcagtctgaggcggacgctgggtccggcccacccacgcctggtccaaccacccttggccctaaaaaggagatcaccgacatcgcagccgctgcagaatcgctgcagcccaagggctacacattggctactactcaggtgaagacccctatcccgctgctgctccgtggccagttacgagagtaccagcacataggcctggattggctggttaccatgtacgaaaagaaactgaacggaatacttgccgatgagatgggcctgggaaagaccatccaaactatctctctcctggctcatctcgcatgcgagaaaggtaattggggtccgcacttaatcattgtgcctaccagcgtgatgctgaactgggagatggagctgaaaagatggtgcccttctttcaagattctgacatactacggagctcagaaggagcggaaactgaaacggcagggttggaccaagcctaatgcctttcatgtgtgtataacgtcgtataaactggtgttgcaggatcaccaagcattcagaagaaaaaattggagatacttgatattggacgaagctcagaacatcaagaattttaaatcgcagcggtggcagtcactcttgaattttaactcacaaagacgcctgcttcttaccggcacaccactccaaaactccctcatggagctgtggtccctcatgcatttcctgatgccacatgtgtttcaatcgcatcgtgaatttaaggaatggtttagtaaccctctcactggcatgattgagggctcccaggaatataacgagggattggttaagaggctgcataaggtgctaaggccttttttgctgaggcgggtcaaagttgacgtggagaagcagatgcccaaaaagtacgagcatgtgatccggtgtaggctctctaaaagacagcggtgcctatacgacgactttatggcacaaaccacgactaaggagaccctggcaactggccacttcatgagcgtcataaacatactgatgcagctgcggaaagtctgtaaccatccaaacctcttcgatccacggccagtaaccagcccctttatcacccctggcatttgtttttctaccgcctctttagtcttgagagcgaccgatgtacacccccttcagaggatcgacatgggtagattcgacttaatcgggctggaaggtcgtgtcagtagatatgaggccgataccttcttgcctaggcaccgacttagccgccgagtgctgctggaagtggccaccgccccagaccccccacctcggccaaaacctgttaagatgaaagtgaacaggatgctacaacctgtgccaaaacaggaagggaggacggtagtggtcgtcaataacccacgggctcctctgggcccagtaccagtcagacccccacccggacctgaactgagcgctcagccaactcccggtccagtccctcaagttttgcctgcctctttgatggtcagtgcctcccccgctggacctccgctgattcccgctagtcgaccccctgggccagttctgctgccaccgctacagcctaatagcgggtctctgccacaggtgctcccttctcctctcggtgtgctgtcaggtacatctcggcctcccaccccgaccctgagcctgaagcccacacccccagcgcctgtgcgtctctccccagcacccccacctggcagttctagccttctgaagcccttgactgtgccgcctggctatacctttcccccagccgctgctaccaccacctccacgacgaccgccactgctacaaccacagccgtgccagctcccactcccgctccacagcgcctcattctgtctcctgacatgcaggcgagacttccgagtggcgaagttgtgtcgattggacagctagcctccctggcacagaggccagtggcaaatgcaggcggaagtaagcccctgacgtttcagatccaaggcaacaagctgaccttgacgggtgcccaggtgagacagctggcagtgggccagccaaggccactgcagaggaatgtcgtgcacctggtttctgcgggagggcagcatcacctgatctctcagcctgcgcacgtggctctgatacaggctgtggcccctacaccaggccctactcccgtgagcgtgctgccttcatccaccccctccacaactcctgcaccaaccggcctgtccttgccactggcagcaaaccaggtgcctcccactatggtcaacaatacaggcgtcgtcaagattgtagtccggcaagctcccagagatggacttacgcccgtgcctcctctggctccagccccaaggccaccgagctcaggactgccggctgtgctaaatcctcgacccacactgactcctgggcgtttgccgacacctactctgggcacagccagggcccctatgccaactcctaccctagttcgcccacttctgaaactggtccacagtccgtccccagaggtgtcagctagtgctccaggtgcagcacccttgaccatttcctctcccctgcacgtgccttctagtctgcctggacctgctagttcccccatgcctatccctaatagttcaccactcgcctctcccgtgagtagcacagtcagcgttccactgagctcaagcctgcccatcagcgtgccaacgaccctgcccgcacccgcttcagctcccctgacgatccctattagtgctccacttacagtctccgccagcgggcctgctttgctcaccagtgtaacgccacctctcgcacccgttgtccccgcagcccctgggcctcctagtttggctccatcgggtgcttcacctagcgcttccgcccttacactaggcctcgctacagccccttcattgagttcctctcagactccagggcacccgctgttgcttgctcccaccagctcccacgttccaggattgaatagtacagtagcccctgcctgctctcctgttctggtaccagcatctgcactcgcttccccctttccaagtgcccctaacccagcaccagcccaggcttccttgttagcgccagcttcatcggcttcccaagccctggctactccattggctcctatggcggcaccacagaccgccattttggcaccaagcccagcccctcccctggccccacttccagtgcttgcaccctcgcctggggcagccccagtgctggcctcttctcagactcctgtgcccgtgatggcaccaagtagcactcctggaaccagtctcgccagcgcgtctccggttccagcacctacccctgttttggcacccagctccactcaaaccatgctcccagctcccgtcccttcccctctgccaagtccggcatccactcagactctggctctagccccagcactcgcccctacattgggcggatcaagcccaagtcagactctgagcctgggcacgggtaatcctcaaggacccttccccactcagaccctttctctcacacccgcttcttcactggtgcccacgcctgcccaaacactttcacttgctccaggaccaccgctaggccctactcagacactgtcactggctcctgcccctccgctcgcccctgcctcccccgtcgggccagccccagctcacaccctcaccctcgccccagcctcctcaagcgcgtcactcctggcgcctgccagcgtccagactctgacgttgtcacccgctcccgttccaaccttgggcccagccgcagcccagacactcgccctagctccggcttccacccagtcgccagcttcccaggcttcctctctcgtggtgtctgcgtctggggctgctcccttacccgtaaccatggtgtcaagactgcccgtgtcaaaggacgaaccggatacactcactctcagaagcgggccaccctccccaccaagtacggcaacaagctttgggggtcctcggcctcggagacagccccctccgcctccccgatctcctttctacctcgactcgctggaggagaaaaggaaacgccaaagatctgaacgcctcgagcgcatatttcagctgagcgaggcacacggcgctcttgcacctgtatatggtaccgaggtgctggacttttgcactctcccacaacccgtagctagtcccatcggacctaggtcacccggaccaagtcacccaaccttttggacgtatactgaggccgctcaccgcgctgtgcttttccctcagcaacgtctcgaccagttatcggaaatcatcgagaggttcatctttgtcatgcccccagtcgaggcccctcccccttcactgcacgcctgtcatccccctccctggcttgcccctaggcaggctgcatttcaagagcagctcgcatccgaactctggcccagagcaaggcctcttcatagaattgtgtgtaatatgcggactcagtttcccgaccttcggctgatccaatatgactgcgggaaactgcagactctggccgtgttgttacggcagctgaaagctgagggtcacagagttcttattttcacccaaatgactcggatgttggacgtgctggagcaattccttacttaccacgggcatctgtatctacggttagacgggtcgactcgggtggagcagcgccaggccctgatggaacggttcaatgcggataaacgtatcttttgcttcattctgagcactagatctgggggagtaggcgtgaatctaaccggagcagacaccgttgtcttctacgatagcgactggaacccgaccatggatgcccaagcacaggatagatgtcaccgtattgggcagactagagacgtgcatatctaccgattgatttccgaaaggactgtggaggagaacatccttaagaaggctaaccagaaacgcatgttgggcgacatggcaattgaggggggaaactttaccacggcctacttcaagcagcaaactattcgggaactgttcgatatgcccctggaggagccctcctcgagctcagtgccctctgccccagaggaggaagaggaaactgtagcctccaaacagacacatatcttggaacaggcgctgtgccgggctgaggacgaggaggatattcgagctgcgacccaggcaaaagcagagcaggttgcagaactggccgaatttaatgagaatgatggatttcctgcaggggagggtgaagaagccggtaggcccggagccgaggatgaggagatgtcccgggctgaacaggagattgccgcactggtcgaacaactcactcctatcgaaaggtatgcaatgaagttcttagaggcctccctagaagaggtgtccagagaagaactgaaacaggccgaagaacaggtggaagcagcaaggaaagaccttgatcaggctaaggaagaggtttttcggttgcctcaagaggaagaggaaggccctggtgctggggacgagtcctcttgcggcacaggtgggggaacacaccgacgatcaaagaaagctaaagcccctgaacggccaggcacaagagtcagcgaaaggctgcggggagctagagctgaaactcagggggctaaccacacaccggtgatctcggcgcaccagactagatctacaaccacaccccctcggtgctcacccgctcgtgaacgggtgcctagacctgcacccagaccacgacctaccccagcgtccgccccagcggctatacctgcactcgtccctgtccctgtttcagcacctgtacctatctccgctccaaaccccataactatcctgcctgtccacattctgccctctccgcctccaccttcacaaattcccccttgcagcagccccgcttgcacccctccccctgcctgtacacctccacccgctcacacccccccacctgctcagacctgtcttgtcacacccagctcccccctgttgcttggtccaccctccgtgcccattagcgcctcagtgactaacctccctctgggcttgagaccagaggccgaactctgcgcccaggcactggcttcgccagaaagcctggaattagcgtccgttgcctcttcagagacgtccagcctgtccctcgtgcctcctaaagacttactccctgtggccgtggagattctgcctgtgagcgaaaaaaacctgagcctgaccccttccgcgcctagtctcactcttgaagccggttccatccccaacgggcaagagcaggaggccccagacagcgcagaaggaactacactgacggtgctgccagagggcgaggaactccctctttgcgtttctgagagtaacggccttgaattaccgcctagtgctgcatcagatgagcccctacaggaaccactggaagccgatcgtactagcgaagaacttacagaggctaagaccccaacctctagccccgaaaagccccaggagctggttactgcagaagtggcggcaccctccactagctctagtgcgactagcagccccgaggggccttctcccgctcggccacctcggcgacgcacctctgcagacgtggaaattaggggacagggaacagggaggcctgggcagcctcccggacccaaagtattgaggaaactgcctggaaggctggtaactgtggtggaggagaaagagctcgtgcggaggcgccgacagcagagaggcgcagctagtactcttgtacccggagtgtctgaaaccagcgcatcacctggcagcccctccgttagaagtatgtctggaccagaatcgagcccccctattggtggtccatgcgaggctgcccctagcagctctcttcctacaccgcctcagcaaccgtttatcgccaggcggcatattgaactgggggtcactggcggtggcagccccgagaacggtgacggtgcattgctcgccataactcctcccgctgttaagagacgcaggggcagaccccctaaaaagaacagaagccctgcagatgctggtaggggggtggacgaggctccttctagcacccttaagggaaaaactaacggcgcagacccagtgccaggccctgagaccctgatcgttgctgacccggtccttgagccgcaactgataccaggaccccaacccctggggcctcagcccgtgcacaggcctaaccctctcctgagtcctgtcgaaaaacgcagaagaggtaggccaccaaaggcccgagatctgcctattcccggaacaataagcagcgcaggcgacggtaatagtgagtcacgtacacaaccccctccccatccctctccactgacacctctgcctcccctgttagtctgccccaccgctaccgtggcgaacacggtgaccacagtgacaataagcacaagcccgccaaagagaaagagaggacgaccacctaagaaccctccttcccccagaccctcccagctcccggttctggaccgagatagtactagtgtactggaaagctgtggtctcgggagaagaagacagccacagggtcagggcgaaagtgaaggctcaagcagcgacgaggatggtagccgacctctgacacgcctagcccgactcaggttggaggcggaggggatgcgcggaaggaaaagcgggggttcaatggtggtggccgtgattcaagacgacttggacctggccgactccgggccaggcggattggagctgacccccccagttgtctctctcactccgaagctgagatccacccgtctcagaccgggatccctcgttccccctttggagaccgagaaactaccacgtaagagggctggagctcctgtgggcggaagcccaggcctcgccaagaggggtcgcctgcaacctccctctcctctgggacctgaaggcagcgtggaggaaagtgaagcagaagccagtggggaggaagaagaaggcgatggcacccctcgcagaaggcccggtccacggcgactggtgggtacgacgaatcagggagatcagcgcatactacggagttccgcccctccctcccttgcaggcccagcggtgagccacaggggacgcaaggccaagacctaa

SEQ ID NO: 166936 - DNA, 9218 bp, Artificial Sequence
  derived and/or modified sequence
atgcagtcctccccaagccctgcccatcctcagctccctgtcttgcagacccagatggtttccgatggcatgacaggctctaatcctgtcagccctgccagctcatcatcacctgcgagtagtggcgctgggggtatcagcccgcaacacatcgcccaggattccagtctggatggccctcccggtccgccagatggagccactgtgcctctggagggattttccctgtcccaggcagcagatctggctaataagggccctaaatgggaaaagagccatgccgaaatagcagaacaggccaagcacgaagctgaaatagagacccgcattgcggaactaagaaaagagggattctggtccttgaagcggctcccaaaggtaccagagccgccaagaccgaagggacattgggactatctttgcgaagaaatgcagtggttaagtgccgatttcgcccaagaacgcagatggaagcggggtgttgcgaggaaagtcgtgcggatggttatacgccatcacgaggagcagcgccagaaagaagaaagagcaaggcgagaggaacaggctaagcttcgacgaatcgcctcaaccatggcaaaggatgtgaggcagttctggagcaacgtggagaaagtggtacagtttaaacagcagagccgcctggaggaaaagcgcaaaaaggccctcgacctacatctcgacttcatcgtcggccagacagaaaagtactccgacctcctgtctcagtctctgaatcagccacttacttcctcaaaggctggaagttccccgtgccttggctccagcagcgctgcttcttccccccctcctcctgccagcagactcgatgatgaggacggcgattttcagccccaggaggacgaagaggaggatgatgaagagacgattgaggtggaagaacagcaagagggaaacgacgccgaggctcaaagaagagagattgagctgctcagaagggaaggcgaactgccgttagaggaactgctgaggagcctgcctcctcagctgttggagggcccttcatctccaagccaaaccccaagttcacacgactcagacacgagagatggcccagaggagggagccgaggaggagccccctcaggtgctggagatcaagcctcctcccagtgccgtgacacaacggaacaaacagccttggcacccagacgaggacgacgaggagtttaccgcaaatgaggaggaggctgaagacgaggaggacacaattgccgcagaggagcagttggagggagaggtggatcatgccatggagctgagcgagcttgccagggagggagaactgtctatggaagagttgctgcagcagtatgcgggtgcctacgccccaggttctgggtcttctgaggacgaggacgaggacgaggtggacgcaaacagctcagattgtgaaccagaaggtccagtagaggccgaggaacccccacaggaggatagcagcagccaaagcgacagcgtcgaagatagaagtgaagacgaggaagacgagcattcagaagaggaggaaacaagcgggtcctctgcatcagaggaatctgagagtgaggagtcagaggacgcccagagccaaagtcaggcggacgaggaggaggaggacgacgatttcggcgtcgagtacctgctcgcacgagacgaagagcagtcagaggcagatgcaggctctggccctccaaccccaggaccaacgacgcttgggccaaaaaaagagatcaccgacattgccgctgcggctgagagcctacagccaaagggttatacactcgctactactcaagtgaagacgcctattcccctgctgttgcgaggccagctcagagaataccagcatatcgggctcgactggctggtgaccatgtacgaaaagaagctgaacgggatcctcgccgatgaaatgggcctgggcaagaccattcagactatcagcctgcttgctcaccttgcctgcgaaaagggtaattggggtccccacctgatcatagtgcctactagcgtgatgttgaactgggaaatggagctgaaaaggtggtgccccagcttcaaaatactgacgtactatggtgcacagaaagagcgcaagcttaaacggcagggctggaccaagccaaatgccttccatgtttgcatcacaagctacaaactggtcctccaggaccaccaggcttttcggcgaaagaactggcgctaccttattcttgacgaggcccagaacataaagaacttcaagtcccagagatggcagtctttactgaacttcaattctcaacgtaggttgttgctcaccggaactccgctgcagaatagcttgatggagctgtggtccctgatgcattttttaatgccccatgtgtttcagagccaccgggagtttaaagagtggttctcaaatcctctaaccggaatgatcgaagggtcacaggaatacaacgaaggtcttgtgaagcggctacataaagtcctccgaccttttctgctaagaagagtgaaggtggacgtcgagaagcaaatgccgaaaaaatacgaacacgtaatccgctgccggctttctaaaaggcagcgatgcctgtacgatgacttcatggctcagactaccactaaggaaacacttgctaccgggcactttatgtctgtcattaacatcctgatgcagttaagaaaggtgtgtaaccacccaaacctctttgacccaaggccagttactagccccttcatcactcctggcatctgcttcagcacagcatctctggttctccgggctacagatgtgcatccactgcagaggatcgacatgggacgcttcgatctcattggcctggaaggtcgagttagtcgctacgaggcggatacttttttacccaggcacagactgtctcgcagggttcttctcgaggtggccacagccccagacccgcctcctagacccaagcccgtaaagatgaaagtgaatagaatgttacaacccgtacccaaacaggaggggagaaccgttgtcgttgtgaacaacccacgcgctccgctggggcctgtgcccgtacgtccccctccagggccagaactcagtgctcagcctactccgggaccagtgccccaggtgttacccgcatcacttatggtttcagcctcccccgcaggaccgccactgatcccagccagtcgcccacccggtccagtgttgctgccccctctgcagcctaactctggatctctgccacaggcgggagaggtggttagcataggacagctggcctccctggcgcagcgaccagtggcaaacgccggtgggtccaagcctctcacatttcagatccagggcaataagctgacgcttaccggggctcaagtgcggcagttggccgtgggccaaccgcgacccctgcaaatgccacccacgatggtgaacaatactggagtggtcaaaattgtggtgcggcaggccccacgagatggactcactcccgtcccccctctggcccctgcgcctcgcccacccagctctggacttccagcagtgctaaaccccagaccgactctgacaccaggtagactcccaacacccaccctcggcacagccagggccccaatgcctacacccactctggtacgcccactgctgaagttggtgcactccccatcacccgaagtgtcagcaagcgctccgggtgcggctcctctgaccatcagttctcccctccatgtcccatctagtctgcctgggccagcttcaagccccatgccgatccctaactcttctcccctggcctcaccagtgtctagcaccgtgtccgtccctcttagctccagcctgccaatttcagtacccacaacactacctgcaccggcatcggctccacttacaattccaatctctgcaccactcaccgttagtgcttctggccctgctctgttaacctctgtcactccaccactggcaccagttgttcctgctgctccgggacctcctagtctggccccaagcggcgcatcacccagcgccagcgccctcactctaggattagctacagctccaagtttaagctcgagtcagaccccaggccacccattactgctggcaccaacatcctcacatgttcccggattgaacagcaccgtagccccagcttgctcaccagtcctggtgccagcctcagcactggcttccccgttccccagcgccccaaatcccgcaccagcccaggctagcctgctcgcaccagcctctagcgcttcacaggccctggccacgccgctggccccaatggcagcccctcagacagctattctggcaccttctccggctcctccactggcccctctgccggtgctcgctccctcacctggggctgcccctgttctggccagttcccaaacaccagtgcctgtgatggccccatcttctacccctggcacgtctcttgccagcgcctctcccgtgccggctcccactcctgtcttggccccttcttctacacagaccatgttgccagccccagtgcccagccctctgcccagtcccgcatctacccagacattagccctcgctccggctcttgcacctactttggggggtagtagcccctcccagacgctgagtctcggaaccggcaatccacaaggtccatttcccactcagacgctgtctctgacaccagccagcagtctggttccaacccccgcacagaccctctccctggccccaggccctcccctcggtcctactcaaactctgtctctagccccagcaccaccgctcgcacccgctagtcccgtcggacctgccccagcccacacactgacactcgccccagcctcctcctccgctagcctgcttgcgcctgccagtgtgcagacgttaactctgtccccagcaccagtgcctactttgggaccagccgcagcccagaccctcgcactggcccctgccagtacacaatccccagccagccaagcatcaagtctggtggtgtccgctagtggagctgccccattgcctgtgactatggtgtctcgcctgcccgtgtctaaggacgaaccagatacccttaccttgagatcagggccaccctctcctccatctaccgccaccagcttcggaggacctcgtcctcgcaggcagccaccgcctcctccaaggagtcctttctacctggactccctcgaagagaaacgcaaacgtcaaagaagcgaacggctggagcggatctttcagctgagtgaagcacacggtgccctagcgcctgtgtatgggaccgaggtgctagacttttgtacgctgcctcagcctgtggcctctccaattggcccacgatcccctgggccttctcaccctaccttttggacttataccgaagccgcacaccgggctgttctgtttccccaacagcgcctcgaccaactgtccgaaatcatcgagagattcatctttgtaatgcccccagtggaagcccctcccccatctctgcacgcatgtcacccaccaccctggctggcgcctcggcaagctgccttccaggaacagctggcttcggagctgtggcctagggcccgtcccctgcatagaattgtatgtaatatgcgcactcagttccctgatctgcggctgatccagtatgactgtggtaaactgcaaacacttgctgttctcctcaggcagttaaaggcagagggtcaccgtgtcttgatttttacacagatgacaaggatgctcgacgtactcgagcaatttttaacctaccatggtcacctgtatctcagactggacgggtccaccagggtggaacaacggcaggccttgatggagagattcaacgccgacaaacggattttctgttttattctgtcgacacgctccggcggtgtgggtgttaatctaactggtgcggacaccgtggtgttctatgacagcgactggaaccctaccatggacgcgcaggctcaggaccgctgtcaccggatcgggcagactagggatgtgcacatctatcgtctcatctccgagcgaaccgtagaggagaacattctgaagaaggcaaaccagaagcgaatgctgggtgatatggccatcgaagggggaaattttaccaccgcctatttcaagcaacagactattagagagctctttgatatgccactggaggagccttcctcttcaagcgtacctagtgcaccagaagaggaggaagagaccgttgcctcaaagcagacacatattctggaacaggctctctgccgcgctgaagatgaggaggacatccgcgcagcaactcaggctaaagcagagcaagtcgcagagcttgctgaatttaatgaaaacgacggcttcccagccggtgagggagaagaggctggaagaccaggcgctgaggacgaggaaatgtctcgcgcagagcaggaaatagccgcactggtcgagcagttaaccccaatcgagagatatgcgatgaaatttcttgaagcttccctagaagaggtatccagggaggagctcaagcaggctgaggaacaggtcgaggcggctaggaaggatctggatcaggccaaagaagaggtctttcgcttgccccaggaagaggaggaaggccctggagctggcgacgaaagctcttgcggcactggtggcggaacacaccgcaggagtaagaaagccaaagctcctgaacgacccggtaccagggtgtctgagcggctgcgaggagccagagcggaaacacagggcgctaatcatacccctgttatatcagcccaccagactagatcaacgacgactccccctaggtgctcacctgctcgcgaaagagtaccacggcctgcgcctcggccaaggcccacaccggcatccgcccctgccgcaatcccggctttggttccggtccctgtgtccgcgcctgtcccaataagcgccccaaatcccatcactatccttccagtgcatattctgcctagcccccctccaccatcccagatacctccttgtagctcacctgcatgcacccctcccccagcctgcactccaccacccgctcacacgccacccccagcccagacttgcctcgtaacccctagcagccctctgctgttgggcccaccatccgttccaatttccgcgtccgtcacaaacctcccactcgggctaagacctgaagccgagctgtgcgcacaggccttggcttcacctgaatctctggagctggcaagcgtggccagctcagaaacatcctcactcagtctggttcctcccaaggacctactcccagtggcagtggaaattctcccagttagcgagaagaacttaagtctgactccttcagctccatcgctgaccctggaagcaggctcaattccgaatggccaagaacaggaggcccctgattctgccgagggaaccacgcttacggtcctgcccgagggagaagaattgcctctatgcgtctctgagagcaatggtctggagctgccacccagtgctgcatctgacgaaccattacaagagccactcgaagctgacagaacctcggaagagctgactgaagctaaaactccaacctcgagcccagagaagcctcaggagcttgtcactgctgaagtagccgctccaagcacttcctctagcgccacaagcagccccgagggtccgtctcctgctagacccccaaggagacgaacaagcgccgatgttgaaattcggggacagggcactggccgtcccggacaaccacccggtccgaaggtcctccgaaaattacctgggagactagttacagtggtcgaagagaaggaactggtacggcgtcgcagacagcagcgaggcgctgctagtacattggttcccggagtgagcgagacttccgcctcacccggaagtccgtctgtgaggtctatgagtggaccagaaagctccccgccaattggaggtccttgtgaagccgctccgagctcgtccctgcctaccccaccgcagcagcctttcatcgcacgacgccatatcgagcttggggtcaccggagggggatcgccggaaaacggagatggggctttgttggcaataacgccacctgcagtaaagcgccgaaggggcagaccgccaaagaaaaatcgtagccctgcagacgccggtcgtggcgtagatgaggccccatcctctactttgaaggggaaaaccaacggagccgatccagtcccaggtcccgagaccctgatcgtggccgacccagtactggaaccccaattgattccagggcctcagccactcggccctcaaccagtgcaccgcccaaacccattactgtcccctgtggagaagcggcgacggggaagacctcccaaggccagggacctgccaattcctggtacaatatcaagcgctggtgatggcaattctgaaagccgcacgcagccacctccgcacccaagcccactgactcctctgccacctttgctcgtgtgcccaacagcgacagttgctaacactgtgacaaccgtcaccattagcacgtcacctccaaagcgtaaacgtggcagaccccctaagaacccaccaagcccgcgacctagtcagctcccagtgctggacagggatagcacatcagtgcttgagagctgtggtcttggacggcgtcggcagccgcagggccagggtgagagcgaaggaagcagctccgatgaagatggctctagacctctgacccggctcgcacggttgcgccttgaggcagagggcatgcggggaaggaagtctggaggctctatggtcgttgctgtgatccaggacgaccttgacctggccgactctggccctggcggactcgagttaacacctccagtcgtctcgctgaccccaaagttgcggagtaccagactcagacctggttctttggtacccccactagagaccgaaaagctcccccgaaaaagagccggtgctcctgtagggggttctccaggattggccaagcggggacgcctccaacccccttctccccttgggcctgaaggatccgtagaagaatcagaggctgaggcctcaggggaagaggaagagggagatgggaccccacgcagacgcccaggaccccgaagactggtggggactacgaatcagggtgaccaaaggatcctccggtcctctgcccctcccagcctggccggacccgcagtgtcccaccgtggtagaaaggctaaaaccta

SEQ ID NO: 166937 - DNA, 9506 bp, Artificial Sequence
  derived and/or modified sequence
atgcagtccagcccaagcccggctcacccacagttgccagtgctgcagacccagatggtcagtgatggtatgaccgggagcaaccctgtaagcccagctagtagctccagcccagcttcctccggagcgggagggatcagtccccaacacatcgcgcaagactcatccctagacggcccacctggcccacctgacggagccaccgtccctttagaggggttttcgttgtcgcaggccgcagatctggccaataaagggcctaaatgggagaaatctcacgctgaaatcgccgaacaggcaaagcacgaagcggaaattgagactaggatcgccgaattgagaaaggaaggattctggagcctgaagcgcctgcccaaagtccctgagccccctaggccgaagggtcactgggattatttatgcgaggagatgcagtggctgagcgcagactttgctcaggaacgtcggtggaaacgaggcgtggcaaggaaggtggtccgcatggtgattagacaccacgaggaacagaggcagaaagaggagagagctcggagagaggagcaggccaagctgcgcaggattgcgtccactatggctaaagacgttcggcagttctggtctaatgttgaaaaagtggtacaatttaagcagcaatcccgtctggaagagaagcgtaagaaagccctagacttacatctggacttcatcgtcggccagaccgaaaagtactccgatctgctgtctcagtccctgaatcagcccctgacctcttcaaaagctgggagcagtccatgtctcggttcaagctctgcggcatcatctcctccccctccagccagcagactggacgacgaggacggcgacttccagccccaagaggacgaggaggaagatgacgaagaaacaatcgaagttgaagagcaacaggagggcaatgacgcagaggcacagcgccgagaaatcgagcttctgcgccgagagggagaactgccgttggaggaactcctgcgtagtctcccaccccagctcttggagggaccatcctccccttctcagacaccttcctcccatgacagtgatacacgcgatggaccagaggaaggcgcagaggaagagccccctcaggtgctagagattaaaccccctcccagcgctgtgacccagcgcaacaagcaaccatggcaccccgacgaagacgatgaggagtttaccgctaatgaagaggaagcggaggacgaggaagacaccatcgccgctgaggagcagcttgaaggcgaagtggatcatgccatggaactctctgaactggccagggaaggggaactctccatggaagagttgcttcagcagtacgccggtgcatatgctcccggatccgggtctagcgaagatgaagatgaggacgaagtggatgctaatagcagcgattgcgagcctgagggacctgtggaagccgaggagccgccacaggaagattcctcttcacagagcgattcggtggaagatcgctcagaagacgaagaggacgagcatagcgaggaggaggaaacctcaggcagttcagcgagcgaagagagtgagtccgaggagagtgaagacgcacagagccagtcacaagcagacgaggaagaggaagatgatgatttcggggtcgaatacttgttagcgcgagacgaggaacaatcggaggccgacgctggatccggccctccaacacccggaccgaccacactgggacccaaaaaggagataaccgatattgccgctgctgccgaatctctccagcctaaaggctatactctcgctaccacgcaggtcaaaacccctatcccattgcttttacgtggccagctccgagaataccagcacataggtctggactggctcgtgaccatgtacgaaaagaaattgaatgggatcctggccgatgaaatgggcctgggaaagacgatccagactatcagtctgctggcccatcttgcttgtgagaaaggcaactggggacctcacctcattatcgtgccgaccagtgtgatgttgaactgggagatggagctcaaaaggtggtgtccttcttttaagattctgacgtattacggagcccagaaggaacgcaagctgaaaaggcagggctggactaagccgaacgcattccatgtgtgtatcacaagttataagctggtgctccaagatcaccaggccttccgcaggaaaaattggcggtacctaatcttggacgaggcccagaatattaagaactttaaatcacaaaggtggcaatcccttctcaacttcaatagccagagacgcctgctgctgacgggcactccactgcagaattctcttatggagctatggagcctaatgcacttcttaatgccccacgtgttccagtcacaccgcgagttcaaggaatggttttctaacccactcaccgggatgatagaagggtcacaggagtataacgagggccttgtcaaacgcctacacaaagtccttcgaccatttcttctgcggagggtgaaggttgacgtggagaaacagatgccaaaaaaatatgagcacgtgattcgctgccgtctgtcaaagaggcagagatgcctgtatgacgactttatggcccaaactaccacaaaagaaacattagccaccggccactttatgagcgtaatcaacattctgatgcagctccggaaggtttgtaatcaccctaacctgtttgaccccaggccggtgactagcccattcattacacccggtatttgtttttcgaccgcttcacttgtgctgcgcgctacagatgtgcatcccttgcagcgtattgacatggggcgattcgaccttataggacttgaaggcagggtgtctaggtacgaagctgatacattcctccctagacatcgactgagcaggagggtgttgctcgaagtggccaccgcacccgatccaccacctagacctaagcctgtgaaaatgaaggtcaataggatgttgcagccagtacctaagcaggagggcaggacggtagtggtcgtgaacaacccccgagcccctcttggacctgtccccgtacgacctccgcctggccctgaactttcagcacaaccaacacccggtcctgtacctcaggtgcttcccgcaagcctgatggtgtctgcatcccccgcagggccacccctgatcccagcgagccgtcccccagggcctgtgctgcttccaccactacagcccaacagcgggtctctgccacaggtgctgcctagccctctgggcgttctcagtggtacctccagacccccaactcccacgctgtctctaaaacctactccacctgcccctgtgcggctctccccagctccccctcctggctccagctctctgttgaaacctcttaccgtcccccctggatacacatttccccctgctgctgcgacaacaactagcacaacaaccgctactgctaccaccaccgccgtgcctgcccctactccagcgcctcagagactgatcctcagccctgacatgcaagcccgtctgccctcaggcgaggtggtgtcaattggtcaactggcctccctcgcccagcgcccagtcgccaacgctgggggatctaaacccctgaccttccagatccagggaaataagttgaccttaacaggagctcaggtgcggcagttggcagtggggcagcctcgtcccctacagatgccaccaacaatggtcaataatactggcgtggtgaagatagtcgtgagacaggctcccagagacgggctgacacccgtgccccctctcgcaccagcccctcgcccaccctcttcaggtctgccagccgtcttgaatcccagacccacgctcacaccgggaagacttccaacccccaccctgggaactgcaagagcacctatgccaacgccgaccttagtcaggccactcctgaagctggtgcacagccctagtccagaagtgagcgcaagcgcacccggtgcagctcccctgactatctcatccccattgcatgtaccaagctccttacctggtccggcaagtagccctatgcccatcccaaatagtagtcctctggccagtcctgtgagtagtactgtgagcgttccactgagctcatccttgcccatctctgtgccaaccacgttacccgctcctgctagtgctccactgacaatccccatttcagccccactgacggttagcgcctctggacctgcgctgttaacatccgtgacccctcctctggctccagtggttcccgcagccccaggcccaccctccctggcaccctctggggcatcaccttcagcctcagccctgaccttggggctcgccactgcgcctagtctgtcatcctcgcagaccccgggacaccctctcttgttggcaccaacttccagtcacgtccctggactcaacagcactgtggccccagcgtgtagccccgtgctggtgcctgcctcagcgctagcttctccatttccaagcgcccctaaccccgctccagcccaggcctcacttttggcgccagccagctcagcaagccaggccctggccaccccactagcccctatggccgctccacagaccgcaatactggcaccttcccctgccccaccattagcccctctccctgtgctggcgccttcccccggagccgcacctgttctcgcttccagccagacaccagtgccggtaatggcaccatcaagcaccccgggaacatcattggctagcgcttcccccgtacccgcaccaacgccagttcttgccccttcctcgactcaaacgatgttaccagcgccagtgcctagtccgctgccaagtcctgctagcacccagaccctggccttagcaccagccctggccccaacgcttgggggaagcagtcccagccaaacactgtccctgggaacaggtaatccgcaggggccatttccaacacagacactgtctctgaccccggcatcttcactggtcccaactcctgcacaaaccctctccctggcacccggtcctcctctcgggccaacacagactctttccctggcgccagctcccccattagctccggcttctcctgtcggtcctgctcccgcacacacactgaccctcgctcccgcttccagttctgcctctctgctcgctccagcaagcgtgcaaaccctaacattgtctccagcccctgtacctaccctgggcccagccgcagcccaaaccctcgccctggccccagccagtacccagtcccctgcttcccaggcctcttccctcgtggtgtctgcctccggcgcagcacccctaccagtgactatggtgtctcggctcccagtttccaaggacgaacccgatacactgacacttagatcagggcctccatcaccaccttcaaccgctaccagttttggaggcccacgtccgagacggcaacccccaccacctcctcggagcccgttttacctcgactccctcgaggaaaagcggaagcggcagcgcagcgaacgactggaacgaatctttcaactttcagaagcccatggggcactcgcccctgtctatggaacagaggtgctggatttctgcactttaccccagcccgtagcctccccgatcggaccacgctcacccggtccaagccacccgactttttggacttataccgaggcggcacatcgggcagtcctatttccccagcagagactggatcagctgagcgagataattgagcgctttattttcgtgatgcccccagttgaggcgcctccccctagccttcacgcctgtcatccccctccctggctggcccctcgccaggccgctttccaggagcaactcgctagtgagctgtggcccagggcgaggcctcttcatcgcattgtatgtaatatgaggacccagttccccgacctccgcctcatccagtacgattgcggcaagttacagaccctggccgtgctcctgcggcagctgaaggccgaagggcacagagtgctgatattcacccaaatgactcgcatgctggatgtgctggaacagttccttacctaccacggtcatctttacctgaggctggatggtagcaccagggtagaacaacgacaggcgctgatggagcgattcaacgctgacaaaaggatattttgtttcatcttatctacccggtctggtggagtgggagtaaacctgactggagccgatacagttgtgttttatgacagcgactggaacccgactatggatgcccaggctcaagacaggtgtcatagaatcgggcagaccagggacgtgcacatctaccgccttataagtgaaaggacagtcgaggagaacatcctgaagaaggctaaccagaaaagaatgctgggcgacatggcaatcgaagggggaaattttaccactgcgtacttcaaacaacagactattcgcgagttgttcgacatgccgctcgaagaaccaagttccagtagcgtacccagcgccccagaagaggaggaagagacggtagcaagtaagcaaacccatattctggagcaggccctgtgtagggctgaagatgaggaggacattagggctgccacccaggctaaagcagaacaggtcgcagaactggcagagtttaacgaaaatgatggctttcccgctggtgagggggaggaagccggtcgaccgggagccgaggacgaggaaatgtctcgtgctgagcaggagatcgctgcactggtggagcagttgacccctattgagcggtatgctatgaaatttttggaagcctccctcgaggaagtgtccagggaggaattgaagcaggcagaggagcaggtcgaggccgctaggaaggacttggatcaggccaaagaagaggtgtttcggctcccacaagaagaggaggaaggacccggagctggtgacgagagcagctgcggcacaggaggcggtacgcacaggcgctctaagaaggcaaaggccccagagagacccggtactcgagtctcagaacgactccggggtgcgagggctgagacccagggggctaaccatacacctgtgatatccgcccaccaaactcgatctactacaaccccacctcggtgctcaccagcccgagagcgtgtacctcggcctgccccaaggccaaggcccacaccagcttccgcccctgcggctatccccgctttggtgcctgtgccagtgtctgcgcctgtcccaatatccgctcctaatccgatcacgattctccctgtgcatatactcccatcccctcctcctccatcccaaatacctccatgctcttcgccagcctgcacacctcctcccgcatgcacaccccctcctgcccacacaccgccacccgcacagacttgcctagtcactccgtcctcaccactgctactcggaccgccatcagtccctatttccgccagtgtgactaaccttcctctaggactgaggcccgaggctgagctatgcgctcaggccctggcaagccccgaaagcctggaactcgcatcagtcgcttcaagcgagacctcgtctctttcactagtaccaccaaaggatctgctccccgtggccgtcgagattttaccagtgtccgaaaaaaatctctccttgacaccgtcagctccaagtctgacacttgaggccggatccatccctaatggacaggaacaagaggcaccagactcagccgaggggacgacactgactgtgctccccgagggcgaggagctgccattgtgcgttagcgagtccaacgggctggaactcccgcctagcgccgcttcggacgagccgctgcaggaacctttggaggcggaccggacctctgaagagttaacagaggccaaaactccaacttctagtccggagaagccccaggagctggtgaccgcagaggtagctgccccaagtacatctagttctgcaacctcatctcctgagggcccatccccagcccgacctcccagaagaagaacctcagcagacgttgaaatccgtggtcaagggactggaaggccaggccaacccccaggtcccaaggtattacgcaagcttcccggaaggttggtgacggtcgttgaggaaaaggagcttgtgaggaggaggagacaacagcgcggagcggcaagtacccttgtgccaggagtgtcagaaacttcggcctccccaggtagtccttcagtgagaagcatgtccggtccagaatcgagtcctcccatcggaggtccttgtgaagccgctcccagtagttctctccccactcccccacaacaaccatttattgcacgtcgccatatcgaactgggcgttaccgggggaggcagtcccgaaaacggtgacggggctctcttggcaatcactcctcccgcagttaaacggcgacgcggaagaccgccaaaaaagaacagatctccagccgatgcaggaagaggagtggatgaggcgccatctagtactttgaaggggaaaacaaatggtgcagaccctgtaccagggcctgagactctcatcgtggccgatccggtattggaaccccaacttatcccaggcccacaacccctgggaccccaacctgttcaccgtcctaacccgttgctctctccagtggaaaagagaagacggggaagaccgcctaaggctagggatctccccatcccagggaccatcagctcggccggagatggtaatagcgaaagtcggacccagcccccaccacaccctagccctctaacacccctcccccctctgctcgtgtgccccacagcaactgtggccaatactgttacaacagtgacgatttctacttctccacccaagcggaaacgtggaaggccacctaagaaccccccttcacctcgtccttcccaacttcccgttttggacagggactcgacaagcgtgttagagagttgtgggctgggacgtcgcagacagccacagggacaaggggagtcggagggctcatctagcgacgaagacggatcccggccattgaccaggctggctagattgaggttggaagcggagggcatgagagggcgtaaatctgggggatccatggtggtagccgtgatccaagacgacctggatttagcagactcaggaccaggaggtctggaattgacccctccagtggtgtctctgacaccgaagctaaggtcaacaagattgagacccggtagtcttgtcccaccactcgaaaccgaaaagctccccaggaagcgggctggggctccggtggggggttcacccggactggccaagagaggcaggcttcagcccccttctccactggggccagagggctcagtggaggaaagcgaagctgaggcctcaggcgaggaggaggagggggatgggactcccaggcgtcgccctggacccagaagactggtcggaactaccaaccagggcgaccagaggatcctcaggagcagcgcccctccctctcttgctggtcctgcagtcagccaccgcggaaggaaggctaagacata

SEQ ID NO: 166938 - DNA, 180 bp, Artificial Sequence
  derived and/or modified sequence
atgcagagttctccatcacctgcccatccccaactcccagtcctgcaaacccagatggtgagcgacggcatgaccggcagcaaccctgtgagccctgcttcaagctcatcacctgctagctccggtgctgggggaatctcacctcagcacattgcccaggattcgagcttggatggctag

SEQ ID NO: 166939 - DNA, 10474 bp, Artificial Sequence
  derived and/or modified sequence
aacttgggcagaggtcaggggtcacgcgaggtcagtccgtcgggagggctagggagatggtcacgaaacctgaagtcaagagttaaggcttgttggcttctggtgtgattcccttcagtacggcggcaccgtggaagtgcagactttcacagggggtgtggtctcagctcacacaggtgctccagaggctggtggacctgagcggaggctgggacgccctggtgggccccgggccctggaaggcgggtcccggtggccggtggcccagaatgaggccagctcccagcatgccctgcagccggacgccagcccctcggccagcagtactggtgataacaacccagtcattcttcaggcatccaagggggagcctgggagtgggaccatgcagagcagcccctcccctgctcaccctcagctcccagtcctacagacacagatggtgtcggacggcatgacaggcagcaatcctgtgtcccctgcctcatccagttccccagcctctagtggggcaggcggcatctccccgcagcacatagctcaagattcctcactggatggacctccaggccccccagatggtgccacagtgcccctggaggggttcagcttatcccaggctgctgacctggctaacaagggcccgaagtgggagaagagccatgccgaaattgcagaacaggccaagcatgaggccgagatcgagactcggattgctgagctgcggaaggagggtttctggtcactgaagaggctgcctaaggtgccagagccccctcgccccaaaggtcactgggactatttgtgcgaagagatgcagtggctctctgctgactttgctcaggagcgccgttggaaacggggtgtggcccggaaggtggtgcgcatggtgatccggcaccacgaggagcagcggcagaaagaggaacgggcccggagggaggagcaggccaagctgcgtcgaattgcttccaccatggccaaggatgtcaggcagttctggagcaatgtggagaaggtggtgcaattcaagcaacagtcccggcttgaggaaaagcgcaaaaaagccctggacctgcatttggacttcattgtggggcaaactgaaaagtactcggaccttctgtctcagagcctcaaccagccattaacctccagcaaagcaggctcttccccttgcctcggctcttcctcagctgcctccagtcctccaccccctgcttctcgcctggatgatgaagatggggactttcaaccccaagaggatgaggaagaggatgatgaggaaacgattgaagttgaagaacaacaggaaggcaatgatgcagaggcccagaggcgtgagattgagctgcttcgccgtgagggagaattgccactggaagagctgctccgttcccttccccctcagctgttggaagggccttccagcccctctcaaaccccctcatctcatgatagtgacacccgagatgggcctgaagaaggtgctgaagaagagccccctcaggtgttggagataaagcccccaccctctgctgtcacacagcgcaacaaacagccttggcatccagatgaagatgatgaagagtttactgccaacgaagaggaagcggaggatgaagaggatactatagcagctgaggaacagttggaaggggaggtggatcatgccatggagctgagcgagttggctcgagaaggtgagctttccatggaggagctattgcagcagtatgcaggagcctatgccccaggctctgggagcagtgaagatgaggatgaagatgaggttgatgctaatagctctgactgtgaaccagaggggcccgtggaagcggaagagcctcctcaggaggatagtagcagtcagtcagactctgtggaggaccggagtgaggatgaggaagatgaacattcagaggaggaagaaacaagtggaagttcagcatcagaggaatctgagtctgaagagtctgaggatgcccaatcacagagccaagcagatgaagaggaggaagatgatgattttggggtggagtacttgcttgccagggatgaagagcagagtgaggcagatgcaggcagtgggcctcctactccagggcccactactctaggtccaaagaaagaaattactgacattgctgcagcagctgaaagtctccagcccaagggttacacgctggccacgacccaggtaaagacgcccattcccctgcttctgcggggccagctccgggagtaccagcacattgggctagactggctggttaccatgtatgagaagaagcttaatggcattcttgctgatgagatggggcttgggaagaccatccagaccatctctctgcttgcccacttggcttgtgagaaaggtaactggggtccccatttaatcattgttcccaccagcgtgatgttgaactgggagatggagttgaaacggtggtgccccagctttaaaatcctcacttactatggagcccagaaagagaggaagctcaagcggcagggctggaccaagcccaatgcctttcatgtgtgtatcacatcttacaagctggtgctgcaggaccaccaggccttccgtcgcaagaactggcgctatctcattctggatgaggcgcagaacatcaagaacttcaagtcacagcgctggcagtcactcctcaacttcaacagccagagacgcctgctcctgacaggaactcccttgcagaacagcctcatggagctgtggtccttgatgcactttttgatgccccatgtcttccagtctcatcgcgagttcaaggagtggttctctaatcccctaactggcatgattgagggcagccaagagtataatgaaggtctagtcaaacgcctccacaaggttttgaggccttttttactgcgccgagttaaggtggatgttgagaagcagatgcccaaaaagtacgagcatgttatccgctgcaggctctccaagcgtcaacgctgtctctatgatgacttcatggcacagaccacaactaaggagacactagccacaggccatttcatgagcgtcatcaacattttgatgcagctgagaaaagtttgcaatcatccaaatctgttcgaccctcgaccggttacctcccctttcatcaccccaggcatctgcttcagcaccgcctctctggtgctaagggccacggatgtccatcccctccagcggatagacatgggtcgatttgaccttattggcctggaaggtcgtgtctctcgatatgaggcagacacatttctgccccggcaccgcctctctcgccgggtactgttagaagtggctactgctcctgaccccccaccccggcccaagccagtcaagatgaaggtcaacaggatgctgcagccagtacctaagcaagaaggccggacagtggtggtggtgaacaacccacgggcgcccctgggccctgtcccagttcgacctcctccaggtcctgagctctcagcccagcccacccctggcccagtcccccaagtgctgccagcatcactgatggtttcagcctcacctgccgggcccccgcttattcctgcatctcggcctcctggccctgtcctcttgcctccactgcagcccaacagtggttctctcccccaggtgttgccatcccccctgggggtcctgagtgggacctcacggcctcccacgccaaccttgtccctaaagccaacaccacctgccccagttcgcctgagcccagccccacctccaggctcctctagcctgttgaagcccctgacagtgccaccaggctacaccttccctcctgctgctgccaccaccacttctaccaccacggcaactgctaccaccacagcagtgccagctccgactcctgcaccacagcgcctcattctatctcccgatatgcaggctcgcctgccctcaggcgaagtggtcagcatcgggcagttagcctcactggcacaacgtccagtggctaatgcagggggaagcaaacctctcaccttccaaatccagggcaacaagctgactttgactggtgcccaggtgcgccagcttgctgtggggcagccccgcccgctgcaaaggaatgtggtgcacctcgtgtcagcaggggggcagcaccatctcatcagccagcctgcccatgtggccctcatccaggccgtggccccgacccctggccctacccctgtctctgtgctgccttcttcgacccccagcaccacccctgcccctactggcctcagccttccgcttgctgctaaccaggtgccaccaaccatggtgaataatacaggcgtggtgaagattgtagtgagacaagcccctcgggatggactgactcctgttcctccattggccccagcaccccggcctccgagctctgggcttccagctgtgttgaatccacgccccacgttaacccctggccggctacccacacctactctgggtactgctcgagcccccatgcccacacccactctggtgaggcctcttctcaagctggtccacagtccttcacctgaagtcagtgcttcagcccccggagctgcccccttgaccatctcttctcctctccacgtgccatcctccctccctgggccagcctcttctccaatgccaattcccaactcctctccccttgctagtcctgtgtcctctacagtctcagttccattgtcatcttcactccccatctctgtccccaccacacttcctgccccagcctcggctccactcaccatccccatctcagcccccttgactgtttctgcttcgggcccagctctgttgaccagtgtgactccaccattggcacctgttgtcccagcggctcctggacctccctccttggcaccatctggtgcttccccgtcagcatcagccttgactctaggtttggccacagctccatccctgtcttcatctcagacacctggtcaccctctgttgttggctcccacctcttcacatgttccagggttgaactcaaccgtggccccagcatgctcacctgtcctggtgccagcttcggctctggccagtccttttccgtcagcaccaaatccagctccagctcaggcttcccttctggctccagcatcttctgcatctcaggctctagccacccctctggctcctatggcggctccacagacagcaattctggctccttctccagctcctcctctggctcctcttccggtcctggcaccatcgccaggtgctgctcctgtcctggcttcatcacagactccggttccagttatggctccatcgtctactccaggaacctctttagcctcagcttcaccggtaccagctccaacccctgtgttggctccatcatcaactcaaactatgctaccagccccggttccgtcacctctcccgagcccggcttctacgcagacactggccctagccccagctttagcacccactcttggaggctcatctccatctcagacactctctttgggaacggggaacccccagggaccctttccaactcagacattgtcattaactccagcatcatccctggtaccaactccagcccagacactgtctttggcaccaggaccaccactgggtccaactcagacgctgtctctggctccagcaccccctctggctccagcttctccagtgggcccagccccagctcacacgctgactttggctccagcatcgtcatctgcttcactcctggccccagcttcagtgcagacactgaccttgagccctgccccagttcctaccctgggcccggccgcagctcagaccttggcgctggccccagcctccacacagtccccagcttcccaggcatcttcccttgtggtttcggcatctggtgccgctcccttgcctgtcaccatggtatcccggctgcctgtttccaaggatgagcctgacacactgacattgcgctctggtccccccagccctccctccactgctacctcgtttggtggcccccggcctcgacgccagccccccccaccacctcgttcccctttttatctggactccctggaggaaaagcggaagcggcagcggtctgaacgcctggaacggattttccaacttagtgaggctcatggggccctggcacctgtgtatgggactgaagtcctggatttctgtaccctgccccaacctgttgccagccccatcggccctcgttctcctggccccagccaccccaccttttggacttataccgaggctgcccaccgggctgtactgtttccccagcagcgactagaccagctgtcagaaatcattgagaggttcatctttgtcatgcctcctgtggaggcacctcccccttccctgcatgcctgccacccacctccttggctggccccacgtcaggcagccttccaggagcaattggcctctgagctctggccccgggctcgtcctttgcaccgtattgtgtgtaacatgcgcacccagttccctgacttaagactcatccagtatgattgcggaaagttgcagacgttggcagtgctgttgcggcagctcaaggcagagggccaccgagtgctcatcttcacccagatgacccgaatgctggatgtattggagcagtttctcacctaccatggccatctctacctgcgcctggatggatctactagagttgaacagagacaggccttgatggaacggttcaatgcagacaaacgcatattctgcttcatcctttcaactcggagtgggggtgtgggcgtgaacctgacaggagcagacactgttgttttttatgacagcgactggaatcccaccatggatgctcaggcccaggaccgctgtcaccgaattggccagacccgggatgtccacatatataggcttatcagtgaacggacagtggaggagaacatcctaaaaaaggcaaatcagaagagaatgttgggggacatggccattgagggaggcaacttcaccacagcctatttcaaacagcagaccatccgagagctgtttgatatgcccctggaggaaccttctagctcatccgtgccctctgcccctgaagaggaggaagagactgtggccagcaagcagactcatattctggagcaggcattgtgtcgggcagaagatgaagaggatatccgtgcagccacccaggccaaggctgaacaggtggctgagcttgcagaatttaatgagaacgatgggtttcctgctggtgagggagaggaagctggccggcctggggctgaggatgaggagatgtcccgggctgagcaggaaattgctgccctcgtagaacagctgacccccattgagcgctatgccatgaaattcctggaggcctcactggaggaggtgagccgagaggagctcaaacaggcagaagagcaagtggaagctgcccgcaaagacctggaccaagccaaggaggaggtgttccgcctaccccaagaggaggaggaggggccgggggctggggatgagagttcctgtgggactggtggaggcacccaccggcgcagtaaaaaggccaaagcccctgagaggccggggactcgtgtcagtgagcgtcttcgtggagcccgggctgagactcaaggggcaaaccacactcctgtcatatccgcccatcaaactcgcagcaccaccacaccaccccgctgcagtcctgccagggagcgagttcccaggccagcacctaggcctcgacccactccagcttcagctccggctgcaattcctgcccttgttcctgtcccagtttctgccccagtacccatttcagccccaaatccaataaccattctccctgtccatatcttgccttctcctccccctccttcacagattcctccttgttcttctcctgcctgcacccctcctcctgcctgtacccctccaccagctcatacaccgcctccagcccaaacctgtcttgtaactccttcctctcctctcttgcttggtccaccttctgtgcccatctctgcctcagtcactaatctccccttgggcttgaggcctgaggcagagctgtgtgcccaggcattggcatctccagagtccctggagctggcttctgtggccagttcagaaacctcctcactttctcttgtgccccctaaagatctgttgccagttgctgtggagatcctgcctgtgtcagagaagaacctttctctcaccccttctgcacccagcctgaccttggaggctggcagcatccccaatggtcaagagcaggaggcaccagattctgctgaggggaccacccttacagtgctgcctgaaggtgaggagttgcccctgtgtgtgagtgagagcaatggcctggagctcccaccctcagcagcatctgatgagccacttcaggagccactggaggctgacaggacctcggaagagctgacagaggccaagaccccaacctccagcccagagaagccacaggaactcgttacagctgaggttgcagctccatccacctcatcttcagccacttcctcgcctgagggtccttcacctgcccgacctcctcggcgtcgcaccagtgctgatgtggaaattaggggtcaagggactggtcggccaggacaaccaccaggccccaaagtgcttcgaaagctgccaggacggctggtaactgtggtagaggaaaaggaactggtgcggcggcggcggcagcagcggggagctgccagcaccctagtgcctggggtctctgagactagtgccagcccgggaagcccgtctgtccgcagcatgtcagggccagaatcctcccctcccattggtgggccctgtgaagctgctccttcatcctcactgcccactccaccccagcagcccttcattgctcgccgtcacattgagctgggggtgactggtggtggcagccccgagaatggagacggagcactgctcgccatcaccccacctgctgtgaaacgtcggagggggaggccccccaagaagaacaggtctccagcagatgctgggagaggtgtggatgaggcaccctcatccaccttgaagggaaaaaccaatggggctgacccagtccctgggcctgagaccctaattgttgcagatcctgtcctggaaccacagcttattcctgggccccagcctcttggaccccagccagttcacagacccaatcccctcctgtcacctgtggagaaaagaaggcgaggacgaccccctaaagcacgagatttgcccatccctgggaccatttcctctgcaggggatggcaactccgaaagtcggacacagccacccccacacccatcacccctaaccccactcccaccactgctagtttgtcccactgctactgttgccaacactgtcaccactgtcaccatttcaacgtccccacccaaacggaagaggggccgacctcccaagaatcctccatcacctcggcccagccagctccccgtcttggaccgtgacagcacttctgttctcgagagctgtggattggggaggcgacggcaaccccagggccaaggggagagtgagggtagttcctctgatgaggatggaagccgccccctcacccgcctggcccgccttcggcttgaagcagaaggaatgcgaggacggaagagtggagggtccatggtggtggctgtaattcaggatgacctggacttagcagatagcgggccaggcgggttggaattgacaccacctgtggtctcactaaccccaaaactgcgctcgacccggctgcgtccagggtctctagtccccccactagagactgagaagttgcctcgcaaacgagcaggggccccagttggtgggagtcctgggctggcaaagcggggccgcctacagcccccaagtcccctggggcctgagggttcagtagaggagtctgaggctgaagcctcaggtgaggaggaggaaggggatgggaccccacgccgacgtcctggcccccgccggcttgttgggaccaccaaccaaggggaccagcgcatcctgcgcagcagcgcccctccctccctggctggccctgctgttagtcacagaggccgcaaggccaagacgtgagtgggctgcccctccacctaggctttccaccgtggccactccctccatgaccaggcctgactctgttaaccactacttgaagtcttgagggggaaagcctccagggagacataggggccttctcccttcttcccaccaaagtagggggtaggcaactggttgtcatggaaatggggatcatcacagtccccttccccttcaccccacgtggctgggcagtgttaagggtggcaagatagtctctgtccccacccccttgtacttgattccccagctgtctttcacacagccccccacccttaggggaagggggaggggcttctctacaatgaggtttttttcttttttttttttttttaagaagaaaaaataataaacttagtttctgtatgagca

SEQ ID NO: 166940 - DNA, 9999 bp, Artificial Sequence
  derived and/or modified sequence
aacttgggcagaggtcaggggtcacgcgaggtcagtccgtcgggagggctagggagatggtcacgaaacctgaagtcaagagttaaggcttgttggcttctggtgtgattcccttcagtacggcggcaccgtggaagtgcagactttcacagggggtgtggtctcagctcacacaggtgctccagaggctggtggacctgagcggaggctgggacgccctggtgggccccgggccctggaaggcgggtcccggtggccggtggcccagaatgaggccagctcccagcatgccctgcagccggacgccagcccctcggccagcagtactggtgataacaacccagtcattcttcaggcatccaagggggagcctgggagtgggaccatgcagagcagcccctcccctgctcaccctcagctcccagtcctacagacacagatggtgtcggacggcatgacaggcagcaatcctgtgtcccctgcctcatccagttccccagcctctagtggggcaggcggcatctccccgcagcacatagctcaagattcctcactggatggacctccaggccccccagatggtgccacagtgcccctggaggggttcagcttatcccaggctgctgacctggctaacaagggcccgaagtgggagaagagccatgccgaaattgcagaacaggccaagcatgaggccgagatcgagactcggattgctgagctgcggaaggagggtttctggtcactgaagaggctgcctaaggtgccagagccccctcgccccaaaggtcactgggactatttgtgcgaagagatgcagtggctctctgctgactttgctcaggagcgccgttggaaacggggtgtggcccggaaggtggtgcgcatggtgatccggcaccacgaggagcagcggcagaaagaggaacgggcccggagggaggagcaggccaagctgcgtcgaattgcttccaccatggccaaggatgtcaggcagttctggagcaatgtggagaaggtggtgcaattcaagcaacagtcccggcttgaggaaaagcgcaaaaaagccctggacctgcatttggacttcattgtggggcaaactgaaaagtactcggaccttctgtctcagagcctcaaccagccattaacctccagcaaagcaggctcttccccttgcctcggctcttcctcagctgcctccagtcctccaccccctgcttctcgcctggatgatgaagatggggactttcaaccccaagaggatgaggaagaggatgatgaggaaacgattgaagttgaagaacaacaggaaggcaatgatgcagaggcccagaggcgtgagattgagctgcttcgccgtgagggagaattgccactggaagagctgctccgttcccttccccctcagctgttggaagggccttccagcccctctcaaaccccctcatctcatgatagtgacacccgagatgggcctgaagaaggtgctgaagaagagccccctcaggtgttggagataaagcccccaccctctgctgtcacacagcgcaacaaacagccttggcatccagatgaagatgatgaagagtttactgccaacgaagaggaagcggaggatgaagaggatactatagcagctgaggaacagttggaaggggaggtggatcatgccatggagctgagcgagttggctcgagaaggtgagctttccatggaggagctattgcagcagtatgcaggagcctatgccccaggctctgggagcagtgaagatgaggatgaagatgaggttgatgctaatagctctgactgtgaaccagaggggcccgtggaagcggaagagcctcctcaggaggatagtagcagtcagtcagactctgtggaggaccggagtgaggatgaggaagatgaacattcagaggaggaagaaacaagtggaagttcagcatcagaggaatctgagtctgaagagtctgaggatgcccaatcacagagccaagcagatgaagaggaggaagatgatgattttggggtggagtacttgcttgccagggatgaagagcagagtgaggcagatgcaggcagtgggcctcctactccagggcccactactctaggtccaaagaaagaaattactgacattgctgcagcagctgaaagtctccagcccaagggttacacgctggccacgacccaggtaaagacgcccattcccctgcttctgcggggccagctccgggagtaccagcacattgggctagactggctggttaccatgtatgagaagaagcttaatggcattcttgctgatgagatggggcttgggaagaccatccagaccatctctctgcttgcccacttggcttgtgagaaaggtaactggggtccccatttaatcattgttcccaccagcgtgatgttgaactgggagatggagttgaaacggtggtgccccagctttaaaatcctcacttactatggagcccagaaagagaggaagctcaagcggcagggctggaccaagcccaatgcctttcatgtgtgtatcacatcttacaagctggtgctgcaggaccaccaggccttccgtcgcaagaactggcgctatctcattctggatgaggcgcagaacatcaagaacttcaagtcacagcgctggcagtcactcctcaacttcaacagccagagacgcctgctcctgacaggaactcccttgcagaacagcctcatggagctgtggtccttgatgcactttttgatgccccatgtcttccagtctcatcgcgagttcaaggagtggttctctaatcccctaactggcatgattgagggcagccaagagtataatgaaggtctagtcaaacgcctccacaaggttttgaggccttttttactgcgccgagttaaggtggatgttgagaagcagatgcccaaaaagtacgagcatgttatccgctgcaggctctccaagcgtcaacgctgtctctatgatgacttcatggcacagaccacaactaaggagacactagccacaggccatttcatgagcgtcatcaacattttgatgcagctgagaaaagtttgcaatcatccaaatctgttcgaccctcgaccggttacctcccctttcatcaccccaggcatctgcttcagcaccgcctctctggtgctaagggccacggatgtccatcccctccagcggatagacatgggtcgatttgaccttattggcctggaaggtcgtgtctctcgatatgaggcagacacatttctgccccggcaccgcctctctcgccgggtactgttagaagtggctactgctcctgaccccccaccccggcccaagccagtcaagatgaaggtcaacaggatgctgcagccagtacctaagcaagaaggccggacagtggtggtggtgaacaacccacgggcgcccctgggccctgtcccagttcgacctcctccaggtcctgagctctcagcccagcccacccctggcccagtcccccaagtgctgccagcatcactgatggtttcagcctcacctgccgggcccccgcttattcctgcatctcggcctcctggccctgtcctcttgcctccactgcagcccaacagtggttctctcccccaggcaggcgaagtggtcagcatcgggcagttagcctcactggcacaacgtccagtggctaatgcagggggaagcaaacctctcaccttccaaatccagggcaacaagctgactttgactggtgcccaggtgcgccagcttgctgtggggcagccccgcccgctgcaaatgccaccaaccatggtgaataatacaggcgtggtgaagattgtagtgagacaagcccctcgggatggactgactcctgttcctccattggccccagcaccccggcctccgagctctgggcttccagctgtgttgaatccacgccccacgttaacccctggccggctacccacacctactctgggtactgctcgagcccccatgcccacacccactctggtgaggcctcttctcaagctggtccacagtccttcacctgaagtcagtgcttcagcccccggagctgcccccttgaccatctcttctcctctccacgtgccatcctccctccctgggccagcctcttctccaatgccaattcccaactcctctccccttgctagtcctgtgtcctctacagtctcagttccattgtcatcttcactccccatctctgtccccaccacacttcctgccccagcctcggctccactcaccatccccatctcagcccccttgactgtttctgcttcgggcccagctctgttgaccagtgtgactccaccattggcacctgttgtcccagcggctcctggacctccctccttggcaccatctggtgcttccccgtcagcatcagccttgactctaggtttggccacagctccatccctgtcttcatctcagacacctggtcaccctctgttgttggctcccacctcttcacatgttccagggttgaactcaaccgtggccccagcatgctcacctgtcctggtgccagcttcggctctggccagtccttttccgtcagcaccaaatccagctccagctcaggcttcccttctggctccagcatcttctgcatctcaggctctagccacccctctggctcctatggcggctccacagacagcaattctggctccttctccagctcctcctctggctcctcttccggtcctggcaccatcgccaggtgctgctcctgtcctggcttcatcacagactccggttccagttatggctccatcgtctactccaggaacctctttagcctcagcttcaccggtaccagctccaacccctgtgttggctccatcatcaactcaaactatgctaccagccccggttccgtcacctctcccgagcccggcttctacgcagacactggccctagccccagctttagcacccactcttggaggctcatctccatctcagacactctctttgggaacggggaacccccagggaccctttccaactcagacattgtcattaactccagcatcatccctggtaccaactccagcccagacactgtctttggcaccaggaccaccactgggtccaactcagacgctgtctctggctccagcaccccctctggctccagcttctccagtgggcccagccccagctcacacgctgactttggctccagcatcgtcatctgcttcactcctggccccagcttcagtgcagacactgaccttgagccctgccccagttcctaccctgggcccggccgcagctcagaccttggcgctggccccagcctccacacagtccccagcttcccaggcatcttcccttgtggtttcggcatctggtgccgctcccttgcctgtcaccatggtatcccggctgcctgtttccaaggatgagcctgacacactgacattgcgctctggtccccccagccctccctccactgctacctcgtttggtggcccccggcctcgacgccagccccccccaccacctcgttcccctttttatctggactccctggaggaaaagcggaagcggcagcggtctgaacgcctggaacggattttccaacttagtgaggctcatggggccctggcacctgtgtatgggactgaagtcctggatttctgtaccctgccccaacctgttgccagccccatcggccctcgttctcctggccccagccaccccaccttttggacttataccgaggctgcccaccgggctgtactgtttccccagcagcgactagaccagctgtcagaaatcattgagaggttcatctttgtcatgcctcctgtggaggcacctcccccttccctgcatgcctgccacccacctccttggctggccccacgtcaggcagccttccaggagcaattggcctctgagctctggccccgggctcgtcctttgcaccgtattgtgtgtaacatgcgcacccagttccctgacttaagactcatccagtatgattgcggaaagttgcagacgttggcagtgctgttgcggcagctcaaggcagagggccaccgagtgctcatcttcacccagatgacccgaatgctggatgtattggagcagtttctcacctaccatggccatctctacctgcgcctggatggatctactagagttgaacagagacaggccttgatggaacggttcaatgcagacaaacgcatattctgcttcatcctttcaactcggagtgggggtgtgggcgtgaacctgacaggagcagacactgttgttttttatgacagcgactggaatcccaccatggatgctcaggcccaggaccgctgtcaccgaattggccagacccgggatgtccacatatataggcttatcagtgaacggacagtggaggagaacatcctaaaaaaggcaaatcagaagagaatgttgggggacatggccattgagggaggcaacttcaccacagcctatttcaaacagcagaccatccgagagctgtttgatatgcccctggaggaaccttctagctcatccgtgccctctgcccctgaagaggaggaagagactgtggccagcaagcagactcatattctggagcaggcattgtgtcgggcagaagatgaagaggatatccgtgcagccacccaggccaaggctgaacaggtggctgagcttgcagaatttaatgagaacgatgggtttcctgctggtgagggagaggaagctggccggcctggggctgaggatgaggagatgtcccgggctgagcaggaaattgctgccctcgtagaacagctgacccccattgagcgctatgccatgaaattcctggaggcctcactggaggaggtgagccgagaggagctcaaacaggcagaagagcaagtggaagctgcccgcaaagacctggaccaagccaaggaggaggtgttccgcctaccccaagaggaggaggaggggccgggggctggggatgagagttcctgtgggactggtggaggcacccaccggcgcagtaaaaaggccaaagcccctgagaggccggggactcgtgtcagtgagcgtcttcgtggagcccgggctgagactcaaggggcaaaccacactcctgtcatatccgcccatcaaactcgcagcaccaccacaccaccccgctgcagtcctgccagggagcgagttcccaggccagcacctaggcctcgacccactccagcttcagctccggctgcaattcctgcccttgttcctgtcccagtttctgccccagtacccatttcagccccaaatccaataaccattctccctgtccatatcttgccttctcctccccctccttcacagattcctccttgttcttctcctgcctgcacccctcctcctgcctgtacccctccaccagctcatacaccgcctccagcccaaacctgtcttgtaactccttcctctcctctcttgcttggtccaccttctgtgcccatctctgcctcagtcactaatctccccttgggcttgaggcctgaggcagagctgtgtgcccaggcattggcatctccagagtccctggagctggcttctgtggccagttcagaaacctcctcactttctcttgtgccccctaaagatctgttgccagttgctgtggagatcctgcctgtgtcagagaagaacctttctctcaccccttctgcacccagcctgaccttggaggctggcagcatccccaatggtcaagagcaggaggcaccagattctgctgaggggaccacccttacagtgctgcctgaaggtgaggagttgcccctgtgtgtgagtgagagcaatggcctggagctcccaccctcagcagcatctgatgagccacttcaggagccactggaggctgacaggacctcggaagagctgacagaggccaagaccccaacctccagcccagagaagccacaggaactcgttacagctgaggttgcagctccatccacctcatcttcagccacttcctcgcctgagggtccttcacctgcccgacctcctcggcgtcgcaccagtgctgatgtggaaattaggggtcaagggactggtcggccaggacaaccaccaggccccaaagtgcttcgaaagctgccaggacggctggtaactgtggtagaggaaaaggaactggtgcggcggcggcggcagcagcggggagctgccagcaccctagtgcctggggtctctgagactagtgccagcccgggaagcccgtctgtccgcagcatgtcagggccagaatcctcccctcccattggtgggccctgtgaagctgctccttcatcctcactgcccactccaccccagcagcccttcattgctcgccgtcacattgagctgggggtgactggtggtggcagccccgagaatggagacggagcactgctcgccatcaccccacctgctgtgaaacgtcggagggggaggccccccaagaagaacaggtctccagcagatgctgggagaggtgtggatgaggcaccctcatccaccttgaagggaaaaaccaatggggctgacccagtccctgggcctgagaccctaattgttgcagatcctgtcctggaaccacagcttattcctgggccccagcctcttggaccccagccagttcacagacccaatcccctcctgtcacctgtggagaaaagaaggcgaggacgaccccctaaagcacgagatttgcccatccctgggaccatttcctctgcaggggatggcaactccgaaagtcggacacagccacccccacacccatcacccctaaccccactcccaccactgctagtttgtcccactgctactgttgccaacactgtcaccactgtcaccatttcaacgtccccacccaaacggaagaggggccgacctcccaagaatcctccatcacctcggcccagccagctccccgtcttggaccgtgacagcacttctgttctcgagagctgtggattggggaggcgacggcaaccccagggccaaggggagagtgagggtagttcctctgatgaggatggaagccgccccctcacccgcctggcccgccttcggcttgaagcagaaggaatgcgaggacggaagagtggagggtccatggtggtggctgtaattcaggatgacctggacttagcagatagcgggccaggcgggttggaattgacaccacctgtggtctcactaaccccaaaactgcgctcgacccggctgcgtccagggtctctagtccccccactagagactgagaagttgcctcgcaaacgagcaggggccccagttggtgggagtcctgggctggcaaagcggggccgcctacagcccccaagtcccctggggcctgagggttcagtagaggagtctgaggctgaagcctcaggtgaggaggaggaaggggatgggaccccacgccgacgtcctggcccccgccggcttgttgggaccaccaaccaaggggaccagcgcatcctgcgcagcagcgcccctccctccctggctggccctgctgttagtcacagaggccgcaaggccaagacgtgagtgggctgcccctccacctaggctttccaccgtggccactccctccatgaccaggcctgactctgttaaccactacttgaagtcttgagggggaaagcctccagggagacataggggccttctcccttcttcccaccaaagtagggggtaggcaactggttgtcatggaaatggggatcatcacagtccccttccccttcaccccacgtggctgggcagtgttaagggtggcaagatagtctctgtccccacccccttgtacttgattccccagctgtctttcacacagccccccacccttaggggaagggggaggggcttctctacaatgaggtttttttcttttttttttttttttaagaagaaaaaataataaacttagtttctgtatgagc

SEQ ID NO: 166941 - DNA, 10287 bp, Artificial Sequence
  derived and/or modified sequence
aacttgggcagaggtcaggggtcacgcgaggtcagtccgtcgggagggctagggagatggtcacgaaacctgaagtcaagagttaaggcttgttggcttctggtgtgattcccttcagtacggcggcaccgtggaagtgcagactttcacagggggtgtggtctcagctcacacaggtgctccagaggctggtggacctgagcggaggctgggacgccctggtgggccccgggccctggaaggcgggtcccggtggccggtggcccagaatgaggccagctcccagcatgccctgcagccggacgccagcccctcggccagcagtactggtgataacaacccagtcattcttcaggcatccaagggggagcctgggagtgggaccatgcagagcagcccctcccctgctcaccctcagctcccagtcctacagacacagatggtgtcggacggcatgacaggcagcaatcctgtgtcccctgcctcatccagttccccagcctctagtggggcaggcggcatctccccgcagcacatagctcaagattcctcactggatggacctccaggccccccagatggtgccacagtgcccctggaggggttcagcttatcccaggctgctgacctggctaacaagggcccgaagtgggagaagagccatgccgaaattgcagaacaggccaagcatgaggccgagatcgagactcggattgctgagctgcggaaggagggtttctggtcactgaagaggctgcctaaggtgccagagccccctcgccccaaaggtcactgggactatttgtgcgaagagatgcagtggctctctgctgactttgctcaggagcgccgttggaaacggggtgtggcccggaaggtggtgcgcatggtgatccggcaccacgaggagcagcggcagaaagaggaacgggcccggagggaggagcaggccaagctgcgtcgaattgcttccaccatggccaaggatgtcaggcagttctggagcaatgtggagaaggtggtgcaattcaagcaacagtcccggcttgaggaaaagcgcaaaaaagccctggacctgcatttggacttcattgtggggcaaactgaaaagtactcggaccttctgtctcagagcctcaaccagccattaacctccagcaaagcaggctcttccccttgcctcggctcttcctcagctgcctccagtcctccaccccctgcttctcgcctggatgatgaagatggggactttcaaccccaagaggatgaggaagaggatgatgaggaaacgattgaagttgaagaacaacaggaaggcaatgatgcagaggcccagaggcgtgagattgagctgcttcgccgtgagggagaattgccactggaagagctgctccgttcccttccccctcagctgttggaagggccttccagcccctctcaaaccccctcatctcatgatagtgacacccgagatgggcctgaagaaggtgctgaagaagagccccctcaggtgttggagataaagcccccaccctctgctgtcacacagcgcaacaaacagccttggcatccagatgaagatgatgaagagtttactgccaacgaagaggaagcggaggatgaagaggatactatagcagctgaggaacagttggaaggggaggtggatcatgccatggagctgagcgagttggctcgagaaggtgagctttccatggaggagctattgcagcagtatgcaggagcctatgccccaggctctgggagcagtgaagatgaggatgaagatgaggttgatgctaatagctctgactgtgaaccagaggggcccgtggaagcggaagagcctcctcaggaggatagtagcagtcagtcagactctgtggaggaccggagtgaggatgaggaagatgaacattcagaggaggaagaaacaagtggaagttcagcatcagaggaatctgagtctgaagagtctgaggatgcccaatcacagagccaagcagatgaagaggaggaagatgatgattttggggtggagtacttgcttgccagggatgaagagcagagtgaggcagatgcaggcagtgggcctcctactccagggcccactactctaggtccaaagaaagaaattactgacattgctgcagcagctgaaagtctccagcccaagggttacacgctggccacgacccaggtaaagacgcccattcccctgcttctgcggggccagctccgggagtaccagcacattgggctagactggctggttaccatgtatgagaagaagcttaatggcattcttgctgatgagatggggcttgggaagaccatccagaccatctctctgcttgcccacttggcttgtgagaaaggtaactggggtccccatttaatcattgttcccaccagcgtgatgttgaactgggagatggagttgaaacggtggtgccccagctttaaaatcctcacttactatggagcccagaaagagaggaagctcaagcggcagggctggaccaagcccaatgcctttcatgtgtgtatcacatcttacaagctggtgctgcaggaccaccaggccttccgtcgcaagaactggcgctatctcattctggatgaggcgcagaacatcaagaacttcaagtcacagcgctggcagtcactcctcaacttcaacagccagagacgcctgctcctgacaggaactcccttgcagaacagcctcatggagctgtggtccttgatgcactttttgatgccccatgtcttccagtctcatcgcgagttcaaggagtggttctctaatcccctaactggcatgattgagggcagccaagagtataatgaaggtctagtcaaacgcctccacaaggttttgaggccttttttactgcgccgagttaaggtggatgttgagaagcagatgcccaaaaagtacgagcatgttatccgctgcaggctctccaagcgtcaacgctgtctctatgatgacttcatggcacagaccacaactaaggagacactagccacaggccatttcatgagcgtcatcaacattttgatgcagctgagaaaagtttgcaatcatccaaatctgttcgaccctcgaccggttacctcccctttcatcaccccaggcatctgcttcagcaccgcctctctggtgctaagggccacggatgtccatcccctccagcggatagacatgggtcgatttgaccttattggcctggaaggtcgtgtctctcgatatgaggcagacacatttctgccccggcaccgcctctctcgccgggtactgttagaagtggctactgctcctgaccccccaccccggcccaagccagtcaagatgaaggtcaacaggatgctgcagccagtacctaagcaagaaggccggacagtggtggtggtgaacaacccacgggcgcccctgggccctgtcccagttcgacctcctccaggtcctgagctctcagcccagcccacccctggcccagtcccccaagtgctgccagcatcactgatggtttcagcctcacctgccgggcccccgcttattcctgcatctcggcctcctggccctgtcctcttgcctccactgcagcccaacagtggttctctcccccaggtgttgccatcccccctgggggtcctgagtgggacctcacggcctcccacgccaaccttgtccctaaagccaacaccacctgccccagttcgcctgagcccagccccacctccaggctcctctagcctgttgaagcccctgacagtgccaccaggctacaccttccctcctgctgctgccaccaccacttctaccaccacggcaactgctaccaccacagcagtgccagctccgactcctgcaccacagcgcctcattctatctcccgatatgcaggctcgcctgccctcaggcgaagtggtcagcatcgggcagttagcctcactggcacaacgtccagtggctaatgcagggggaagcaaacctctcaccttccaaatccagggcaacaagctgactttgactggtgcccaggtgcgccagcttgctgtggggcagccccgcccgctgcaaatgccaccaaccatggtgaataatacaggcgtggtgaagattgtagtgagacaagcccctcgggatggactgactcctgttcctccattggccccagcaccccggcctccgagctctgggcttccagctgtgttgaatccacgccccacgttaacccctggccggctacccacacctactctgggtactgctcgagcccccatgcccacacccactctggtgaggcctcttctcaagctggtccacagtccttcacctgaagtcagtgcttcagcccccggagctgcccccttgaccatctcttctcctctccacgtgccatcctccctccctgggccagcctcttctccaatgccaattcccaactcctctccccttgctagtcctgtgtcctctacagtctcagttccattgtcatcttcactccccatctctgtccccaccacacttcctgccccagcctcggctccactcaccatccccatctcagcccccttgactgtttctgcttcgggcccagctctgttgaccagtgtgactccaccattggcacctgttgtcccagcggctcctggacctccctccttggcaccatctggtgcttccccgtcagcatcagccttgactctaggtttggccacagctccatccctgtcttcatctcagacacctggtcaccctctgttgttggctcccacctcttcacatgttccagggttgaactcaaccgtggccccagcatgctcacctgtcctggtgccagcttcggctctggccagtccttttccgtcagcaccaaatccagctccagctcaggcttcccttctggctccagcatcttctgcatctcaggctctagccacccctctggctcctatggcggctccacagacagcaattctggctccttctccagctcctcctctggctcctcttccggtcctggcaccatcgccaggtgctgctcctgtcctggcttcatcacagactccggttccagttatggctccatcgtctactccaggaacctctttagcctcagcttcaccggtaccagctccaacccctgtgttggctccatcatcaactcaaactatgctaccagccccggttccgtcacctctcccgagcccggcttctacgcagacactggccctagccccagctttagcacccactcttggaggctcatctccatctcagacactctctttgggaacggggaacccccagggaccctttccaactcagacattgtcattaactccagcatcatccctggtaccaactccagcccagacactgtctttggcaccaggaccaccactgggtccaactcagacgctgtctctggctccagcaccccctctggctccagcttctccagtgggcccagccccagctcacacgctgactttggctccagcatcgtcatctgcttcactcctggccccagcttcagtgcagacactgaccttgagccctgccccagttcctaccctgggcccggccgcagctcagaccttggcgctggccccagcctccacacagtccccagcttcccaggcatcttcccttgtggtttcggcatctggtgccgctcccttgcctgtcaccatggtatcccggctgcctgtttccaaggatgagcctgacacactgacattgcgctctggtccccccagccctccctccactgctacctcgtttggtggcccccggcctcgacgccagccccccccaccacctcgttcccctttttatctggactccctggaggaaaagcggaagcggcagcggtctgaacgcctggaacggattttccaacttagtgaggctcatggggccctggcacctgtgtatgggactgaagtcctggatttctgtaccctgccccaacctgttgccagccccatcggccctcgttctcctggccccagccaccccaccttttggacttataccgaggctgcccaccgggctgtactgtttccccagcagcgactagaccagctgtcagaaatcattgagaggttcatctttgtcatgcctcctgtggaggcacctcccccttccctgcatgcctgccacccacctccttggctggccccacgtcaggcagccttccaggagcaattggcctctgagctctggccccgggctcgtcctttgcaccgtattgtgtgtaacatgcgcacccagttccctgacttaagactcatccagtatgattgcggaaagttgcagacgttggcagtgctgttgcggcagctcaaggcagagggccaccgagtgctcatcttcacccagatgacccgaatgctggatgtattggagcagtttctcacctaccatggccatctctacctgcgcctggatggatctactagagttgaacagagacaggccttgatggaacggttcaatgcagacaaacgcatattctgcttcatcctttcaactcggagtgggggtgtgggcgtgaacctgacaggagcagacactgttgttttttatgacagcgactggaatcccaccatggatgctcaggcccaggaccgctgtcaccgaattggccagacccgggatgtccacatatataggcttatcagtgaacggacagtggaggagaacatcctaaaaaaggcaaatcagaagagaatgttgggggacatggccattgagggaggcaacttcaccacagcctatttcaaacagcagaccatccgagagctgtttgatatgcccctggaggaaccttctagctcatccgtgccctctgcccctgaagaggaggaagagactgtggccagcaagcagactcatattctggagcaggcattgtgtcgggcagaagatgaagaggatatccgtgcagccacccaggccaaggctgaacaggtggctgagcttgcagaatttaatgagaacgatgggtttcctgctggtgagggagaggaagctggccggcctggggctgaggatgaggagatgtcccgggctgagcaggaaattgctgccctcgtagaacagctgacccccattgagcgctatgccatgaaattcctggaggcctcactggaggaggtgagccgagaggagctcaaacaggcagaagagcaagtggaagctgcccgcaaagacctggaccaagccaaggaggaggtgttccgcctaccccaagaggaggaggaggggccgggggctggggatgagagttcctgtgggactggtggaggcacccaccggcgcagtaaaaaggccaaagcccctgagaggccggggactcgtgtcagtgagcgtcttcgtggagcccgggctgagactcaaggggcaaaccacactcctgtcatatccgcccatcaaactcgcagcaccaccacaccaccccgctgcagtcctgccagggagcgagttcccaggccagcacctaggcctcgacccactccagcttcagctccggctgcaattcctgcccttgttcctgtcccagtttctgccccagtacccatttcagccccaaatccaataaccattctccctgtccatatcttgccttctcctccccctccttcacagattcctccttgttcttctcctgcctgcacccctcctcctgcctgtacccctccaccagctcatacaccgcctccagcccaaacctgtcttgtaactccttcctctcctctcttgcttggtccaccttctgtgcccatctctgcctcagtcactaatctccccttgggcttgaggcctgaggcagagctgtgtgcccaggcattggcatctccagagtccctggagctggcttctgtggccagttcagaaacctcctcactttctcttgtgccccctaaagatctgttgccagttgctgtggagatcctgcctgtgtcagagaagaacctttctctcaccccttctgcacccagcctgaccttggaggctggcagcatccccaatggtcaagagcaggaggcaccagattctgctgaggggaccacccttacagtgctgcctgaaggtgaggagttgcccctgtgtgtgagtgagagcaatggcctggagctcccaccctcagcagcatctgatgagccacttcaggagccactggaggctgacaggacctcggaagagctgacagaggccaagaccccaacctccagcccagagaagccacaggaactcgttacagctgaggttgcagctccatccacctcatcttcagccacttcctcgcctgagggtccttcacctgcccgacctcctcggcgtcgcaccagtgctgatgtggaaattaggggtcaagggactggtcggccaggacaaccaccaggccccaaagtgcttcgaaagctgccaggacggctggtaactgtggtagaggaaaaggaactggtgcggcggcggcggcagcagcggggagctgccagcaccctagtgcctggggtctctgagactagtgccagcccgggaagcccgtctgtccgcagcatgtcagggccagaatcctcccctcccattggtgggccctgtgaagctgctccttcatcctcactgcccactccaccccagcagcccttcattgctcgccgtcacattgagctgggggtgactggtggtggcagccccgagaatggagacggagcactgctcgccatcaccccacctgctgtgaaacgtcggagggggaggccccccaagaagaacaggtctccagcagatgctgggagaggtgtggatgaggcaccctcatccaccttgaagggaaaaaccaatggggctgacccagtccctgggcctgagaccctaattgttgcagatcctgtcctggaaccacagcttattcctgggccccagcctcttggaccccagccagttcacagacccaatcccctcctgtcacctgtggagaaaagaaggcgaggacgaccccctaaagcacgagatttgcccatccctgggaccatttcctctgcaggggatggcaactccgaaagtcggacacagccacccccacacccatcacccctaaccccactcccaccactgctagtttgtcccactgctactgttgccaacactgtcaccactgtcaccatttcaacgtccccacccaaacggaagaggggccgacctcccaagaatcctccatcacctcggcccagccagctccccgtcttggaccgtgacagcacttctgttctcgagagctgtggattggggaggcgacggcaaccccagggccaaggggagagtgagggtagttcctctgatgaggatggaagccgccccctcacccgcctggcccgccttcggcttgaagcagaaggaatgcgaggacggaagagtggagggtccatggtggtggctgtaattcaggatgacctggacttagcagatagcgggccaggcgggttggaattgacaccacctgtggtctcactaaccccaaaactgcgctcgacccggctgcgtccagggtctctagtccccccactagagactgagaagttgcctcgcaaacgagcaggggccccagttggtgggagtcctgggctggcaaagcggggccgcctacagcccccaagtcccctggggcctgagggttcagtagaggagtctgaggctgaagcctcaggtgaggaggaggaaggggatgggaccccacgccgacgtcctggcccccgccggcttgttgggaccaccaaccaaggggaccagcgcatcctgcgcagcagcgcccctccctccctggctggccctgctgttagtcacagaggccgcaaggccaagacgtgagtgggctgcccctccacctaggctttccaccgtggccactccctccatgaccaggcctgactctgttaaccactacttgaagtcttgagggggaaagcctccagggagacataggggccttctcccttcttcccaccaaagtagggggtaggcaactggttgtcatggaaatggggatcatcacagtccccttccccttcaccccacgtggctgggcagtgttaagggtggcaagatagtctctgtccccacccccttgtacttgattccccagctgtctttcacacagccccccacccttaggggaagggggaggggcttctctacaatgaggtttttttcttttttttttttttttaagaagaaaaaataataaacttagtttctgtatgagc

SEQ ID NO: 166942 - DNA, 9693 bp, Artificial Sequence
  derived and/or modified sequence
atgcagagcagccccagccccgcccacccccagctgcccgtgctgcagacccagatggtgagcgacggcatgaccggcagcaaccccgtgagccccgccagcagcagcagccccgccagcagcggcgccggcggcatcagcccccagcacatcgcccaggacagcagcctggacggcccccccggcccccccgacggcgccaccgtgcccctggagggcttcagcctgagccaggccgccgacctggccaacaagggccccaagtgggagaagagccacgccgagatcgccgagcaggccaagcacgaggccgagatcgagaccagaatcgccgagctgagaaaggagggcttctggagcctgaagagactgcccaaggtgcccgagccccccagacccaagggccactgggactacctgtgcgaggagatgcagtggctgagcgccgacttcgcccaggagagaagatggaagagaggcgtggccagaaaggtggtgagaatggtgatcagacaccacgaggagcagagacagaaggaggagagagccagaagagaggagcaggccaagctgagaagaatcgccagcaccatggccaaggacgtgagacagttctggagcaacgtggagaaggtggtgcagttcaagcagcagagcagactggaggagaagagaaagaaggccctggacctgcacctggacttcatcgtgggccagaccgagaagtacagcgacctgctgagccagagcctgaaccagcccctgaccagcagcaaggccggcagcagcccctgcctgggcagcagcagcgccgccagcagcccccccccccccgccagcagactggacgacgaggacggcgacttccagccccaggaggacgaggaggaggacgacgaggagaccatcgaggtggaggagcagcaggagggcaacgacgccgaggcccagagaagagagatcgagctgctgagaagagagggcgagctgcccctggaggagctgctgagaagcctgcccccccagctgctggagggccccagcagccccagccagacccccagcagccacgacagcgacaccagagacggccccgaggagggcgccgaggaggagcccccccaggtgctggagatcaagcccccccccagcgccgtgacccagagaaacaagcagccctggcaccccgacgaggacgacgaggagttcaccgccaacgaggaggaggccgaggacgaggaggacaccatcgccgccgaggagcagctggagggcgaggtggaccacgccatggagctgagcgagctggccagagagggcgagctgagcatggaggagctgctgcagcagtacgccggcgcctacgcccccggcagcggcagcagcgaggacgaggacgaggacgaggtggacgccaacagcagcgactgcgagcccgagggccccgtggaggccgaggagcccccccaggaggacagcagcagccagagcgacagcgtggaggacagaagcgaggacgaggaggacgagcacagcgaggaggaggagaccagcggcagcagcgccagcgaggagagcgagagcgaggagagcgaggacgcccagagccagagccaggccgacgaggaggaggaggacgacgacttcggcgtggagtacctgctggccagagacgaggagcagagcgaggccgacgccggcagcggcccccccacccccggccccaccaccctgggccccaagaaggagatcaccgacatcgccgccgccgccgagagcctgcagcccaagggctacaccctggccaccacccaggtgaagacccccatccccctgctgctgagaggccagctgagagagtaccagcacatcggcctggactggctggtgaccatgtacgagaagaagctgaacggcatcctggccgacgagatgggcctgggcaagaccatccagaccatcagcctgctggcccacctggcctgcgagaagggcaactggggcccccacctgatcatcgtgcccaccagcgtgatgctgaactgggagatggagctgaagagatggtgccccagcttcaagatcctgacctactacggcgcccagaaggagagaaagctgaagagacagggctggaccaagcccaacgccttccacgtgtgcatcaccagctacaagctggtgctgcaggaccaccaggccttcagaagaaagaactggagatacctgatcctggacgaggcccagaacatcaagaacttcaagagccagagatggcagagcctgctgaacttcaacagccagagaagactgctgctgaccggcacccccctgcagaacagcctgatggagctgtggagcctgatgcacttcctgatgccccacgtgttccagagccacagagagttcaaggagtggttcagcaaccccctgaccggcatgatcgagggcagccaggagtacaacgagggcctggtgaagagactgcacaaggtgctgagacccttcctgctgagaagagtgaaggtggacgtggagaagcagatgcccaagaagtacgagcacgtgatcagatgcagactgagcaagagacagagatgcctgtacgacgacttcatggcccagaccaccaccaaggagaccctggccaccggccacttcatgagcgtgatcaacatcctgatgcagctgagaaaggtgtgcaaccaccccaacctgttcgaccccagacccgtgaccagccccttcatcacccccggcatctgcttcagcaccgccagcctggtgctgagagccaccgacgtgcaccccctgcagagaatcgacatgggcagattcgacctgatcggcctggagggcagagtgagcagatacgaggccgacaccttcctgcccagacacagactgagcagaagagtgctgctggaggtggccaccgcccccgaccccccccccagacccaagcccgtgaagatgaaggtgaacagaatgctgcagcccgtgcccaagcaggagggcagaaccgtggtggtggtgaacaaccccagagcccccctgggccccgtgcccgtgagacccccccccggccccgagctgagcgcccagcccacccccggccccgtgccccaggtgctgcccgccagcctgatggtgagcgccagccccgccggcccccccctgatccccgccagcagaccccccggccccgtgctgctgccccccctgcagcccaacagcggcagcctgccccaggtgctgcccagccccctgggcgtgctgagcggcaccagcagaccccccacccccaccctgagcctgaagcccaccccccccgcccccgtgagactgagccccgcccccccccccggcagcagcagcctgctgaagcccctgaccgtgccccccggctacaccttcccccccgccgccgccaccaccaccagcaccaccaccgccaccgccaccaccaccgccgtgcccgcccccacccccgccccccagagactgatcctgagccccgacatgcaggccagactgcccagcggcgaggtggtgagcatcggccagctggccagcctggcccagagacccgtggccaacgccggcggcagcaagcccctgaccttccagatccagggcaacaagctgaccctgaccggcgcccaggtgagacagctggccgtgggccagcccagacccctgcagagaaacgtggtgcacctggtgagcgccggcggccagcaccacctgatcagccagcccgcccacgtggccctgatccaggccgtggcccccacccccggccccacccccgtgagcgtgctgcccagcagcacccccagcaccacccccgcccccaccggcctgagcctgcccctggccgccaaccaggtgccccccaccatggtgaacaacaccggcgtggtgaagatcgtggtgagacaggcccccagagacggcctgacccccgtgccccccctggcccccgcccccagaccccccagcagcggcctgcccgccgtgctgaaccccagacccaccctgacccccggcagactgcccacccccaccctgggcaccgccagagcccccatgcccacccccaccctggtgagacccctgctgaagctggtgcacagccccagccccgaggtgagcgccagcgcccccggcgccgcccccctgaccatcagcagccccctgcacgtgcccagcagcctgcccggccccgccagcagccccatgcccatccccaacagcagccccctggccagccccgtgagcagcaccgtgagcgtgcccctgagcagcagcctgcccatcagcgtgcccaccaccctgcccgcccccgccagcgcccccctgaccatccccatcagcgcccccctgaccgtgagcgccagcggccccgccctgctgaccagcgtgaccccccccctggcccccgtggtgcccgccgcccccggcccccccagcctggcccccagcggcgccagccccagcgccagcgccctgaccctgggcctggccaccgcccccagcctgagcagcagccagacccccggccaccccctgctgctggcccccaccagcagccacgtgcccggcctgaacagcaccgtggcccccgcctgcagccccgtgctggtgcccgccagcgccctggccagccccttccccagcgcccccaaccccgcccccgcccaggccagcctgctggcccccgccagcagcgccagccaggccctggccacccccctggcccccatggccgccccccagaccgccatcctggcccccagccccgccccccccctggcccccctgcccgtgctggcccccagccccggcgccgcccccgtgctggccagcagccagacccccgtgcccgtgatggcccccagcagcacccccggcaccagcctggccagcgccagccccgtgcccgcccccacccccgtgctggcccccagcagcacccagaccatgctgcccgcccccgtgcccagccccctgcccagccccgccagcacccagaccctggccctggcccccgccctggcccccaccctgggcggcagcagccccagccagaccctgagcctgggcaccggcaacccccagggccccttccccacccagaccctgagcctgacccccgccagcagcctggtgcccacccccgcccagaccctgagcctggcccccggcccccccctgggccccacccagaccctgagcctggcccccgccccccccctggcccccgccagccccgtgggccccgcccccgcccacaccctgaccctggcccccgccagcagcagcgccagcctgctggcccccgccagcgtgcagaccctgaccctgagccccgcccccgtgcccaccctgggccccgccgccgcccagaccctggccctggcccccgccagcacccagagccccgccagccaggccagcagcctggtggtgagcgccagcggcgccgcccccctgcccgtgaccatggtgagcagactgcccgtgagcaaggacgagcccgacaccctgaccctgagaagcggcccccccagcccccccagcaccgccaccagcttcggcggccccagacccagaagacagcccccccccccccccagaagccccttctacctggacagcctggaggagaagagaaagagacagagaagcgagagactggagagaatcttccagctgagcgaggcccacggcgccctggcccccgtgtacggcaccgaggtgctggacttctgcaccctgccccagcccgtggccagccccatcggccccagaagccccggccccagccaccccaccttctggacctacaccgaggccgcccacagagccgtgctgttcccccagcagagactggaccagctgagcgagatcatcgagagattcatcttcgtgatgccccccgtggaggcccccccccccagcctgcacgcctgccacccccccccctggctggcccccagacaggccgccttccaggagcagctggccagcgagctgtggcccagagccagacccctgcacagaatcgtgtgcaacatgagaacccagttccccgacctgagactgatccagtacgactgcggcaagctgcagaccctggccgtgctgctgagacagctgaaggccgagggccacagagtgctgatcttcacccagatgaccagaatgctggacgtgctggagcagttcctgacctaccacggccacctgtacctgagactggacggcagcaccagagtggagcagagacaggccctgatggagagattcaacgccgacaagagaatcttctgcttcatcctgagcaccagaagcggcggcgtgggcgtgaacctgaccggcgccgacaccgtggtgttctacgacagcgactggaaccccaccatggacgcccaggcccaggacagatgccacagaatcggccagaccagagacgtgcacatctacagactgatcagcgagagaaccgtggaggagaacatcctgaagaaggccaaccagaagagaatgctgggcgacatggccatcgagggcggcaacttcaccaccgcctacttcaagcagcagaccatcagagagctgttcgacatgcccctggaggagcccagcagcagcagcgtgcccagcgcccccgaggaggaggaggagaccgtggccagcaagcagacccacatcctggagcaggccctgtgcagagccgaggacgaggaggacatcagagccgccacccaggccaaggccgagcaggtggccgagctggccgagttcaacgagaacgacggcttccccgccggcgagggcgaggaggccggcagacccggcgccgaggacgaggagatgagcagagccgagcaggagatcgccgccctggtggagcagctgacccccatcgagagatacgccatgaagttcctggaggccagcctggaggaggtgagcagagaggagctgaagcaggccgaggagcaggtggaggccgccagaaaggacctggaccaggccaaggaggaggtgttcagactgccccaggaggaggaggagggccccggcgccggcgacgagagcagctgcggcaccggcggcggcacccacagaagaagcaagaaggccaaggcccccgagagacccggcaccagagtgagcgagagactgagaggcgccagagccgagacccagggcgccaaccacacccccgtgatcagcgcccaccagaccagaagcaccaccaccccccccagatgcagccccgccagagagagagtgcccagacccgcccccagacccagacccacccccgccagcgcccccgccgccatccccgccctggtgcccgtgcccgtgagcgcccccgtgcccatcagcgcccccaaccccatcaccatcctgcccgtgcacatcctgcccagcccccccccccccagccagatccccccctgcagcagccccgcctgcacccccccccccgcctgcacccccccccccgcccacacccccccccccgcccagacctgcctggtgacccccagcagccccctgctgctgggcccccccagcgtgcccatcagcgccagcgtgaccaacctgcccctgggcctgagacccgaggccgagctgtgcgcccaggccctggccagccccgagagcctggagctggccagcgtggccagcagcgagaccagcagcctgagcctggtgccccccaaggacctgctgcccgtggccgtggagatcctgcccgtgagcgagaagaacctgagcctgacccccagcgcccccagcctgaccctggaggccggcagcatccccaacggccaggagcaggaggcccccgacagcgccgagggcaccaccctgaccgtgctgcccgagggcgaggagctgcccctgtgcgtgagcgagagcaacggcctggagctgccccccagcgccgccagcgacgagcccctgcaggagcccctggaggccgacagaaccagcgaggagctgaccgaggccaagacccccaccagcagccccgagaagccccaggagctggtgaccgccgaggtggccgcccccagcaccagcagcagcgccaccagcagccccgagggccccagccccgccagaccccccagaagaagaaccagcgccgacgtggagatcagaggccagggcaccggcagacccggccagccccccggccccaaggtgctgagaaagctgcccggcagactggtgaccgtggtggaggagaaggagctggtgagaagaagaagacagcagagaggcgccgccagcaccctggtgcccggcgtgagcgagaccagcgccagccccggcagccccagcgtgagaagcatgagcggccccgagagcagcccccccatcggcggcccctgcgaggccgcccccagcagcagcctgcccacccccccccagcagcccttcatcgccagaagacacatcgagctgggcgtgaccggcggcggcagccccgagaacggcgacggcgccctgctggccatcaccccccccgccgtgaagagaagaagaggcagaccccccaagaagaacagaagccccgccgacgccggcagaggcgtggacgaggcccccagcagcaccctgaagggcaagaccaacggcgccgaccccgtgcccggccccgagaccctgatcgtggccgaccccgtgctggagccccagctgatccccggcccccagcccctgggcccccagcccgtgcacagacccaaccccctgctgagccccgtggagaagagaagaagaggcagaccccccaaggccagagacctgcccatccccggcaccatcagcagcgccggcgacggcaacagcgagagcagaacccagccccccccccaccccagccccctgacccccctgccccccctgctggtgtgccccaccgccaccgtggccaacaccgtgaccaccgtgaccatcagcaccagcccccccaagagaaagagaggcagaccccccaagaacccccccagccccagacccagccagctgcccgtgctggacagagacagcaccagcgtgctggagagctgcggcctgggcagaagaagacagccccagggccagggcgagagcgagggcagcagcagcgacgaggacggcagcagacccctgaccagactggccagactgagactggaggccgagggcatgagaggcagaaagagcggcggcagcatggtggtggccgtgatccaggacgacctggacctggccgacagcggccccggcggcctggagctgaccccccccgtggtgagcctgacccccaagctgagaagcaccagactgagacccggcagcctggtgccccccctggagaccgagaagctgcccagaaagagagccggcgcccccgtgggcggcagccccggcctggccaagagaggcagactgcagccccccagccccctgggccccgagggcagcgtggaggagagcgaggccgaggccagcggcgaggaggaggagggcgacggcacccccagaagaagacccggccccagaagactggtgggcaccaccaaccagggcgaccagagaatcctgagaagcagcgccccccccagcctggccggccccgccgtgagccacagaggcagaaaggccaagacctag

SEQ ID NO: 166943 - DNA, 9219 bp, Artificial Sequence
  derived and/or modified sequence
atgcagagcagccccagccccgcccacccccagctgcccgtgctgcagacccagatggtgagcgacggcatgaccggcagcaaccccgtgagccccgccagcagcagcagccccgccagcagcggcgccggcggcatcagcccccagcacatcgcccaggacagcagcctggacggcccccccggcccccccgacggcgccaccgtgcccctggagggcttcagcctgagccaggccgccgacctggccaacaagggccccaagtgggagaagagccacgccgagatcgccgagcaggccaagcacgaggccgagatcgagaccagaatcgccgagctgagaaaggagggcttctggagcctgaagagactgcccaaggtgcccgagccccccagacccaagggccactgggactacctgtgcgaggagatgcagtggctgagcgccgacttcgcccaggagagaagatggaagagaggcgtggccagaaaggtggtgagaatggtgatcagacaccacgaggagcagagacagaaggaggagagagccagaagagaggagcaggccaagctgagaagaatcgccagcaccatggccaaggacgtgagacagttctggagcaacgtggagaaggtggtgcagttcaagcagcagagcagactggaggagaagagaaagaaggccctggacctgcacctggacttcatcgtgggccagaccgagaagtacagcgacctgctgagccagagcctgaaccagcccctgaccagcagcaaggccggcagcagcccctgcctgggcagcagcagcgccgccagcagcccccccccccccgccagcagactggacgacgaggacggcgacttccagccccaggaggacgaggaggaggacgacgaggagaccatcgaggtggaggagcagcaggagggcaacgacgccgaggcccagagaagagagatcgagctgctgagaagagagggcgagctgcccctggaggagctgctgagaagcctgcccccccagctgctggagggccccagcagccccagccagacccccagcagccacgacagcgacaccagagacggccccgaggagggcgccgaggaggagcccccccaggtgctggagatcaagcccccccccagcgccgtgacccagagaaacaagcagccctggcaccccgacgaggacgacgaggagttcaccgccaacgaggaggaggccgaggacgaggaggacaccatcgccgccgaggagcagctggagggcgaggtggaccacgccatggagctgagcgagctggccagagagggcgagctgagcatggaggagctgctgcagcagtacgccggcgcctacgcccccggcagcggcagcagcgaggacgaggacgaggacgaggtggacgccaacagcagcgactgcgagcccgagggccccgtggaggccgaggagcccccccaggaggacagcagcagccagagcgacagcgtggaggacagaagcgaggacgaggaggacgagcacagcgaggaggaggagaccagcggcagcagcgccagcgaggagagcgagagcgaggagagcgaggacgcccagagccagagccaggccgacgaggaggaggaggacgacgacttcggcgtggagtacctgctggccagagacgaggagcagagcgaggccgacgccggcagcggcccccccacccccggccccaccaccctgggccccaagaaggagatcaccgacatcgccgccgccgccgagagcctgcagcccaagggctacaccctggccaccacccaggtgaagacccccatccccctgctgctgagaggccagctgagagagtaccagcacatcggcctggactggctggtgaccatgtacgagaagaagctgaacggcatcctggccgacgagatgggcctgggcaagaccatccagaccatcagcctgctggcccacctggcctgcgagaagggcaactggggcccccacctgatcatcgtgcccaccagcgtgatgctgaactgggagatggagctgaagagatggtgccccagcttcaagatcctgacctactacggcgcccagaaggagagaaagctgaagagacagggctggaccaagcccaacgccttccacgtgtgcatcaccagctacaagctggtgctgcaggaccaccaggccttcagaagaaagaactggagatacctgatcctggacgaggcccagaacatcaagaacttcaagagccagagatggcagagcctgctgaacttcaacagccagagaagactgctgctgaccggcacccccctgcagaacagcctgatggagctgtggagcctgatgcacttcctgatgccccacgtgttccagagccacagagagttcaaggagtggttcagcaaccccctgaccggcatgatcgagggcagccaggagtacaacgagggcctggtgaagagactgcacaaggtgctgagacccttcctgctgagaagagtgaaggtggacgtggagaagcagatgcccaagaagtacgagcacgtgatcagatgcagactgagcaagagacagagatgcctgtacgacgacttcatggcccagaccaccaccaaggagaccctggccaccggccacttcatgagcgtgatcaacatcctgatgcagctgagaaaggtgtgcaaccaccccaacctgttcgaccccagacccgtgaccagccccttcatcacccccggcatctgcttcagcaccgccagcctggtgctgagagccaccgacgtgcaccccctgcagagaatcgacatgggcagattcgacctgatcggcctggagggcagagtgagcagatacgaggccgacaccttcctgcccagacacagactgagcagaagagtgctgctggaggtggccaccgcccccgaccccccccccagacccaagcccgtgaagatgaaggtgaacagaatgctgcagcccgtgcccaagcaggagggcagaaccgtggtggtggtgaacaaccccagagcccccctgggccccgtgcccgtgagacccccccccggccccgagctgagcgcccagcccacccccggccccgtgccccaggtgctgcccgccagcctgatggtgagcgccagccccgccggcccccccctgatccccgccagcagaccccccggccccgtgctgctgccccccctgcagcccaacagcggcagcctgccccaggccggcgaggtggtgagcatcggccagctggccagcctggcccagagacccgtggccaacgccggcggcagcaagcccctgaccttccagatccagggcaacaagctgaccctgaccggcgcccaggtgagacagctggccgtgggccagcccagacccctgcagatgccccccaccatggtgaacaacaccggcgtggtgaagatcgtggtgagacaggcccccagagacggcctgacccccgtgccccccctggcccccgcccccagaccccccagcagcggcctgcccgccgtgctgaaccccagacccaccctgacccccggcagactgcccacccccaccctgggcaccgccagagcccccatgcccacccccaccctggtgagacccctgctgaagctggtgcacagccccagccccgaggtgagcgccagcgcccccggcgccgcccccctgaccatcagcagccccctgcacgtgcccagcagcctgcccggccccgccagcagccccatgcccatccccaacagcagccccctggccagccccgtgagcagcaccgtgagcgtgcccctgagcagcagcctgcccatcagcgtgcccaccaccctgcccgcccccgccagcgcccccctgaccatccccatcagcgcccccctgaccgtgagcgccagcggccccgccctgctgaccagcgtgaccccccccctggcccccgtggtgcccgccgcccccggcccccccagcctggcccccagcggcgccagccccagcgccagcgccctgaccctgggcctggccaccgcccccagcctgagcagcagccagacccccggccaccccctgctgctggcccccaccagcagccacgtgcccggcctgaacagcaccgtggcccccgcctgcagccccgtgctggtgcccgccagcgccctggccagccccttccccagcgcccccaaccccgcccccgcccaggccagcctgctggcccccgccagcagcgccagccaggccctggccacccccctggcccccatggccgccccccagaccgccatcctggcccccagccccgccccccccctggcccccctgcccgtgctggcccccagccccggcgccgcccccgtgctggccagcagccagacccccgtgcccgtgatggcccccagcagcacccccggcaccagcctggccagcgccagccccgtgcccgcccccacccccgtgctggcccccagcagcacccagaccatgctgcccgcccccgtgcccagccccctgcccagccccgccagcacccagaccctggccctggcccccgccctggcccccaccctgggcggcagcagccccagccagaccctgagcctgggcaccggcaacccccagggccccttccccacccagaccctgagcctgacccccgccagcagcctggtgcccacccccgcccagaccctgagcctggcccccggcccccccctgggccccacccagaccctgagcctggcccccgccccccccctggcccccgccagccccgtgggccccgcccccgcccacaccctgaccctggcccccgccagcagcagcgccagcctgctggcccccgccagcgtgcagaccctgaccctgagccccgcccccgtgcccaccctgggccccgccgccgcccagaccctggccctggcccccgccagcacccagagccccgccagccaggccagcagcctggtggtgagcgccagcggcgccgcccccctgcccgtgaccatggtgagcagactgcccgtgagcaaggacgagcccgacaccctgaccctgagaagcggcccccccagcccccccagcaccgccaccagcttcggcggccccagacccagaagacagcccccccccccccccagaagccccttctacctggacagcctggaggagaagagaaagagacagagaagcgagagactggagagaatcttccagctgagcgaggcccacggcgccctggcccccgtgtacggcaccgaggtgctggacttctgcaccctgccccagcccgtggccagccccatcggccccagaagccccggccccagccaccccaccttctggacctacaccgaggccgcccacagagccgtgctgttcccccagcagagactggaccagctgagcgagatcatcgagagattcatcttcgtgatgccccccgtggaggcccccccccccagcctgcacgcctgccacccccccccctggctggcccccagacaggccgccttccaggagcagctggccagcgagctgtggcccagagccagacccctgcacagaatcgtgtgcaacatgagaacccagttccccgacctgagactgatccagtacgactgcggcaagctgcagaccctggccgtgctgctgagacagctgaaggccgagggccacagagtgctgatcttcacccagatgaccagaatgctggacgtgctggagcagttcctgacctaccacggccacctgtacctgagactggacggcagcaccagagtggagcagagacaggccctgatggagagattcaacgccgacaagagaatcttctgcttcatcctgagcaccagaagcggcggcgtgggcgtgaacctgaccggcgccgacaccgtggtgttctacgacagcgactggaaccccaccatggacgcccaggcccaggacagatgccacagaatcggccagaccagagacgtgcacatctacagactgatcagcgagagaaccgtggaggagaacatcctgaagaaggccaaccagaagagaatgctgggcgacatggccatcgagggcggcaacttcaccaccgcctacttcaagcagcagaccatcagagagctgttcgacatgcccctggaggagcccagcagcagcagcgtgcccagcgcccccgaggaggaggaggagaccgtggccagcaagcagacccacatcctggagcaggccctgtgcagagccgaggacgaggaggacatcagagccgccacccaggccaaggccgagcaggtggccgagctggccgagttcaacgagaacgacggcttccccgccggcgagggcgaggaggccggcagacccggcgccgaggacgaggagatgagcagagccgagcaggagatcgccgccctggtggagcagctgacccccatcgagagatacgccatgaagttcctggaggccagcctggaggaggtgagcagagaggagctgaagcaggccgaggagcaggtggaggccgccagaaaggacctggaccaggccaaggaggaggtgttcagactgccccaggaggaggaggagggccccggcgccggcgacgagagcagctgcggcaccggcggcggcacccacagaagaagcaagaaggccaaggcccccgagagacccggcaccagagtgagcgagagactgagaggcgccagagccgagacccagggcgccaaccacacccccgtgatcagcgcccaccagaccagaagcaccaccaccccccccagatgcagccccgccagagagagagtgcccagacccgcccccagacccagacccacccccgccagcgcccccgccgccatccccgccctggtgcccgtgcccgtgagcgcccccgtgcccatcagcgcccccaaccccatcaccatcctgcccgtgcacatcctgcccagcccccccccccccagccagatccccccctgcagcagccccgcctgcacccccccccccgcctgcacccccccccccgcccacacccccccccccgcccagacctgcctggtgacccccagcagccccctgctgctgggcccccccagcgtgcccatcagcgccagcgtgaccaacctgcccctgggcctgagacccgaggccgagctgtgcgcccaggccctggccagccccgagagcctggagctggccagcgtggccagcagcgagaccagcagcctgagcctggtgccccccaaggacctgctgcccgtggccgtggagatcctgcccgtgagcgagaagaacctgagcctgacccccagcgcccccagcctgaccctggaggccggcagcatccccaacggccaggagcaggaggcccccgacagcgccgagggcaccaccctgaccgtgctgcccgagggcgaggagctgcccctgtgcgtgagcgagagcaacggcctggagctgccccccagcgccgccagcgacgagcccctgcaggagcccctggaggccgacagaaccagcgaggagctgaccgaggccaagacccccaccagcagccccgagaagccccaggagctggtgaccgccgaggtggccgcccccagcaccagcagcagcgccaccagcagccccgagggccccagccccgccagaccccccagaagaagaaccagcgccgacgtggagatcagaggccagggcaccggcagacccggccagccccccggccccaaggtgctgagaaagctgcccggcagactggtgaccgtggtggaggagaaggagctggtgagaagaagaagacagcagagaggcgccgccagcaccctggtgcccggcgtgagcgagaccagcgccagccccggcagccccagcgtgagaagcatgagcggccccgagagcagcccccccatcggcggcccctgcgaggccgcccccagcagcagcctgcccacccccccccagcagcccttcatcgccagaagacacatcgagctgggcgtgaccggcggcggcagccccgagaacggcgacggcgccctgctggccatcaccccccccgccgtgaagagaagaagaggcagaccccccaagaagaacagaagccccgccgacgccggcagaggcgtggacgaggcccccagcagcaccctgaagggcaagaccaacggcgccgaccccgtgcccggccccgagaccctgatcgtggccgaccccgtgctggagccccagctgatccccggcccccagcccctgggcccccagcccgtgcacagacccaaccccctgctgagccccgtggagaagagaagaagaggcagaccccccaaggccagagacctgcccatccccggcaccatcagcagcgccggcgacggcaacagcgagagcagaacccagccccccccccaccccagccccctgacccccctgccccccctgctggtgtgccccaccgccaccgtggccaacaccgtgaccaccgtgaccatcagcaccagcccccccaagagaaagagaggcagaccccccaagaacccccccagccccagacccagccagctgcccgtgctggacagagacagcaccagcgtgctggagagctgcggcctgggcagaagaagacagccccagggccagggcgagagcgagggcagcagcagcgacgaggacggcagcagacccctgaccagactggccagactgagactggaggccgagggcatgagaggcagaaagagcggcggcagcatggtggtggccgtgatccaggacgacctggacctggccgacagcggccccggcggcctggagctgaccccccccgtggtgagcctgacccccaagctgagaagcaccagactgagacccggcagcctggtgccccccctggagaccgagaagctgcccagaaagagagccggcgcccccgtgggcggcagccccggcctggccaagagaggcagactgcagccccccagccccctgggccccgagggcagcgtggaggagagcgaggccgaggccagcggcgaggaggaggagggcgacggcacccccagaagaagacccggccccagaagactggtgggcaccaccaaccagggcgaccagagaatcctgagaagcagcgccccccccagcctggccggccccgccgtgagccacagaggcagaaaggccaagacctag

SEQ ID NO: 166944 - DNA, 9507 bp, Artificial Sequence
  derived and/or modified sequence
atgcagagcagccccagccccgcccacccccagctgcccgtgctgcagacccagatggtgagcgacggcatgaccggcagcaaccccgtgagccccgccagcagcagcagccccgccagcagcggcgccggcggcatcagcccccagcacatcgcccaggacagcagcctggacggcccccccggcccccccgacggcgccaccgtgcccctggagggcttcagcctgagccaggccgccgacctggccaacaagggccccaagtgggagaagagccacgccgagatcgccgagcaggccaagcacgaggccgagatcgagaccagaatcgccgagctgagaaaggagggcttctggagcctgaagagactgcccaaggtgcccgagccccccagacccaagggccactgggactacctgtgcgaggagatgcagtggctgagcgccgacttcgcccaggagagaagatggaagagaggcgtggccagaaaggtggtgagaatggtgatcagacaccacgaggagcagagacagaaggaggagagagccagaagagaggagcaggccaagctgagaagaatcgccagcaccatggccaaggacgtgagacagttctggagcaacgtggagaaggtggtgcagttcaagcagcagagcagactggaggagaagagaaagaaggccctggacctgcacctggacttcatcgtgggccagaccgagaagtacagcgacctgctgagccagagcctgaaccagcccctgaccagcagcaaggccggcagcagcccctgcctgggcagcagcagcgccgccagcagcccccccccccccgccagcagactggacgacgaggacggcgacttccagccccaggaggacgaggaggaggacgacgaggagaccatcgaggtggaggagcagcaggagggcaacgacgccgaggcccagagaagagagatcgagctgctgagaagagagggcgagctgcccctggaggagctgctgagaagcctgcccccccagctgctggagggccccagcagccccagccagacccccagcagccacgacagcgacaccagagacggccccgaggagggcgccgaggaggagcccccccaggtgctggagatcaagcccccccccagcgccgtgacccagagaaacaagcagccctggcaccccgacgaggacgacgaggagttcaccgccaacgaggaggaggccgaggacgaggaggacaccatcgccgccgaggagcagctggagggcgaggtggaccacgccatggagctgagcgagctggccagagagggcgagctgagcatggaggagctgctgcagcagtacgccggcgcctacgcccccggcagcggcagcagcgaggacgaggacgaggacgaggtggacgccaacagcagcgactgcgagcccgagggccccgtggaggccgaggagcccccccaggaggacagcagcagccagagcgacagcgtggaggacagaagcgaggacgaggaggacgagcacagcgaggaggaggagaccagcggcagcagcgccagcgaggagagcgagagcgaggagagcgaggacgcccagagccagagccaggccgacgaggaggaggaggacgacgacttcggcgtggagtacctgctggccagagacgaggagcagagcgaggccgacgccggcagcggcccccccacccccggccccaccaccctgggccccaagaaggagatcaccgacatcgccgccgccgccgagagcctgcagcccaagggctacaccctggccaccacccaggtgaagacccccatccccctgctgctgagaggccagctgagagagtaccagcacatcggcctggactggctggtgaccatgtacgagaagaagctgaacggcatcctggccgacgagatgggcctgggcaagaccatccagaccatcagcctgctggcccacctggcctgcgagaagggcaactggggcccccacctgatcatcgtgcccaccagcgtgatgctgaactgggagatggagctgaagagatggtgccccagcttcaagatcctgacctactacggcgcccagaaggagagaaagctgaagagacagggctggaccaagcccaacgccttccacgtgtgcatcaccagctacaagctggtgctgcaggaccaccaggccttcagaagaaagaactggagatacctgatcctggacgaggcccagaacatcaagaacttcaagagccagagatggcagagcctgctgaacttcaacagccagagaagactgctgctgaccggcacccccctgcagaacagcctgatggagctgtggagcctgatgcacttcctgatgccccacgtgttccagagccacagagagttcaaggagtggttcagcaaccccctgaccggcatgatcgagggcagccaggagtacaacgagggcctggtgaagagactgcacaaggtgctgagacccttcctgctgagaagagtgaaggtggacgtggagaagcagatgcccaagaagtacgagcacgtgatcagatgcagactgagcaagagacagagatgcctgtacgacgacttcatggcccagaccaccaccaaggagaccctggccaccggccacttcatgagcgtgatcaacatcctgatgcagctgagaaaggtgtgcaaccaccccaacctgttcgaccccagacccgtgaccagccccttcatcacccccggcatctgcttcagcaccgccagcctggtgctgagagccaccgacgtgcaccccctgcagagaatcgacatgggcagattcgacctgatcggcctggagggcagagtgagcagatacgaggccgacaccttcctgcccagacacagactgagcagaagagtgctgctggaggtggccaccgcccccgaccccccccccagacccaagcccgtgaagatgaaggtgaacagaatgctgcagcccgtgcccaagcaggagggcagaaccgtggtggtggtgaacaaccccagagcccccctgggccccgtgcccgtgagacccccccccggccccgagctgagcgcccagcccacccccggccccgtgccccaggtgctgcccgccagcctgatggtgagcgccagccccgccggcccccccctgatccccgccagcagaccccccggccccgtgctgctgccccccctgcagcccaacagcggcagcctgccccaggtgctgcccagccccctgggcgtgctgagcggcaccagcagaccccccacccccaccctgagcctgaagcccaccccccccgcccccgtgagactgagccccgcccccccccccggcagcagcagcctgctgaagcccctgaccgtgccccccggctacaccttcccccccgccgccgccaccaccaccagcaccaccaccgccaccgccaccaccaccgccgtgcccgcccccacccccgccccccagagactgatcctgagccccgacatgcaggccagactgcccagcggcgaggtggtgagcatcggccagctggccagcctggcccagagacccgtggccaacgccggcggcagcaagcccctgaccttccagatccagggcaacaagctgaccctgaccggcgcccaggtgagacagctggccgtgggccagcccagacccctgcagatgccccccaccatggtgaacaacaccggcgtggtgaagatcgtggtgagacaggcccccagagacggcctgacccccgtgccccccctggcccccgcccccagaccccccagcagcggcctgcccgccgtgctgaaccccagacccaccctgacccccggcagactgcccacccccaccctgggcaccgccagagcccccatgcccacccccaccctggtgagacccctgctgaagctggtgcacagccccagccccgaggtgagcgccagcgcccccggcgccgcccccctgaccatcagcagccccctgcacgtgcccagcagcctgcccggccccgccagcagccccatgcccatccccaacagcagccccctggccagccccgtgagcagcaccgtgagcgtgcccctgagcagcagcctgcccatcagcgtgcccaccaccctgcccgcccccgccagcgcccccctgaccatccccatcagcgcccccctgaccgtgagcgccagcggccccgccctgctgaccagcgtgaccccccccctggcccccgtggtgcccgccgcccccggcccccccagcctggcccccagcggcgccagccccagcgccagcgccctgaccctgggcctggccaccgcccccagcctgagcagcagccagacccccggccaccccctgctgctggcccccaccagcagccacgtgcccggcctgaacagcaccgtggcccccgcctgcagccccgtgctggtgcccgccagcgccctggccagccccttccccagcgcccccaaccccgcccccgcccaggccagcctgctggcccccgccagcagcgccagccaggccctggccacccccctggcccccatggccgccccccagaccgccatcctggcccccagccccgccccccccctggcccccctgcccgtgctggcccccagccccggcgccgcccccgtgctggccagcagccagacccccgtgcccgtgatggcccccagcagcacccccggcaccagcctggccagcgccagccccgtgcccgcccccacccccgtgctggcccccagcagcacccagaccatgctgcccgcccccgtgcccagccccctgcccagccccgccagcacccagaccctggccctggcccccgccctggcccccaccctgggcggcagcagccccagccagaccctgagcctgggcaccggcaacccccagggccccttccccacccagaccctgagcctgacccccgccagcagcctggtgcccacccccgcccagaccctgagcctggcccccggcccccccctgggccccacccagaccctgagcctggcccccgccccccccctggcccccgccagccccgtgggccccgcccccgcccacaccctgaccctggcccccgccagcagcagcgccagcctgctggcccccgccagcgtgcagaccctgaccctgagccccgcccccgtgcccaccctgggccccgccgccgcccagaccctggccctggcccccgccagcacccagagccccgccagccaggccagcagcctggtggtgagcgccagcggcgccgcccccctgcccgtgaccatggtgagcagactgcccgtgagcaaggacgagcccgacaccctgaccctgagaagcggcccccccagcccccccagcaccgccaccagcttcggcggccccagacccagaagacagcccccccccccccccagaagccccttctacctggacagcctggaggagaagagaaagagacagagaagcgagagactggagagaatcttccagctgagcgaggcccacggcgccctggcccccgtgtacggcaccgaggtgctggacttctgcaccctgccccagcccgtggccagccccatcggccccagaagccccggccccagccaccccaccttctggacctacaccgaggccgcccacagagccgtgctgttcccccagcagagactggaccagctgagcgagatcatcgagagattcatcttcgtgatgccccccgtggaggcccccccccccagcctgcacgcctgccacccccccccctggctggcccccagacaggccgccttccaggagcagctggccagcgagctgtggcccagagccagacccctgcacagaatcgtgtgcaacatgagaacccagttccccgacctgagactgatccagtacgactgcggcaagctgcagaccctggccgtgctgctgagacagctgaaggccgagggccacagagtgctgatcttcacccagatgaccagaatgctggacgtgctggagcagttcctgacctaccacggccacctgtacctgagactggacggcagcaccagagtggagcagagacaggccctgatggagagattcaacgccgacaagagaatcttctgcttcatcctgagcaccagaagcggcggcgtgggcgtgaacctgaccggcgccgacaccgtggtgttctacgacagcgactggaaccccaccatggacgcccaggcccaggacagatgccacagaatcggccagaccagagacgtgcacatctacagactgatcagcgagagaaccgtggaggagaacatcctgaagaaggccaaccagaagagaatgctgggcgacatggccatcgagggcggcaacttcaccaccgcctacttcaagcagcagaccatcagagagctgttcgacatgcccctggaggagcccagcagcagcagcgtgcccagcgcccccgaggaggaggaggagaccgtggccagcaagcagacccacatcctggagcaggccctgtgcagagccgaggacgaggaggacatcagagccgccacccaggccaaggccgagcaggtggccgagctggccgagttcaacgagaacgacggcttccccgccggcgagggcgaggaggccggcagacccggcgccgaggacgaggagatgagcagagccgagcaggagatcgccgccctggtggagcagctgacccccatcgagagatacgccatgaagttcctggaggccagcctggaggaggtgagcagagaggagctgaagcaggccgaggagcaggtggaggccgccagaaaggacctggaccaggccaaggaggaggtgttcagactgccccaggaggaggaggagggccccggcgccggcgacgagagcagctgcggcaccggcggcggcacccacagaagaagcaagaaggccaaggcccccgagagacccggcaccagagtgagcgagagactgagaggcgccagagccgagacccagggcgccaaccacacccccgtgatcagcgcccaccagaccagaagcaccaccaccccccccagatgcagccccgccagagagagagtgcccagacccgcccccagacccagacccacccccgccagcgcccccgccgccatccccgccctggtgcccgtgcccgtgagcgcccccgtgcccatcagcgcccccaaccccatcaccatcctgcccgtgcacatcctgcccagcccccccccccccagccagatccccccctgcagcagccccgcctgcacccccccccccgcctgcacccccccccccgcccacacccccccccccgcccagacctgcctggtgacccccagcagccccctgctgctgggcccccccagcgtgcccatcagcgccagcgtgaccaacctgcccctgggcctgagacccgaggccgagctgtgcgcccaggccctggccagccccgagagcctggagctggccagcgtggccagcagcgagaccagcagcctgagcctggtgccccccaaggacctgctgcccgtggccgtggagatcctgcccgtgagcgagaagaacctgagcctgacccccagcgcccccagcctgaccctggaggccggcagcatccccaacggccaggagcaggaggcccccgacagcgccgagggcaccaccctgaccgtgctgcccgagggcgaggagctgcccctgtgcgtgagcgagagcaacggcctggagctgccccccagcgccgccagcgacgagcccctgcaggagcccctggaggccgacagaaccagcgaggagctgaccgaggccaagacccccaccagcagccccgagaagccccaggagctggtgaccgccgaggtggccgcccccagcaccagcagcagcgccaccagcagccccgagggccccagccccgccagaccccccagaagaagaaccagcgccgacgtggagatcagaggccagggcaccggcagacccggccagccccccggccccaaggtgctgagaaagctgcccggcagactggtgaccgtggtggaggagaaggagctggtgagaagaagaagacagcagagaggcgccgccagcaccctggtgcccggcgtgagcgagaccagcgccagccccggcagccccagcgtgagaagcatgagcggccccgagagcagcccccccatcggcggcccctgcgaggccgcccccagcagcagcctgcccacccccccccagcagcccttcatcgccagaagacacatcgagctgggcgtgaccggcggcggcagccccgagaacggcgacggcgccctgctggccatcaccccccccgccgtgaagagaagaagaggcagaccccccaagaagaacagaagccccgccgacgccggcagaggcgtggacgaggcccccagcagcaccctgaagggcaagaccaacggcgccgaccccgtgcccggccccgagaccctgatcgtggccgaccccgtgctggagccccagctgatccccggcccccagcccctgggcccccagcccgtgcacagacccaaccccctgctgagccccgtggagaagagaagaagaggcagaccccccaaggccagagacctgcccatccccggcaccatcagcagcgccggcgacggcaacagcgagagcagaacccagccccccccccaccccagccccctgacccccctgccccccctgctggtgtgccccaccgccaccgtggccaacaccgtgaccaccgtgaccatcagcaccagcccccccaagagaaagagaggcagaccccccaagaacccccccagccccagacccagccagctgcccgtgctggacagagacagcaccagcgtgctggagagctgcggcctgggcagaagaagacagccccagggccagggcgagagcgagggcagcagcagcgacgaggacggcagcagacccctgaccagactggccagactgagactggaggccgagggcatgagaggcagaaagagcggcggcagcatggtggtggccgtgatccaggacgacctggacctggccgacagcggccccggcggcctggagctgaccccccccgtggtgagcctgacccccaagctgagaagcaccagactgagacccggcagcctggtgccccccctggagaccgagaagctgcccagaaagagagccggcgcccccgtgggcggcagccccggcctggccaagagaggcagactgcagccccccagccccctgggccccgagggcagcgtggaggagagcgaggccgaggccagcggcgaggaggaggagggcgacggcacccccagaagaagacccggccccagaagactggtgggcaccaccaaccagggcgaccagagaatcctgagaagcagcgccccccccagcctggccggccccgccgtgagccacagaggcagaaaggccaagacctag

SEQ ID NO: 166945 - DNA, 180 bp, Artificial Sequence
  derived and/or modified sequence
atgcagagcagccccagccccgcccacccccagctgcccgtgctgcagacccagatggtgagcgacggcatgaccggcagcaaccccgtgagccccgccagcagcagcagccccgccagcagcggcgccggcggcatcagcccccagcacatcgcccaggacagcagcctggacggctag

SEQ ID NO: 166946 - protein, 112 aa, Artificial Sequence
  derived and/or modified sequence
MKGPPTFCSLLLLSLLLSPDPTAAFLLPPSTACCTQLYRKPLSDKLLRKVIQVELQEADGDCHLQAFVLHLAQRSICIHPQNPSLSQWFEHQERKLHGTLPKLNFGMLRKMG

SEQ ID NO: 166947 - DNA, 339 bp, Artificial Sequence
  derived and/or modified sequence
atgaagggcccacccactttctgtagtttgctcctgctaagcttgcttctgtcacccgatcccacggccgccttcctgctgcctccctctaccgcttgctgcactcaactctatcgaaagccactctccgacaagttactgcggaaggttatccaggtcgaactccaagaggctgacggcgattgccacctgcaggcctttgtccttcatctggcccaacgctctatatgtatccatccccaaaatccttccctgtcacagtggtttgagcaccaagagaggaaactgcacgggactttgcccaagctgaacttcggcatgcttcggaagatgggatag

SEQ ID NO: 166948 - DNA, 339 bp, Artificial Sequence
  derived and/or modified sequence
atgaagggcccccccaccttctgcagcctgctgctgctgagcctgctgctgagcccagaccccacagctgccttcctgctgccccccagcacagcctgctgcacccagctgtacaggaagcccctgagtgacaagctgctgaggaaggtgatccaggtggagctgcaggaggctgatggagactgccacctgcaggcctttgtgctgcacctggcccagaggagcatctgcatccacccccagaaccccagcctgagccagtggtttgagcaccaggagaggaagctgcacggcaccctgcccaagctgaactttggcatgctgaggaagatgggctag

SEQ ID NO: 166949 - DNA, 339 bp, Artificial Sequence
  derived and/or modified sequence
atgaagggcccccccaccttctgcagcctgctgctgctgagcctgctgttaagcccagatccgacagccgcgtttctcctccccccatctaccgcttgttgcacacagctgtatcggaagccacttagcgacaagcttctgagaaaagtgatccaggtagagctgcaggaggccgacggagactgtcacctgcaagcattcgtgctgcatttggcccaacgttctatctgcattcatcctcagaaccccagcctcagccaatggttcgaacaccaggagcgaaagcttcacggtacacttcctaagctcaattttggaatgttgaggaaaatgggctag

SEQ ID NO: 166950 - DNA, 339 bp, Artificial Sequence
  derived and/or modified sequence
atgaaagggcctccaaccttctgctccttgctgctgctctccctgctgctgagtcctgatccaaccgccgctttcctgctgccaccatcaactgcctgttgcacacagctgtatcgaaaacctcttagcgataaactactgcgtaaagtgatccaggtcgagctgcaggaggccgacggagattgccacctgcaagctttcgttttgcatttggcccagagatccatctgcatccatccccagaaccccagtctctctcagtggttcgagcatcaggaaagaaaactgcacggcactcttcccaagctgaacttcgggatgcttaggaagatgggatag

SEQ ID NO: 166951 - DNA, 446 bp, Artificial Sequence
  derived and/or modified sequence
cccagataaaaggtaggggaggaggagagagagagaaggaagagtctaggctgagcaacatgaaggggcccccaaccttctgcagcctcctgctgctgtcattgctcctgagcccagaccctacagcagcattcctactgccacccagcactgcctgctgtactcagctctaccgaaagccactctcagacaagctactgaggaaggtcatccaggtggaactgcaggaggctgacggggactgtcacctccaggctttcgtgcttcacctggctcaacgcagcatctgcatccacccccagaaccccagcctgtcacagtggtttgagcaccaagagagaaagctccatgggactctgcccaagctgaattttgggatgctaaggaaaatgggctgaagcccccaatagccaaataataaagcagcattggataataatttctga

SEQ ID NO: 166952 - DNA, 339 bp, Artificial Sequence
  derived and/or modified sequence
atgaagggcccccccaccttctgcagcctgctgctgctgagcctgctgctgagccccgaccccaccgccgccttcctgctgccccccagcaccgcctgctgcacccagctgtacagaaagcccctgagcgacaagctgctgagaaaggtgatccaggtggagctgcaggaggccgacggcgactgccacctgcaggccttcgtgctgcacctggcccagagaagcatctgcatccacccccagaaccccagcctgagccagtggttcgagcaccaggagagaaagctgcacggcaccctgcccaagctgaacttcggcatgctgagaaagatgggctag

SEQ ID NO: 166953 - protein, 463 aa, Artificial Sequence
  derived and/or modified sequence
MATVTATTKVPEIRDVTRIERIGAHSHIRGLGLDDALEPRQASQGMVGQLAARRAAGVVLEMIREGKIAGRAVLIAGQPGTGKTAIAMGMAQALGPDTPFTAIAGSEIFSLEMSKTEALTQAFRRSIGVRIKEETEIIEGEVVEIQIDRPATGTGSKVGKLTLKTTEMETIYDLGTKMIESLTKDKVQAGDVITIDKATGKISKLGRSFTRARDYDAMGSQTKFVQCPDGELQKRKEVVHTVSLHEIDVINSRTQGFLALFSGDTGEIKSEVREQINAKVAEWREEGKAEIIPGVLFIDEVHMLDIESFSFLNRALESDMAPVLIMATNRGITRIRGTSYQSPHGIPIDLLDRLLIVSTTPYSEKDTKQILRIRCEEEDVEMSEDAYTVLTRIGLETSLRYAIQLITAASLVCRKRKGTEVQVDDIKRVYSLFLDESRSTQYMKEYQDAFLFNELKGETMDTS

SEQ ID NO: 166954 - DNA, 1392 bp, Artificial Sequence
  derived and/or modified sequence
atggcgacagtgacggctactacgaaggtgcctgaaattagagatgtgacccgaatcgagcggataggcgctcattcacacatccgagggcttggacttgacgacgcactggagccacgccaagccagccaggggatggtgggccagctcgctgcccgtcgggccgcgggggtggtactagaaatgatcagggaaggaaaaatcgcggggcgagccgtattgatcgccggccagcctgggaccggcaagacagctattgcgatgggaatggctcaggctttgggaccagataccccatttactgctatcgctggtagcgagatcttttccctggaaatgagtaagactgaggctcttacgcaagccttccgacgctcaattggggtccgaattaaggaggagactgaaattattgagggcgaagttgtcgagatccagattgacaggcctgcgacaggcaccgggagcaaggttggtaagttgaccttgaagactaccgaaatggaaacaatctatgacctgggcacaaaaatgattgaaagcctcacaaaagacaaggtgcaagctggcgatgtgattacaattgacaaagctacaggaaaaataagtaagctagggcggagttttactagagctagggattacgacgccatgggaagccagactaaattcgtgcagtgccctgatggagagcttcaaaagcgcaaggaggttgtccataccgtatcactgcacgagatagatgtgattaattcccgcactcagggttttcttgctctgtttagcggcgatactggtgaaataaaatccgaggtgagggaacaaattaacgccaaagtagcagaatggcgcgaagagggcaaggctgagattatccctggtgtactctttattgatgaggtgcatatgctggacattgagagttttagttttctgaaccgggccctcgagtcagatatggcccctgttctgattatggccactaaccgagggatcacaagaattcggggaacttcctatcagtcgcctcacggcatcccaattgatctgctcgacaggttgctcatcgtaagcaccacaccgtactctgagaaagacactaaacagatactgcggatcaggtgtgaagaagaggatgtcgagatgtccgaggacgcctacaccgtgctgacaaggatcgggctggagaccagcctccggtacgctatacagctaataaccgctgcctccctcgtgtgtagaaagcggaagggcactgaggtgcaggtagatgatataaagcgcgtgtactcattgttcctggacgaaagtcgatcaactcagtacatgaaggagtaccaggacgcattcctgtttaatgaattgaaaggtgagactatggacacatcatag

SEQ ID NO: 166955 - DNA, 1392 bp, Artificial Sequence
  derived and/or modified sequence
atggctacggtcacggccacaaccaaagtccctgaaattagggatgtaacgcggatcgagcgtatcggcgcccattcgcatataaggggcctcgggcttgacgacgcgctggaaccacggcaagcttcgcagggcatggtcgggcagcttgcagcccgtcgggcggcaggagttgttctggagatgatccgtgaaggtaagatcgctgggagagccgttctaattgcaggtcagcccggcacaggcaagaccgccattgctatgggaatggcccaggcactgggacccgatacgcccttcaccgctatagcggggagcgagatattcagtctggagatgtcaaagacagaggccctcactcaggcatttcggaggagcatcggggtgcgtatcaaggaagaaaccgaaatcatcgaaggcgaggtggttgagatccagatcgatagacctgccaccgggacggggtcgaaggttggcaaacttactctgaaaactactgaaatggaaacaatctacgatctgggtactaaaatgattgagagcctgacgaaggataaggttcaagcaggagatgtgattaccatcgataaagccaccggcaagatttctaagctgggtcggtcattcacaagggcaagggactatgatgccatgggatctcaaaccaaattcgtccagtgccctgacggagagttacagaaacgaaaagaggttgtgcacactgttagcttgcacgaaattgacgtgattaatagtcgtacgcaaggcttcctagcccttttctctggagacacaggggaaattaaatccgaggtgagagaacaaatcaacgccaaagtggccgaatggcgtgaagaggggaaagctgaaatcattccgggggttctgttcatagacgaagtgcacatgcttgatatcgaatccttttcttttctgaaccgagccctcgaaagcgatatggcacctgtcctgatcatggctactaaccggggcatcactcgaatccggggcaccagctaccagagtccccacgggatccctattgatctccttgaccggttgctgattgtaagtaccactccctattctgagaaggataccaagcagattctgcgcatccgctgcgaggaggaagacgtcgaaatgagcgaagacgcctacactgttctcacccgtattgggcttgagacgtcactcagatatgcaattcagctgataaccgcagcctcattggtctgcagaaaaaggaaggggaccgaggttcaggttgatgacatcaagagagtctattcactgttcctggatgagtctaggtccacccaatacatgaaagaataccaggacgctttcttgttcaacgagctgaagggagagaccatggatacaagctag

SEQ ID NO: 166956 - DNA, 1392 bp, Artificial Sequence
  derived and/or modified sequence
atggccaccgtgacagccaccaccaaggtgcctgagatcagagatgtgaccagaattgagcgcatcggggcccacagccacatccggggcctgggcctggatgatgccctggagccccggcaggccagccagggcatggtgggccagctggccgccaggagagctgctggggtggtgctggagatgatccgggagggcaagattgctggccgggctgtgctgattgctggccagcccggcaccgggaagacagccatcgccatgggcatggcccaggccctgggccctgacacccccttcaccgccatcgccggcagcgagatcttcagcctggagatgagcaagacagaggccctgacccaggccttccgccgcagcattggagtgcgcatcaaggaggagacagagatcatcgagggggaggtggtggagatccagattgacaggcctgccaccggcaccggcagcaaggtgggcaagctgaccctgaagaccacagagatggagaccatctatgacctgggcaccaagatgattgagagcctgaccaaggacaaggtgcaggccggagatgtgatcaccatcgacaaggccaccgggaagatcagcaagctgggccgctccttcacccgggcccgggactatgatgccatgggcagccagaccaagtttgtgcagtgcccagatggagagctgcagaagaggaaggaggtggtgcacacagtgtccctgcatgaaattgatgtgatcaacagcaggacccagggcttcctggccctcttcagcggggacacaggagagatcaagtctgaggtgcgggagcagatcaatgccaaggtggccgagtggagggaggagggcaaggccgagatcatccctggggtgctcttcattgatgaggtgcacatgctggacatcgagagcttctccttcctgaacagagccctggagagtgacatggcccctgtgctgatcatggccaccaacagaggcatcacccgcatccggggcaccagctaccagagcccccacggcatccccatcgacctgctggaccggctgctgattgtgtccaccaccccctacagcgagaaggacaccaagcagatcctgcgcatccgctgtgaggaggaggatgtggagatgtctgaagatgcctacacagtgctgaccagaattggcctggagaccagcctgcgctatgccatccagctgatcacagctgccagcctggtgtgcaggaagaggaaaggaacagaggtgcaggtggatgacatcaagagggtgtacagcctcttcctggatgagagccgcagcacccagtacatgaaggagtaccaggatgccttcctgttcaatgagctgaagggggagaccatggacaccagctag

SEQ ID NO: 166957 - DNA, 1392 bp, Artificial Sequence
  derived and/or modified sequence
atggccaccgtgaccgccaccaccaaggtgcccgagatccgggacgtcacaaggattgaacgcatcggggcacatagtcatataagagggctgggccttgatgacgccctcgaacctagacaggctagccaggggatggttggccagctggccgccagacgtgcggcaggggtggttctggagatgatccgcgaaggcaagattgcaggcagggcagttcttattgcaggccaacctggaacgggtaagaccgccatcgccatgggaatggctcaagcactgggacccgacacccccttcactgctatcgccgggtctgagatcttctccctggagatgtctaagaccgaggcactaactcaagctttcagacggagtattggggtgaggattaaggaagagaccgaaattattgaaggcgaggttgtcgagattcagatcgatcggcctgctactggcaccggatcaaaggtaggcaagctaacccttaaaacgactgagatggaaacaatctatgatctgggaactaagatgatcgagagtcttacaaaagataaggtccaggcaggggatgttattaccattgataaagccacagggaaaatcagtaaactgggcagatcgtttactagggccagggattacgacgcgatggggagccagacaaagttcgtgcagtgccccgacggggagctgcaaaagcgcaaggaagtcgtccataccgtcagcctgcatgagatagacgtaattaacagccgtactcagggcttcctggcattattttctggggatactggagagatcaagtccgaggtgagggagcaaattaatgctaaggtcgctgagtggagagaagaaggaaaggcggaaattattcccggggtgctgttcatcgatgaggtgcacatgctcgatattgagtccttcagctttttaaacagggccctggagagcgatatggcccctgtgctcattatggctactaatcgcgggatcacccggatccgcggaacatcataccagtcaccacacggcattcccattgatttattggatcggctgcttatagtgtctacaaccccctactcagaaaaggacaccaaacagatccttcgtattcgctgcgaagaggaggacgttgagatgagcgaggatgcatacaccgtcctcacccgcataggtctggaaacctccttaagatacgccatccagctgataaccgcggcatctctggtgtgcagaaaacgaaaaggcactgaagtgcaagtcgatgacatcaaaagggtctatagcctctttctcgatgaaagtcgatctacccagtacatgaaggagtatcaggacgcattcctgttcaatgaactgaagggggaaactatggatacctcatag

SEQ ID NO: 166958 - DNA, 1392 bp, Artificial Sequence
  derived and/or modified sequence
atggccaccgtgaccgccaccaccaaggtgcccgagatccgggacgtcactcgcatcgagaggatcggcgcccatagtcacatcagaggtttgggtctggacgatgccctggagccccggcaagcgagtcaggggatggttgggcagctagcggcccggcgcgccgctggggtcgtcctggaaatgatccgagagggaaagatagctggccgtgcagttttgatcgctggccagcccgggaccggcaaaaccgccattgctatgggtatggcccaggccttggggcctgacacgcctttcactgctatagcagggagcgaaatttttagtttggagatgagcaaaaccgaggcattgacccaggcctttaggaggtcgatcggggttcggattaaagaggaaactgaaataatcgagggcgaggtggtcgaaatccagatcgatcgacccgccaccgggaccgggagcaaagttgggaagttgacccttaaaactaccgagatggagacaatttatgatcttgggaccaaaatgattgagtctctaaccaaggataaggtgcaggcaggtgatgtcatcactatcgacaaggcgactggaaagatctcaaagttaggaaggagcttcacacgcgcacgagactatgacgccatgggatcccagacaaagtttgttcaatgccccgacggcgagctgcagaaaagaaaggaggttgttcatacggtaagtctccatgagatagacgtgattaacagccgcacacagggattcttggccctgttttccggggacactggtgaaatcaaatctgaagtcagagagcaaatcaacgctaaggtggccgagtggcgggaggagggcaaggccgaaataattccaggggtgctgtttatcgatgaggtccatatgttggacatcgagagcttttccttcctcaatagggcactggaaagtgatatggctccagtgctcatcatggccactaaccggggaataactagaatccggggcacctcctatcaaagtcctcacggtataccaatcgatctcttggacaggctgctgatagtctcgacgacaccatacagcgagaaagacacaaaacagatcctcaggatccgctgtgaggaggaagatgttgagatgagcgaagacgcctatactgtgttgacaagaattgggctagaaacgtcgctgcggtatgccatacagttgatcacagcagcgtcactagtctgccggaagcgaaagggtacagaagtgcaggtcgatgatataaagcgcgtatacagcctgtttctggacgagagcagaagcacccagtatatgaaggagtaccaggatgctttcttgttcaatgaactcaagggcgagaccatggacaccagctag

SEQ ID NO: 166959 - DNA, 1392 bp, Artificial Sequence
  derived and/or modified sequence
atggctaccgtgactgcaaccacaaaggttcccgaaattcgggatgtgaccagaatcgaacgcataggagctcacagtcacattagggggctcggtcttgacgacgctctggagccaaggcaagcttcccagggcatggtcgggcaactggcggcacgtcgcgctgccggagtggtgctggagatgattagagaggggaagatagccggaagggctgttctgattgcaggacagccaggcaccggcaaaactgccattgccatggggatggctcaagctctggggcctgatacgccttttaccgctattgcaggcagtgaaatcttctccctcgaaatgtccaagacggaggcacttacacaggctttcaggcggagtattggcgtgcgcatcaaggaggagaccgagattattgagggtgaggtagttgagatccaaatcgatcgtccagcaacaggaacagggtcaaaggtggggaaacttactctgaaaaccactgaaatggagaccatatacgatttagggactaaaatgattgaaagcctcacaaaggacaaggtgcaggccggagatgtgatcaccatcgacaaagccaccggaaagatctctaaattgggcagaagcttcaccagagcacgcgactatgacgcaatgggttcacaaacaaaattcgtccagtgccctgatggagagttgcaaaagaggaaagaggtagtgcatactgtctctttgcacgagattgatgtcataaatagtagaacacaggggttcctggcgttattctctggagacaccggagaaattaagtccgaggtgcgagaacagatcaacgcaaaagttgcggaatggcgggaagagggtaaggcagaaatcatcccgggagtactatttattgacgaggtgcatatgcttgacattgaatcattttcatttttgaatcgggcattagagagcgatatggcacccgtgctgatcatggccacgaacagaggaattacaagaatcagaggaaccagctaccagtcacctcatggcattcccattgacctgctggaccggctgttaatcgtcagtacaactccatactctgaaaaggatacaaagcagatccttcgcattcgatgcgaagaagaggacgtggaaatgagcgaagatgcctacactgtattgacaagaattggcttagaaactagcttaagatatgcgatacagctcatcactgcagccagcttagtatgtagaaaacgcaaggggacagaagtgcaggtcgatgacattaagcgcgtatattctttgtttttagatgagagccgcagcacccagtacatgaaagagtatcaggacgcgttcctgtttaatgagctgaagggtgaaaccatggatacaagttag

SEQ ID NO: 166960 - DNA, 1392 bp, Artificial Sequence
  derived and/or modified sequence
atggctaccgttaccgcgaccactaaggtgcctgaaattcgcgacgtcaccaggattgagcgcattggagcccacagccacatccgtggcttgggcttggacgacgccctcgagcctagacaggcgagtcaaggaatggtgggccaactcgcggcacgcagggccgcaggagtggtgctggagatgatcagagagggcaaaatcgcgggtcgggctgtgcttatcgccggtcagccgggaaccggtaaaacagccatcgcaatgggcatggctcaggctttgggaccagatacaccctttacggctatcgcagggtcagagatattttcactggagatgagcaaaacggaggccttgacacaggcctttcgtcgctccatcggcgtgcggataaaggaagagaccgagatcatcgagggtgaagtggtggaaattcagattgatcggcctgccactggaactggttctaaggtaggaaaactcaccttgaagactaccgaaatggagaccatctatgacctgggcactaaaatgatcgaatcccttaccaaggataaagtacaggctggcgacgtcattaccatagataaggcaaccggtaagatttcgaaactgggacggagttttacacgcgctcgtgattacgatgccatgggctcccagaccaaatttgtgcaatgcccagatggcgaactacagaagaggaaggaggtcgtgcatactgtgtccttacacgagatcgatgtcattaactcccggacccagggcttcctggccctgttttccggtgacactggggaaatcaagtccgaggtgcgagaacagatcaacgccaaggtggcagaatggcgcgaggagggcaaagcagaaatcattcccggagtgctcttcatagatgaagtgcatatgctcgatattgagtctttttccttcttgaacagggccctggagtctgatatggctcccgtcctgatcatggcaaccaatcgcggtataaccagaattcgcggtacatcctatcagtcccctcacgggatcccgattgaccttctagacagactactgatcgtctcaacgacaccttacagtgagaaagatacaaaacaaattcttcgcataagatgtgaggaagaggacgtggagatgtccgaggacgcctacacagttctgactcgcatcggtctggaaactagccttcggtacgctatacagcttataacagctgcttctctggtgtgccgaaagcgcaaaggtacggaagtgcaggttgacgacattaagcgagtctacagtcttttcctcgacgaaagccggtcaacccagtatatgaaagagtatcaagatgcttttttgttcaacgagctgaaaggggagacaatggatacgtcctag

SEQ ID NO: 166961 - DNA, 1488 bp, Artificial Sequence
  derived and/or modified sequence
gttggtgagcatcatggcaaccgttacagccacaaccaaagtcccggagatccgtgatgtaacaaggattgagcgaatcggtgcccactcccacatccggggactggggctggacgatgccttggagcctcggcaggcttcgcaaggcatggtgggtcagctggcggcacggcgggcggctggcgtggtgctggagatgatccgggaagggaagattgccggtcgggcagtccttattgctggccagccgggcacggggaagacggccatcgccatgggcatggcgcaggccctgggccctgacacgccattcacagccatcgccggcagtgaaatcttctccctggagatgagcaagaccgaggcgctgacgcaggccttccggcggtccatcggcgttcgcatcaaggaggagacggagatcatcgaaggggaggtggtggagatccagattgatcgaccagcaacagggacgggctccaaggtgggcaaactgaccctcaagaccacagagatggagaccatctacgacctgggcaccaagatgattgagtccctgaccaaggacaaggtccaggccggggacgtgatcaccatcgacaaggcgacgggcaagatctccaagctgggccgctccttcacacgcgcccgcgactacgacgctatgggctcccagaccaagttcgtgcagtgcccagatggggagctccagaaacgcaaggaggtggtgcacaccgtgtccctgcacgagatcgacgtcatcaactctcgcacccagggcttcctggcgctcttctcaggtgacacaggggagatcaagtcagaagtccgtgagcagatcaatgccaaggtggctgagtggcgcgaggagggcaaggcggagatcatccctggagtgctgttcatcgacgaggtccacatgctggacatcgagagcttctccttcctcaaccgggccctggagagtgacatggcgcctgtcctgatcatggccaccaaccgtggcatcacgcgaatccggggcaccagctaccagagccctcacggcatccccatagacctgctggaccggctgcttatcgtctccaccaccccctacagcgagaaagacacgaagcagatcctccgcatccggtgcgaggaagaagatgtggagatgagtgaggacgcctacacggtgctgacccgcatcgggctggagacgtcactgcgctacgccatccagctcatcacagctgccagcttggtgtgccggaaacgcaagggtacagaagtgcaggtggatgacatcaagcgggtctactcactcttcctggacgagtcccgctccacgcagtacatgaaggagtaccaggacgccttcctcttcaacgaactcaaaggcgagaccatggacacctcctgagttggatgtcatcccccgaccccaccctgttttccaccagagttctgacactgtgactctgtataaaatggttgggaagctgc

SEQ ID NO: 166962 - DNA, 2488 bp, Artificial Sequence
  derived and/or modified sequence
atcatggcaaccgttgtaagtgtgggtgcatggagggtgaggagcgagctagcagtctcgagtttgagagaggaggatgctggaggccctgactcctgggtctgagggaggggggatctgggggttcagactcctgggtctgaaagaggaggaagctcggccacccagatctgggggagaaggggacatgggggctggacttctggatctgaggcggggagggggctgggatcccagaatctcgggtctggccccatcatgctataggaactccaactttcaaaatcatcttggcgcaacggccggttccgcagtccttggcgccagtgtgtgatgaggagggttgtaggaccttgcgcttcgagccatttgggagccttggattgttagtggtgccaatggcacttgagttccaagctggaagcacaggcaggtacctgttcagtgtgtctgagagcgcgagggcgcctagtgagcctttagtgggaagaaattgtcgaggaacaagagagtcttagtggagaggactgaaggattagggacccagaaatcgggatcttgtcatgctaccgttttggccattttcatatttccagtatttcacacgggctacgtctcagtgtaaatgctcaataaattatcacttgaatatttgaatgaatgaatacatgtgaatgaaggagaggccaggaaacttggcctggcacctgctcaattacctgaataaagaagcgattttggcctggcgtggtggctcatgcctgtaatcccagcactttgggaggccgaggcgggcggatcacttcaggtcaggagttcgtggccaacattgcgaaaccccgtctctattaaaaatacaaaaattagccaggtgtggtggtgcaggcctgtaatcccagctactcagaaggctgaggcaggagaatcgcttgaacctgggaggcagaagttgcagtgagccaagatcgcgccactgcattccagcctgggcgacaaagcgagactctgtctccaaaaaaaaaaagacagccacaaccaaagtcccggagatccgtgatgtaacaaggattgagcgaatcggtgcccactcccacatccggggactggggctggacgatgccttggagcctcggcaggcttcgcaaggcatggtgggtcagctggcggcacggcgggcggctggcgtggtgctggagatgatccgggaagggaagattgccggtcgggcagtccttattgctggccagccgggcacggggaagacggccatcgccatgggcatggcgcaggccctgggccctgacacgccattcacagccatcgccggcagtgaaatcttctccctggagatgagcaagaccgaggcgctgacgcaggccttccggcggtccatcggcgttcgcatcaaggaggagacggagatcatcgaaggggaggtggtggagatccagattgatcgaccagcaacagggacgggctccaaggtgggcaaactgaccctcaagaccacagagatggagaccatctacgacctgggcaccaagatgattgagtccctgaccaaggacaaggtccaggccggggacgtgatcaccatcgacaaggcgacgggcaagatctccaagctgggccgctccttcacacgcgcccgcgactacgacgctatgggctcccagaccaagttcgtgcagtgcccagatggggagctccagaaacgcaaggaggtggtgcacaccgtgtccctgcacgagatcgacgtcatcaactctcgcacccagggcttcctggcgctcttctcaggtgacacaggggagatcaagtcagaagtccgtgagcagatcaatgccaaggtggctgagtggcgcgaggagggcaaggcggagatcatccctggagtgctgttcatcgacgaggtccacatgctggacatcgagagcttctccttcctcaaccgggccctggagagtgacatggcgcctgtcctgatcatggccaccaaccgtggcatcacgcgaatccggggcaccagctaccagagccctcacggcatccccatagacctgctggaccggctgcttatcgtctccaccaccccctacagcgagaaagacacgaagcagatcctccgcatccggtgcgaggaagaagatgtggagatgagtgaggacgcctacacggtgctgacccgcatcgggctggagacgtcactgcgctacgccatccagctcatcacagctgccagcttggtgtgccggaaacgcaagggtacagaagtgcaggtggatgacatcaagcgggtctactcactcttcctggacgagtcccgctccacgcagtacatgaaggagtaccaggacgccttcctcttcaacgaactcaaaggcgagaccatggacacctcctgagttggatgtcatcccccgaccccaccctgttttccaccagagttctgacactgtgactctgtataaaatggttgggaagctgc

SEQ ID NO: 166963 - DNA, 2009 bp, Artificial Sequence
  derived and/or modified sequence
gtgtcccggccccgcctcggccgtgagacctccagggggcggagcttgccgctgcgctttacggaaacgagtggccttcagctctgtcaatctggagctggaggcctcaaagtggggaggaggaggagggtgggataaagaggaaaggagcgtggaggacgtgtggttactcaaagaacagctaagaattttgcaatcggcctgagcggggcggtggtggggctgagcaaaaggaggaggagccaggagacattgggaatggacccaggagttccggacgcccgtcttccagcgcagcctcggtgggagggcggggcataaagtcccgccacgcccccacaatatttacatatttatgaggaaccatcgagatctttgaagaaccagctagcctagaggagccagaacatctcgctcctcgcgcgtttccgtttccgctaggactctggcagttggtgagcatcatggcaaccgttacagccacaaccaaagtcccggagatccgtgatgtaacaaggattgagcgaatcggtgcccactcccacatccggggactggggctggacgatgccttggagcctcggcaggcttcgcaaggcatggtgggtcagctggcggcacggcgggcggctggcgtggtgctggagatgatccgggaagggaagattgccggtcgggcagtccttattgctggccagccgggcacggggaagacggccatcgccatgggcatggcgcaggccctgggccctgacacgccattcacagccatcgccggcagtgaaatcttctccctggagatgagcaagaccgaggcgctgacgcaggccttccggcggtccatcggcgttcgcatcaaggaggagacggagatcatcgaaggggaggtggtggagatccagattgatcgaccagcaacagggacgggctccaaggtgggcaaactgaccctcaagaccacagagatggagaccatctacgacctgggcaccaagatgattgagtccctgaccaaggacaaggtccaggccggggacgtgatcaccatcgacaaggcgacgggcaagatctccaagctgggccgctccttcacacgcgcccgcgactacgacgctatgggctcccagaccaagttcgtgcagtgcccagatggggagctccagaaacgcaaggaggtggtgcacaccgtgtccctgcacgagatcgacgtcatcaactctcgcacccagggcttcctggcgctcttctcaggtgacacaggggagatcaagtcagaagtccgtgagcagatcaatgccaaggtggctgagtggcgcgaggagggcaaggcggagatcatccctggagtgctgttcatcgacgaggtccacatgctggacatcgagagcttctccttcctcaaccgggccctggagagtgacatggcgcctgtcctgatcatggccaccaaccgtggcatcacgcgaatccggggcaccagctaccagagccctcacggcatccccatagacctgctggaccggctgcttatcgtctccaccaccccctacagcgagaaagacacgaagcagatcctccgcatccggtgcgaggaagaagatgtggagatgagtgaggacgcctacacggtgctgacccgcatcgggctggagacgtcactgcgctacgccatccagctcatcacagctgccagcttggtgtgccggaaacgcaagggtacagaagtgcaggtggatgacatcaagcgggtctactcactcttcctggacgagtcccgctccacgcagtacatgaaggagtaccaggacgccttcctcttcaacgaactcaaaggcgagaccatggacacctcctgagttggatgtcatcccccgaccccaccctgttttccaccagagttctgacactgtgactctgtataaaatggttgggaagctgcacccaccctgtgtatgtgtggttgccctgagcccacagaaagacacctccagagtgcggattgagaagcc

SEQ ID NO: 166964 - DNA, 1392 bp, Artificial Sequence
  derived and/or modified sequence
atggccaccgtgaccgccaccaccaaggtgcccgagatcagagacgtgaccagaatcgagagaatcggcgcccacagccacatcagaggcctgggcctggacgacgccctggagcccagacaggccagccagggcatggtgggccagctggccgccagaagagccgccggcgtggtgctggagatgatcagagagggcaagatcgccggcagagccgtgctgatcgccggccagcccggcaccggcaagaccgccatcgccatgggcatggcccaggccctgggccccgacacccccttcaccgccatcgccggcagcgagatcttcagcctggagatgagcaagaccgaggccctgacccaggccttcagaagaagcatcggcgtgagaatcaaggaggagaccgagatcatcgagggcgaggtggtggagatccagatcgacagacccgccaccggcaccggcagcaaggtgggcaagctgaccctgaagaccaccgagatggagaccatctacgacctgggcaccaagatgatcgagagcctgaccaaggacaaggtgcaggccggcgacgtgatcaccatcgacaaggccaccggcaagatcagcaagctgggcagaagcttcaccagagccagagactacgacgccatgggcagccagaccaagttcgtgcagtgccccgacggcgagctgcagaagagaaaggaggtggtgcacaccgtgagcctgcacgagatcgacgtgatcaacagcagaacccagggcttcctggccctgttcagcggcgacaccggcgagatcaagagcgaggtgagagagcagatcaacgccaaggtggccgagtggagagaggagggcaaggccgagatcatccccggcgtgctgttcatcgacgaggtgcacatgctggacatcgagagcttcagcttcctgaacagagccctggagagcgacatggcccccgtgctgatcatggccaccaacagaggcatcaccagaatcagaggcaccagctaccagagcccccacggcatccccatcgacctgctggacagactgctgatcgtgagcaccaccccctacagcgagaaggacaccaagcagatcctgagaatcagatgcgaggaggaggacgtggagatgagcgaggacgcctacaccgtgctgaccagaatcggcctggagaccagcctgagatacgccatccagctgatcaccgccgccagcctggtgtgcagaaagagaaagggcaccgaggtgcaggtggacgacatcaagagagtgtacagcctgttcctggacgagagcagaagcacccagtacatgaaggagtaccaggacgccttcctgttcaacgagctgaagggcgagaccatggacaccagctag

SEQ ID NO: 166965 - protein, 195 aa, Artificial Sequence
  derived and/or modified sequence
MAAEDVVATGADPSDLESGGLLHEIFTSPLNLLLLGLCIFLLYKIVRGDQPAASGDSDDDEPPPLPRLKRRDFTPAELRRFDGVQDPRILMAINGKVFDVTKGRKFYGPEGPYGVFAGRDASRGLATFCLDKEALKDEYDDLSDLTAAQQETLSDWESQFTFKYHHVGKLLKEGEEPTVYSDEEEPKDESARKND

SEQ ID NO: 166966 - DNA, 588 bp, Artificial Sequence
  derived and/or modified sequence
atggcagcagaggacgtggtggcaacgggcgccgatcctagcgatctggagtcaggaggcctgctgcacgaaatattcactagccccctgaacctgctgttacttggactctgtatcttcctcctctacaaaattgtccgcggcgatcagcctgcagccagcggggattccgacgatgatgaaccgccaccactcccccgcctcaagcgtcgggacttcacacccgcagagttgcggaggtttgacggggttcaggaccctagaatcctcatggcaattaatggcaaggttttcgatgtgacaaaggggcgcaaattttacgggcccgaaggcccctacggagtgtttgccgggcgggatgcttcgagaggtttagctactttttgcttggacaaagaggctctgaaagatgagtatgacgatttaagcgatcttaccgccgctcagcaagaaaccctatctgactgggagtctcagtttactttcaaataccaccatgtggggaagttactgaaagagggtgaggagccaacagtatactcagacgaagaagaacccaaggacgagtctgcaagaaagaacgactag

SEQ ID NO: 166967 - DNA, 588 bp, Artificial Sequence
  derived and/or modified sequence
atggctgctgaagatgtggtggccactggagctgaccccagcgacctggagagcggcggcctgctgcacgagatcttcaccagccccctgaacctgctgctgctgggcctgtgcatcttcctgctgtacaagatcgtgcggggggaccagcctgctgccagcggggacagtgatgatgatgagcccccacccctgccccggctgaagaggcgggacttcaccccagctgagctgcggagatttgatggagtgcaggacccccgcatcctgatggccatcaacgggaaggtgtttgatgtgaccaagggcaggaagttctacggccctgagggcccctatggagtgtttgctggaagagatgccagccggggcctggccaccttctgcctggacaaggaggccctgaaggatgaatatgatgacctgagtgacctgacagctgcccagcaggagaccctgagtgactgggagagccagttcaccttcaagtaccaccacgtgggcaagctgctgaaggagggggaggagcccaccgtgtacagtgatgaggaggagcccaaggatgagagcgccaggaagaatgactag

SEQ ID NO: 166968 - DNA, 588 bp, Artificial Sequence
  derived and/or modified sequence
atggccgccgaggacgtggtggccaccggcgccgaccccagcgacctcgagtccggcggactccttcatgagatatttacaagccctctaaacctgctgcttctgggcctctgtatatttctgctgtacaagatcgtgaggggagatcaaccagccgcaagcggcgattctgatgatgacgaacctcctcccctgcccagactcaagcgtagagatttcacacctgcagagctgcggaggtttgacggcgtgcaagatcctagaatcctgatggcgatcaacggtaaagtgttcgatgtaacgaaggggcgaaagttttatggccccgaaggaccctatggtgtgttcgccggtcgcgatgctagcagaggattggcaactttctgtctcgacaaggaagctctaaaagatgagtatgacgacctgtcggacctgaccgccgcccagcaggagactctctccgactgggagtctcagtttacatttaagtaccaccatgtgggtaaattgcttaaggaaggggaggagccaacggtttactcagacgaagaagagccaaaggatgagagcgccagaaagaacgactag

SEQ ID NO: 166969 - DNA, 588 bp, Artificial Sequence
  derived and/or modified sequence
atggccgctgaggatgtggtcgcaaccggagctgatccaagcgatcttgagtcagggggacttctgcacgaaattttcacatcccctctaaaccttctgctgctgggtttgtgcattttcctgctgtacaagattgtgcgcggagaccagccggcagcctcaggagattccgatgatgatgaaccgcctcccttacctcgattaaagcggcgagattttacgccagccgaactcagacgatttgacggcgtacaggacccccgaatattgatggctataaacggcaaagtttttgacgttacaaaaggacgcaaattctacggcccagaaggcccatatggcgtgttcgctggaagggacgcttcccgaggcctcgccacattctgtctggacaaggaagctctgaaagatgaatacgatgacctttccgacctcaccgctgcacagcaggagaccctctcagactgggagtcccagttcacattcaagtaccaccacgtaggaaaattacttaaggaaggggaggagccaacagtatactcagacgaggaggagccaaaagatgagtctgccagaaagaacgactag

SEQ ID NO: 166970 - DNA, 588 bp, Artificial Sequence
  derived and/or modified sequence
atggccgccgaggacgtggtggccaccggcgccgaccccagcgacctggagagcggcggcctgctgcacgagatcttcaccagccccctgaacctgctgctgctgggcctgtgcatcttcctgctgtacaagatcgtgagaggcgaccagcccgccgccagcggcgacagcgacgacgacgagcccccccccctgcccagactgaagagaagagacttcacccccgccgagctgagaagattcgacggcgtgcaggaccccagaatcctgatggccatcaacggcaaggtgttcgacgtgaccaagggcagaaagttctacggccccgagggcccctacggcgtgttcgccggcagagacgccagcagaggcctggccaccttctgcctggacaaggaggccctgaaggacgagtacgacgacctgagcgacctgaccgccgcccagcaggagaccctgagcgactgggagagccagttcaccttcaagtaccaccacgtgggcaagctgctgaaggagggcgaggagcccaccgtgtacagcgacgaggaggagcccaaggacgagagcgccagaaagaacgactag

SEQ ID NO: 166971 - DNA, 1911 bp, Artificial Sequence
  derived and/or modified sequence
tagtctttggccgccgccgaaccccgcgcgccactcgctcgctcagagggaggagaaagtggcgagttccggatccctgcctagcgcggcccaacctttactccagagatcatggctgccgaggatgtggtggcgactggcgccgacccaagcgatctggagagcggcgggctgctgcatgagattttcacgtcgccgctcaacctgctgctgcttggcctctgcatcttcctgctctacaagatcgtgcgcggggaccagccggcggccagcggcgacagcgacgacgacgagccgccccctctgccccgcctcaagcggcgcgacttcacccccgccgagctgcggcgcttcgacggcgtccaggacccgcgcatactcatggccatcaacggcaaggtgttcgatgtgaccaaaggccgcaaattctacgggcccgaggggccgtatggggtctttgctggaagagatgcatccaggggccttgccacattttgcctggataaggaagcactgaaggatgagtacgatgacctttctgacctcactgctgcccagcaggagactctgagtgactgggagtctcagttcactttcaagtatcatcacgtgggcaaactgctgaaggagggggaggagcccactgtgtactcagatgaggaagaaccaaaagatgagagtgcccggaaaaatgattaaagcattcagtggaagtatatctatttttgtattttgcaaaatcatttgtaacagtccactctgtctttaaaacatagtgattacaatatttagaaagttttgagcacttgctataagttttttaattaacatcactagtgacactaataaaattaacttcttagaatgcatgatgtgtttgtgtgtcacaaatccagaaagtgaactgcagtgctgtaatacacatgttaatactgtttttcttctatctgtagttagtacaggatgaatttaaatgtgtttttcctgagagacaaggaagacttgggtatttcccaaaacaggtaaaaatcttaaatgtgcaccaagagcaaaggatcaacttttagtcatgatgttctgtaaagacaacaaatccctttttttttctcaattgacttaactgcatgatttctgttttatctacctctaaagcaaatctgcagtgttccaaagactttggtatggattaagcgctgtccagtaacaaaatgaaatctcaaaacagagctcagctgcaaaaaagcatattttctgtgtttctggactgcactgttgtccttgccctcacatagacactcagacaccctcacaaacacagtagtctatagttaggattaaaataggatctgaacattcaaaagaaagctttggaaaaaaagagctggctggcctaaaaacctaaatatatgatgaagattgtaggactgtcttcccaagccccatgttcatggtggggcaatggttatttggttattttactcaattggttactctcatttgaaatgagggagggacatacagaataggaacaggtgtttgctctcctaagagccttcatgcacacccctgaaccacgaggaaacagtacagtcgctagtcaagtggtttttaaagtaaagtatattcataaggtaacagttattctgttgttataaaactatacccactgcaaaagtagtagtcaagtgtctaggtctttgatattgctcttttggttaacactaagcttaagtagactatacagttgtatgaatttgtaaaagtatatgaacacctagtgagatttcaaacttgtaattgtggttaaatagtcattgtattttcttgtgaactgtgttttatgattttacctcaaatcagaaaacaaaatgatgtgctttggtcagttaataaaaatggttttacccacta

SEQ ID NO: 166972 - protein, 500 aa, Artificial Sequence
  derived and/or modified sequence
MSPGLLLLGSAVLLAFGLCCTFVHRARSRYEHIPGPPRPSFLLGHLPCFWKKDEVGGRVLQDVFLDWAKKYGPVVRVNVFHKTSVIVTSPESVKKFLMSTKYNKDSKMYRALQTVFGERLFGQGLVSECNYERWHKQRRVIDLAFSRSSLVSLMETFNEKAEQLVEILEAKADGQTPVSMQDMLTYTAMDILAKAAFGMETSMLLGAQKPLSQAVKLMLEGITASRNTLAKFLPGKRKQLREVRESIRFLRQVGRDWVQRRREALKRGEEVPADILTQILKAEEGAQDDEGLLDNFVTFFIAGHETSANHLAFTVMELSRQPEIVARLQAEVDEVIGSKRYLDFEDLGRLQYLSQVLKESLRLYPPAWGTFRLLEEETLIDGVRVPGNTPLLFSTYVMGRMDTYFEDPLTFNPDRFGPGAPKPRFTYFPFSLGHRSCIGQQFAQMEVKVVMAKLLQRLEFRLVPGQRFGLQEQATLKPLDPVLCTLRPRGWQPAPPPPPC

SEQ ID NO: 166973 - protein, 403 aa, Artificial Sequence
  derived and/or modified sequence
MSTKYNKDSKMYRALQTVFGERLFGQGLVSECNYERWHKQRRVIDLAFSRSSLVSLMETFNEKAEQLVEILEAKADGQTPVSMQDMLTYTAMDILAKAAFGMETSMLLGAQKPLSQAVKLMLEGITASRNTLAKFLPGKRKQLREVRESIRFLRQVGRDWVQRRREALKRGEEVPADILTQILKAEEGAQDDEGLLDNFVTFFIAGHETSANHLAFTVMELSRQPEIVARLQAEVDEVIGSKRYLDFEDLGRLQYLSQVLKESLRLYPPAWGTFRLLEEETLIDGVRVPGNTPLLFSTYVMGRMDTYFEDPLTFNPDRFGPGAPKPRFTYFPFSLGHRSCIGQQFAQMEVKVVMAKLLQRLEFRLVPGQRFGLQEQATLKPLDPVLCTLRPRGWQPAPPPPPC

SEQ ID NO: 166974 - DNA, 1503 bp, Artificial Sequence
  derived and/or modified sequence
atgtctcctggactgttactgttggggtctgcagtgcttctggctttcgggctctgttgcacttttgtgcacagagcccgaagtcggtacgaacacatccctggcccacccaggccatcgttcctccttggtcacctgccatgcttttggaagaaagacgaggtcggggggcgagtcctccaggacgtctttttggactgggcaaagaagtacgggccagtggttagggtcaacgtttttcacaaaacatctgttatagtgaccagccccgagagtgtaaagaagtttttgatgtccacgaagtacaacaaagattccaagatgtaccgggctttgcagactgtgttcggggagcgcctgtttggacaaggcctagtgagcgagtgcaattatgaaaggtggcacaaacagcgccgcgttatcgacctggctttcagcagaagtagcctggtgtcgctcatggaaaccttcaacgaaaaggcagagcagctggtggaaatcctggaggctaaagccgatggacagacccccgtatccatgcaggacatgctgacgtatacagccatggacatcttagccaaagctgctttcggaatggaaacttcgatgttgctaggcgctcagaagcccctgtcccaagccgttaagctcatgctagagggcattactgccagccggaatacactggcgaagttcttaccagggaagagaaaacagctgcgggaggtcagggagtcaatccgttttctgcgacaggtcggacgcgattgggtgcagaggcgccgcgaggctctgaagagaggcgaagaagtccccgcggacatcttaacccaaatccttaaggccgaagaaggcgctcaggacgacgagggattgttggacaattttgtgacctttttcatcgccggtcacgaaacaagcgccaaccaccttgcgtttaccgtcatggagctgtcacgacagcctgaaatcgtcgctaggctccaggctgaagtggatgaggtgatcggatccaagagatacttggattttgaagacctgggccggctccagtacttgtctcaagtactgaaggaatctctgcgactgtatcctcctgcctggggcacattcagactgctggaggaagagactctcattgacggcgttagagttcctgggaacacccctttgctcttctccacttacgtcatgggacgcatggatacatattttgaagatcccctgacattcaatcccgacaggttcggacccggcgcccctaaaccacgcttcacctactttccattctcattaggtcatcgctcttgcattggccagcagtttgctcagatggaagtgaaagtggttatggcaaaactgctgcagcggctggaatttaggctcgtcccgggtcagaggttcgggctgcaggagcaagctaccctgaagccacttgaccccgtcttgtgcacactgcggccgcgaggatggcagcctgctccccctcctccgccatgttag

SEQ ID NO: 166975 - DNA, 1212 bp, Artificial Sequence
  derived and/or modified sequence
atgagtaccaagtacaataaggattccaagatgtacagagccctccagaccgtcttcggggaaaggctgttcgggcaaggcctggtcagcgaatgtaactatgagagatggcacaagcaacgacgggtcattgatctggcattctccagaagctccctcgtgagtctgatggaaactttcaacgagaaggccgaacagctggtcgagatcctggaggcgaaggcggacggacaaacccctgtgagcatgcaagacatgctcacatatactgccatggacatcctcgctaaagcagcattcggtatggagaccagcatgcttttgggcgctcagaagcccctgtctcaggcggtgaagctaatgctcgaaggaatcacagcatcccgcaacacgctagccaaattcttgccaggtaaacgaaaacagttgagggaggtgcgggagtccattcggttcctgcggcaggtcggtcgcgactgggttcagcgtagacgcgaagcgctgaaacgcggagaggaggttcccgcagatatcctaacgcagatcctaaaggcggaagagggcgcgcaggacgatgaaggcctcttggacaattttgtgaccttctttattgctggccacgaaacttccgcgaatcacttagcctttaccgtaatggaactcagccgtcagcctgagattgtggcaaggctgcaagctgaggtggacgaagtaatcggtagcaagcggtacctcgactttgaagacctaggccgtctgcagtatttgtcccaggtattgaaggaatcactgcggctgtacccgccagcatgggggacatttcgcttgctcgaggaggaaactctgattgatggcgtgagagtgcctgggaacacaccgttgctgttctctacgtatgtaatgggtcggatggatacgtacttcgaagatccattgactttcaatccagacagatttgggccgggggctcctaagccccgcttcacctactttccgttcagtctgggccaccggtcatgtattggacagcagttcgcccagatggaggttaaagtggtcatggcaaagctgctacagagacttgaattcaggctggttcccggtcagcgattcgggctacaagagcaggcaactctgaaaccccttgaccctgttctctgcaccctgcggccaaggggttggcaacccgcaccaccccctccgccctgttag

SEQ ID NO: 166976 - DNA, 1503 bp, Artificial Sequence
  derived and/or modified sequence
atgagccctggcctgctgctgctgggcagcgctgtgctgctggccttcggcctgtgctgcacctttgtgcaccgggcccggagccgctatgagcacatccctggccccccccggcccagcttcctgctgggccacctgccctgcttctggaagaaggatgaggtgggcggccgggtgctgcaggatgtgttcctggactgggccaagaagtatggccctgtggtgcgggtgaatgtgttccacaagaccagcgtcatcgtgaccagccctgagagcgtgaagaagttcctgatgagcaccaagtacaacaaggacagcaagatgtaccgggccctgcagacagtgtttggagagcggctgtttggccagggcctggtgtctgagtgcaactatgagcgctggcacaagcagaggagagtgattgacctggccttcagccgcagcagcctggtgtccctgatggagaccttcaatgagaaggccgagcagctggtggagatcctggaggccaaggcagatggccagacccctgtgtccatgcaggacatgctgacctacacagccatggacatcctggccaaggccgccttcggcatggagacctccatgctgctgggcgcccagaagcccctgagccaggccgtgaagctgatgctggagggcatcacagccagcaggaacaccctggccaagttcctgcccgggaagaggaagcagctgcgggaggtgcgggagagcatccgcttcctgcggcaggtgggccgggactgggtgcagaggagaagagaggccctgaagagaggagaggaggtgcctgctgacatcctgacccagatcctgaaggccgaggagggcgcccaggatgatgagggcctgctggacaactttgtgaccttcttcatcgccggccacgagaccagcgccaaccacctggccttcaccgtgatggagctgagccggcagcctgagatcgtggcccggctgcaggccgaggtggatgaagtcatcggcagcaagcgctacctggactttgaggacctgggccgcctgcagtacctgagccaggtgctgaaggagagcctgcggctgtaccccccagcctggggcaccttccggctgctggaggaggagaccctgattgatggagtgcgggtgcccggcaacacccccctgctcttcagcacctacgtgatgggccgcatggacacctactttgaggaccccctgaccttcaacccagaccgcttcggccctggggcccccaagccccgcttcacctacttccccttcagcctgggccacaggagctgcatcggccagcagtttgcccagatggaggtgaaggtggtgatggccaagctgctgcagaggctggagttccggctggtgcccggccagcgcttcggcctgcaggagcaggccaccctgaagcccctggaccctgtgctgtgcaccctgcggccccggggctggcagcctgcccctcctcctccaccctgctag

SEQ ID NO: 166977 - DNA, 1212 bp, Artificial Sequence
  derived and/or modified sequence
atgagcaccaagtacaacaaggacagcaagatgtaccgggccctgcagacagtgtttggagagcggctgtttggccagggcctggtgtctgagtgcaactatgagcgctggcacaagcagaggagggtcatcgacctggccttcagccgcagcagcctggtgtccctgatggagaccttcaatgagaaggccgagcagctggtggagatcctggaggccaaggcagatggccagacccctgtgtccatgcaggacatgctgacctacacagccatggacatcctggccaaggccgccttcggcatggagacctccatgctgctgggcgcccagaagcccctgagccaggccgtgaagctgatgctggagggcatcacagccagcaggaacaccctggccaagttcctgcccgggaagaggaagcagctgcgggaggtgcgggagagcatccgcttcctgcggcaggtgggccgggactgggtgcagaggcggcgggaggccctgaagagaggagaggaggtgcctgctgacatcctgacccagatcctgaaggccgaggagggcgcccaggatgatgagggcctgctggacaactttgtgaccttcttcatcgccggccacgagaccagcgccaaccacctggccttcaccgtgatggagctgagccggcagcctgagatcgtggcccggctgcaggccgaggtggatgaggtgattggcagcaagcgctacctggactttgaggacctgggccgcctgcagtacctgagccaggtgctgaaggagagcctgcggctgtaccccccagcctggggcaccttccggctgctggaggaggagaccctgattgatggagtgcgggtgcccggcaacacccccctgctcttcagcacctacgtgatgggccgcatggacacctactttgaggaccccctgaccttcaacccagacagatttggacctggggcccccaagccccgcttcacctacttccccttcagcctgggccacaggagctgcatcggccagcagtttgcccagatggaggtgaaggtggtgatggccaagctgctgcagaggctggagttccggctggtgcccggccagagatttggcctgcaggagcaggccaccctgaagcccctggaccctgtgctgtgcaccctgcggccccggggctggcagcctgcccctcctcctccaccctgctag

SEQ ID NO: 166978 - DNA, 1503 bp, Artificial Sequence
  derived and/or modified sequence
atgagccccggcctgctgctgctgggcagcgccgtgctgctggccttcggcctgtgctgtacctttgtgcaccgcgccaggtctaggtatgaacatatcccagggccgccgagaccgtcctttctgctagggcacctcccctgtttctggaagaaggacgaggtgggggggagggttcttcaggacgtgtttctggattgggccaaaaagtatggaccggttgtcagggttaacgtctttcataaaacatccgtgatcgtgacatcacccgagtccgttaagaagtttttgatgagtaccaaatataacaaggattccaaaatgtacagagcactccagactgtgttcggagagaggctatttggccagggtctcgtgagtgaatgtaattacgagaggtggcacaaacagcggagagtgattgacctagcttttagtaggtcctctctggtgtccctgatggagacctttaatgagaaggccgaacagttggtggaaattctggaggccaaagctgacgggcagacccccgtaagcatgcaggatatgctgacgtataccgcaatggatatcttagcaaaagctgccttcgggatggagacttccatgcttctaggggctcagaagccactttcgcaggctgtgaagctgatgcttgaggggatcacagcctcacgtaacaccctggctaagttcttgcctggcaaacgcaagcagttaagagaagtaagggaaagtatcaggttcttaagacaagttggcagagattgggtccaaaggcggagagaggccctgaagcgtggggaggaggtgcctgccgatatactcactcaaattctcaaggctgaagagggagcccaagacgacgaagggctcctagataattttgtaactttctttatagccggtcacgaaacctcggccaaccaccttgcatttaccgtgatggaactgtctaggcagcctgaaatcgtggcaagattgcaagctgaagtggatgaggtgattggcagtaagaggtacctcgatttcgaagacttggggcgtcttcaatacctgtctcaagtactgaaagaaagcctaagattatacccacctgcttggggtaccttcagactcctcgaggaggagactctcatcgacggagtgcgtgtcccggggaataccccactcctcttctccacctacgtaatgggccgaatggatacgtactttgaggatcctctgacctttaacccggataggttcggcccgggggcaccaaaaccgcggttcacatactttcccttttccctcggccaccgctcctgtatcggacagcagttcgcccagatggaagtaaaagtagtgatggccaaactgttacaaaggttagagtttcgcctcgtccctggccagcggttcggtttgcaggaacaagcgacactaaagcctctggaccctgtgctttgcactttgaggcctaggggctggcagccagcaccacctccccctccttgttag

SEQ ID NO: 166979 - DNA, 1212 bp, Artificial Sequence
  derived and/or modified sequence
atgagcaccaagtacaacaaggacagcaagatgtaccgggccctgcagacagtattcggagaacgcttattcggccagggccttgtttcagaatgtaactatgaacgctggcacaagcagaggcgggtcatcgatcttgctttcagtagaagctccctcgtcagccttatggagaccttcaatgaaaaggcggaacagctagttgaaatcctggaggcgaaggccgatggccaaactccagtgtctatgcaggacatgctaacatataccgccatggacatattggcaaaagccgcctttgggatggagacctcgatgctgctgggcgcccagaaacctctgtcccaagccgtcaaactcatgcttgagggaataacggccagccgcaacaccctggcgaagtttctcccaggaaaacgtaagcagctgcgtgaggtgagggaaagcatccgatttttgcgacaagttgggagagattgggtgcagaggagaagggaagcactgaagcggggcgaagaggtgccagccgacatactgactcagatccttaaagccgaggaaggagctcaggatgacgaggggcttctggataatttcgtcacattttttatcgcgggacacgagacttctgccaatcatctggctttcaccgtcatggagctcagcagacagcccgagatcgtggcccggcttcaggcagaagtcgatgaggtgatcggctctaagagatacctggatttcgaggacttaggccggttgcagtacctgtctcaggtccttaaagaaagtcttaggctatacccccccgcctgggggaccttccggttattagaggaggaaaccctgattgacggcgtcagggtgccaggtaataccccactgcttttctccacttatgtgatgggcagaatggatacatatttcgaggatcccctcacctttaaccctgaccgcttcgggccaggggcacccaaaccacggttcacctattttccattttccctgggacaccggagttgcatagggcagcagtttgctcaaatggaggtgaaagttgtaatggcaaagctgctgcagcgtctggaattcagactggtccccgggcagaggttcggcctgcaagaacaggccactctgaagccactggatccagtcctgtgtacactccggccccgaggctggcagccagcccctcccccgccaccatgctag

SEQ ID NO: 166980 - DNA, 1503 bp, Artificial Sequence
  derived and/or modified sequence
atgtcaccgggtctcctgctcctggggagtgcagtcctcctggcctttgggctgtgttgcacctttgtccacagagctcgaagtagatacgaacatatccccggtccacctcggccatcatttctcctgggccacttaccttgtttctggaagaaggacgaagtgggtggaagagtgctgcaggacgtttttttggactgggctaaaaaatacggacctgtggttcgcgtgaacgtattccacaaaacatcagtgatcgttacatcacccgagtccgttaaaaaattccttatgtcaacaaaatacaacaaggactcaaaaatgtatagggcactgcagaccgtcttcggggagcgcctcttcggtcagggactggtttccgaatgcaactacgagcggtggcacaagcaacggcgagtgatcgatctggcattctcaaggtcaagcctcgtttcactgatggagaccttcaatgagaaagctgagcagctcgtggagattttggaggccaaggctgacggccaaactcctgtgtctatgcaggacatgcttacatataccgcaatggatatcttagcgaaggctgcctttgggatggaaacttctatgttgcttggagcccaaaagcctttaagtcaggcagtgaagctcatgttagagggcattaccgcgtccagaaataccttggcaaagtttcttcctggcaaaagaaagcaacttcgcgaggtacgagaatctattcggttcctcaggcaggtggggagagattgggtacagcgccgtcgagaagccctaaagcggggagaagaggttccggcagacatcttgactcagatcctcaaggcagaggagggggctcaggacgatgaaggattgctcgataatttcgtgaccttctttatagcgggtcacgagacttccgccaaccacctggcctttactgtcatggagctgtcccgccaaccagaaatcgttgcccgactccaggctgaggttgatgaggtcattggtagcaagcggtacttagattttgaagacctcgggaggctacagtacctgtctcaggtgctgaaggaatcactgcgattgtaccccccagcgtggggaacctttaggctcttggaagaagagacactcatcgacggggtcagagtaccagggaatactcccctgctgttctccacatacgtgatgggccgaatggatacctattttgaagaccccctcacttttaacccagatagatttgggccaggcgcacccaagccaaggttcacatattttccattctcactgggccaccgctcttgtattggccagcagttcgcccaaatggaagtcaaggtcgtcatggccaagctattgcagagactggaattccgtctggtaccaggacaacggttcggcctacaagagcaggcaacactcaagcccttggatcctgtgctatgcaccctccgtccccgaggctggcagcccgcaccaccaccaccaccatgttag

SEQ ID NO: 166981 - DNA, 1212 bp, Artificial Sequence
  derived and/or modified sequence
atgtccacaaagtacaacaaagatagcaaaatgtatcgagctctgcagacggtgttcggggaacggttgtttggccagggcctggtaagcgagtgcaactacgaacgctggcataaacagcgtcgggtgatcgacttggcctttagtcggagttctctagtgagcctaatggaaacattcaatgaaaaggcggaacaactcgtcgaaatcctcgaagccaaagctgacggtcagacacccgtcagcatgcaggatatgttgacatatactgcaatggatattctcgctaaagcagcattcggcatggaaacaagcatgctgctgggcgcacagaaacccctctcccaggcggttaagttgatgctggaaggtatcacagcatctcggaacacactcgcgaaattcctgccaggtaagaggaaacaactccgagaggtccgcgagagcatccgcttcctgcggcaagtggggcgtgactgggttcaaaggagacgtgaagcattgaagcgcggagaggaggtccctgcagatattctaactcagatcctcaaggccgaggagggtgctcaggacgatgaggggcttctggataattttgtgacattctttattgccggacacgaaacatccgccaaccacctggcattcacagttatggagctctcgaggcaacccgagatcgtggcgagattgcaggctgaggtggacgaagtgattggttccaagcggtacctggatttcgaggacctcgggagactgcaatacctgagtcaggttctgaaggagagcctgagactgtatcccccagcatggggcacgttcaggctactagaggaggaaacactgatcgatggggtgcgcgtgccgggtaacacaccactgcttttctctacttacgtgatgggaagaatggacacgtactttgaggatccactgactttcaacccagaccggttcgggccaggggctcctaagcctcggttcacctactttccgttttcgctgggtcacaggtcatgtattggacaacagtttgcacagatggaggtgaaagtcgttatggccaaactcttacaaagactggaattccgtctagtgcccggacagagatttgggctccaggagcaggccaccttaaaacctctcgatcccgtgctgtgtacactgcggcctcgtggttggcagccagctccccctcctccaccttgttag

SEQ ID NO: 166982 - DNA, 2181 bp, Artificial Sequence
  derived and/or modified sequence
ggggccgaggcggcgcgcggcgctgacagctgagtcggctcgcggcctcccggccccctcggcgcccggcccgaccctggcctggcctgccctgccccggagccatgagccccgggctgctgctgctcggcagcgccgtcctgctcgccttcggcctctgctgcaccttcgtgcaccgcgctcgcagccgctacgagcacatccccgggccgccgcggcccagtttccttctaggacacctcccctgcttttggaaaaaggatgaggttggtggccgtgtgctccaagatgtgtttttggattgggctaagaagtatggacctgttgtgcgggtcaacgtcttccacaaaacctcagtcatcgtcacgagtcctgagtcggttaagaagttcctgatgtcaaccaagtacaacaaggactccaagatgtaccgtgcgctccagactgtgtttggtgagagactcttcggccaaggcttggtgtccgaatgcaactatgagcgctggcacaagcagcggagagtcatagacctggccttcagccggagctccttggttagcttaatggaaacattcaacgagaaggctgagcagctggtggagattctagaagccaaggcagatgggcagaccccagtgtccatgcaggacatgctgacctacaccgccatggacatcctggccaaggcagcttttgggatggagaccagtatgctgctgggtgcccagaagcctctgtcccaggcagtgaaacttatgttggagggaatcactgcgtcccgcaacactctggcaaagttcctgccagggaagaggaagcagctccgggaggtccgggagagcattcgcttcctgcgccaggtgggcagggactgggtccagcgccgccgggaagccctgaagaggggcgaggaggttcctgccgacatcctcacacagattctgaaagctgaagagggagcccaggacgacgagggtctgctggacaacttcgtcaccttcttcattgctggtcacgagacctctgccaaccacttggcgttcacagtgatggagctgtctcgccagccagagatcgtggcaaggctgcaggccgaggtggatgaggtcattggttctaagaggtacctggatttcgaggacctggggagactgcagtacctgtcccaggtcctcaaagagtcgctgaggctgtacccaccagcatggggcacctttcgcctgctggaagaggagaccttgattgatggggtcagagtccccggcaacaccccgctcttgttcagcacctatgtcatggggcggatggacacatactttgaggacccgctgactttcaaccccgatcgcttcggccctggagcacccaagccacggttcacctacttccccttctccctgggccaccgctcctgcatcgggcagcagtttgctcagatggaggtgaaggtggtcatggcaaagctgctgcagaggctggagttccggctggtgcccgggcagcgcttcgggctgcaggagcaggccacactcaagccactggaccccgtgctgtgcaccctgcggccccgcggctggcagcccgcacccccaccacccccctgctgagggggcctccaggcaggacgagactcctcgggcaagggccgtgcccgcccacctctgctgcccacggccacccacccttctcccctgccccgtcccctgggccacccttcacgctggcttccagcgggccctctgccgaccgcctgcttcacacccctcagcgctccctgtcgcctgcggactccatggcccttcctggactggcccttgcccaactcccagccaccaccactgtccctaccactgagcccttgcacaggccacttgctcagacgagacaccctaactcttgctcactccctaaagccctcttcaggggtcacctcctccaagaagccctccttgccaccccccgccggcaggggcccctcctctgtgctccctcggtcacctgtgctacctctaacaccacactgaccacactgtatcgtgagtgtccgttgacgtgaccaattgccctgccaggctgtcagcgcctcaagggtagggtctgcgtgtgatttgtctctgagccccctgtgcccacccagggcccggcacagagtcgatgctcaataaatgtgtgttgactgca

SEQ ID NO: 166983 - DNA, 1599 bp, Artificial Sequence
  derived and/or modified sequence
ctcacagccgcagcagctgctgggcgcccaccgcgcacagctgggccccacaaacgtgatggcagccacagccctttcagtttccttctaggacacctcccctgcttttggaaaaaggatgaggttggtggccgtgtgctccaagatgtgtttttggattgggctaagaagtatggacctgttgtgcgggtcaacgtcttccacaaaacctcagtcatcgtcacgagtcctgagtcggttaagaagttcctgatgtcaaccaagtacaacaaggactccaagatgtaccgtgcgctccagactgtgtttggtgagagactcttcggccaaggcttggtgtccgaatgcaactatgagcgctggcacaagcagcggagagtcatagacctggccttcagccggagctccttggttagcttaatggaaacattcaacgagaaggctgagcagctggtggagattctagaagccaaggcagatgggcagaccccagtgtccatgcaggacatgctgacctacaccgccatggacatcctggccaaggcagcttttgggatggagaccagtatgctgctgggtgcccagaagcctctgtcccaggcagtgaaacttatgttggagggaatcactgcgtcccgcaacactctggcaaagttcctgccagggaagaggaagcagctccgggaggtccgggagagcattcgcttcctgcgccaggtgggcagggactgggtccagcgccgccgggaagccctgaagaggggcgaggaggttcctgccgacatcctcacacagattctgaaagctgaagagggagcccaggacgacgagggtctgctggacaacttcgtcaccttcttcattgctggtcacgagacctctgccaaccacttggcgttcacagtgatggagctgtctcgccagccagagatcgtggcaaggctgcaggccgaggtggatgaggtcattggttctaagaggtacctggatttcgaggacctggggagactgcagtacctgtcccaggtcctcaaagagtcgctgaggctgtacccaccagcatggggcacctttcgcctgctggaagaggagaccttgattgatggggtcagagtccccggcaacaccccgctcttgttcagcacctatgtcatggggcggatggacacatactttgaggacccgctgactttcaaccccgatcgcttcggccctggagcacccaagccacggttcacctacttccccttctccctgggccaccgctcctgcatcgggcagcagtttgctcagatggaggtgaaggtggtcatggcaaagctgctgcagaggctggagttccggctggtgcccgggcagcgcttcgggctgcaggagcaggccacactcaagccactggaccccgtgctgtgcaccctgcggccccgcggctggcagcccgcacccccaccacccccctgctgagggggcctccaggcaggacgagactcctcgggcaagggccgtgcccgcccacctctgctgcccacggccacccacccttctcccctgccccgtcccctgggccacccttcacgctggcttccagcgggccctctg

SEQ ID NO: 166984 - DNA, 1503 bp, Artificial Sequence
  derived and/or modified sequence
atgagccccggcctgctgctgctgggcagcgccgtgctgctggccttcggcctgtgctgcaccttcgtgcacagagccagaagcagatacgagcacatccccggcccccccagacccagcttcctgctgggccacctgccctgcttctggaagaaggacgaggtgggcggcagagtgctgcaggacgtgttcctggactgggccaagaagtacggccccgtggtgagagtgaacgtgttccacaagaccagcgtgatcgtgaccagccccgagagcgtgaagaagttcctgatgagcaccaagtacaacaaggacagcaagatgtacagagccctgcagaccgtgttcggcgagagactgttcggccagggcctggtgagcgagtgcaactacgagagatggcacaagcagagaagagtgatcgacctggccttcagcagaagcagcctggtgagcctgatggagaccttcaacgagaaggccgagcagctggtggagatcctggaggccaaggccgacggccagacccccgtgagcatgcaggacatgctgacctacaccgccatggacatcctggccaaggccgccttcggcatggagaccagcatgctgctgggcgcccagaagcccctgagccaggccgtgaagctgatgctggagggcatcaccgccagcagaaacaccctggccaagttcctgcccggcaagagaaagcagctgagagaggtgagagagagcatcagattcctgagacaggtgggcagagactgggtgcagagaagaagagaggccctgaagagaggcgaggaggtgcccgccgacatcctgacccagatcctgaaggccgaggagggcgcccaggacgacgagggcctgctggacaacttcgtgaccttcttcatcgccggccacgagaccagcgccaaccacctggccttcaccgtgatggagctgagcagacagcccgagatcgtggccagactgcaggccgaggtggacgaggtgatcggcagcaagagatacctggacttcgaggacctgggcagactgcagtacctgagccaggtgctgaaggagagcctgagactgtacccccccgcctggggcaccttcagactgctggaggaggagaccctgatcgacggcgtgagagtgcccggcaacacccccctgctgttcagcacctacgtgatgggcagaatggacacctacttcgaggaccccctgaccttcaaccccgacagattcggccccggcgcccccaagcccagattcacctacttccccttcagcctgggccacagaagctgcatcggccagcagttcgcccagatggaggtgaaggtggtgatggccaagctgctgcagagactggagttcagactggtgcccggccagagattcggcctgcaggagcaggccaccctgaagcccctggaccccgtgctgtgcaccctgagacccagaggctggcagcccgccccccccccccccccctgctag

SEQ ID NO: 166985 - DNA, 1212 bp, Artificial Sequence
  derived and/or modified sequence
atgagcaccaagtacaacaaggacagcaagatgtacagagccctgcagaccgtgttcggcgagagactgttcggccagggcctggtgagcgagtgcaactacgagagatggcacaagcagagaagagtgatcgacctggccttcagcagaagcagcctggtgagcctgatggagaccttcaacgagaaggccgagcagctggtggagatcctggaggccaaggccgacggccagacccccgtgagcatgcaggacatgctgacctacaccgccatggacatcctggccaaggccgccttcggcatggagaccagcatgctgctgggcgcccagaagcccctgagccaggccgtgaagctgatgctggagggcatcaccgccagcagaaacaccctggccaagttcctgcccggcaagagaaagcagctgagagaggtgagagagagcatcagattcctgagacaggtgggcagagactgggtgcagagaagaagagaggccctgaagagaggcgaggaggtgcccgccgacatcctgacccagatcctgaaggccgaggagggcgcccaggacgacgagggcctgctggacaacttcgtgaccttcttcatcgccggccacgagaccagcgccaaccacctggccttcaccgtgatggagctgagcagacagcccgagatcgtggccagactgcaggccgaggtggacgaggtgatcggcagcaagagatacctggacttcgaggacctgggcagactgcagtacctgagccaggtgctgaaggagagcctgagactgtacccccccgcctggggcaccttcagactgctggaggaggagaccctgatcgacggcgtgagagtgcccggcaacacccccctgctgttcagcacctacgtgatgggcagaatggacacctacttcgaggaccccctgaccttcaaccccgacagattcggccccggcgcccccaagcccagattcacctacttccccttcagcctgggccacagaagctgcatcggccagcagttcgcccagatggaggtgaaggtggtgatggccaagctgctgcagagactggagttcagactggtgcccggccagagattcggcctgcaggagcaggccaccctgaagcccctggaccccgtgctgtgcaccctgagacccagaggctggcagcccgccccccccccccccccctgctag

SEQ ID NO: 166986 - protein, 650 aa, Artificial Sequence
  derived and/or modified sequence
MTPILTVLICLGLSLGPRTHVQAGHLPKPTLWAEPGSVITQGSPVTLRCQGGQETQEYRLYREKKTALWITRIPQELVKKGQFPIPSITWEHAGRYRCYYGSDTAGRSESSDPLELVVTGAYIKPTLSAQPSPVVNSGGNVILQCDSQVAFDGFSLCKEGEDEHPQCLNSQPHARGSSRAIFSVGPVSPSRRWWYRCYAYDSNSPYEWSLPSDLLELLVLGVSKKPSLSVQPGPIVAPEETLTLQCGSDAGYNRFVLYKDGERDFLQLAGAQPQAGLSQANFTLGPVSRSYGGQYRCYGAHNLSSEWSAPSDPLDILIAGQFYDRVSLSVQPGPTVASGENVTLLCQSQGWMQTFLLTKEGAADDPWRLRSTYQSQKYQAEFPMGPVTSAHAGTYRCYGSQSSKPYLLTHPSDPLELVVSGPSGGPSSPTTGPTSTSGPEDQPLTPTGSDPQSGLGRHLGVVIGILVAVILLLLLLLLLFLILRHRRQGKHWTSTQRKADFQHPAGAVGPEPTDRGLQWRSSPAADAQEENLYAAVKHTQPEDGVEMDTRSPHDEDPQAVTYAEVKHSRPRREMASPPSPLSGEFLDTKDRQAEEDRQMDTEAAASEAPQDVTYAQLHSLTLRREATEPPPSQEGPSPAVPSIYATLAIH

SEQ ID NO: 166987 - DNA, 1953 bp, Artificial Sequence
  derived and/or modified sequence
atgacgcctattttgaccgtcttgatctgtctaggcctgagcctggggccacgaactcacgtgcaggccggacatctacctaagcctacattgtgggccgaacctgggagtgtcatcacccagggcagcccggttactctgagatgccagggaggccaggaaacccaagagtaccgactttaccgggagaagaagacggctttgtggatcacccggatcccacaggagctcgttaaaaaaggccaatttcccattccttccattacatgggagcacgcaggaaggtatcgctgttactacggatccgatacagcgggacgttcagagagttctgacccccttgaactggtggtgacgggggcgtacataaagcctacactgagtgcccaaccttctcctgtggtgaactcggggggtaacgttatactacagtgtgactcacaggtcgccttcgacgggttctccctttgtaaggagggcgaggacgaacatcctcagtgtctgaatagccagccccatgctagagggagttcaagggccatcttttccgtagggcctgtgtccccatctaggcgctggtggtatcgttgttacgcgtacgattcaaactcaccttacgaatggtctctgccctctgatctgctcgagctgctcgtcttaggggtgagcaagaaaccaagccttagtgtgcagcctggcccgatagttgcccccgaggaaaccctcaccttgcagtgtggatctgacgccggctacaatcgatttgtgctctataaggatggggaaagagactttctccaactggccggcgcacagccgcaggctggactgtcgcaggccaactttactctcgggcccgtgagtagaagctacggaggccaataccggtgctacggggcccacaatctgagcagcgaatggtcggctccatcagaccccctggatattctgatagcaggtcagttttacgatcgggtgtcactctcagtccagcctggtccaactgtcgcatccggtgaaaatgtgacactcctctgtcagtcccaggggtggatgcagacttttttgcttaccaaggagggcgctgcagatgatccctggcgcttgagaagcacataccagagccagaagtatcaagctgagtttccaatgggacctgtgacaagcgctcatgctggaacgtaccgctgttatggcagtcagtcttcgaagccataccttctgactcaccccagcgaccccctggagcttgtggtgtcagggccctcaggcggaccctccagtcccactactgggcctacctccactagtggcccagaagaccagccccttactccaactggtagcgacccgcagagtggcctggggcgtcacctgggggtagtcatcgggattttggtggccgtaattctgctcttacttctccttcttctcttgtttctgattctgaggcacaggcgacaaggcaaacattggacatcaactcagcggaaggccgattttcagcaccccgctggggccgtgggcccggaacctacggatagagggcttcagtggaggtctagtccagccgcggacgcacaggaggagaatctttacgccgccgtgaagcatacacagccggaggatggagtggagatggatacccgttccccgcacgatgaagatcctcaagcagttacatacgccgaggtgaagcatagcaggccccgccgcgaaatggctagtcccccgtcaccgctcagtggtgaatttctggatactaaggatcggcaagccgaggaggatcggcaaatggataccgaggccgcagcatccgaggctccgcaggacgtcacatatgcacaacttcactcccttaccctaaggagagaagccacggaaccaccccctagtcaggaaggtccgagccctgctgtgccatctatttatgctacgctggccatacactag

SEQ ID NO: 166988 - DNA, 1953 bp, Artificial Sequence
  derived and/or modified sequence
atgactccaattctcaccgtgctgatttgcttggggctgtccttgggtcccaggacacacgtccaggccgggcatctgccaaaaccaaccctctgggccgagccagggtccgtcattacacagggatccccggtgaccttacgttgtcagggtggccaagagacacaagagtatcgactgtaccgggaaaagaagactgccttatggataaccagaattcctcaggagctggtgaaaaagggtcagtttcccattccctccattacatgggaacatgctgggcgataccggtgctactacgggtctgatacggccggcagatcggagagtagtgaccctctcgaactggtcgtaaccggcgcttacatcaaacccactctgagcgcccagccatccccggtagtcaactcaggcggcaatgtaatactccaatgtgattcccaagttgctttcgacggtttcagtctctgcaaggaaggagaagatgagcatcctcagtgtctgaattcacagcctcacgctaggggctcttcacgtgctatattctcagtgggcccggtgagcccctcgcgaagatggtggtatagatgctatgcatacgactcgaattccccctacgagtggtccctgcccagcgatctgctggagcttttggtgctgggggtatcaaagaagccctctctatccgtgcagcccgggcccatcgtagctccggaggagaccctcaccttgcaatgcggatccgatgctggatacaacagatttgtattgtacaaggacggtgagagagactttttacagctggcgggggcacagccgcaggccggcctatcccaggcaaatttcaccctggggcccgtgtcaaggtcctatggcggccagtatcgctgctatggcgcgcataatttgagctcggagtggagcgctccttctgatccactggacattctgatcgccgggcagttttacgatcgagtgagcctgtcggtgcagcctgggcctacggtcgcttccggcgaaaacgtgacactcctgtgtcagtcccaagggtggatgcagacctttttgctgacaaaggaaggagcagcggacgatccctggaggctgaggtctacttaccagagccagaaataccaggctgagtttcccatggggcctgtgactagtgctcatgcgggcacttatcgctgctatggctcacagagctccaaaccctacttactcacccatccatccgaccccttggagttggtcgtaagcggtcccagcggcggcccctcaagtcccactaccggaccaacaagcacctcaggtccagaagaccagccgctgacacctacgggatcagatccccagagcggacttgggcgccacctaggcgttgttattgggatcctcgtggccgtgatcctcttgttgctcctcttgctgttgttgttcttaattctgcggcaccgccgccaggggaagcactggacctctacccagagaaaggctgactttcagcaccccgctggggcagtgggtcctgagccaactgatagaggcctacagtggcgtagctctccagctgccgatgctcaggaagaaaatttgtatgctgctgtgaagcacacgcaaccagaggacggtgtggaaatggatacgagatcaccgcatgacgaggatccacaggctgtgacctacgctgaggtgaaacatagccggcctaggagagagatggcaagcccaccttccccgctgtccggcgaattcctcgacacgaaagatcgacaagctgaggaggacagacagatggatacggaggctgccgcatctgaggccccacaggatgtcacatacgctcagttacatagcttaacgttgaggcgcgaagcaacagagcccccaccgagtcaggagggtccgagcccagccgtgccctccatttacgctactctcgccatccactag

SEQ ID NO: 166989 - DNA, 1953 bp, Artificial Sequence
  derived and/or modified sequence
atgactcctattttaacggtgcttatatgcttaggcctgagcctcggcccgagaactcacgtacaagccggacatctccctaagccgaccctgtgggcagagcccggaagtgtgattacccaagggagccccgtgacgctccggtgccaggggggtcaggagacacaggaataccgtctctaccgcgagaagaaaaccgctctctggatcacaagaattccgcaggaactggtcaaaaaaggtcaattccctatcccaagcattacatgggagcatgctggacggtataggtgttattacgggtcagacaccgctgggcgcagcgagtcttccgatcctctggagctagtggtgaccggcgcttacatcaagccaacactgtctgcacagccctcaccagtggtgaattcagggggcaacgtgatattgcaatgcgattcccaggtcgccttcgacggatttagtttatgcaaggagggcgaagacgaacaccctcagtgtttgaacagccagccacacgcacggggctctagtcgtgctatttttagtgtggggccagtgagcccttcacgtcggtggtggtaccgctgttatgcctacgacagtaattctccctatgagtggagcctgccctccgatcttcttgagctgctcgtgctcggagttagtaagaaaccctcgctgtctgtacagcccggccctatcgtggcccccgaagagactctgaccttacaatgcgggtccgacgccggatacaaccgctttgttctttataaggatggcgaaagagatttcctgcagctcgcgggggcccaacctcaggctgggctatcgcaagcaaacttcacactggggccagtgtcaaggagctacgggggccaatatcgctgttacggtgcccataatctgtcttcggagtggagcgctccctcagacccactcgacattctcatagccggacagttctacgatagggtttccctctcagtgcagcctggcccgaccgtggcttctggcgaaaacgttactctcctctgtcaaagtcagggatggatgcagacttttctgctgactaaagaaggggccgcagacgatccctggcgccttcggtccacctaccagagccagaaatatcaagctgagtttcccatgggcccggtgacaagtgctcacgccggcacttatcgctgctatggcagccagagttcgaaaccatatcttctcactcacccttccgatccactcgagctggtcgtttccggaccctccggaggcccatcttcacccaccacaggccccacttctacctcgggaccagaggatcaacccctaaccccaacaggctccgacccgcagagtgggctcgggcgccacctgggtgtggttatcggtatcctggtggctgtgatactgttactactgcttcttttactcctgttcctgatcttgcggcaccggcgccagggcaaacactggactagtacacagcgaaaggccgactttcagcatccagcaggagcagtgggtcctgaacctaccgaccgcggcctacaatggagatctagtcccgccgctgatgcgcaggaagagaacctgtatgctgccgtgaagcacactcagcctgaagacggtgtggagatggacaccagatctccccacgatgaagaccctcaggctgtgacctacgcggaagtgaagcattctcggccaaggcgggaaatggcaagcccaccctccccattgagcggcgagtttctcgatacgaaggacagacaggcagaagaggacagacagatggacacagaggcagccgcttccgaggcacctcaggacgtgacctatgcacaacttcactctctgactctcagaagagaggccacagagccccccccatcccaagagggaccaagtccagcagtaccctcaatatacgcaacactcgccattcactag

SEQ ID NO: 166990 - DNA, 1953 bp, Artificial Sequence
  derived and/or modified sequence
atgacccccatcctgactgtgctgatctgcctgggcctgagcctgggccccaggacccacgtgcaggccggccacctgcccaagcccaccctgtgggccgagcccggcagcgtcatcacccagggcagccctgtgaccctgcgctgccagggcggccaggagacccaggagtaccgcctgtaccgggagaagaagacagccctgtggatcacccgcatcccccaggagctggtgaagaagggccagttccccatccccagcatcacctgggagcacgccggccgctaccgctgctactacggcagtgacacagctggccgctctgagagcagtgaccccctggagctggtggtgactggagcctacatcaagcccaccctgagcgcccagcccagccctgtggtgaacagcggcggcaatgtcatcctgcagtgtgacagccaggtggcctttgatggcttcagcctgtgcaaggagggagaagatgagcacccccagtgcctgaacagccagccccacgcccggggcagcagccgggccatcttctctgtgggccctgtgagccccagccgccgctggtggtaccgctgctacgcctatgacagcaacagcccctatgagtggagcctgcccagcgacctgctggagctgctggtgctgggcgtgtccaagaagcccagcctgtctgtgcagcccggccccatcgtggcccctgaggagaccctgaccctgcagtgtggcagtgatgctggctacaacagatttgtgctgtacaaggatggagagcgggacttcctgcagctggccggggcccagccccaggccggcctgagccaggccaacttcaccctgggccctgtgagccgctcctatggaggccagtaccgctgctacggggcccacaacctgagcagcgagtggagcgcccccagcgaccccctggacatcctgattgctggccagttctatgacagagtgtccctgtctgtgcagcccggccccaccgtggccagcggggagaatgtgaccctgctgtgccagagccagggctggatgcagaccttcctgctgaccaaggagggcgctgctgatgacccctggaggctgcggagcacctaccagagccagaagtaccaggccgagttccccatgggccctgtgaccagcgcccacgccggcacctaccgctgctacggcagccagagcagcaagccctacctgctgacccaccccagcgaccccctggagctggtggtgtctggccccagcggcggccccagcagccccaccaccggccccaccagcaccagcggccctgaggaccagcccctgacccccactggaagtgacccccagagcggcctgggccgccacctgggcgtggtgattggcatcctggtggccgtcatcctgctgctgctgctgctgctgctgctcttcctgatcctgcggcaccggcggcagggcaagcactggaccagcacccagaggaaggctgacttccagcaccctgctggagctgtgggccctgagcccacagaccggggcctgcagtggaggagcagccctgctgctgatgcccaggaggagaacctgtatgctgctgtgaagcacacccagccagaagatggagtggagatggacaccaggagcccccatgatgaggacccccaggccgtgacctatgcagaggtgaagcacagccggccccggcgggagatggccagcccccccagccccctgagcggggagttcctggacaccaaggaccggcaggccgaggaggaccggcagatggacacagaagctgctgccagcgaggccccccaggatgtgacctacgcccagctgcacagcctgaccctgcggcgggaggccacagagcccccacccagccaggagggccccagccctgctgtgcccagcatctatgccaccctggccatccactag

SEQ ID NO: 166991 - DNA, 2094 bp, Artificial Sequence
  derived and/or modified sequence
atgacccccatcctcacggtcctgatctgtctcgggctgagtctgggccccaggacccacgtgcaggcagggcacctccccaagcccaccctctgggctgaaccaggctctgtgatcacccaggggagtcctgtgaccctcaggtgtcaggggggccaggagacccaggagtaccgtctatatagagaaaagaaaacagcactctggattacacggatcccacaggagcttgtgaagaagggccagttccccatcccatccatcacctgggaacatgcagggcggtatcgctgttactatggtagcgacactgcaggccgctcagagagcagtgaccccctggagctggtggtgacaggagcctacatcaaacccaccctctcagcccagcccagccccgtggtgaactcaggagggaatgtaatcctccagtgtgactcacaggtggcatttgatggcttcagtctgtgtaaggaaggagaagatgaacacccacaatgcctgaactcccagccccatgcccgtgggtcgtcccgcgccatcttctccgtgggccccgtgagcccgagtcgcaggtggtggtacaggtgctatgcttatgactcgaactctccctatgagtggtctctacccagtgatctcctggagctcctggtcctaggtgtttctaagaagccatcactctcagtgcagccaggtcctatcgtggcccctgaggagaccctgactctgcagtgtggctctgatgctggctacaacagatttgttctgtataaggacggggaacgtgacttccttcagctcgctggcgcacagccccaggctgggctctcccaggccaacttcaccctgggccctgtgagccgctcctacgggggccagtacagatgctacggtgcacacaacctctcctccgagtggtcggcccccagcgaccccctggacatcctgatcgcaggacagttctatgacagagtctccctctcggtgcagccgggccccacggtggcctcaggagagaacgtgaccctgctgtgtcagtcacagggatggatgcaaactttccttctgaccaaggagggggcagctgatgacccatggcgtctaagatcaacgtaccaatctcaaaaataccaggctgaattccccatgggtcctgtgacctcagcccatgcggggacctacaggtgctacggctcacagagctccaaaccctacctgctgactcaccccagtgaccccctggagctcgtggtctcaggaccgtctgggggccccagctccccgacaacaggccccacctccacatctggccctgaggaccagcccctcacccccaccgggtcggatccccagagtggtctgggaaggcacctgggggttgtgatcggcatcttggtggccgtcatcctactgctcctcctcctcctcctcctcttcctcatcctccgacatcgacgtcagggcaaacactggacatcgacccagagaaaggctgatttccaacatcctgcaggggctgtggggccagagcccacagacagaggcctgcagtggaggtccagcccagctgccgatgcccaggaagaaaacctctatgctgccgtgaagcacacacagcctgaggatggggtggagatggacactcggagcccacacgatgaagacccccaggcagtgacgtatgccgaggtgaaacactccagacctaggagagaaatggcctctcctccttccccactgtctggggaattcctggacacaaaggacagacaggcggaagaggacaggcagatggacactgaggctgctgcatctgaagccccccaggatgtgacctacgcccagctgcacagcttgaccctcagacgggaggcaactgagcctcctccatcccaggaagggccctctccagctgtgcccagcatctacgccactctggccatccactagcccagggggggacgcagaccccacactccatggagtctggaatgcatgggagctgcccccccagtggacaccattggaccccacccagcctggatctaccccaggagactctgggaacttttaggggtcactcaattctgc

SEQ ID NO: 166992 - DNA, 1953 bp, Artificial Sequence
  derived and/or modified sequence
atgacccccatcctgaccgtgctgatctgcctgggcctgagcctgggccctaggacacacgttcaggctggccacctgcccaaaccgacactgtgggccgagccaggatcggtcatcacacaggggagccctgtcacgttgcgatgccaaggtggtcaggagacacaggagtatagactgtatcgtgagaaaaagaccgctctgtggattacgaggatccctcaggagctagtaaagaaaggacagttccccattccaagcatcacttgggaacatgcagggcgctaccgctgttactatggatccgacacagccggccgaagtgagagcagcgaccccttggagctcgtcgtcacaggagcttacattaaacccaccttaagtgcgcagccttccccagtggtcaactcaggagggaacgttatcctccaatgcgattcacaggttgcattcgatgggttctccctatgtaaggaaggtgaggatgagcatccgcagtgtctcaattctcagccacacgcaagaggcagctcaagagccattttttctgtaggccctgtcagtcctagccgtcggtggtggtaccgttgctatgcctatgattctaattccccttatgagtggtctctccccagtgacctgctggagttgctggtcctgggggtgagtaagaagccttctctgagtgtccagcctggacccatcgtcgccccagaagagaccctgacccttcaatgtggatccgacgctggctataatcggttcgtgctttataaagacggagagagagatttcctccagctcgcgggcgcccagccacaggctggcctgtcacaggctaattttacattggggcccgtttcccggtcttacggaggccaatatagatgctatggtgctcacaatctatcaagtgagtggagcgcccctagtgacccactggatatcttgatcgcgggtcaattttacgacagggtgagtctcagcgtgcaaccaggtcctacggtggcttccggggaaaacgtaactctgctgtgtcagtcccagggctggatgcaaactttcctcctgacgaaggaaggcgccgccgacgatccatggaggcttaggtctacttaccagagccagaagtatcaggccgagtttccaatgggcccagtgacgagcgcccatgccgggacctaccgctgctacggaagtcagtcctctaaaccttatttgctgacacatccctccgatccgctggagttggtggtcagcggtcctagcgggggcccttctagtcccactacaggacccacttccacatcggggcccgaagatcaaccccttacaccaactggcagtgatccgcagtctggactgggtcgccacttgggtgtcgtgattggcatcctggtggcagtcatcctgctgctgctgttattacttctcttgttcctgatcttgaggcacagaagacagggtaagcactggacaagcacccagagaaaagcagactttcagcaccctgcaggcgcagtggggccggagcccaccgacagggggttgcagtggagaagttcacccgcagctgatgcgcaagaggagaatctatatgctgcagtgaagcacactcagcccgaagatggggttgagatggatacaaggagcccccacgatgaggacccccaggccgtaacctacgctgaggtcaagcactctaggccccgaagagagatggcctctcccccgtctccacttagcggcgagttcctggataccaaagatcgccaggctgaagaagaccgtcaaatggataccgaagctgctgcatcagaggccccccaagacgtcacctatgctcagctccactccctgactctgaggagggaggccacagagcctccccccagtcaggaaggacccagccccgctgttccttccatctatgctactctcgccatccactag

SEQ ID NO: 166993 - DNA, 1953 bp, Artificial Sequence
  derived and/or modified sequence
atgacccccatcctgaccgtgctgatctgcctgggcctgagcctgggcccacgaacgcacgtgcaggctgggcacctgcccaaaccgaccctctgggccgaaccagggtctgtaatcacccaggggtctcctgtcacattacgatgccagggggggcaagagacccaggaatatcgtctttatcgagaaaagaagactgctctttggatcaccaggattccgcaagagctggtgaagaagggccaatttcccattccctctataacatgggagcacgcagggcgctaccgttgctactatgggtccgataccgccggaaggtccgaatcctccgacccactggagctcgtggtgaccggagcatacattaagccaacgctgagtgcgcagccttcaccagtagttaatagcggaggaaatgtcatcctccaatgtgatagccaggtggcctttgacggcttttccctgtgcaaagaaggcgaagatgagcatccccaatgtctgaatagtcagccacacgcaagagggtcaagcagggcaatcttttctgtgggacccgtgtcccctagcaggaggtggtggtaccggtgttatgcctacgactcaaattccccttacgaatggtccctgccttccgatctgcttgagttgctcgtgctaggggtgagcaaaaaaccaagtctttctgtgcagccaggtcctattgtcgcccctgaggaaaccctcacccttcaatgcggctctgatgctgggtacaataggtttgttttgtacaaggatggggagcgggactttttacagttggctggagctcagccccaggctggcctgagtcaggctaatttcacactggggccggtgtccagatcatacggaggccagtaccggtgctatggggcccataatctttcaagcgaatggagcgcgccctcggacccgcttgacattctgattgcaggccagttttacgatagggtcagcctttccgttcagcccggccccaccgtagccagtggagaaaatgttaccctgttatgtcagtctcagggctggatgcagacctttttgttgactaaggagggcgctgcagatgatccctggcgcctgcgtagcacttaccagtcgcagaagtaccaggcggaattccctatgggccccgttacgtctgcgcacgccggtacttataggtgctatgggagccaatctagcaagccctacctcttaacacacccctctgacccgttggaattggtggtttcaggtcctagcggcggcccgtcctccccgaccacaggaccaacatctaccagtggcccagaagaccagcccctgactccaaccgggagcgatccccagagtggtcttggcagacacttaggagtagtgattggaatcttggtggctgtgattcttctgcttttgctcctgcttttactctttttgattctgaggcacagacgccagggcaaacactggacaagtacacagcgaaaggcagacttccagcatcctgccggagccgtgggaccggaaccgactgatcgtggactccagtggagaagttctccagcagctgatgcgcaggaagaaaacctctacgccgctgttaagcatacccagcctgaggatggagttgaaatggatacgaggtcaccgcacgacgaggacccccaggccgttacttacgccgaagtgaaacactcacggcccagacgcgaaatggccagccccccatcccccctgtctggtgagttcctggacactaaggacaggcaggctgaggaggataggcagatggataccgaggcggctgcatcggaagcccctcaggatgtcacctatgcccagctccattcactcacactgcgcagggaggctaccgagccccccccctcccaagaaggcccaagcccagcggtgccttctatttacgcaacactcgcaattcattag

SEQ ID NO: 166994 - DNA, 1953 bp, Artificial Sequence
  derived and/or modified sequence
atgacccccatcctgaccgtgctgatctgcctgggcctgagcctgggtcctcgaacccatgtgcaagcagggcatctcccaaaacctacactctgggcagagccagggtccgtgattactcaaggctcccctgtgacattaagatgtcaaggtgggcaagagactcaggagtaccgtctttaccgtgagaagaagaccgccctgtggataacgaggattccccaagagcttgtcaaaaaggggcagttccctatcccgtcaattacttgggagcacgccgggagatatcggtgttactatggctctgatactgccgggcgctctgagtcctccgatccactggagctggtggtgacaggagcttacatcaagcctaccctgagtgctcagccttcacccgtggtcaactctggtggcaacgtcatactacagtgcgactcccaggttgccttcgacggattttccctgtgtaaggagggagaggacgagcaccctcaatgtttgaatagccaaccacacgctcgcggttccagccgcgccattttctcagtgggcccagtcagtccatcccgcaggtggtggtacagatgttacgcctacgacagtaattcgccttatgaatggagcctgccttccgacctacttgagcttctcgttctgggcgtgtctaagaaacccagcttatcggtgcagccagggccaatagtagctccagaagaaaccctgaccctgcagtgcggtagtgatgctggatataataggttcgtactatacaaggacggggagcgagattttctccagcttgcaggggcccagccccaggccggccttagtcaggctaacttcaccctcgggcctgtatccaggtcctacgggggtcaatacaggtgctatggggcacataacctgagctctgagtggtcggccccttctgatcccctcgacatccttatcgcaggccagttctatgatagagtctccctgtccgtacaaccgggccccactgtggcatcgggtgaaaatgtgaccttgctgtgtcagtctcagggttggatgcagacttttctgttgaccaaagagggagccgccgacgacccctggcggctgcgatcaacctaccagagtcagaagtatcaggcagagttccctatggggccggttacctcggcacatgcgggtacttaccggtgctacggtagtcagtcctccaaaccctacttgctgacccacccgagtgaccctctggagttggtcgtgtccggcccctccggggggccaagctccccgacgaccgggccaacatctacatcaggcccggaggaccaaccactgaccccaaccgggtcggacccccagtccggcctgggtcgccatctgggcgtggtcattgggatactagttgccgtcatcctgcttctgctgttgttgctgctgctgttccttattcttcgccatcgcagacaaggaaagcactggaccagcactcagcgaaaggccgacttccagcatcctgctggcgccgtcggcccagagccaacagatagagggttacagtggcgtagctcccccgcggcagatgcccaagaagagaacctgtatgctgctgttaaacatacacagcccgaggacggggtcgagatggacaccagaagccctcacgacgaagatcctcaagccgttacatatgccgaggtcaaacactcccgtcctcggcgtgagatggccagccctccctctccactatcaggtgaattcctggacacaaaggatagacaggccgaagaagaccggcaaatggacacagaggctgccgcatctgaggccccccaggacgtcacgtacgctcagctgcactccctcactttacggcgggaggctaccgagcccccccccagccaggaaggtccttccccagctgtgccctcaatttacgcgaccttggctattcactag

SEQ ID NO: 166995 - DNA, 1953 bp, Artificial Sequence
  derived and/or modified sequence
atgacacccattttaacggttctcatctgcctggggctctcactgggcccacggacccacgtgcaggctggccatttgccgaagcctaccctctgggcagagcctggatcagtcataacgcaggggagccccgtgacactgcggtgccaggggggacaggagactcaggaatatagactgtatagagagaagaaaactgctctgtggataacgagaatcccacaggagctcgtcaagaaggggcaatttccaatcccatctatcacatgggagcatgccggaaggtacagatgctactatgggtcggacacggctggaaggagcgaaagttcagatccactggaattggtggtcacaggtgcctacatcaaacccactttatccgcccagcccagccccgtggtgaactccgggggtaatgttattcttcagtgtgactcacaagtggcttttgacggcttttccctgtgtaaggagggggaggacgaacatcctcagtgccttaactcccagccacacgccagggggagcagtagggctatatttagcgtcggacctgtcagtccttcccggaggtggtggtacagatgttatgcatacgactcaaacagcccgtacgagtggtccctgccgtccgacttgctagaactgctcgttttaggcgtgtctaagaagccctctctctccgtgcagcccggaccaatcgtcgctccagaggagacattgaccttgcagtgcggctctgacgccggttacaatcgctttgtcctgtataaagacggagagcgagattttttacagcttgccggagcccagcctcaggctgggctgagtcaggcaaatttcactctggggccagtgtcacgcagttacgggggacagtaccgatgttacggtgcccacaatctgagctccgaatggagcgcccctagtgatcccctggatattctaatcgctggccagttctatgatagagtctccctctctgtgcagcctggaccaaccgtggcctccggcgagaacgtgacacttctatgccagtcacaaggatggatgcaaaccttcctgctcacaaaagagggagcagccgacgatccctggagactgaggtctacataccagagtcagaaatatcaagctgaattcccaatgggcccagtgacctctgcccatgccggtacctacagatgttacggaagtcaaagtagcaaaccttacctgctgacccatccatccgatcctctggagctagtggtctcaggccctagcgggggtcctagttctccgacaacaggccctacgtccacttctggccctgaggaccagccactgaccccaacaggaagcgacccccagtcagggctggggcgacatcttggtgtagtcattgggatcctcgtggcagtgatcctgctacttttactgctgttgctgctgttcctgatattgcgccatcgcagacaggggaagcactggacatcaactcagcgaaaagccgactttcagcatccagctggcgcagtcgggccagagcctactgatcgcggtctgcagtggcgctcttcaccagctgctgacgcccaagaggaaaacctttatgcagctgtcaaacatacccagcctgaagatggggtggagatggatacacgctctcctcacgacgaagatccacaagccgtcacatatgctgaggtaaagcatagtcgccctcggcgagaaatggcgtccccaccttcaccacttagcggcgaattcctagacaccaaagacagacaggccgaggaagatcggcagatggatacggaggccgcagcgtcagaagcaccccaggacgtaacctatgcacagctgcattcacttaccctgcgtcgggaggccactgagcctcccccaagtcaagagggcccttctcctgcggtgccgtcaatctacgccaccctcgctatccactag

SEQ ID NO: 166996 - DNA, 1953 bp, Artificial Sequence
  derived and/or modified sequence
atgaccccgatactaaccgtactgatctgtttagggctctctctggggcctcgcacacatgtccaagccggacacctgcccaaacccacactgtgggccgagccgggtagcgtcattactcagggatcccccgtgactctgagatgtcaaggtggacaagaaacccaggagtatcgtttgtatcgagagaaaaagaccgcactgtggatcaccagaatcccacaggagcttgtgaagaaaggacagttccccattccttcaattacttgggagcacgccggaaggtataggtgctattacgggtcagacacggctggtaggtccgaatcaagtgatcccctggaactggtagttaccggagcatatattaaaccgactctgagcgctcaacccagcccagtggttaattccggtggcaatgttatattgcaatgtgactctcaggttgctttcgacgggtttagcttgtgtaaggaaggagaggatgagcatccccagtgtctgaattctcaaccccacgcccgaggttcgtctagagccatctttagcgtggggcctgtctcgccttcccgacggtggtggtaccgctgttacgcctatgatagcaattccccctatgaatggagtctgccttccgatctgctggagctcctggtcctgggagtgagcaaaaaaccaagcctctcagttcagcccggtccaattgtggctcctgaggagactctgactttacaatgcggaagcgatgcagggtacaataggtttgtgctctacaaagacggagaacgggattttctgcagctggccggagcacaaccccaagctggcttgagccaagccaacttcaccctcgggcctgtctccagaagctacgggggacagtatcggtgttacggagcccataacctttctagcgagtggagcgcaccctccgaccctttggatattttgatagccggacaattctacgaccgggtgagtctgagcgtgcaaccaggcccaacagttgcaagtggggagaatgtgacccttctgtgccagtctcagggatggatgcaaacatttctcctcaccaaagagggcgctgccgacgatccatggaggctcaggtcaacctatcagagtcagaaatatcaagccgaatttccgatgggacctgtcacctccgctcacgctgggacataccggtgttacggctcacagagcagcaaaccatacttactcacacatccttctgatcccctggagctggtggtcagcggcccatccggagggccatcttcacctaccactgggccaacatccacaagcggcccagaggaccaaccgttgactccaacaggatccgacccccagtcaggtctgggccgacacctgggggtggtgatcgggattcttgtggctgtcattcttctcttactgctgttgttgctactgttcctgattctcaggcacaggcggcaaggaaagcactggacaagcacccagcgcaaagctgacttccaacatcccgctggggctgtcgggcctgaacctactgatcgcggactgcaatggagatctagcccagccgctgacgcccaagaagaaaacttatacgccgctgtgaagcacacacaacccgaggacggagtggagatggacactcgatcaccccacgatgaagaccctcaagccgtgacctacgcggaggtgaagcattcccgcccaagacgcgaaatggcctcacctccctcccctctgtcgggtgaatttttggatactaaggatagacaggctgaggaggaccgccagatggacaccgaagcggcagcatcagaggcccctcaagatgtgacatacgcccaactgcattccttgacgctgagaagggaagccacagagccaccaccgagccaggaggggccttctcccgcagtgcccagcatttacgcgacactggctattcattag

SEQ ID NO: 166997 - DNA, 1953 bp, Artificial Sequence
  derived and/or modified sequence
atgaccccaatcctgaccgtcttaatctgtctgggcctcagcctgggtcctcgcacacacgtccaggctggacatctcccaaagccaaccctctgggcggagccaggctctgtcatcacgcaaggctccccagtgaccttgagatgtcaggggggacaggagacacaggagtataggctttacagggaaaagaagacagcactgtggatcacaagaatccctcaagagctggttaagaagggccaattccccatcccatctatcacttgggagcatgctgggaggtacagatgctattacggctcagacaccgctgggcgatccgagtcctccgatcccctagaactcgtggttaccggcgcatacatcaagcccacactgtccgcacaacctagtcctgtcgtgaacagcgggggaaatgtgatcctccagtgcgatagccaggtggcctttgacggcttcagcctgtgtaaagagggggaagatgagcatccgcagtgcttaaactcacagccccacgcccgtggctcctcaagagctatcttctccgtgggaccggtttctccatccagaagatggtggtacagatgctacgcctatgattccaactcaccgtatgaatggtccctgccttcagacctgctcgagctgttggtcctgggcgtgagtaagaagccgagcctatctgtccagccagggcctatagtagctccagaagagactctaactttgcaatgtgggagcgacgcaggatataacagatttgtactctataaggacggcgagcgggatttcttacagcttgccggtgctcagccccaggctggcctgtcccaggctaatttcactctggggcctgtgtccagaagctacgggggacagtatcgttgttacggcgcacacaaccttagcagtgagtggtccgcgccatcggacccccttgatatcctcattgctgggcagttttacgatagagttagtctgtctgtgcaaccaggacctaccgtggcctctggggaaaatgtgaccctgctgtgccagagccaggggtggatgcagaccttcctgctgacaaaggagggggctgccgacgacccctggcggctgaggagcacttatcagtcacaaaagtaccaagccgaatttcccatgggtccagtaacctcagctcacgcaggaacgtatagatgttatggttcccaatcctctaaaccatacctccttacgcacccctccgatcccctggaacttgtcgtgtccgggccttcaggaggcccatcatcacctacgacaggcccaacttccacatccggccctgaggatcagcccctgactccgaccggctcagatcctcagtccgggctggggaggcatcttggggtggtgataggaattcttgtcgccgttattctgttgctactgctgctgctactactctttctgatcttacgccatcgtaggcaggggaagcattggaccagcacccaaagaaaggcagattttcagcacccagctggcgctgtagggccagaacctaccgatagaggccttcagtggagatcctccccggctgccgacgctcaggaagagaacctgtacgctgcagtgaaacatactcagccagaagacggcgttgaaatggatactagatcgcctcatgacgaagatcctcaggccgtgacgtacgcggaggtgaaacactctagaccgcgacgggaaatggcctcccccccaagcccactttcgggcgaattcctggacactaaggaccggcaggctgaggaagaccgacagatggacaccgaagccgcagctagcgaggcccctcaggacgtgacgtatgctcagcttcactccttaacattgcggagagaagccaccgagccgcctccaagccaagagggtcctagtcctgcagttccaagcatatacgccacactggctatccattag

SEQ ID NO: 166998 - DNA, 1953 bp, Artificial Sequence
  derived and/or modified sequence
atgacccccatcctgaccgtgctgatctgcctgggcctgagcctgggccccagaacccacgtgcaggccggccacctgcccaagcccaccctgtgggccgagcccggcagcgtgatcacccagggcagccccgtgaccctgagatgccagggcggccaggagacccaggagtacagactgtacagagagaagaagaccgccctgtggatcaccagaatcccccaggagctggtgaagaagggccagttccccatccccagcatcacctgggagcacgccggcagatacagatgctactacggcagcgacaccgccggcagaagcgagagcagcgaccccctggagctggtggtgaccggcgcctacatcaagcccaccctgagcgcccagcccagccccgtggtgaacagcggcggcaacgtgatcctgcagtgcgacagccaggtggccttcgacggcttcagcctgtgcaaggagggcgaggacgagcacccccagtgcctgaacagccagccccacgccagaggcagcagcagagccatcttcagcgtgggccccgtgagccccagcagaagatggtggtacagatgctacgcctacgacagcaacagcccctacgagtggagcctgcccagcgacctgctggagctgctggtgctgggcgtgagcaagaagcccagcctgagcgtgcagcccggccccatcgtggcccccgaggagaccctgaccctgcagtgcggcagcgacgccggctacaacagattcgtgctgtacaaggacggcgagagagacttcctgcagctggccggcgcccagccccaggccggcctgagccaggccaacttcaccctgggccccgtgagcagaagctacggcggccagtacagatgctacggcgcccacaacctgagcagcgagtggagcgcccccagcgaccccctggacatcctgatcgccggccagttctacgacagagtgagcctgagcgtgcagcccggccccaccgtggccagcggcgagaacgtgaccctgctgtgccagagccagggctggatgcagaccttcctgctgaccaaggagggcgccgccgacgacccctggagactgagaagcacctaccagagccagaagtaccaggccgagttccccatgggccccgtgaccagcgcccacgccggcacctacagatgctacggcagccagagcagcaagccctacctgctgacccaccccagcgaccccctggagctggtggtgagcggccccagcggcggccccagcagccccaccaccggccccaccagcaccagcggccccgaggaccagcccctgacccccaccggcagcgacccccagagcggcctgggcagacacctgggcgtggtgatcggcatcctggtggccgtgatcctgctgctgctgctgctgctgctgctgttcctgatcctgagacacagaagacagggcaagcactggaccagcacccagagaaaggccgacttccagcaccccgccggcgccgtgggccccgagcccaccgacagaggcctgcagtggagaagcagccccgccgccgacgcccaggaggagaacctgtacgccgccgtgaagcacacccagcccgaggacggcgtggagatggacaccagaagcccccacgacgaggacccccaggccgtgacctacgccgaggtgaagcacagcagacccagaagagagatggccagcccccccagccccctgagcggcgagttcctggacaccaaggacagacaggccgaggaggacagacagatggacaccgaggccgccgccagcgaggccccccaggacgtgacctacgcccagctgcacagcctgaccctgagaagagaggccaccgagcccccccccagccaggagggccccagccccgccgtgcccagcatctacgccaccctggccatccactag

SEQ ID NO: 166999 - protein, 539 aa, Artificial Sequence
  derived and/or modified sequence
MGFEELLEQVGGFGPFQLRNVALLALPRVLLPLHFLLPIFLAAVPAHRCALPGAPANFSHQDVWLEAHLPREPDGTLSSCLRFAYPQALPNTTLGEERQSRGELEDEPATVPCSQGWEYDHSEFSSTIATEWDLVCEQKGLNRAASTFFFAGVLVGAVAFGYLSDRFGRRRLLLVAYVSTLVLGLASAASVSYVMFAITRTLTGSALAGFTIIVMPLELEWLDVEHRTVAGVLSSTFWTGGVMLLALVGYLIRDWRWLLLAVTLPCAPGILSLWWVPESARWLLTQGHVKEAHRYLLHCARLNGRPVCEDSFSQEAVSKVAAGERVVRRPSYLDLFRTPRLRHISLCCVVVWFGVNFSYYGLSLDVSGLGLNVYQTQLLFGAVELPSKLLVYLSVRYAGRRLTQAGTLLGTALAFGTRLLVSSDMKSWSTVLAVMGKAFSEAAFTTAYLFTSELYPTVLRQTGMGLTALVGRLGGSLAPLAALLDGVWLSLPKLTYGGIALLAAGTALLLPETRQAQLPETIQDVERKRCVHRTVSVYV

SEQ ID NO: 167000 - protein, 546 aa, Artificial Sequence
  derived and/or modified sequence
MGFEELLEQVGGFGPFQLRNVALLALPRVLLPLHFLLPIFLAAVPAHRCALPGAPANFSHQDVWLEAHLPREPDGTLSSCLRFAYPQALPNTTLGEERQSRGELEDEPATVPCSQGWEYDHSEFSSTIATEWDLVCEQKGLNRAASTFFFAGVLVGAVAFGYLSDRFGRRRLLLVAYVSTLVLGLASAASVSYVMFAITRTLTGSALAGFTIIVMPLELEWLDVEHRTVAGVLSSTFWTGGVMLLALVGYLIRDWRWLLLAVTLPCAPGILSLWWVPESARWLLTQGHVKEAHRYLLHCARLNGRPVCEDSFSQEAVSKVAAGERVVRRPSYLDLFRTPRLRHISLCCVVVWFGVNFSYYGLSLDVSGLGLNVYQTQLLFGAVELPSKLLVYLSVRYAGRRLTQAGTLLGTALAFGTRLLVSSDMKSWSTVLAVMGKAFSEAAFTTAYLFTSELYPTVLRQTGMGLTALVGRLGGSLAPLAALLDGVWLSLPKLTYGGIALLAAGTALLLPETRQAQLPETIQDVERKSAPTSLQEEEMPMKQVQN

SEQ ID NO: 167001 - DNA, 1620 bp, Artificial Sequence
  derived and/or modified sequence
atgggattcgaagagctgttggagcaggtggggggctttgggccgtttcagctgaggaatgtcgcacttctggcattacctagagtcctgctgcctcttcatttcctcctgcctatcttcctcgctgcagtgcctgcccacagatgcgctcttccaggggctcctgcaaatttctctcaccaagatgtttggctagaggctcatctgcctcgggagccggatggaacattaagctcttgtcttcggtttgcctacccgcaagccctacctaatacaactctaggggaggagcggcaaagccgaggggagcttgaagatgagcccgccactgtgccatgtagccaagggtgggagtacgaccatagtgagtttagctctacaatagccaccgaatgggatttggtttgcgaacaaaaaggtctaaatagggctgcgtccaccttttttttcgccggcgtgcttgtgggtgctgttgcgttcggctatttaagtgataggttcgggcgcaggaggctgttacttgtggcctacgtttccactctggtgctgggtttagcttcggccgcaagtgtctcatacgttatgttcgcaataactagaactttgactgggtctgccctcgccggatttactatcatagtgatgccacttgagctcgagtggctggatgtggagcacagaaccgtggcgggggtgttgtcctccactttttggacaggaggggtgatgttactggctttggtaggatacctgatccgagattggcggtggttgctgctcgcggtgactctgccatgcgcccccggaatcctctccttgtggtgggttccagagtctgctagatggctgctaacgcaaggtcacgtgaaggaggcccatcggtacctactccattgcgcaaggctcaatggcaggccagtgtgcgaggattctttttcccaggaggctgtcagcaaggtcgcagctggggaaagagtcgtgcgccggcccagttatctggatttgtttcgcactcccagactgagacatatcagcctatgttgtgtcgtcgtctggtttggcgtcaacttttcctattatggcctgagcttggacgttagtggactcgggttgaatgtttatcagactcaactgctgtttggagccgtagagctgccatctaaactgcttgtgtacctgtccgtccgatatgcaggacggcgactaactcaggcggggaccttacttggcaccgccctggcctttggcacaaggctcctggtttccagtgatatgaagtcttggtcgaccgtattggccgttatgggcaaagcatttagcgaagccgctttcactaccgcctatctttttacttctgaactatatcctactgttttaagacagactggcatggggcttacagcattggtaggaagattaggcggctcgctggcaccactggctgccctactcgacggggtctggctgtcgctgccgaaactcacatatggcggaattgcgctcctggcagctgggaccgctcttctgctacccgagactagacaggctcaactgcccgagacaatccaggacgtggaaagaaaaaggtgcgtgcaccggacagtctctgtgtatgtctag

SEQ ID NO: 167002 - DNA, 1641 bp, Artificial Sequence
  derived and/or modified sequence
atgggattcgaagaattactggaacaggtcgggggctttgggcctttccagctacgtaacgtggcactccttgctctccccagggtcctcctccctctgcatttccttttaccaatttttctcgctgccgttccagctcaccgctgcgccttgccgggcgctcctgctaattttagccaccaggacgtgtggctggaggctcatttgccccgagagcccgacggcacactaagctcctgcctaagattcgcttatcctcaggccctgcctaataccacactaggggaggaaagacagtcaagaggcgaactagaggatgagcctgctactgtgccgtgttcacagggctgggaatatgatcactcggagttctcctccaccatagccacagagtgggatctggtgtgtgagcagaagggcctgaaccgggccgctagcaccttcttctttgcaggtgtattggttggagcagtggcctttgggtacctgtcagaccgctttgggaggagacggctactgctagtggcctatgttagcacgctcgtgttgggtctggcctcagccgcgagcgtgtcttatgtgatgtttgccatcacccggactcttacaggttctgccttggcgggttttaccatcatcgtgatgcccctagaactggagtggttagatgtggagcatcgcaccgtggccggagtcctttccagcaccttttggactggcggcgtcatgttgttggcccttgtggggtatctcattcgtgactggcggtggctccttctggccgtgaccttgccttgcgcacccgggattttgtcactctggtgggtaccagagtcagctcgttggctactcacacaagggcacgttaaagaagctcaccgatatttgctccactgtgcgcgacttaatgggcggccggtgtgcgaggattctttctcacaggaggctgtttctaaagtggcggccggggagagggtggttcggaggcctagttatttggacctgtttcgtacacccagactgcggcacatttccctgtgttgtgtcgtggtatggtttggcgtgaatttttcatattatgggctatccctcgacgtgagtgggctcggtctgaatgtgtatcagacgcaactcttgttcggtgccgtagagctgcccagtaagctcctcgtctatttgtccgtacgctatgcaggaaggcgcctgacccaggctggtacactgctcggtacagctcttgcgtttggcacgcgcctgctagtctccagtgatatgaaatcttggtccacggtgcttgccgttatgggaaaagccttttccgaagccgcttttacgactgcctacctcttcacgtctgagctgtatcctacagtgttgcggcagactggaatgggtcttacagcccttgtcggacgactggggggaagtctggctccactggcagccctgctggacggcgtctggctctctctgcccaagctcacgtatggaggcattgctcttcttgccgcagggaccgcgttgctccttccggagactagacaggcgcagcttccggagactatccaggatgtggagcgtaagtctgccccgacttccctacaggaggaagagatgccaatgaagcaggtgcaaaattag

SEQ ID NO: 167003 - DNA, 1620 bp, Artificial Sequence
  derived and/or modified sequence
atgggctttgaggagctgctggagcaggtgggcggcttcggccccttccagctgagaaatgtggccctgctggccctgccccgggtgctgctgcccctgcacttcctgctgcccatcttcctggccgctgtgcctgcccaccgctgtgccctgcccggggccccagccaacttcagccaccaggatgtgtggctggaggcccacctgccccgggagccagatggcaccctgagcagctgcctgcgctttgcctacccccaggccctgcccaacaccaccctgggggaggagcggcagagcagaggagagctggaggatgagcccgccaccgtgccctgcagccagggctgggagtatgaccacagcgagttcagcagcaccatcgccacagagtgggacctggtgtgtgagcagaagggcctgaacagagctgccagcaccttcttctttgctggggtgctggtgggcgctgtggccttcggctacctgagtgacagatttggaagaagaaggctgctgctggtggcctacgtgtccaccctggtgctgggcctggccagcgctgcctctgtgtcctatgtgatgtttgccatcaccaggaccctgactggaagtgccctggccggcttcaccatcatcgtgatgcccctggagctggagtggctggatgtggagcacaggacagtggccggcgtgctgagcagcaccttctggacaggaggagtgatgctgctggccctggtgggctacctgatccgggactggcgctggctgctgctggccgtgaccctgccctgtgcccctggcatcctgagcctgtggtgggtgcctgagagcgcccgctggctgctgacccagggccacgtgaaggaggcccaccgctacctgctgcactgtgcccggctgaatggccggcctgtgtgtgaagattccttcagccaggaggccgtgtccaaggtggccgccggggagcgggtggtgcggcggcccagctacctggacctcttccgcaccccccggctgcggcacatcagcctgtgctgcgtggtggtgtggtttggagtgaacttctcctactacggcctgagcctggatgtgtctggcctgggcctgaatgtgtaccagacccagctgctgtttggagctgtggagctgcccagcaagctgctggtgtacctgtctgtgcgctatgccggccggcggctgacccaggccggcaccctgctgggcacagccctggccttcggcacccggctgctggtgtccagtgacatgaagtcctggagcacagtgctggccgtgatgggcaaggccttcagcgaggccgccttcaccacagcctacctgttcaccagcgagctgtaccccaccgtgctgcggcagacaggcatgggcctgacagccctggtgggccgcctgggcggcagcctggcccccctggccgccctgctggatggagtgtggctgagcctgcccaagctgacctacggcggcatcgccctgctggccgccggcacagccctgctgctgcctgagacccggcaggcccagctgcctgagaccatccaggatgtggagaggaagagatgtgtgcacaggacagtgtctgtgtatgtgtag

SEQ ID NO: 167004 - DNA, 1641 bp, Artificial Sequence
  derived and/or modified sequence
atgggctttgaggagctgctggagcaggtgggcggcttcggccccttccagctgagaaatgtggccctgctggccctgccccgggtgctgctgcccctgcacttcctgctgcccatcttcctggccgctgtgcctgcccaccgctgtgccctgcccggggccccagccaacttcagccaccaggatgtgtggctggaggcccacctgccccgggagccagatggcaccctgagcagctgcctgcgctttgcctacccccaggccctgcccaacaccaccctgggggaggagcggcagagcagaggagagctggaggatgagcccgccaccgtgccctgcagccagggctgggagtatgaccacagcgagttcagcagcaccatcgccacagagtgggacctggtgtgtgagcagaagggcctgaacagagctgccagcaccttcttctttgctggggtgctggtgggcgctgtggccttcggctacctgagtgacagatttggaagaagaaggctgctgctggtggcctacgtgtccaccctggtgctgggcctggccagcgctgcctctgtgtcctatgtgatgtttgccatcaccaggaccctgactggaagtgccctggccggcttcaccatcatcgtgatgcccctggagctggagtggctggatgtggagcacaggacagtggccggcgtgctgagcagcaccttctggacaggaggagtgatgctgctggccctggtgggctacctgatccgggactggcgctggctgctgctggccgtgaccctgccctgtgcccctggcatcctgagcctgtggtgggtgcctgagagcgcccgctggctgctgacccagggccacgtgaaggaggcccaccgctacctgctgcactgtgcccggctgaatggccggcctgtgtgtgaagattccttcagccaggaggccgtgtccaaggtggccgccggggagcgggtggtgcggcggcccagctacctggacctcttccgcaccccccggctgcggcacatcagcctgtgctgcgtggtggtgtggtttggagtgaacttctcctactacggcctgagcctggatgtgtctggcctgggcctgaatgtgtaccagacccagctgctgtttggagctgtggagctgcccagcaagctgctggtgtacctgtctgtgcgctatgccggccggcggctgacccaggccggcaccctgctgggcacagccctggccttcggcacccggctgctggtgtccagtgacatgaagtcctggagcacagtgctggccgtgatgggcaaggccttcagcgaggccgccttcaccacagcctacctgttcaccagcgagctgtaccccaccgtgctgcggcagacaggcatgggcctgacagccctggtgggccgcctgggcggcagcctggcccccctggccgccctgctggatggagtgtggctgagcctgcccaagctgacctacggcggcatcgccctgctggccgccggcacagccctgctgctgcctgagacccggcaggcccagctgcctgagaccatccaggatgtggagaggaagagcgcccccaccagcctgcaggaggaggagatgcccatgaagcaggtgcagaactag

SEQ ID NO: 167005 - DNA, 1620 bp, Artificial Sequence
  derived and/or modified sequence
atgggcttcgaggagctgctggagcaggtgggcggcttcggcccctttcaattgaggaacgtagcactgcttgccctgcccagagtactcctcccattacacttcctgctgcccatctttctggccgccgtgccggctcatcgatgtgctctccctggcgccccagcgaacttctcacaccaggatgtgtggcttgaagcccacctgcccagagagccggacggaaccctgagctcctgcctgcgatttgcctatccccaggcactgcccaatacgactttgggcgaagaacggcagagccggggcgagctcgaggacgagcctgctacggtgccttgtagtcagggctgggaatacgatcactctgaattcagtagtaccatagccactgaatgggaccttgtgtgcgagcagaaaggtctgaaccgcgctgcatcaacgttttttttcgccggagtcctggtgggtgccgtggccttcggctatctgtcggatagattcggacggagacgcttgttgctcgtggcttatgtttccactctggtgcttggtttagcttctgccgccagcgtgagctacgtcatgttcgccattacccgcacacttaccggttctgccctggccgggttcacaatcatcgttatgcccctggagcttgagtggctggatgtggagcaccgaacagttgcgggagtcttgtctagcactttctggaccggaggagtaatgctgctcgcgctggtcggctatctaataagagactggagatggcttctattggcagttactctcccctgtgcacctggtatcctgtccctctggtgggttcccgagagtgcccgatggcttctgacacagggacacgtcaaggaggcacatcgctacctactccattgcgccaggttgaatggacgccccgtgtgcgaagacagcttcagtcaggaggcagtttctaaggtagcggctggcgagagagtggtccggcgcccctcctaccttgatctttttaggaccccccgcctccgacacatttccctgtgttgcgtggttgtatggttcggagttaacttttcttattacggactatccttggacgtatcaggcttgggactgaatgtgtatcagacccagctgctgttcggcgctgtcgaactgccctcgaagcttctcgtctacctgagcgtgcgttatgcaggtaggcgcctgactcaggccgggacactgctcggcacggctctagcatttggcactcggcttctggtgtctagcgatatgaaatcttggagtacagtactggccgtaatggggaaagcctttagcgaggcggcctttacgactgcttacctcttcacatccgaactttaccccacagttctgcgtcagaccggaatgggcctgaccgctctggttgggcgcttagggggatcactcgctcctctcgcggccttactggatggtgtgtggctgagcttaccgaaactgacatacggtggaatcgctttgctggcagccggcaccgccctcttgctgccggagaccaggcaagcccagctacccgaaacaatacaggacgttgagaggaagagatgcgtgcaccggacagttagcgtatacgtttag

SEQ ID NO: 167006 - DNA, 1641 bp, Artificial Sequence
  derived and/or modified sequence
atgggcttcgaggagctgctggagcaggtgggcggcttcggcccctttcaattgaggaatgtcgcactgctggccctcccaagggtcctgctgccattgcacttccttcttccaatcttcctcgccgctgttcctgctcatcgttgcgcgctgcctggcgctccagcaaacttctcccatcaggatgtgtggttggaggcccacttgccaagagaaccggacggcaccctgtcctcctgcctgaggttcgcatacccgcaggccctgcccaatacgactctcggtgaggaacgccagtcgcgaggagaactggaggatgaacccgccaccgtgccctgttctcaaggctgggagtacgatcattcagaattttcgtccaccatagcaactgaatgggacctggtgtgcgaacaaaaaggccttaaccgagctgcaagtacctttttctttgccggggtgctggtgggtgccgtagccttcgggtatctcagcgatagattcgggcggcgcaggctgctgctagttgcttacgtgagtactcttgtgcttgggctagcttctgctgcctctgtcagctacgttatgttcgccattactcgtaccctgactggcagtgccttggctggtttcactataattgtcatgcctttagagctcgaatggttagatgtcgagcaccgcaccgttgccggagtcctcagttccacgttctggaccggcggcgttatgctattagcgctggtggggtaccttattcgggactggcgatggctgcttttggccgtcacactcccttgcgccccaggtattctgtctctttggtgggtgccagagagcgctagatggctcctcactcagggacatgtgaaagaggcacaccggtacctcctccattgcgcccgcctgaacgggcgaccggtgtgcgaggactcgtttagtcaagaggccgtttccaaagttgctgccggggaacgggtggtaagacgaccttcctacctggatctgtttcggacaccgcgtttaaggcatattagtctgtgttgtgtggtagtgtggtttggcgtgaacttctcttactatggactgtccctggatgtatccggtctcggcctgaatgtctaccaaacccaactgctctttggcgctgttgagctgccctccaaactgctcgtgtacctgagcgtgagatacgctgggcgcagactgactcaggctggcactctcttggggaccgccctggcttttgggactcggctccttgtatcttcggacatgaaatcatggtctacagtgctcgcagtgatgggaaaggcattcagtgaagccgcattcacaacagcctacttgtttacctctgagttgtaccctaccgtgttaaggcagactggaatgggtttgaccgcactagtcgggaggttgggtggcagcctggcccctcttgcagctctcctggatggtgtgtggctgtcacttccgaaattaacatacgggggcattgcactgctggccgccggcacagccttactcctgccggagacaagacaagcccagctccctgagacgattcaggatgttgagcggaaatcagctcctacttccctgcaggaggaggaaatgcccatgaagcaagtccagaactag

SEQ ID NO: 167007 - DNA, 1620 bp, Artificial Sequence
  derived and/or modified sequence
atgggattcgaggagcttcttgaacaggtggggggttttggtcctttccagctgcgaaatgtggctctcctcgctctccccagagttctacttcccctgcattttctgctgcctatattcctggccgctgttcccgctcaccgatgtgcactccctggggctccagccaattttagtcaccaggacgtttggcttgaggcccacctgcctcgggagcctgatggaacgctctcttcttgcctccgatttgcgtacccccaggctctgccaaacacaacactgggcgaagagcggcagtcccggggtgagttagaggatgagcccgctaccgtgccgtgttcacaaggctgggagtacgaccattcagaatttagcagcaccatcgctaccgagtgggacttagtgtgtgaacagaaaggtctaaaccgagccgcaagcacattcttcttcgccggagtgctggttggcgcagttgcctttggatatcttagcgaccgtttcggccgaagacgactcctcctggtggcatatgtatctactctcgtgctaggtctggcatcagccgcttccgtcagttatgtgatgtttgcaataaccagaactcttacaggatccgcacttgccggattcacgatcatcgttatgcctcttgagcttgaatggctcgacgtcgagcaccgcactgtggcgggagtgctgtcttctaccttctggactggcggtgttatgttgcttgcactggtgggttacctgattcgggactggcgatggcttctcctcgctgtgaccctgccctgcgctcccggtatactcagcttgtggtgggtccccgaaagcgcaaggtggctgctgactcaaggccatgtgaaggaagcgcataggtatctgctgcactgcgcgaggttaaacggcagacccgtgtgcgaagacagcttcagccaagaggcagtctcgaaggtggctgcgggtgagcgtgtggtgcgaaggccatcctatctcgatctgtttaggaccccacggctgcgtcacatttctctgtgctgcgttgtggtttggttcggcgtaaactttagttactatggccttagtctggatgtctcaggcctcggcctgaacgtttatcagacccagttactatttggagccgttgagttgccctctaagctgctcgtctatctgagcgtcagatacgctgggaggcgtctgacccaggcaggcacactgctaggcactgcactggcatttgggactaggctgttagtatcctctgatatgaaatcgtggtcaacagtactggcagtgatggggaaagccttctccgaagctgcatttaccacggcatacctgtttacatcagaactgtacccgacagttctacgtcagaccggtatgggattaaccgccctggtgggccgactcgggggaagcctggcccctctggcagcacttctcgacggcgtatggttgagcctccctaaacttacctacggagggatcgctctactggctgcgggaaccgctctgctgctgccggagaccagacaagcacagcttcctgagaccatccaagacgtcgagcgcaagcggtgtgtccatcggactgtgagcgtctatgtgtag

SEQ ID NO: 167008 - DNA, 1641 bp, Artificial Sequence
  derived and/or modified sequence
atgggctttgaagagctgctggaacaagtgggcggatttgggcctttccaactgcgcaatgttgcccttctggcgctgcccagggtactgcttcctctgcattttttattaccaatctttttggcggctgtgcccgctcaccgatgcgccctgcctggcgctccggcaaatttttcacaccaggacgtctggctggaagcgcacctcccacgggagccagatgggacactctcaagctgtcttagatttgcctaccctcaggcattgcccaatactactctgggcgaggaaagacaatcaagaggggaattggaggatgagcctgcgaccgtgccatgttcgcaaggctgggagtatgaccattccgaattcagctcaactattgctactgaatgggatttagtgtgtgaacagaaaggcctgaaccgggctgcttcgacattctttttcgcgggagtcctagtcggtgccgtagccttcggctacttgagcgaccgcttcggtaggcgcagacttctgctggtagcctatgtctcaacacttgtgctgggcttagccagcgccgcttctgtcagttatgtcatgtttgcaataacccgcacacttaccgggtctgccttggcaggttttactattattgtgatgccccttgaactcgagtggctagatgtcgaacaccggaccgttgcaggcgtgctgtctagcaccttttggaccggcggagtaatgttgctggcactggtgggttatttgattcgcgattggcggtggctgctgctggcagtgacattgccctgtgccccagggatccttagcttatggtgggtgcccgaatctgcacgttggctgcttacgcaaggacatgttaaggaagctcacagatatctcctccactgcgccagactgaatggcagaccagtctgcgaggactcattttcacaggaggccgtgtctaaggtcgctgccggtgagcgggttgtgcggagaccatcttatctagacctgttccgaactcctaggctccgccatatcagcctttgttgcgtggtggtgtggttcggagttaatttcagctattatgggttgtcgttggatgttagtggcctgggtctgaacgtctatcaaactcagttactgttcggggctgtggagttgcccagcaagttgctcgtctacctgtcagttcgatatgccggacggaggcttacccaggctggcaccttgttagggactgcacttgccttcggtacgcgcctcttggtgagtagtgatatgaagtcctggtcaacagtactcgctgttatgggaaaggcattcagcgaagctgcattcacaacagcctatcttttcacatctgagctgtaccctacagtactccggcaaacaggcatgggactgacggctctggttgggcgactcggtggcagcttggctcctctggctgccctgctggacggagtctggctgtcgctccctaaacttacctatggtgggatcgcgctgctagcagcgggaacagctctgttattacccgaaacccggcaggcccagttgccagagactatacaggacgtggaacgaaaaagcgcccctacctcgctccaggaagaagagatgcctatgaagcaggttcagaactag

SEQ ID NO: 167009 - DNA, 1822 bp, Artificial Sequence
  derived and/or modified sequence
atgggctttgaggagctgctggagcaggtgggcggctttgggcccttccaactgcggaatgtggcactgctggccctgccccgagtgctgctaccactgcacttcctcctgcccatcttcctggctgccgtgcctgcccaccgatgtgccctgccgggtgcccctgccaacttcagccatcaggatgtgtggctggaggcccatcttccccgggagcctgatggcacgctcagctcctgcctccgctttgcctatccccaggctctccccaacaccacgttgggggaagaaaggcagagccgtggggagctggaggatgaacctgccacagtgccctgctctcagggctgggagtacgaccactcagaattctcctctaccattgcaactgagtgggatctggtgtgtgagcagaaaggtctgaacagagctgcgtccactttcttcttcgccggtgtgctggtgggggctgtggcctttggatatctgtccgacaggtttgggcggcggcgtctgctgctggtagcctacgtgagtaccctggtgctgggcctggcatctgcagcctccgtcagctatgtaatgtttgccatcacccgcacccttactggctcagccctggctggttttaccatcatcgtgatgccactggagctggagtggctggatgtggagcaccgcaccgtggctggagtcctgagcagcaccttctggacagggggcgtgatgctgctggcactggttgggtacctgatacgggactggcgatggcttctgctagctgtcaccctgccttgtgccccaggcatcctcagcctctggtgggtgcctgagtctgcacgctggcttctgacccaaggccatgtgaaagaggcccacaggtacttgctccactgtgccaggctcaatgggcggccagtgtgtgaggacagcttcagccaggaggctgtgagcaaagtggccgccggggaacgggtggtccgaagaccttcatacctagacctgttccgcacaccacggctccgacacatctcactgtgctgcgtggtggtgtggttcggagtgaacttctcctattacggcctgagtctggatgtgtcggggctggggctgaacgtgtaccagacacagctgttgttcggggctgtggaactgccctccaagctgctggtctacttgtcggtgcgctacgcaggacgccgcctcacgcaagctgggacactgctgggcacggccctggcgttcggcactagactgctagtgtcctccgatatgaagtcctggagcactgtcctggcagtgatggggaaagctttttctgaagctgccttcaccactgcctacctgttcacttcagagttgtaccctacggtgctcagacagacagggatggggctgactgcactggtgggccggctggggggctctttggccccactggcggccttgctggatggagtgtggctgtcactgcccaagcttacttatggggggatcgccctgctggctgccggcaccgccctcctgctgccagagacgaggcaggcacagctgccagagaccatccaggacgtggagagaaagaggtgtgtgcacaggactgtgtctgtgtacgtgtgataacatgcatatggatgcaggtgctcagatacctgacaccttaggattcagacaggaaactatatctgcacatgtgtacttggtgcatgtatgtgtgcgtgcacaggtgagtgtttcagggtgcatgattgggggcatgtaaactgcaagcataaatgtgtacatgagtgtatgaacacaaatacataaggttgttcaggaa

SEQ ID NO: 167010 - DNA, 2549 bp, Artificial Sequence
  derived and/or modified sequence
ccacctccagagtccaagggtctatgtggtgggcagtttgagctggctggatactagagggaggctgcacctgaagcatttggtgggtgagcagcatgggctttgaggagctgctggagcaggtgggcggctttgggcccttccaactgcggaatgtggcactgctggccctgccccgagtgctgctaccactgcacttcctcctgcccatcttcctggctgccgtgcctgcccaccgatgtgccctgccgggtgcccctgccaacttcagccatcaggatgtgtggctggaggcccatcttccccgggagcctgatggcacgctcagctcctgcctccgctttgcctatccccaggctctccccaacaccacgttgggggaagaaaggcagagccgtggggagctggaggatgaacctgccacagtgccctgctctcagggctgggagtacgaccactcagaattctcctctaccattgcaactgagtgggatctggtgtgtgagcagaaaggtctgaacagagctgcgtccactttcttcttcgccggtgtgctggtgggggctgtggcctttggatatctgtccgacaggtttgggcggcggcgtctgctgctggtagcctacgtgagtaccctggtgctgggcctggcatctgcagcctccgtcagctatgtaatgtttgccatcacccgcacccttactggctcagccctggctggttttaccatcatcgtgatgccactggagctggagtggctggatgtggagcaccgcaccgtggctggagtcctgagcagcaccttctggacagggggcgtgatgctgctggcactggttgggtacctgatacgggactggcgatggcttctgctagctgtcaccctgccttgtgccccaggcatcctcagcctctggtgggtgcctgagtctgcacgctggcttctgacccaaggccatgtgaaagaggcccacaggtacttgctccactgtgccaggctcaatgggcggccagtgtgtgaggacagcttcagccaggaggctgtgagcaaagtggccgccggggaacgggtggtccgaagaccttcatacctagacctgttccgcacaccacggctccgacacatctcactgtgctgcgtggtggtgtggttcggagtgaacttctcctattacggcctgagtctggatgtgtcggggctggggctgaacgtgtaccagacacagctgttgttcggggctgtggaactgccctccaagctgctggtctacttgtcggtgcgctacgcaggacgccgcctcacgcaagctgggacactgctgggcacggccctggcgttcggcactagactgctagtgtcctccgatatgaagtcctggagcactgtcctggcagtgatggggaaagctttttctgaagctgccttcaccactgcctacctgttcacttcagagttgtaccctacggtgctcagacagacagggatggggctgactgcactggtgggccggctggggggctctttggccccactggcggccttgctggatggagtgtggctgtcactgcccaagcttacttatggggggatcgccctgctggctgccggcaccgccctcctgctgccagagacgaggcaggcacagctgccagagaccatccaggacgtggagagaaagagtgccccaaccagtcttcaggaggaagagatgcccatgaagcaggtccagaactaagtgggagtggaggcaggccctccacagaagctctgcagcaggggctgggagagcagaagggcaggccctgcaactcaggctgggagtatcgaaccctctgcctagggccggagttgctgccagtacccgctccctctgctcatccatccttgattatttggcttctaggaacagttgacttcccagaatgcagtgggctgctgggcacccctctcacggttggggaggattctgtaaataaaggtgccccttgggttggggcagtggtgacgagctgtgggaagagccctggataggaagccactgagtctgccctgggctctgataaaaccttcaccattaacttgctgtgtgaccttgggcatgtggctttccctctctgggcctcagtctgttcatctcccaaatggataatgaagcctcttgggaggccctaccataggatctgttgccatgctcaaatgagttactgaataaggtgcttctgcttcttctagagatggtgctaaagaaaggactagcatatgagacttctggtaccaatggggctggtgggcatgctgtccactgtgtggtgctaggactgccaatgccaggcccaagggacaaaaagaacagagctttttgttctcatggctggccctgctacctccgaggcaccctgcagggcaatgcatgtcatcccaacccccacactccccatcctccaacccactggtctcatgcccaaagaagagttgaaggcatgggagccaacattttattgaagaagccacagaggctgaaattcaataaacacaagttttatgagta

SEQ ID NO: 167011 - DNA, 1620 bp, Artificial Sequence
  derived and/or modified sequence
atgggcttcgaggagctgctggagcaggtgggcggcttcggccccttccagctgagaaacgtggccctgctggccctgcccagagtgctgctgcccctgcacttcctgctgcccatcttcctggccgccgtgcccgcccacagatgcgccctgcccggcgcccccgccaacttcagccaccaggacgtgtggctggaggcccacctgcccagagagcccgacggcaccctgagcagctgcctgagattcgcctacccccaggccctgcccaacaccaccctgggcgaggagagacagagcagaggcgagctggaggacgagcccgccaccgtgccctgcagccagggctgggagtacgaccacagcgagttcagcagcaccatcgccaccgagtgggacctggtgtgcgagcagaagggcctgaacagagccgccagcaccttcttcttcgccggcgtgctggtgggcgccgtggccttcggctacctgagcgacagattcggcagaagaagactgctgctggtggcctacgtgagcaccctggtgctgggcctggccagcgccgccagcgtgagctacgtgatgttcgccatcaccagaaccctgaccggcagcgccctggccggcttcaccatcatcgtgatgcccctggagctggagtggctggacgtggagcacagaaccgtggccggcgtgctgagcagcaccttctggaccggcggcgtgatgctgctggccctggtgggctacctgatcagagactggagatggctgctgctggccgtgaccctgccctgcgcccccggcatcctgagcctgtggtgggtgcccgagagcgccagatggctgctgacccagggccacgtgaaggaggcccacagatacctgctgcactgcgccagactgaacggcagacccgtgtgcgaggacagcttcagccaggaggccgtgagcaaggtggccgccggcgagagagtggtgagaagacccagctacctggacctgttcagaacccccagactgagacacatcagcctgtgctgcgtggtggtgtggttcggcgtgaacttcagctactacggcctgagcctggacgtgagcggcctgggcctgaacgtgtaccagacccagctgctgttcggcgccgtggagctgcccagcaagctgctggtgtacctgagcgtgagatacgccggcagaagactgacccaggccggcaccctgctgggcaccgccctggccttcggcaccagactgctggtgagcagcgacatgaagagctggagcaccgtgctggccgtgatgggcaaggccttcagcgaggccgccttcaccaccgcctacctgttcaccagcgagctgtaccccaccgtgctgagacagaccggcatgggcctgaccgccctggtgggcagactgggcggcagcctggcccccctggccgccctgctggacggcgtgtggctgagcctgcccaagctgacctacggcggcatcgccctgctggccgccggcaccgccctgctgctgcccgagaccagacaggcccagctgcccgagaccatccaggacgtggagagaaagagatgcgtgcacagaaccgtgagcgtgtacgtgtag

SEQ ID NO: 167012 - DNA, 1641 bp, Artificial Sequence
  derived and/or modified sequence
atgggcttcgaggagctgctggagcaggtgggcggcttcggccccttccagctgagaaacgtggccctgctggccctgcccagagtgctgctgcccctgcacttcctgctgcccatcttcctggccgccgtgcccgcccacagatgcgccctgcccggcgcccccgccaacttcagccaccaggacgtgtggctggaggcccacctgcccagagagcccgacggcaccctgagcagctgcctgagattcgcctacccccaggccctgcccaacaccaccctgggcgaggagagacagagcagaggcgagctggaggacgagcccgccaccgtgccctgcagccagggctgggagtacgaccacagcgagttcagcagcaccatcgccaccgagtgggacctggtgtgcgagcagaagggcctgaacagagccgccagcaccttcttcttcgccggcgtgctggtgggcgccgtggccttcggctacctgagcgacagattcggcagaagaagactgctgctggtggcctacgtgagcaccctggtgctgggcctggccagcgccgccagcgtgagctacgtgatgttcgccatcaccagaaccctgaccggcagcgccctggccggcttcaccatcatcgtgatgcccctggagctggagtggctggacgtggagcacagaaccgtggccggcgtgctgagcagcaccttctggaccggcggcgtgatgctgctggccctggtgggctacctgatcagagactggagatggctgctgctggccgtgaccctgccctgcgcccccggcatcctgagcctgtggtgggtgcccgagagcgccagatggctgctgacccagggccacgtgaaggaggcccacagatacctgctgcactgcgccagactgaacggcagacccgtgtgcgaggacagcttcagccaggaggccgtgagcaaggtggccgccggcgagagagtggtgagaagacccagctacctggacctgttcagaacccccagactgagacacatcagcctgtgctgcgtggtggtgtggttcggcgtgaacttcagctactacggcctgagcctggacgtgagcggcctgggcctgaacgtgtaccagacccagctgctgttcggcgccgtggagctgcccagcaagctgctggtgtacctgagcgtgagatacgccggcagaagactgacccaggccggcaccctgctgggcaccgccctggccttcggcaccagactgctggtgagcagcgacatgaagagctggagcaccgtgctggccgtgatgggcaaggccttcagcgaggccgccttcaccaccgcctacctgttcaccagcgagctgtaccccaccgtgctgagacagaccggcatgggcctgaccgccctggtgggcagactgggcggcagcctggcccccctggccgccctgctggacggcgtgtggctgagcctgcccaagctgacctacggcggcatcgccctgctggccgccggcaccgccctgctgctgcccgagaccagacaggcccagctgcccgagaccatccaggacgtggagagaaagagcgcccccaccagcctgcaggaggaggagatgcccatgaagcaggtgcagaactag

SEQ ID NO: 167013 - protein, 224 aa, Artificial Sequence
  derived and/or modified sequence
MTARAWASWRSSALLLLLVPGYFPLSHPMTVAGPVGGSLSVQCRYEKEHRTLNKFWCRPPQILRCDKIVETKGSAGKRNGRVSIRDSPANLSFTVTLENLTEEDAGTYWCGVDTPWLRDFHDPIVEVEVSVFPAGTTTASSPQSSMGTSGPPTKLPVHTWPSVTRKDSPEPSPHPGSLFSNVRFLLLVLLELPLLLSMLGAVLWVNRPQRSSRSRQNWPKGENQ

SEQ ID NO: 167014 - DNA, 675 bp, Artificial Sequence
  derived and/or modified sequence
atgaccgccagagcctgggccagctggagaagcagcgccctgctgctgctgctggtgcccggctacttccccctgagccaccccatgaccgtggccggccccgtgggcggcagcctgagcgtgcagtgcagatacgagaaggagcacagaaccctgaacaagttctggtgcagacccccccagatcctgagatgcgacaagatcgtggagaccaagggcagcgccggcaagagaaacggcagagtgagcatcagagacagccccgccaacctgagcttcaccgtgaccctggagaacctgaccgaggaggacgccggcacctactggtgcggcgtggacaccccctggctgagagacttccacgaccccatcgtggaggtggaggtgagcgtgttccccgccggcaccaccaccgccagcagcccccagagcagcatgggcaccagcggcccccccaccaagctgcccgtgcacacctggcccagcgtgaccagaaaggacagccccgagcccagcccccaccccggcagcctgttcagcaacgtgagattcctgctgctggtgctgctggagctgcccctgctgctgagcatgctgggcgccgtgctgtgggtgaacagaccccagagaagcagcagaagcagacagaactggcccaagggcgagaaccagtag

SEQ ID NO: 167015 - DNA, 675 bp, Artificial Sequence
  derived and/or modified sequence
atgaccgcacgcgcgtgggcttcctggagatcttctgcccttctgctcttactggtaccaggatacttccccctttcgcaccccatgaccgttgccggacccgtgggcggaagtttatctgtgcagtgtcgttacgaaaaggagcaccgcacgttgaacaagttctggtgccgtccgccccagattctgcggtgtgataaaattgtggagaccaaagggagcgccgggaaacggaatggccgagtcagcatccgagactctcccgcgaacctcagctttacagtaacgttggagaatcttacagaggaggatgccggaacatactggtgtggggtagacaccccctggctccgagactttcacgatcctattgtggaagttgaggtgtctgtatttccagccgggactaccacagcctcgtcccctcagtcatccatgggtacttcggggccaccaacgaaactgcccgtgcatacttggccatcggttacaaggaaagactcaccagagcccagcccccatcccggttcgctgttctctaatgtgagattcttgctcctggttctgctggagctaccgctgctgctgtcgatgctaggggctgtgctctgggtgaacagaccgcagagatcctcccgaagcaggcagaactggccgaaaggagagaaccagtag

SEQ ID NO: 167016 - DNA, 675 bp, Artificial Sequence
  derived and/or modified sequence
atgacagcccgggcctgggcctcctggaggagcagcgccctgctgctgctgctggtgcccggctacttccccctgagccaccccatgacagtggccggccctgtgggcggcagcctgtctgtgcagtgccgctatgagaaggagcacaggaccctgaacaagttctggtgcaggcctccccagatcctgcgctgtgacaagatcgtggagaccaagggcagcgctgggaagagaaatggccgggtgtccatccgggacagccctgccaacctgtccttcaccgtgaccctggagaacctgacagaagaagatgctggcacctactggtgtggggtggacaccccctggctgcgggacttccatgaccccatcgtggaggtggaggtgtctgtgtttcctgctggcaccaccacagccagcagcccccagagctccatgggcaccagcggcccccccaccaagctgcctgtgcacacctggcccagcgtgaccaggaaggacagccctgagcccagcccccaccctggcagcctcttcagcaatgtgcgcttcctgctgctggtgctgctggagctgcccctgctgctgtccatgctgggcgctgtgctgtgggtgaaccggccccagaggagcagccgcagccggcagaactggcccaagggggagaaccagtag

SEQ ID NO: 167017 - DNA, 675 bp, Artificial Sequence
  derived and/or modified sequence
atgaccgcccgggcctgggccagctggcggagcagcgccctgctgttactcctcgtgcctggatactttcctctcagccacccgatgactgtggccggcccagtggggggatccctttcagtgcagtgcaggtatgaaaaagagcatcgcacattaaataagttttggtgtcgtccacctcagattctcagatgcgacaaaatcgtggagacaaagggatctgcagggaagcggaacgggcgggtttcaattcgggactcgcccgccaatctgagcttcaccgtgactctggagaatcttaccgaagaggacgccggaacttactggtgcggggtcgataccccttggttaagagacttccacgacccgatcgtcgaggttgaagttagcgttttccctgccggaacaacaacagcctcatcgccacaatcctcaatggggacttccggtccgcccacaaagctgcctgttcacacatggccctcggtgacccggaaggacagcccagagccatcccctcatcctgggtccttgttctccaacgtccgttttctcctattggtacttttggaactgccccttttgctctcaatgctgggtgccgtactgtgggttaataggccacagcgatcctcccggtcgaggcagaattggccaaagggggagaaccagtag

SEQ ID NO: 167018 - DNA, 675 bp, Artificial Sequence
  derived and/or modified sequence
atgacagccagagcttgggcaagctggcgctcctcggcactgctgctcttgctggtgccaggctacttcccactctcacatcctatgactgtcgccggaccagtgggcggttccctctctgtgcagtgccgttatgagaaagagcaccgtacactgaacaagttttggtgtagacctcctcagatactgaggtgtgacaaaatcgttgagactaaagggagtgctggcaaaaggaacggacgtgtgtctattagggattctcctgctaacctgtccttcaccgtcacattagagaacctgacagaggaagacgccggtacctattggtgcggtgtggacaccccatggttaagggacttccacgatccaatcgtggaagtggaagtgtcggtctttcccgctggtacgactacggctagttcgccacagagttccatgggtacatccggaccccctactaaactgcccgtccatacttggcccagcgtcacacgcaaagacagcccggagcccagcccgcatcccggttccctgttctcaaatgtgcgcttcttgctcctggtattactcgagctgcctctcttgttgagcatgttaggggcagttctgtgggtgaatagaccccagcgaagtagccggtctcggcagaactggcctaaaggggaaaatcaatag

SEQ ID NO: 167019 - DNA, 1517 bp, Artificial Sequence
  derived and/or modified sequence
gaaatggcccagcttggctctgccttctgcagtgtgagtaacacactgaagccagaagctgtgggctgtggggaagtggctgcatcgccacccaagggaccctggactttgccagacgtcagggttgagaggagccactagcaccatcccagagctgtcagcaccggcctcagcccaggcggctctctccctgagcttcctgtaccctgaccctctccagcctcagacctgagacagggctggacaaggaagcagagagcagaagaaaagcagaagcgaagctcagatctgctgggaggagattacattttgtcccctcctggggtcttgcacagtggcaggtgacattcgtgttacaggaatgactgccagggcctgggcctcgtggcggtcttcagctctgctcctcctgcttgtcccaggctattttcctctgagccaccccatgaccgtggcgggccccgtggggggatccctgagtgtgcagtgtcgctatgagaaggaacacaggaccctcaacaaattctggtgcagaccaccacagattctccgatgtgacaagattgtggagaccaaagggtcagcagggaaaaggaatggccgagtgtccatcagggacagtcctgcaaacctcagcttcacagtgaccctggagaatctcacagaggaggacgcaggcacctactggtgtggggtggatacaccgtggctccgagactttcatgatcccattgtcgaggttgaggtgtccgtgttcccggccgggacgaccacagcctccagcccccagagctccatgggcacctcaggtcctcccacgaagctgcccgtgcacacctggcccagcgtgaccagaaaggacagccccgaacccagcccacaccctggctccctgttcagcaatgtccgcttcctgctcctggtcctcttggagctgcccctgctcctgagcatgctgggtgccgtcctctgggtgaacagacctcagagaagctctagaagcaggcagaattggcccaagggtgagaaccagtagcatctgctgtccatcaaggccctgtgctgcaacagagcccctctgggggactggaatgacctcctgaccactccctcccgggctgctctctccacatctcctggaatcctttgtgagcctccttcagccttttccctgtgcccgatcctcatgtgtcacatgtgaacctgacggacatggacgccctgagctgtgagtccacgtctcatgtgcacgccccggccagctaagcctcgggccgtcagcaatacctctgagtgcccggatgccctccctgcacccttccatttctccaggagcctggcactgcttcctccaccgttttcacagggagaagcaggtctaggactcccctgcacctttgccaccataatggcccacactccctgggtccaggagtgtagaatatgcggctgcttccatttgctgagtgtgtcgattcaatgatgctttcaaactttaataaatgacaatgtgtagg

SEQ ID NO: 167020 - protein, 174 aa, Artificial Sequence
  derived and/or modified sequence
MLRTESCRPRSPAGQVAAASPLLLLLLLLAWCAGACRGAPILPQGLQPEQQLQLWNEIDDTCSSFLSIDSQPQASNALEELCFMIMGMLPKPQEQDEKDNTKRFLFHYSKTQKLGKSNVVSSVVHPLLQLVPHLHERRMKRFRVDEEFQSPFASQSRGYFLFRPRNGRRSAGFI

SEQ ID NO: 167021 - protein, 157 aa, Artificial Sequence
  derived and/or modified sequence
MLRTESCRPRSPAGQVAAASPLLLLLLLLAWCAGACRGAPILPQGLQPEQQLQLWNEIDDTCSSFLSIDSQPQASNALEELCFMIMGMLPKPQEQDEKDNTKRSSVVHPLLQLVPHLHERRMKRFRVDEEFQSPFASQSRGYFLFRPRNGRRSAGFI

SEQ ID NO: 167022 - DNA, 474 bp, Artificial Sequence
  derived and/or modified sequence
atgctgcggaccgagagctgccggccccggagccccgccggccaggtggcagcagcatccccccttctcctcctgctcctgctgctcgcatggtgtgcaggcgcatgtcgcggtgctcctattctgcctcagggtctgcaacctgagcaacaactccagttatggaacgagatcgatgatacctgcagcagcttcctgtccattgactctcagccacaagcttccaacgcacttgaggagctgtgctttatgataatgggaatgctccctaagccccaggaacaggacgaaaaggataatacaaaacgctcaagcgtggtgcaccccctgttgcaactggttcctcacctccacgaacggcggatgaagcgcttccgggtggatgaggagttccaatctcccttcgcttcacagtctaggggctactttctctttcgacctaggaatggcaggagaagcgccgggttcatttag

SEQ ID NO: 167023 - DNA, 525 bp, Artificial Sequence
  derived and/or modified sequence
atgctgagaaccgaatcatgcagaccaagatcacctgcaggccaagtcgccgcagcctctcccctactgctgctcctgctacttttggcatggtgcgctggggcttgtcgcggagcacctatcctgccccagggcttacagccagaacagcagctacagctctggaatgagattgacgatacctgttcctcattcctcagcattgactcacagcctcaggcctccaacgcactggaagagctgtgtttcatgatcatgggaatgctccctaagccccaagagcaggatgaaaaggataatactaagagatttctcttccactattctaagacacagaagctgggtaagagcaacgtagtcagtagtgtggtgcacccattgctgcaacttgtccctcacctgcatgagaggcggatgaagcgcttccgcgttgatgaagagttccaatcccctttcgctagtcagagccgtggttactttttgttcaggcctcgcaacgggaggcgttcagccggatttatttag

SEQ ID NO: 167024 - DNA, 474 bp, Artificial Sequence
  derived and/or modified sequence
atgcttaggacagagagctgtagaccaaggagcccggcaggtcaggtcgccgcagccagccccctcttgctgctgctattactcctcgcttggtgcgccggagcctgcaggggcgctcccatcttgcctcaaggccttcagcccgaacagcagcttcagctctggaacgagatcgatgatacctgcagttcattcctctcaattgattctcagccccaggcctcgaacgcactcgaggagctctgtttcatgatcatgggcatgctgccaaagccgcaggaacaggacgaaaaagacaataccaagaggagtagcgtcgtccatcccctcctccagctagtaccccacttgcacgagagacggatgaagcgcttcagggtagacgaggagtttcagtctccctttgctagccaaagccgaggctactttctctttcgccctcgcaacggacggaggtcagccggtttcatttag

SEQ ID NO: 167025 - DNA, 525 bp, Artificial Sequence
  derived and/or modified sequence
atgctccggacagagtcctgccgaccgaggagccctgcagggcaagtggctgctgcatcccctttgttattacttctgctattactggcatggtgtgcaggggcctgtcggggggctcctattttaccgcagggtctccagcccgaacagcagttgcagctgtggaacgagatcgacgatacttgctcttcctttttatctatcgactcccagccccaggcctcaaatgcattggaagaactatgcttcatgataatggggatgttacccaagccccaagagcaggacgagaaagataacactaaacgtttcctctttcattattcaaagacgcagaagctcggcaaatccaacgtggtcagttctgtagtgcaccccttgctccaactggtcccccacttacatgaaagacgtatgaaacggtttcgagttgatgaagaatttcagtcccctttcgcaagtcagagccggggatatttcttgttccggccaaggaatgggcgcagaagtgctgggttcatctag

SEQ ID NO: 167026 - DNA, 474 bp, Artificial Sequence
  derived and/or modified sequence
atgcttagaaccgagtcctgtcggcccagatctccagcggggcaggtcgcagctgcctcaccattactgctactgctgttactcctggcctggtgtgcgggcgcatgtagaggagctcccatcctacctcaaggccttcaacccgagcagcaacttcaactgtggaacgagatcgacgatacatgctcctcattcctctccattgacagccaaccacaggcctcaaacgctctggaagaactgtgtttcatgatcatgggcatgctgccaaaaccacaggagcaggatgagaaagacaacacgaagcgttcttctgtcgtccacccactgctgcaactcgttccccacctccatgagcgtagaatgaaaaggtttcgtgtagatgaggagttccagagtcccttcgcttctcagagccgtggctacttcctgtttcgcccaaggaacggtagacgaagcgccgggttcatttag

SEQ ID NO: 167027 - DNA, 525 bp, Artificial Sequence
  derived and/or modified sequence
atgctccgcaccgaatcctgccggccccgatcacctgctggccaagttgcagccgccagtccactgctactgctgctcctgttactcgcgtggtgtgctggtgcttgtcggggagctcccatcctgcctcagggattgcagcccgaacagcaactgcagctctggaacgaaattgacgatacatgctctagcttcctttccattgactcccagccacaggcctcaaatgcccttgaagagctatgcttcatgattatgggtatgttgccaaagccccaggaacaagatgagaaagataacactaaacgtttcctctttcattattcaaagacgcagaagctcggcaaatccaacgtggtcagttctgtagtgcaccccttgctccaactggtcccccacttacatgaaagacgtatgaaacggtttcgagttgatgaagaatttcagtcccctttcgcaagtcagagccggggatatttcttgttccggccaaggaatgggcgcagaagtgctgggttcatctag

SEQ ID NO: 167028 - DNA, 474 bp, Artificial Sequence
  derived and/or modified sequence
atgcttagaaccgagtcctgtcggcccagatctccagcggggcaggtcgcagctgcctcaccattactgctactgctgttactcctggcctggtgtgcgggcgcatgtagaggagctcccatcctacctcaaggccttcaacccgagcagcaacttcaactgtggaacgagatcgacgatacatgctcctcattcctctccattgacagccaaccacaggcctcaaacgctctggaagaactgtgtttcatgatcatgggcatgctgccaaaaccacaggagcaggatgagaaagacaacacaaaaaggtcctcggtcgtccatcccttgctccaactggtccctcacttacacgaaagaaggatgaaacgattcagggtagacgaggagttccaatctccatttgcatctcaatcccgaggctatttcctgtttaggccccgtaatggaaggagaagtgcagggttcatttag

SEQ ID NO: 167029 - DNA, 749 bp, Artificial Sequence
  derived and/or modified sequence
agtcctgtgtccgggccccgaggcacagccagggcaccaggtggagcaccagctacgcgtggcgcagcgcagcgtccctagcaccgagcctcccgcagccgccgagatgctgcgaacagagagctgccgccccaggtcgcccgccggacaggtggccgcggcgtccccgctcctgctgctgctgctgctgctcgcctggtgcgcgggcgcctgccgaggtgctccaatattacctcaaggattacagcctgaacaacagctacagttgtggaatgagatagatgatacttgttcgtcttttctgtccattgattctcagcctcaggcatccaacgcactggaggagctttgctttatgattatgggaatgctaccaaagcctcaggaacaagatgaaaaagataatactaaaaggtcgtcagttgtgcatccgttgctgcagctcgttcctcacctgcatgagagaagaatgaagagattcagagtggacgaagaattccaaagtccctttgcaagtcaaagtcgaggatattttttattcaggccacggaatggaagaaggtcagcagggttcatttaaaatggatgccagctaattttccacagagcaatgctatggaatacaaaatgtactgacattttgttttcttctgaaaaaaatccttgctaaatgtactctgttgaaaatccctgtgttgtcaatgttctcagttgtaacaatgttgtaaatgttcaatttgttgaaaatt

SEQ ID NO: 167030 - DNA, 816 bp, Artificial Sequence
  derived and/or modified sequence
agtcctgtgtccgggccccgaggcacagccagggcaccaggtggagcaccagctacgcgtggcgcagcgcagcgtccctagcaccgagcctcccgcagccgccgagatgctgcgaacagagagctgccgccccaggtcgcccgccggacaggtggccgcggcgtccccgctcctgctgctgctgctgctgctcgcctggtgcgcgggcgcctgccgaggtgctccaatattacctcaaggattacagcctgaacaacagctacagttgtggaatgagatagatgatacttgttcgtcttttctgtccattgattctcagcctcaggcatccaacgcactggaggagctttgctttatgattatgggaatgctaccaaagcctcaggaacaagatgaaaaagataatactaaaaggttcttatttcattattcgaagacacagaagttgggcaagtcaaatgttgtgtcgtcagttgtgcatccgttgctgcagctcgttcctcacctgcatgagagaagaatgaagagattcagagtggacgaagaattccaaagtccctttgcaagtcaaagtcgaggatattttttattcaggccacggaatggaagaaggtcagcagggttcatttaaaatggatgccagctaattttccacagagcaatgctatggaatacaaaatgtactgacattttgttttcttctgaaaaaaatccttgctaaatgtactctgttgaaaatccctgtgttgtcaatgttctcagttgtaacaatgttgtaaatgttcaatttgttgaaaattaaaaaatctaaaaata

SEQ ID NO: 167031 - DNA, 525 bp, Artificial Sequence
  derived and/or modified sequence
atgctgagaaccgagagctgcagacccagaagccccgccggccaggtggccgccgccagccccctgctgctgctgctgctgctgctggcctggtgcgccggcgcctgcagaggcgcccccatcctgccccagggcctgcagcccgagcagcagctgcagctgtggaacgagatcgacgacacctgcagcagcttcctgagcatcgacagccagccccaggccagcaacgccctggaggagctgtgcttcatgatcatgggcatgctgcccaagccccaggagcaggacgagaaggacaacaccaagagattcctgttccactacagcaagacccagaagctgggcaagagcaacgtggtgagcagcgtggtgcaccccctgctgcagctggtgccccacctgcacgagagaagaatgaagagattcagagtggacgaggagttccagagccccttcgccagccagagcagaggctacttcctgttcagacccagaaacggcagaagaagcgccggcttcatctag

SEQ ID NO: 167032 - DNA, 474 bp, Artificial Sequence
  derived and/or modified sequence
atgctgagaaccgagagctgcagacccagaagccccgccggccaggtggccgccgccagccccctgctgctgctgctgctgctgctggcctggtgcgccggcgcctgcagaggcgcccccatcctgccccagggcctgcagcccgagcagcagctgcagctgtggaacgagatcgacgacacctgcagcagcttcctgagcatcgacagccagccccaggccagcaacgccctggaggagctgtgcttcatgatcatgggcatgctgcccaagccccaggagcaggacgagaaggacaacaccaagagaagcagcgtggtgcaccccctgctgcagctggtgccccacctgcacgagagaagaatgaagagattcagagtggacgaggagttccagagccccttcgccagccagagcagaggctacttcctgttcagacccagaaacggcagaagaagcgccggcttcatctag

SEQ ID NO: 167033 - DNA, 525 bp, Artificial Sequence
  derived and/or modified sequence
atgctgcggactgaatcatgccgacccaggtcccctgccggccaggtcgcggccgcaagcccgcttctcctgctgctgctgctgttagcatggtgcgccggagcctgcaggggggctcccatcctgcctcagggactccaacctgagcaacagcttcagctatggaatgaaattgatgatacctgctcgtcatttctctctatcgactcacagccccaggcctcaaacgctcttgaggaactctgttttatgattatgggtatgttgcccaagccacaggagcaagatgaaaaagataatacaaagaggtttcttttccactacagtaagactcagaagctgggtaagtccaacgtagtctcgagtgtggtgcacccactgcttcaactggtgcctcacctgcacgagcgacgaatgaaaagattcagagtagatgaagaattccagtctcctttcgccagccagagccgaggctattttcttttcaggccaagaaacgggcggagaagtgccggctttatctag

SEQ ID NO: 167034 - DNA, 474 bp, Artificial Sequence
  derived and/or modified sequence
atgttacggaccgagtcctgtcgtccccgctcacccgccggacaagtcgcagccgcttccccccttctcctgctgctgttgttattggcatggtgtgcaggggcttgtagaggagcacccatcctgccccaagggctgcagcctgaacagcaactgcaattatggaacgaaatcgacgacacttgtagttcatttctctcaatagatagccagccccaggccagtaacgctttggaagagttgtgctttatgattatgggcatgctcccgaagccccaggaacaagatgagaaggataacactaaaaggtcatctgtggtccaccccttgctccaactggttccccacctgcacgagcgcagaatgaaacgcttcagagtggatgaggagtttcaatcaccattcgcctcacagtctcgaggatacttcctgttccgaccaaggaatgggagacggtctgccgggttcatttag

SEQ ID NO: 167035 - DNA, 525 bp, Artificial Sequence
  derived and/or modified sequence
atgctgaggacagagagctgccggcccaggagccctgctggccaggtggccgccgccagccccctgctgctgctgctgctgctgctggcctggtgtgccggggcctgccgcggggcccccatcctgccccagggcctgcagcctgagcagcagctgcagctgtggaatgaaattgatgacacctgcagcagcttcctgagcattgacagccagccccaggccagcaatgccctggaggagctgtgcttcatgatcatgggcatgctgcccaagccccaggagcaggatgagaaggacaacaccaagcgcttcctgttccactacagcaagacccagaagctgggcaagagcaatgtggtgtcctctgtggtgcaccccctgctgcagctggtgccccacctgcatgaaagaaggatgaagcgcttccgggtggatgaggagttccagagcccctttgccagccagagccggggctacttcctgttccggcccagaaatggccgccgctctgctggcttcatctag

SEQ ID NO: 167036 - DNA, 474 bp, Artificial Sequence
  derived and/or modified sequence
atgctgaggacagagagctgccggcccaggagccctgctggccaggtggccgccgccagccccctgctgctgctgctgctgctgctggcctggtgtgccggggcctgccgcggggcccccatcctgccccagggcctgcagcctgagcagcagctgcagctgtggaatgaaattgatgacacctgcagcagcttcctgagcattgacagccagccccaggccagcaatgccctggaggagctgtgcttcatgatcatgggcatgctgcccaagccccaggagcaggatgagaaggacaacaccaagaggagctctgtggtgcaccccctgctgcagctggtgccccacctgcacgagaggaggatgaagcgcttccgggtggatgaggagttccagagcccctttgccagccagagccggggctacttcctgttccggcccagaaatggaagaagatctgctggcttcatctag

SEQ ID NO: 167037 - DNA, 525 bp, Artificial Sequence
  derived and/or modified sequence
atgctgcggaccgagagctgccggccccggagccccgccggccaggtggccgcggcatctccactcctgctgctcctgctgttgctggcctggtgcgccggcgcctgccggggagcacccatcctgccacagggtctccaacctgaacagcagctccaactatggaacgagatcgacgatacctgttcatcctttctgtcaattgatagccagccacaggcgtccaatgctttggaggaactttgttttatgattatggggatgctgcctaagccacaagaacaggatgagaaagacaacacaaagcgctttctttttcattacagcaaaacccaaaagctcggcaagtccaatgtagtttcttcagtggtgcatccactactccagctggtgccccacctgcatgagagacgtatgaagagattccgcgtggacgaagagttccagagtccctttgcgtcccagagcaggggttactttttgtttagaccaaggaatggtcgacgcagtgctggattcatctag

SEQ ID NO: 167038 - RNA, 525 nt, Artificial Sequence
  derived and/or modified sequence
augcuccggacagaguccugccgaccgaggagcccugcagggcaaguggcugcugcauccccuuuguuauuacuucugcuauuacuggcauggugugcaggggccugucggggggcuccuauuuuaccgcagggucuccagcccgaacagcaguugcagcuguggaacgagaucgacgauacuugcucuuccuuuuuaucuaucgacucccagccccaggccucaaaugcauuggaagaacuaugcuucaugauaauggggauguuacccaagccccaagagcaggacgagaaagauaacacuaaacguuuccucuuucauuauucaaagacgcagaagcucggcaaauccaacguggucaguucuguagugcaccccuugcuccaacuggucccccacuuacaugaaagacguaugaaacgguuucgaguugaugaagaauuucaguccccuuucgcaagucagagccggggauauuucuuguuccggccaaggaaugggcgcagaagugcuggguucaucuag

SEQ ID NO: 167039 - RNA, 474 nt, Artificial Sequence
  derived and/or modified sequence
augcuuagaaccgaguccugucggcccagaucuccagcggggcaggucgcagcugccucaccauuacugcuacugcuguuacuccuggccuggugugcgggcgcauguagaggagcucccauccuaccucaaggccuucaacccgagcagcaacuucaacuguggaacgagaucgacgauacaugcuccucauuccucuccauugacagccaaccacaggccucaaacgcucuggaagaacuguguuucaugaucaugggcaugcugccaaaaccacaggagcaggaugagaaagacaacacgaagcguucuucugucguccacccacugcugcaacucguuccccaccuccaugagcguagaaugaaaagguuucguguagaugaggaguuccagagucccuucgcuucucagagccguggcuacuuccuguuucgcccaaggaacgguagacgaagcgccggguucauuuag

SEQ ID NO: 167040 - RNA, 525 nt, Artificial Sequence
  derived and/or modified sequence
augcuccgcaccgaauccugccggccccgaucaccugcuggccaaguugcagccgccaguccacugcuacugcugcuccuguuacucgcguggugugcuggugcuugucggggagcucccauccugccucagggauugcagcccgaacagcaacugcagcucuggaacgaaauugacgauacaugcucuagcuuccuuuccauugacucccagccacaggccucaaaugcccuugaagagcuaugcuucaugauuauggguauguugccaaagccccaggaacaagaugagaaagauaacacuaaacguuuccucuuucauuauucaaagacgcagaagcucggcaaauccaacguggucaguucuguagugcaccccuugcuccaacuggucccccacuuacaugaaagacguaugaaacgguuucgaguugaugaagaauuucaguccccuuucgcaagucagagccggggauauuucuuguuccggccaaggaaugggcgcagaagugcuggguucaucuag

SEQ ID NO: 167041 - RNA, 474 nt, Artificial Sequence
  derived and/or modified sequence
augcuuagaaccgaguccugucggcccagaucuccagcggggcaggucgcagcugccucaccauuacugcuacugcuguuacuccuggccuggugugcgggcgcauguagaggagcucccauccuaccucaaggccuucaacccgagcagcaacuucaacuguggaacgagaucgacgauacaugcuccucauuccucuccauugacagccaaccacaggccucaaacgcucuggaagaacuguguuucaugaucaugggcaugcugccaaaaccacaggagcaggaugagaaagacaacacaaaaagguccucggucguccaucccuugcuccaacuggucccucacuuacacgaaagaaggaugaaacgauucaggguagacgaggaguuccaaucuccauuugcaucucaaucccgaggcuauuuccuguuuaggccccguaauggaaggagaagugcaggguucauuuag

SEQ ID NO: 167042 - protein, 439 aa, Artificial Sequence
  derived and/or modified sequence
MKLANWYWLSSAVLATYGFLVVANNETEEIKDERAKDVCPVRLESRGKCEEAGECPYQVSLPPLTIQLPKQFSRIEEVFKEVQNLKEIVNSLKKSCQDCKLQADDNGDPGRNGLLLPSTGAPGEVGDNRVRELESEVNKLSSELKNAKEEINVLHGRLEKLNLVNMNNIENYVDSKVANLTFVVNSLDGKCSKCPSQEQIQSRPVQHLIYKDCSDYYAIGKRSSETYRVTPDPKNSSFEVYCDMETMGGGWTVLQARLDGSTNFTRTWQDYKAGFGNLRREFWLGNDKIHLLTKSKEMILRIDLEDFNGVELYALYDQFYVANEFLKYRLHVGNYNGTAGDALRFNKHYNHDLKFFTTPDKDNDRYPSGNCGLYYSSGWWFDACLSANLNGKYYHQKYRGVRNGIFWGTWPGVSEAHPGGYKSSFKEAKMMIRPKHFKP

SEQ ID NO: 167043 - DNA, 4261 bp, Artificial Sequence
  derived and/or modified sequence
gcactccctgctggggtgagcagcactgtaaagatgaagctggctaactggtactggctgagctcagctgttcttgccacttacggttttttggttgtggcaaacaatgaaacagaggaaattaaagatgaaagagcaaaggatgtctgcccagtgagactagaaagcagagggaaatgcgaagaggcaggggagtgcccctaccaggtaagcctgccccccttgactattcagctcccgaagcaattcagcaggatcgaggaggtgttcaaagaagtccaaaacctcaaggaaatcgtaaatagtctaaagaaatcttgccaagactgcaagctgcaggctgatgacaacggagacccaggcagaaacggactgttgttacccagtacaggagccccgggagaggttggtgataacagagttagagaattagagagtgaggttaacaagctgtcctctgagctaaagaatgccaaagaggagatcaatgtacttcatggtcgcctggagaagctgaatcttgtaaatatgaacaacatagaaaattatgttgacagcaaagtggcaaatctaacatttgttgtcaatagtttggatggcaaatgttcaaagtgtcccagccaagaacaaatacagtcacgtccagttcaacatctaatatataaagattgctctgactactacgcaataggcaaaagaagcagtgagacctacagagttacacctgatcccaaaaatagtagctttgaagtttactgtgacatggagaccatggggggaggctggacagtgctgcaggcacgtctcgatgggagcaccaacttcaccagaacatggcaagactacaaagcaggctttggaaacctcagaagggaattttggctggggaacgataaaattcatcttctgaccaagagtaaggaaatgattctgagaatagatcttgaagactttaatggtgtcgaactatatgccttgtatgatcagttttatgtggctaatgagtttctcaaatatcgtttacacgttggtaactataatggcacagctggagatgcattacgtttcaacaaacattacaaccacgatctgaagtttttcaccactccagataaagacaatgatcgatatccttctgggaactgtgggctgtactacagttcaggctggtggtttgatgcatgtctttctgcaaacttaaatggcaaatattatcaccaaaaatacagaggtgtccgtaatgggattttctggggtacctggcctggtgtaagtgaggcacaccctggtggctacaagtcctccttcaaagaggctaagatgatgatcagacccaagcactttaagccataaatcactctgttcattcctccaggtattcgttatctaatagggcaattaattccttcagcactttagaatatgccttgtttcatatttttcatagctaaaaaatgatgtctgacggctaggttcttatgctacacagcatttgaaataaagctgaaaaacaatgcattttaaaggagtcctttgttgttatgctgttatccaatgaacacttgcaagcaattagcaatattgagaattatacattagatttacaattcttttaatttctattgaaactttttctattgcttgtattacttgctgtatttaaaaaataattgttggctgggtgtggtagctcacgcctgtaatcccagcactttggaatgtcaaggcaggcagatcacttgaggtcaggagtttgagaccagcctggccaaacatgtgaaacgctgtctctattaaaaatacaaaaattagccgggcatggtggtacatgcctgtaatcctagctacttgggaggctgaggcaggagaatcgcttgaacctgagaggaagaggttgcagtgagccaagactgagccactgcactccagcatgggtgacagagaaaactctgtctcaaacaaaaaaataataaaatttattcagtaggctggattctacacaaagtaatctgtatttgggccatgatttaagcacatctgaaggtatatcactcttttcaggctataattatttgggtaatcttcattctgagacaaacttaatctatatcatttactttgcaacagaacaaccctacagcattttggttcccagactaagggaactaatatctatataattaaacttgttcatttatcattcatgaaatataaaatacttgtcatttaaaccgtttaaaaatgtggtagcataatgtcaccccaaaaagcattcagaaagcaatgtaactgtgaagaccagggtttaaaggtaattcatttatagtttataactccttagatgtttgatgttgaaaactgctttaacatgaaaattatcttcctctgctctgtgtgaacaatagcttttaatttaagattgctcactactgtactagactactggtaggtttttttggggggggtgggtagggatatgtgggtaatgaagcatttacttacaggctatcatactctgaggccaattttatctccaaagcaataatatcattaagtgattcacttcatagaaggctaagtttctctaggacagatagaaaacatgaattttgaaatatatagaacagtagttaaaatactatatatttcaaccctggctggtagattgcttattttactatcagaaactaaaagatagatttttacccaaacagaagtatctgtaatttttataattcatcaattctggaatgctatatataatatttaaaagactttttaaatgtgtttaatttcatcatcgtaaaaagggatcatctcagagagaacagcagtattctgcgtatttttaaaaatgctctagagtaacatttgaagtaattcactgtagtgtatgccagtcctagaaataatttttttaatttctggtgtctgtttctaatacactaaccaagttttcaaaatatatttacaaagatgcatctttacccattattttaaaatgattaaggaggatagttgcttcaggtaacaagctaatttttcaaatattaggcccttacagaactatttagtcaaaaagtaagatattcctttaaaatatataacccaaagctttcagttaaacatgatatatcacaaatactattaaaatgttaaagagaaatgcaaatagcattaaatgatgaccaaaatgtaaaatattgtagatttcaaaagctgtgtctctattaggtgggataccaaatgtaaatgatgtaactgacgttgttttttactttttactttttaaaaaagactaaaaacgttttgatattatacaatgtatttgtttcagataaggtcattgtcatttagtatatataattaatatatgtacaagtttaagtaaattcctgtgagtaaaaatggacttatcacaaaacatagttctaaagaaaggtatatgctcatatacacggtgtccattaatttaatgggaactaggtataacttcaggagaatttggcaaataattcattaatccatgtaaatattcaaaagcttgttctatccacattatttcaagggatcactttatttttcattatactttcacagcacttttctagtaaattctgtaacacagaaattccattttggaatcatttcatgttaccaataattctagacttttataacatttaacatgttgatggaaatagattacatctgctagaaccttttgccttaactattcaccaatatatgctaatattcataaatatggattgactgtttacaaacattagaatcttgtcttggttccattttgatggctaatatttgttatcttaattaagactatttctgaggtcatgattacttgaaaatattgactaaaactgggtccttagaaattccaggtggagctgatttacctatgactgaggggaaaaaaaaatcaaattttactgataatagtaatgctccaaatgaattaatgacacatctgttcaataaataaagagcttaaatatacaaaacataagaaatctgggcaacaaaacttgtggtctttacttttgaatagctacccaagaaaaggttttaaaggtaaaagttatgagtaatgtcatcacaataagctcttgtttaaaattcttttcttttatgtataattaggtttatgtttcatgtctttttaaaaccttataaaagatttaattatcacatctattcttcaatgtggaaatattaaatattgttggttgtaaaataa

SEQ ID NO: 167044 - DNA, 1320 bp, Artificial Sequence
  derived and/or modified sequence
atgaagctcgcgaactggtattggttaagtagcgcagtgctcgctacatatggattcttggtcgtagcgaataacgagactgaagaaatcaaagacgagagggctaaggatgtgtgtccagtaaggctggagtcccgcggcaaatgcgaggaggcaggtgaatgcccataccaggtaagccttccgcctctgacgatccagctgccaaaacagttctcccgcatcgaagaagtgttcaaagaagtgcagaacttgaaagagatcgttaattctctcaagaagagctgtcaggactgcaaactgcaagctgatgacaacggcgatcctggtagaaatggcctgttgctcccttccactggtgcgcccggggaagtaggcgacaacagagtacgcgagctggaatctgaagtgaacaagctgtcaagtgaactcaagaacgcaaaagaggagattaacgtgttgcatggaaggcttgagaagctgaacctcgtcaatatgaacaacatcgaaaactatgttgattccaaagtggctaatctgacatttgtcgtgaattcattagatggtaaatgttctaagtgtccctctcaagaacagatccagtctagaccagtgcaacacctaatttataaggactgtagcgactactacgccataggaaaacgctctagtgagacctaccgcgtaacacctgaccctaaaaattcttcatttgaggtctactgtgacatggagaccatggggggggggtggaccgttctgcaggcccgactggatgggtccaccaacttcacgcggacgtggcaggattataaagctggctttgggaacttgcggcgggagttctggctgggtaacgataaaatccaccttcttacaaaatctaaggagatgatcctgcgaatagatctcgaagattttaatggtgtggaactctacgcgctgtacgaccagttttatgtagctaacgaatttctgaagtatcgcttacacgtagggaactataatgggacagcgggagacgccctgcggtttaacaagcactacaaccacgaccttaaattttttacgacccctgacaaggataatgacaggtaccctagtgggaattgtggattgtattattcctcaggctggtggttcgatgcttgcctgtccgctaatcttaacggcaagtactatcaccagaagtataggggcgtgcggaatggaatcttctggggaacctggcctggggtaagcgaggcgcatccgggcggctacaagagctcatttaaggaggcaaagatgatgatccggcccaagcactttaagccttag

SEQ ID NO: 167045 - DNA, 1320 bp, Artificial Sequence
  derived and/or modified sequence
atgaagctggccaactggtactggctgagcagcgctgtgctggccacctacggcttcctggtggtggccaacaatgaaacagaggagatcaaggatgagcgggccaaggatgtgtgccctgtgcggctggagagccggggcaaatgtgaggaggccggggagtgcccctaccaggtgtccctgccccccctgaccatccagctgcccaagcagttcagcagaattgaggaggtgttcaaggaggtgcagaacctgaaggagatcgtgaacagcctgaagaagagctgccaggactgcaagctgcaggctgatgacaacggggaccctggaagaaatggcctgctgctgcccagcactggagcccctggagaggtgggggacaacagagtgcgggagctggagagcgaggtgaacaagctgagcagcgagctgaagaatgccaaggaggagatcaacgtgctgcacggccgcctggagaagctgaacctggtgaacatgaacaacatcgagaactacgtggacagcaaggtggccaacctgacctttgtggtgaacagcctggatggcaagtgcagcaaatgtcccagccaggagcagatccagagcaggcctgtgcagcacctgatctacaaggactgcagcgactactatgccatcggcaagaggagcagcgagacctacagagtgaccccagaccccaagaacagcagctttgaggtgtactgtgacatggagaccatgggcggcggctggacagtgctgcaggcccggctggatggcagcaccaacttcaccaggacctggcaggactacaaggccggctttggaaacctgcggcgggagttctggctgggcaatgacaagatccacctgctgaccaagagcaaggagatgatcctgagaattgacctggaggacttcaacggggtggagctgtatgccctgtatgaccagttctacgtggccaatgagttcctgaagtaccgcctgcacgtgggcaactacaacggcacagctggagatgccctgcgcttcaacaagcactacaaccacgacctgaagttcttcaccaccccagacaaggacaatgaccgctaccccagcggcaactgtggcctgtactacagcagcggctggtggtttgatgcctgcctgagcgccaacctgaatggcaagtactaccaccagaagtaccggggcgtgagaaatggcatcttctggggcacctggccaggagtgtctgaggcccaccctgggggctacaagagcagcttcaaggaggccaagatgatgatccggcccaagcacttcaagccctag

SEQ ID NO: 167046 - DNA, 1320 bp, Artificial Sequence
  derived and/or modified sequence
atgaagctggccaactggtactggctgagcagcgccgtgctggccacctatggttttctagtggtcgcaaacaacgaaacggaggagatcaaggatgagagggctaaggatgtgtgcccggttagattagaatcgcggggtaagtgcgaagaggccggggagtgcccataccaagtaagcctgcctcctctcacaattcagctccctaagcagttttctcgcatagaggaggtttttaaagaggtgcaaaatttgaaagagatcgtaaactccctgaaaaaaagttgccaggattgcaaacttcaggctgacgataacggagatcctggccggaatggacttctcctgccatccacaggcgctcccggcgaggtgggagacaatagggttagggagctcgagagtgaagttaacaaactcagtagcgagcttaaaaatgccaaggaagaaattaacgttctgcacgggaggctagagaaattgaaccttgttaacatgaataatatcgagaactacgtagattctaaagtcgcgaacttgactttcgtggtcaattccctggatggaaaatgtagcaaatgtccttcacaagagcagattcagtcccgtcccgttcagcacttgatctataaagactgctctgattactatgcgattggaaagcgtagctctgaaacctaccgggtgacacctgatccaaagaactcctcttttgaagtttactgcgacatggagacgatggggggcggatggactgtgctgcaggctaggctcgatggaagcactaattttacaagaacttggcaggactacaaggcggggttcggtaatctccgtcgcgagttctggctgggcaatgacaaaattcatttgctaactaaaagcaaggaaatgattctgcgcattgatctggaggacttcaatggggtcgaattgtacgccctctatgaccagttctatgtggcaaatgaatttctcaagtacaggctgcatgttggcaattataatggaacggccggagacgcactccgttttaacaagcactataatcacgacttgaaattttttactacccctgacaaagacaatgatcgctacccatctggaaattgcggcctgtattacagtagcggttggtggtttgacgcatgcctgagtgctaacctcaacggaaagtactaccaccagaaatatcgaggtgtcaggaacgggatcttttggggaacttggccaggcgttagtgaagctcaccccggcggctacaagagctccttcaaagaggctaaaatgatgattagacccaaacacttcaaaccttag

SEQ ID NO: 167047 - DNA, 1320 bp, Artificial Sequence
  derived and/or modified sequence
atgaagctcgctaattggtactggctaagctcagctgtgttggcaacctacggcttcctggtggtggccaataatgagacagaggaaatcaaggatgagcgcgctaaggatgtctgtcccgtgcgcctggaatcgcgaggtaagtgcgaagaggcgggagagtgtccctatcaagtgagcctccccccactgactatacagcttccaaagcaattttcaagaatcgaggaggtgttcaaagaggtgcagaatctgaaggagatcgtcaattctctgaagaagtcttgtcaggactgtaagctccaagctgatgataacggtgatcctggacgcaatggtctccttctgccgtccaccggcgcaccgggtgaagtaggagacaatcgcgtgagagagctggagtctgaagtgaataaacttagctctgagctaaaaaatgccaaggaagagattaacgtgctccacggacgtctggaaaagctcaacctggtgaatatgaataacattgaaaactacgtcgatagcaaagtcgccaacctcaccttcgtggtgaacagtctggacggtaagtgtagcaagtgcccaagccaagagcaaatacagagcagacccgtccagcacctgatctacaaagactgtagtgactactatgccatcgggaagagaagttcagaaacttacagagtgacacccgatcccaagaatagctcgtttgaagtgtactgcgatatggagacaatgggcggtggttggaccgttttgcaggccaggctggatggttcgaccaatttcactcgcacctggcaggactataaggccggttttggaaatctgagaagggagttctggttgggtaatgataagattcacctgctgactaaatctaaggaaatgatactgcggattgatcttgaagattttaatggagtggaactgtacgctctctacgaccagttttatgttgcgaatgaattccttaaatatagattacacgtggggaattacaacgggaccgccggagatgccctaaggttcaacaagcactacaaccacgatctaaagttttttacaactcctgataaggacaacgataggtatccttcaggcaactgcggtttgtactacagctcgggttggtggtttgacgcctgtcttagtgcaaacctcaatggaaaatactaccaccaaaagtaccggggagtccggaacggcatcttctggggcacctggcccggagtatctgaagcacacccgggtggctacaaaagctcattcaaagaggccaaaatgatgatccgtccaaaacactttaaaccctag

SEQ ID NO: 167048 - DNA, 1320 bp, Artificial Sequence
  derived and/or modified sequence
atgaagctggccaactggtactggctgagcagcgccgtgctggccacctacggcttcctggtggtggccaacaacgagaccgaggagatcaaggacgagagagccaaggacgtgtgccccgtgagactggagagcagaggcaagtgcgaggaggccggcgagtgcccctaccaggtgagcctgccccccctgaccatccagctgcccaagcagttcagcagaatcgaggaggtgttcaaggaggtgcagaacctgaaggagatcgtgaacagcctgaagaagagctgccaggactgcaagctgcaggccgacgacaacggcgaccccggcagaaacggcctgctgctgcccagcaccggcgcccccggcgaggtgggcgacaacagagtgagagagctggagagcgaggtgaacaagctgagcagcgagctgaagaacgccaaggaggagatcaacgtgctgcacggcagactggagaagctgaacctggtgaacatgaacaacatcgagaactacgtggacagcaaggtggccaacctgaccttcgtggtgaacagcctggacggcaagtgcagcaagtgccccagccaggagcagatccagagcagacccgtgcagcacctgatctacaaggactgcagcgactactacgccatcggcaagagaagcagcgagacctacagagtgacccccgaccccaagaacagcagcttcgaggtgtactgcgacatggagaccatgggcggcggctggaccgtgctgcaggccagactggacggcagcaccaacttcaccagaacctggcaggactacaaggccggcttcggcaacctgagaagagagttctggctgggcaacgacaagatccacctgctgaccaagagcaaggagatgatcctgagaatcgacctggaggacttcaacggcgtggagctgtacgccctgtacgaccagttctacgtggccaacgagttcctgaagtacagactgcacgtgggcaactacaacggcaccgccggcgacgccctgagattcaacaagcactacaaccacgacctgaagttcttcaccacccccgacaaggacaacgacagataccccagcggcaactgcggcctgtactacagcagcggctggtggttcgacgcctgcctgagcgccaacctgaacggcaagtactaccaccagaagtacagaggcgtgagaaacggcatcttctggggcacctggcccggcgtgagcgaggcccaccccggcggctacaagagcagcttcaaggaggccaagatgatgatcagacccaagcacttcaagccctag

SEQ ID NO: 167049 - protein, 331 aa, Artificial Sequence
  derived and/or modified sequence
MLLLINVILTLWVSCANGQEVKPCDFPEIQHGGLYYKSLRRLYFPAAAGQSYSYYCDQNFVTPSGSYWDYIHCTQDGWSPTVPCLRTCSKSDIEIENGFISESSSIYILNKEIQYKCKPGYATADGNSSGSITCLQNGWSAQPICIKFCDMPVFENSRAKSNGMRFKLHDTLDYECYDGYEISYGNTTGSIVCGEDGWSHFPTCYNSSEKCGPPPPISNGDTTSFLLKVYVPQSRVEYQCQSYYELQGSNYVTCSNGEWSEPPRCIHPCIITEENMNKNNIQLKGKSDIKYYAKTGDTIEFMCKLGYNANTSVLSFQAVCREGIVEYPRCE

SEQ ID NO: 167050 - protein, 331 aa, Artificial Sequence
  derived and/or modified sequence
MLLLINVILTLWVSCANGQAMKPCEFPEIQHGHLYYENTRRPYFPVATGQSYSYYCDQNFVTPSGSYWDYIHCTQDGWLPTVPCLRTCSKSDIEIENGFISESSSIYILNKEIQYKCKPGYATADGNSSGSITCLQNGWSAQPICIKFCDMPVFENSRAKSNGMRFKLHDTLDYECYDGYEISYGNTTGSIVCGEDGWSHFPTCYNSSEKCGPPPPISNGDTTSFLLKVYVPQSRVEYQCQSYYELQGSNYVTCSNGEWSEPPRCIHPCIITEENMNKNNIQLKGKSDIKYYAKTGDTIEFMCKLGYNANTSVLSFQAVCREGIVEYPRCE

SEQ ID NO: 167051 - protein, 331 aa, Artificial Sequence
  derived and/or modified sequence
MLLLINVILTLWVSCANGQEVKPCDFPEIQHGGLYYKSLRRLYFPAAAGQSYSYYCDQNFVTPSGSYWDYIHCTQDGWLPTVPCLRTCSKSDIEIENGFISESSSIYILNKEIQYKCKPGYATADGNSSGSITCLQNGWSAQPICIKFCDMPVFENSRAKSNGMRFKLHDTLDYECYDGYEISYGNTTGSIVCGEDGWSHFPTCYNSSEKCGPPPPISNGDTTSFLLKVYVPQSRVEYQCQSYYELQGSNYVTCSNGEWSEPPRCIHPCIITEENMNKNNIQLKGKSDIKYYAKTGDTIEFMCKLGYNANTSVLSFQAVCREGIVEYPRCE

SEQ ID NO: 167052 - DNA, 996 bp, Artificial Sequence
  derived and/or modified sequence
atgttgctgctgatcaatgtcatcctcaccttgtgggtatcatgcgctaatggtcaggaagtaaagccctgtgactttcccgagattcaacacggcggcctgtactacaagtccctgaggcgcctgtacttcccggcggctgccggccagagctacagttattattgcgaccaaaacttcgttacaccttcgggttcatattgggactatatccattgtacacaggacggttggagtcctacggtgccttgcctgcgaacatgttccaagtcagatatagagatagaaaacggcttcatatccgaatcctcttcaatctacatccttaataaagagatccagtataagtgcaagccgggctacgcaaccgccgacggaaactcaagcggatcaatcacttgcctgcagaatggctggtctgcccagcccatctgtattaagttctgtgatatgccggtgttcgaaaatagtagagccaagtctaacggcatgaggttcaagctccatgatacactagactacgaatgctatgacgggtatgagattagctatggcaacacaacgggctcgattgtatgcggagaagacggctggtcccacttccccacgtgttacaactcgtctgagaagtgcgggcctcctcctccgatctccaatggcgatacaactagctttcttctgaaggtctacgtcccacagtctcgggtcgagtaccagtgccaatcttactacgaattgcagggatccaactacgtgacttgttctaatggggagtggtcagaaccaccaagatgtattcacccttgcatcatcaccgaggaaaatatgaataagaacaacatccagctaaagggcaagtccgacatcaagtattacgcaaaaactggagacaccatcgaatttatgtgcaagctgggatataatgccaacacttctgtgttaagctttcaggccgtttgtcgggaaggaatcgttgagtatcctcggtgcgaatag

SEQ ID NO: 167053 - DNA, 996 bp, Artificial Sequence
  derived and/or modified sequence
atgctactgctgattaacgtgatcctaacactgtgggtcagctgcgcgaatgggcaagcaatgaagccctgcgaatttccggaaatccaacacggacacctctactatgaaaatacacgtagaccttattttccggtggccacaggacagagttacagttattattgcgaccagaactttgtgacaccctccgggtcatattgggattacatccactgcacccaagacggttggctcccaacagtgccctgcttgcggacttgttctaagtcggatatcgagatcgaaaacgggttcatttctgaaagctccagtatctatatccttaacaaagagatccagtataaatgcaagcccggatatgctaccgccgatggcaatagctcaggttctattacatgcttgcagaatgggtggagtgcccaacctatctgcatcaagttctgtgatatgccagtgttcgagaattctcgcgccaagagcaacggcatgcgcttcaaattgcacgatactcttgattatgagtgctatgacggttatgaaatctcttacggcaatacaaccggctccatagtctgcggcgaagatgggtggagtcacttccccacctgctacaattccagtgagaaatgcgggccaccccccccgatatccaatggagacaccacaagttttctgttgaaagtgtacgttcctcaaagccgagtggagtatcagtgtcagtcctattacgaattgcaaggaagcaactatgtaacctgttctaatggggagtggagtgaaccaccccgctgcattcacccatgtatcataacagaggagaacatgaataagaataatatacagctcaaaggcaaatctgacattaaatattacgcaaaaacgggcgacactatcgaatttatgtgtaagctggggtataatgcgaacacttccgtgctgtcattccaggcagtttgtcgggagggcatcgtcgaatatcccaggtgcgagtag

SEQ ID NO: 167054 - DNA, 996 bp, Artificial Sequence
  derived and/or modified sequence
atgctgctcctgattaacgtcattctcacactctgggtcagctgcgctaacgggcaggaagttaagccgtgtgacttccctgaaatccagcatgggggcctatactataaaagtctgagaagactctacttcccagctgccgctgggcagagctattcatattactgtgatcagaatttcgtgacgccctccgggagttactgggattacatccattgtacccaggatggctggctccctacagttccgtgtctccgtacttgctcgaagtccgacatagaaatagaaaatggcttcatttctgaatcaagttccatttacatcctgaataaggaaattcagtataagtgcaaacctggatacgctacagccgacggcaactcaagtggatctattacctgccttcagaacgggtggagtgcgcaaccgatctgtatcaaattctgtgacatgccggtattcgagaattctagggcgaaaagcaatggaatgagattcaaattacatgacacattagattacgagtgttacgatggctatgagatcagctatggcaatacaacggggtccattgtctgcggggaggacggatggtcacactttcccacttgttataactctagcgaaaagtgtggccctccaccacccatctcaaacggagatacaacgtcctttctcctcaaggtatacgtgccacaatctcgggttgaatatcagtgccagagttattatgagctgcaaggttcaaattatgtcacatgttcaaatggggagtggtccgagcctccacggtgcattcacccttgtatcattactgaagaaaatatgaataagaacaacatccagctgaaaggaaaatccgacattaagtactatgctaagacaggcgatactatcgaattcatgtgcaaactgggctacaatgcaaacacctctgtattatcatttcaagccgtctgccgggagggcatcgtggaatacccccgctgcgagtag

SEQ ID NO: 167055 - DNA, 996 bp, Artificial Sequence
  derived and/or modified sequence
atgctgctgctgatcaacgtcatcctgaccctgtgggtgtcctgtgccaacggccaggaggtgaagccctgtgacttccctgagatccagcacggcggcctgtactacaagagcctgcggcggctgtacttccctgctgctgctggccagagctacagctactactgtgaccagaactttgtgacccccagcggcagctactgggactacatccactgcacccaggacggctggagccccaccgtgccctgcctgcggacctgcagcaagagtgacattgaaattgaaaatggcttcatcagcgagagcagcagcatctacatcctgaacaaggagatccagtacaagtgcaagccaggctacgccacagcagatggcaacagcagcggcagcatcacctgcctgcagaatggctggagcgcccagcccatctgcatcaagttctgtgacatgcctgtgtttgagaacagccgggccaagagcaatggcatgaggttcaagctgcatgacaccctggactatgaatgttatgatggctatgagatctcctatggcaacaccaccggcagcatcgtgtgtggagaagatggctggagccacttccccacctgctacaacagcagcgagaagtgtggccccccaccacccatcagcaatggagacaccaccagcttcctgctgaaggtgtatgtgccccagagccgggtggagtaccagtgccagagctactatgagctgcagggcagcaactacgtgacctgcagcaatggagagtggagcgagcccccacgctgcatccacccctgcatcatcacagaggagaacatgaacaagaacaacatccagctgaagggcaagagtgacatcaagtactatgccaagacaggagacaccatcgagttcatgtgcaagctgggctacaatgccaacacctctgtgctgtccttccaggccgtgtgccgggagggcatcgtggagtacccccgctgtgagtag

SEQ ID NO: 167056 - DNA, 996 bp, Artificial Sequence
  derived and/or modified sequence
atgctgctgctgatcaacgtcatcctgaccctgtgggtgtcctgtgccaacggccaggccatgaagccctgtgagttccctgagatccagcacggccacctgtactatgagaacacccggcggccctacttccctgtggccaccggccagagctacagctactactgtgaccagaactttgtgacccccagcggcagctactgggactacatccactgcacccaggacggctggctgcccaccgtgccctgcctgcggacctgcagcaagagtgacattgaaattgaaaatggcttcatcagcgagagcagcagcatctacatcctgaacaaggagatccagtacaagtgcaagccaggctacgccacagcagatggcaacagcagcggcagcatcacctgcctgcagaatggctggagcgcccagcccatctgcatcaagttctgtgacatgcctgtgtttgagaacagccgggccaagagcaatggcatgaggttcaagctgcatgacaccctggactatgaatgttatgatggctatgagatctcctatggcaacaccaccggcagcatcgtgtgtggagaagatggctggagccacttccccacctgctacaacagcagcgagaagtgtggccccccaccacccatcagcaatggagacaccaccagcttcctgctgaaggtgtatgtgccccagagccgggtggagtaccagtgccagagctactatgagctgcagggcagcaactacgtgacctgcagcaatggagagtggagcgagcccccacgctgcatccacccctgcatcatcacagaggagaacatgaacaagaacaacatccagctgaagggcaagagtgacatcaagtactatgccaagacaggagacaccatcgagttcatgtgcaagctgggctacaatgccaacacctctgtgctgtccttccaggccgtgtgccgggagggcatcgtggagtacccccgctgtgagtag

SEQ ID NO: 167057 - DNA, 996 bp, Artificial Sequence
  derived and/or modified sequence
atgctgctgctgatcaacgtcatcctgaccctgtgggtgtcctgtgccaacggccaggaggtgaagccctgtgacttccctgagatccagcacggcggcctgtactacaagagcctgcggcggctgtacttccctgctgctgctggccagagctacagctactactgtgaccagaactttgtgacccccagcggcagctactgggactacatccactgcacccaggacggctggctgcccaccgtgccctgcctgcggacctgcagcaagagtgacattgaaattgaaaatggcttcatcagcgagagcagcagcatctacatcctgaacaaggagatccagtacaagtgcaagccaggctacgccacagcagatggcaacagcagcggcagcatcacctgcctgcagaatggctggagcgcccagcccatctgcatcaagttctgtgacatgcctgtgtttgagaacagccgggccaagagcaatggcatgaggttcaagctgcatgacaccctggactatgaatgttatgatggctatgagatctcctatggcaacaccaccggcagcatcgtgtgtggagaagatggctggagccacttccccacctgctacaacagcagcgagaagtgtggccccccaccacccatcagcaatggagacaccaccagcttcctgctgaaggtgtatgtgccccagagccgggtggagtaccagtgccagagctactatgagctgcagggcagcaactacgtgacctgcagcaatggagagtggagcgagcccccacgctgcatccacccctgcatcatcacagaggagaacatgaacaagaacaacatccagctgaagggcaagagtgacatcaagtactatgccaagacaggagacaccatcgagttcatgtgcaagctgggctacaatgccaacacctctgtgctgtccttccaggccgtgtgccgggagggcatcgtggagtacccccgctgtgagtag

SEQ ID NO: 167058 - DNA, 996 bp, Artificial Sequence
  derived and/or modified sequence
atgctgctgctgatcaacgtgatcctgaccctgtgggtgagctgcgccaacggccaggaggtcaagccctgtgattttccggagatccagcatggcggtctgtactataagagcctgagaaggctgtatttcccggctgctgctgggcagagttatagctactattgtgaccagaatttcgtgacaccttcagggtcatactgggactacatacactgtactcaggatggctggagtcccacagtgccctgcctccggacttgctcaaaaagcgatatcgaaattgaaaacgggtttatcagcgagtcaagtagtatctacattctgaataaggagatacagtataagtgtaaacctggatacgctaccgccgatggcaactcttcagggagcatcacatgcctccagaatggctggagtgctcaaccaatctgcatcaagttctgtgatatgcccgtattcgaaaactccagggctaaatcaaatggcatgcggttcaagttacacgataccctagactacgagtgctatgatgggtatgagatttcctacgggaacacgacaggctcgatcgtgtgcggtgaagacggctggtctcatttcccgacctgctacaattccagcgagaagtgcgggccaccccctccaatctctaatggcgacaccacctcctttctcctgaaggtttacgtccctcagtcgagggtggagtaccagtgccagagctattacgagctccagggctcgaattacgtcacatgctccaacggagaatggtcagagccccctagatgcatccacccttgcattataacggaagagaacatgaacaaaaataatattcagctcaagggaaaaagcgatattaagtattatgccaagactggcgacacgattgaatttatgtgtaagctgggctacaacgctaacacctctgtactgagttttcaggcggtatgtagagaagggatcgtcgaataccccaggtgtgagtag

SEQ ID NO: 167059 - DNA, 996 bp, Artificial Sequence
  derived and/or modified sequence
atgctgctgctgatcaacgtgatcctgaccctgtgggtgagctgcgcaaacgggcaggcgatgaaaccctgcgagttcccggaaatccagcatggccatctatactatgagaatacacgccgaccatatttccccgtggctacgggacagtcttactcctactactgcgatcagaacttcgtgactccatcggggagttactgggattacattcattgtacacaggacggatggctgccaactgttccgtgtctgaggacttgctctaagtctgatatcgaaattgagaatggattcatctcggagtcgtcctccatttatatcttaaacaaggagattcaatacaagtgcaaaccaggctacgccactgctgacgggaattctagtggttccatcacttgtctgcagaatggctggagcgcacaacccatttgcattaaattctgtgacatgcccgtgtttgagaatagtcgggctaaaagcaatggcatgcggtttaagcttcacgacacccttgattatgagtgttatgacggatacgagatatcttacggtaacacaaccggctccattgtctgtggtgaggacggatggtctcacttccctacctgttataattcttctgaaaaatgcgggcctccaccgcctatttcaaacggcgataccacgtctttcctgctcaaggtctatgtgcctcagtccagggtggagtaccagtgtcagtcatactatgaactacaggggtccaattatgtgacctgcagtaacggtgagtggtccgagcctcctcgatgcatccatccctgtatcattaccgaagaaaacatgaacaagaacaacatacagctaaagggaaagagcgacataaagtattatgcaaaaacgggagatactatcgagtttatgtgcaagctcggatacaatgccaatacttccgttctatcttttcaggccgtgtgtcgcgaaggaatcgttgaatatcccaggtgtgaatag

SEQ ID NO: 167060 - DNA, 996 bp, Artificial Sequence
  derived and/or modified sequence
atgctgctgctgatcaacgtgatcctgaccctgtgggtgagctgcgcaaacggacaggaagttaagccctgcgattttcccgagatccagcatggcgggctgtactataagtcactgcgtcggctctattttcccgcagccgctgggcagagctacagttactactgcgaccagaacttcgtgaccccaagcggaagctactgggattacattcactgtactcaggacggctggcttcctactgtcccctgccttcgaacctgcagtaagagcgatatagaaatcgaaaatgggttcatttccgagtcatcgtctatctatatactgaataaggaaattcaatacaagtgtaaacccggctacgctactgcagatggaaactcctccggcagcatcacctgcctgcaaaatggttggtccgcccaacccatttgcatcaagttttgtgacatgccggtgttcgaaaatagtcgcgccaagtctaatggaatgagatttaaactgcatgatacgctggactacgagtgctatgacggttacgagattagttatggaaatacaaccggaagcattgtctgcggggaggatggatggtcacactttccaacctgctataactctagcgaaaaatgtggacccccaccgcctatctctaacggagacacaaccagcttcctcctcaaggtgtacgtaccgcagagcagggtggaatatcagtgtcaatcatattacgaactgcagggcagcaattatgtgacttgtagcaacggcgaatggtctgagccgcctcggtgtatccacccttgcatcatcaccgaagagaatatgaataagaacaacattcaacttaagggtaaatccgacattaaatactatgcgaaaacaggagacaccatcgagttcatgtgcaagttggggtataatgcaaacacatctgtcctttccttccaagcggtgtgccgagagggaatagtagaatatccacggtgcgagtag

SEQ ID NO: 167061 - DNA, 996 bp, Artificial Sequence
  derived and/or modified sequence
atgctgctcttaatcaatgtaatcttgaccctctgggtctcatgtgcgaatggccaggaagtgaagccttgtgacttcccagaaatccagcatggaggcctctactataaaagtctgagacggctgtactttccggcagccgcaggccagtcctacagttactattgtgatcagaactttgtgactcccagcgggtcttactgggactacattcactgtacccaggatgggtggtccccgaccgtcccctgtctcaggacatgcagtaagtcagacattgagatcgaaaacggttttatctcggaatccagcagtatttatatcctaaacaaagagatacagtataaatgtaagccagggtacgcaacagccgacggcaacagttctggcagcatcacatgcctgcagaacgggtggtccgcccagccaatatgcatcaagttctgtgatatgccggtgtttgagaactcgcgcgcaaagtccaacggcatgcggtttaagcttcatgacacgctggattacgagtgttatgatggctatgagatttcttacggcaataccacaggaagcatcgtttgtggtgaagacggatggtcacacttccccacatgctacaattcttcagagaaatgcgggcctccaccacccatcagcaatggggacactactagctttctgttgaaagtttatgtccctcaatctagggtggaataccagtgccagagctactacgagcttcagggctccaattacgtgacttgttctaatggtgagtggtccgaaccacctcgctgcatacatccctgcattatcacagaggagaatatgaacaagaacaacattcagctcaaagggaagagcgacatcaagtactatgcaaaaacaggggacaccatcgaatttatgtgtaagttgggttataatgcaaatacctcggtgctctcattccaggccgtttgccgggagggcattgttgaatatcctcgttgtgaatag

SEQ ID NO: 167062 - DNA, 996 bp, Artificial Sequence
  derived and/or modified sequence
atgcttctgttaatcaatgtgatccttaccctgtgggtgagctgcgccaacggacaggctatgaaaccctgtgagtttcctgaaatccagcatgggcatctttactacgagaacacccggcgtccctatttcccagtggcaaccggccagagctattcctattactgtgatcagaatttcgtcactccatcaggctcttattgggactatatccattgtacacaagatggatggctccctaccgtaccttgtctccgcacttgctctaagagtgacatcgagatagaaaatggatttattagcgaatcctccagcatttatatactcaataaagagatccagtacaaatgtaagccaggctacgccactgcggatggaaactcaagcgggagtattacatgcctgcagaacggatggagcgcacagcctatctgcatcaaattttgtgacatgcctgtatttgagaattcaagggccaaatctaacggtatgcgattcaagctacacgacacattggactatgagtgctacgacgggtatgagatcagctacgggaacacaaccgggtctattgtctgcggagaggatggttggtctcattttcctacatgctataacagctctgagaagtgcggccctcctccaccaatctcaaatggagatactacaagctttttactgaaagtttacgtacctcaatcaagagtggagtaccaatgtcagtcatattatgaactccagggaagcaactatgtcacttgttctaacggtgagtggagcgagccaccacggtgtatccatccatgcatcatcacagaggagaacatgaacaaaaacaacattcagcttaaggggaagagtgacattaaatattatgcaaagacgggagacactatcgagttcatgtgcaaactcggatacaatgctaacacctctgtgctgtcattccaagctgtatgtagagaagggattgttgaatatcccagatgcgagtag

SEQ ID NO: 167063 - DNA, 996 bp, Artificial Sequence
  derived and/or modified sequence
atgcttctgctgataaacgttattcttacactgtgggtgtcttgcgccaatggccaggaagtgaagccttgtgatttcccggaaattcagcacggtggtctgtactacaagagtttgcgccgtctgtacttccctgctgcggctggccagtcttactcctattattgcgatcagaatttcgttacaccttctggctcttactgggattacattcactgtacccaggacgggtggttacccacagttccctgcctgagaacttgtagtaaaagtgacatcgagattgagaatggctttattagtgagagctcctccatctatattctgaacaaggagattcagtacaagtgcaagcccggatatgcaaccgcagacggcaactcatccggctccataacctgtctgcagaacggctggtcagctcagcccatctgtatcaagttctgcgacatgcccgtatttgagaacagcagagccaaaagcaacgggatgaggttcaagctccacgataccttagattacgagtgctacgacggctacgagatttcatacgggaatactactggttccatagtttgtggagaagacggttggtcccatttccccacctgttacaactcctctgaaaaatgtggcccacctccccctattagtaatggtgacaccacaagctttctcctgaaggtttacgtcccccagtctcgggtggagtatcaatgccagtcttactatgaattgcagggctcaaattatgtgacatgctccaatggggagtggagtgagccgcctagatgcatccatccatgtatcatcaccgaagaaaatatgaacaagaacaacattcaactcaaaggcaaatccgacataaagtactacgccaagacgggtgacaccattgagtttatgtgtaagctcgggtacaacgctaatacatctgtgttgtcctttcaggccgtgtgtcgcgaagggatagtggaatatccgcgttgcgaatag

SEQ ID NO: 167064 - DNA, 1292 bp, Artificial Sequence
  derived and/or modified sequence
tgaaagatttcaaaccccaaacagtgcaactgaaacttttgcattactatactactgagaatatctaacatgttgttactaatcaatgtcattctgaccttgtgggtttcctgtgctaatggacaagaagtgaaaccttgtgattttccagaaattcaacatggaggtctatattataagagtttgcgtagactatactttccagcagctgcaggacaatcttattcctattactgtgatcaaaattttgtgactccttcaggaagttactgggattacattcattgcacacaagatggttggtcaccaacggtcccatgcctcagaacatgctcaaaatcagatatagaaattgaaaatggattcatttctgaatcttcctctatttatattttaaataaagaaatacaatataaatgtaaaccaggatatgcaacagcagatggaaattcttcaggttcaattacatgtttgcaaaatggatggtcagcacaaccaatttgcattaaattttgtgatatgcctgtttttgagaattccagagccaagagtaatggcatgcggtttaagctccatgacacattggactacgaatgctacgatggatatgaaatcagttatggaaacaccacaggttccatagtgtgtggtgaagatgggtggtcccatttcccaacatgttataattcttcagaaaagtgtgggcctcctccacctattagcaatggtgataccacctcctttctactaaaagtgtatgtgccacagtcaagagtcgagtaccaatgccagtcctactatgaacttcagggttctaattatgtaacatgtagtaatggagagtggtcggaaccaccaagatgcatacatccatgtataataactgaagaaaacatgaataaaaataacatacagttaaaaggaaaaagtgacataaaatattatgcaaaaacaggggataccattgaatttatgtgtaaattgggatataatgcgaatacatcagttctatcatttcaagcagtgtgtagggaaggcatagtggaataccccagatgcgaataaggcagcattgttaccctaaatgtatgtccaacttccacttctcactcttatggtctcaaagcttgcaaagatagcttctgatattgttgtaatttctactttatttcaaagaaaattaatataatagtttcaatttgcaacttaatatgttctcaaaaatatgttaaaacaaactaaattattgcttatgcttgtactaaaataataaaaactacccttatattgga

SEQ ID NO: 167065 - DNA, 1292 bp, Artificial Sequence
  derived and/or modified sequence
tgaaagatttcaaaccccaaacagtgcaactgaaacttttgcattactatactactgagaatatctaacatgttgttactaatcaatgtcattctgaccttgtgggtttcctgtgctaatggacaagcaatgaaaccttgtgagtttccagaaattcaacatggacatctatattatgagaatacgcgtagaccatactttccagtagctacaggacaatcttactcctattactgtgaccaaaattttgtgactccttcaggaagttactgggattacattcactgcacacaagatgggtggttgccaacagtcccatgcctcagaacatgctcaaaatcagatatagaaattgaaaatggattcatttctgaatcttcctctatttatattttaaataaagaaatacaatataaatgtaaaccaggatatgcaacagcagatggaaattcttcaggttcaattacatgtttgcaaaatggatggtcagcacaaccaatttgcattaaattttgtgatatgcctgtttttgagaattccagagccaagagtaatggcatgcggtttaagctccatgacacattggactacgaatgctacgatggatatgaaatcagttatggaaacaccacaggttccatagtgtgtggtgaagatgggtggtcccatttcccaacatgttataattcttcagaaaagtgtgggcctcctccacctattagcaatggtgataccacctcctttctactaaaagtgtatgtgccacagtcaagagtcgagtaccaatgccagtcctactatgaacttcagggttctaattatgtaacatgtagtaatggagagtggtcggaaccaccaagatgcatacatccatgtataataactgaagaaaacatgaataaaaataacatacagttaaaaggaaaaagtgacataaaatattatgcaaaaacaggggataccattgaatttatgtgtaaattgggatataatgcgaatacatcagttctatcatttcaagcagtgtgtagggaaggcatagtggaataccccagatgcgaataaggcagcattgttaccctaaatgtatgtccaacttccacttctcactcttatggtctcaaagcttgcaaagatagcttctgatattgttgtaatttctactttatttcaaagaaaattaatataatagtttcaatttgcaacttaatatgttctcaaaaatatgttaaaacaaactaaattattgcttatgcttgtactaaaataataaaaactacccttatattgga

SEQ ID NO: 167066 - DNA, 1066 bp, Artificial Sequence
  derived and/or modified sequence
cagtgcaactgaaacttttgcattactatactactgagaatatctaacatgttgttactaatcaatgtcattctgaccttgtgggtttcctgtgctaatggacaagaagtgaaaccttgtgattttccagaaattcaacatggaggtctatattataagagtttgcgtagactatactttccagcagctgcaggacaatcttactcctattactgtgaccaaaattttgtgactccttcaggaagttactgggattacattcactgcacacaagatgggtggttgccaacagtcccatgcctcagaacatgctcaaaatcagatatagaaattgaaaatggattcatttctgaatcttcctctatttatattttaaataaagaaatacaatataaatgtaaaccaggatatgcaacagcagatggaaattcttcaggttcaattacatgtttgcaaaatggatggtcagcacaaccaatttgcattaaattttgtgatatgcctgtttttgagaattccagagccaagagtaatggcatgcggtttaagctccatgacacattggactacgaatgctacgatggatatgaaatcagttatggaaacaccacaggttccatagtgtgtggtgaagatgggtggtcccatttcccaacatgttataattcttcagaaaagtgtgggcctcctccacctattagcaatggtgataccacctcctttctactaaaagtgtatgtgccacagtcaagagtcgagtaccaatgccagtcctactatgaacttcagggttctaattatgtaacatgtagtaatggagagtggtcggaaccaccaagatgcatacatccatgtataataactgaagaaaacatgaataaaaataacatacagttaaaaggaaaaagtgacataaaatattatgcaaaaacaggggataccattgaatttatgtgtaaattgggatataatgcgaatacatcagttctatcatttcaagcagtgtgtagggaaggcatagtggaataccccagatgcgaataaggcagcattgttaccctaaatg

SEQ ID NO: 167067 - DNA, 996 bp, Artificial Sequence
  derived and/or modified sequence
atgctgctgctgatcaacgtgatcctgaccctgtgggtgagctgcgccaacggccaggaggtgaagccctgcgacttccccgagatccagcacggcggcctgtactacaagagcctgagaagactgtacttccccgccgccgccggccagagctacagctactactgcgaccagaacttcgtgacccccagcggcagctactgggactacatccactgcacccaggacggctggagccccaccgtgccctgcctgagaacctgcagcaagagcgacatcgagatcgagaacggcttcatcagcgagagcagcagcatctacatcctgaacaaggagatccagtacaagtgcaagcccggctacgccaccgccgacggcaacagcagcggcagcatcacctgcctgcagaacggctggagcgcccagcccatctgcatcaagttctgcgacatgcccgtgttcgagaacagcagagccaagagcaacggcatgagattcaagctgcacgacaccctggactacgagtgctacgacggctacgagatcagctacggcaacaccaccggcagcatcgtgtgcggcgaggacggctggagccacttccccacctgctacaacagcagcgagaagtgcggcccccccccccccatcagcaacggcgacaccaccagcttcctgctgaaggtgtacgtgccccagagcagagtggagtaccagtgccagagctactacgagctgcagggcagcaactacgtgacctgcagcaacggcgagtggagcgagccccccagatgcatccacccctgcatcatcaccgaggagaacatgaacaagaacaacatccagctgaagggcaagagcgacatcaagtactacgccaagaccggcgacaccatcgagttcatgtgcaagctgggctacaacgccaacaccagcgtgctgagcttccaggccgtgtgcagagagggcatcgtggagtaccccagatgcgagtag

SEQ ID NO: 167068 - DNA, 996 bp, Artificial Sequence
  derived and/or modified sequence
atgctgctgctgatcaacgtgatcctgaccctgtgggtgagctgcgccaacggccaggccatgaagccctgcgagttccccgagatccagcacggccacctgtactacgagaacaccagaagaccctacttccccgtggccaccggccagagctacagctactactgcgaccagaacttcgtgacccccagcggcagctactgggactacatccactgcacccaggacggctggctgcccaccgtgccctgcctgagaacctgcagcaagagcgacatcgagatcgagaacggcttcatcagcgagagcagcagcatctacatcctgaacaaggagatccagtacaagtgcaagcccggctacgccaccgccgacggcaacagcagcggcagcatcacctgcctgcagaacggctggagcgcccagcccatctgcatcaagttctgcgacatgcccgtgttcgagaacagcagagccaagagcaacggcatgagattcaagctgcacgacaccctggactacgagtgctacgacggctacgagatcagctacggcaacaccaccggcagcatcgtgtgcggcgaggacggctggagccacttccccacctgctacaacagcagcgagaagtgcggcccccccccccccatcagcaacggcgacaccaccagcttcctgctgaaggtgtacgtgccccagagcagagtggagtaccagtgccagagctactacgagctgcagggcagcaactacgtgacctgcagcaacggcgagtggagcgagccccccagatgcatccacccctgcatcatcaccgaggagaacatgaacaagaacaacatccagctgaagggcaagagcgacatcaagtactacgccaagaccggcgacaccatcgagttcatgtgcaagctgggctacaacgccaacaccagcgtgctgagcttccaggccgtgtgcagagagggcatcgtggagtaccccagatgcgagtag

SEQ ID NO: 167069 - DNA, 996 bp, Artificial Sequence
  derived and/or modified sequence
atgctgctgctgatcaacgtgatcctgaccctgtgggtgagctgcgccaacggccaggaggtgaagccctgcgacttccccgagatccagcacggcggcctgtactacaagagcctgagaagactgtacttccccgccgccgccggccagagctacagctactactgcgaccagaacttcgtgacccccagcggcagctactgggactacatccactgcacccaggacggctggctgcccaccgtgccctgcctgagaacctgcagcaagagcgacatcgagatcgagaacggcttcatcagcgagagcagcagcatctacatcctgaacaaggagatccagtacaagtgcaagcccggctacgccaccgccgacggcaacagcagcggcagcatcacctgcctgcagaacggctggagcgcccagcccatctgcatcaagttctgcgacatgcccgtgttcgagaacagcagagccaagagcaacggcatgagattcaagctgcacgacaccctggactacgagtgctacgacggctacgagatcagctacggcaacaccaccggcagcatcgtgtgcggcgaggacggctggagccacttccccacctgctacaacagcagcgagaagtgcggcccccccccccccatcagcaacggcgacaccaccagcttcctgctgaaggtgtacgtgccccagagcagagtggagtaccagtgccagagctactacgagctgcagggcagcaactacgtgacctgcagcaacggcgagtggagcgagccccccagatgcatccacccctgcatcatcaccgaggagaacatgaacaagaacaacatccagctgaagggcaagagcgacatcaagtactacgccaagaccggcgacaccatcgagttcatgtgcaagctgggctacaacgccaacaccagcgtgctgagcttccaggccgtgtgcagagagggcatcgtggagtaccccagatgcgagtag

SEQ ID NO: 167070 - protein, 79 aa, Artificial Sequence
  derived and/or modified sequence
MKSLTWILGLWALAACFTPGESQRGPRGPYPPGPLAPPQPFGPGFVPPPPPPPYGPGRIPPPPPAPYGPGIFPPPPPQP

SEQ ID NO: 167071 - protein, 107 aa, Artificial Sequence
  derived and/or modified sequence
MKSLTWILGLWALAACFTPGESQRGPRGPYPPGPLAPPQPFGPGFVPPPPPPPYGPGRIPPPPYSCTPNMNNCSRCHHHHKRHHYPCNYCFYYPKYEFQHCFQETFT

SEQ ID NO: 167072 - DNA, 665 bp, Artificial Sequence
  derived and/or modified sequence
acctttattttctgtctttcaactggcaagagtcattttgaccagcaggttaatcaactctaagacagatcctcacgcaaagaggcaactgaaaggatgaaatcactgacttggatcttgggcctttgggctcttgcagcgtgtttcacacctggtgagagtcaaagaggccccaggggaccatatccacctggaccactggctcctcctcctccaccatgttttccttttggaacaggatttgttccaccaccccatcctccaccctatggtccagggagatttccaccacccctttctccaccctatggtccagggagaatcccaccatcccctcctccaccctatggtccagggagaattcaatcacactctcttcctcctccttatggcccaggttatccacagccaccttcccaaccaagaccctatccacctggacctccatttttccctgtaaattctccaactgatcctgccctccctactcctgcaccctaaatacagacaactgcaacaggtgccaccacccacaaaagacaacactaccctcgtaactactgcttctactacccaaaaataagaatttcaacactacttccaagagacttttagataaaatcacttccatttttggatgagaataaagatttccaaagcactga

SEQ ID NO: 167073 - DNA, 240 bp, Artificial Sequence
  derived and/or modified sequence
atgaagagcctgacctggatcctgggcctgtgggccctggccgcctgcttcacccccggcgagagccagagaggccccagaggcccctacccccccggccccctggcccccccccagcccttcggccccggcttcgtgccccccccccccccccccccctacggccccggcagaatccccccccccccccccgccccctacggccccggcatcttcccccccccccccccccagccctag

SEQ ID NO: 167074 - DNA, 324 bp, Artificial Sequence
  derived and/or modified sequence
atgaagagcctgacctggatcctgggcctgtgggccctggccgcctgcttcacccccggcgagagccagagaggccccagaggcccctacccccccggccccctggcccccccccagcccttcggccccggcttcgtgccccccccccccccccccccctacggccccggcagaatccccccccccccctacagctgcacccccaacatgaacaactgcagcagatgccaccaccaccacaagagacaccactacccctgcaactactgcttctactaccccaagtacgagttccagcactgcttccaggagaccttcacctag

SEQ ID NO: 167075 - DNA, 405 bp, Artificial Sequence
  derived and/or modified sequence
atgaagtccctgacatggattctgggattgtgggcactggccgcctgtttcacacctggtgagtcccagcgcggcccccgagggccctaccctcctgggcctttagcccccccacccccaccgtgctttccattcggaaccggcttcgtgccaccccctcaccccccgccatatggtcctggacgcttccctccacccctctcaccaccctacggccccgggagaatccctccctcaccccctccaccttacgggcctgggagaatccaaagccactcgctccctcctccttacgggccggggtaccctcagcctccatctcagcctcgcccgtaccccccggggccccctttttttcccgtgaattctccaacggatcctgcactccccactcccgctccttag

SEQ ID NO: 167076 - DNA, 240 bp, Artificial Sequence
  derived and/or modified sequence
atgaagagcctgacttggattctcggactatgggcgctggccgcttgctttacgccaggtgagtcacagcggggtcctcgcggaccttaccccccaggcccactggctccccctcagcccttcggtcctggatttgtgcctcctcccccaccccctccatacgggccaggacgtatccctccacccccccctgctccatacggacccgggatttttcctcctccaccaccacagccctag

SEQ ID NO: 167077 - DNA, 324 bp, Artificial Sequence
  derived and/or modified sequence
atgaaatctctcacttggattctgggattgtgggctctggccgcatgctttacccctggagagtctcaacgtgggccccgtggtccttaccctccaggccctttagcgccaccgcagcctttcgggcccggtttcgttcctccacccccaccaccaccatacggacccggaaggattccaccgccgccgtattcatgtactccgaacatgaacaactgcagccggtgccaccaccatcacaaacggcatcactatccctgcaactattgcttctattatccgaagtatgaattccagcattgtttccaagaaaccttcacctag

SEQ ID NO: 167078 - DNA, 240 bp, Artificial Sequence
  derived and/or modified sequence
atgaaatcccttacttggatcctggggctctgggctcttgccgcgtgcttcactcccggggaaagccagcgtggccccagagggccttaccctccaggaccccttgcccctcctcagccctttggaccgggtttcgtaccaccccctcccccccccccttatggccccggtaggatacctcccccacctcccgccccatacggtcctggcatcttcccccctcctcctccacaaccctag

SEQ ID NO: 167079 - DNA, 405 bp, Artificial Sequence
  derived and/or modified sequence
atgaagagcctgacctggatcctgggcctgtgggccctggccgcctgcttcaccccaggagagagccagaggggcccccggggcccctacccacctggccccctggcccctcctcctccaccctgcttcccctttggaactggatttgtgcccccaccccaccccccaccctacggccctggccgcttccccccacccctgagccccccctacggccctggccgcatcccccccagccccccaccaccctacggccctggccgcatccagagccacagcctgcccccaccctacggccctggctacccccagccccccagccagccccggccctacccacctggcccccccttcttccctgtgaacagccccacagatcctgccctgcccaccccagccccctag

SEQ ID NO: 167080 - DNA, 240 bp, Artificial Sequence
  derived and/or modified sequence
atgaagagcctgacctggatcctgggcctgtgggccctggccgcctgcttcaccccaggagagagccagaggggcccccggggcccctacccacctggccccctggccccaccccagccctttggacctggctttgtgcccccacctcctcctccaccctacggccctggccgcatccccccacctcctccagccccctacggccctggcatcttccccccacctccaccccagccctag

SEQ ID NO: 167081 - DNA, 324 bp, Artificial Sequence
  derived and/or modified sequence
atgaagagcctgacctggatcctgggcctgtgggccctggccgcctgcttcaccccaggagagagccagaggggcccccggggcccctacccacctggccccctggccccaccccagccctttggacctggctttgtgcccccacctcctcctccaccctacggccctggccgcatccccccaccaccctacagctgcacccccaacatgaacaactgcagccgctgccaccaccaccacaagaggcaccactacccctgcaactactgcttctactaccccaagtatgagttccagcactgcttccaggagaccttcacctag

SEQ ID NO: 167082 - DNA, 405 bp, Artificial Sequence
  derived and/or modified sequence
atgaagagcctgacctggatcctgggcctgtgggccctggccgcctgtttcaccccgggagagtctcagcggggaccaaggggtccttatcctcccggacccctggcccccccgccacccccctgttttcctttcggcaccggattcgttccgcccccacacccccctccatatgggccgggacggtttccgcctcccctgagtcctccctacggccctggaagaatacccccttcacctccacccccctatggaccgggccggatccagagtcactccctccctcccccgtacggccctggctacccccagccgccttcccagccccgcccatacccccccggacccccttttttccctgtcaacagccccacagatcctgcgctccctacgcctgccccctag

SEQ ID NO: 167083 - DNA, 240 bp, Artificial Sequence
  derived and/or modified sequence
atgaagagcctgacctggatcctgggcctgtgggccctggccgcctgctttacccccggagagtcccagcgcggtcccagagggccatacccacctggacctctggcccctcctcagcctttcggccccggctttgtccctcccccaccgccacctccctatggaccaggccgcattcctccaccacccccggcaccctatggacccgggatattcccacctcctccacctcagccttag

SEQ ID NO: 167084 - DNA, 324 bp, Artificial Sequence
  derived and/or modified sequence
atgaagagcctgacctggatcctgggcctgtgggccctggccgcctgcttcactccaggcgagtcacagcgcggcccacggggcccatacccaccagggcccctggccccaccccagccgttcggccctggatttgtgccccccccccctccccccccatatggtcccggacgcattccacctccaccatactcatgcacacccaacatgaacaactgcagtcggtgccatcaccatcacaaaaggcaccactacccctgtaactattgcttttattatccaaaatacgagttccagcactgttttcaagagacattcacttag

SEQ ID NO: 167085 - DNA, 240 bp, Artificial Sequence
  derived and/or modified sequence
atgaagagcctgacctggatcctgggcctgtgggccctggccgcctgctttactcccggggagagccagcgggggccaagagggccctatcccccaggccccctggctcccccacagcccttcggtccaggttttgtgccccctcctcctccacccccctacggtccaggcaggattcctccaccccctcctgccccgtacggtcctggaatcttcccgccacctccaccacaaccgtag

SEQ ID NO: 167086 - DNA, 405 bp, Artificial Sequence
  derived and/or modified sequence
atgaagtctcttacctggatcctgggcctgtgggcactcgccgcatgtttcacacccggtgagtctcagagaggccctaggggtccctaccccccagggcctctcgccccaccccctcccccttgctttccatttggtacaggtttcgttccccctccgcacccgcctccgtacggccctggacgattcccccctccactgtctcctccttacgggcctggcaggatcccccctagccctccacccccatacggtcccggtagaattcagtctcattccctaccgccaccatatgggccaggctacccacagcccccaagtcagccccgtccttatcctcccggaccccctttctttcccgttaatagtccaacagaccccgctctgcccactccggcaccctag

SEQ ID NO: 167087 - DNA, 240 bp, Artificial Sequence
  derived and/or modified sequence
atgaagagcctcacatggatccttggcctctgggccctggccgcatgcttcacacctggagagtcccagagaggccctaggggaccttacccacctggacctctggctccaccacagccattcggtccaggattcgtgcccccaccacctccccctccttatgggccaggcagaatccctcctcctccccctgctccgtacgggcctggcattttcccgccacctccaccccaaccttag

SEQ ID NO: 167088 - DNA, 324 bp, Artificial Sequence
  derived and/or modified sequence
atgaagtcactgacttggattttaggtctctgggctctggcagcttgcttcacacccggagaatctcagcgcggtccacggggaccttacccccctggacctctggctcccccacagccttttggcccaggctttgtccccccaccacccccacctccttacggacctggacggatccctcctcctccttactcctgcacacctaatatgaataactgcagcagatgccaccaccaccacaagcggcaccattacccatgtaactactgtttctactatccaaaatacgagtttcagcactgttttcaggagaccttcacttag

SEQ ID NO: 167089 - DNA, 240 bp, Artificial Sequence
  derived and/or modified sequence
atgaaaagtttaacctggatactcgggctgtgggcgcttgccgcatgcttcacaccgggagagtcccagcgaggcccaagagggccataccccccaggtcccctagcgccaccccagcccttcggcccagggttcgtgcccccaccaccaccacctccttatgggcctggccgaatcccaccgcctccccctgctccttacggtccgggaatctttccccctcctcctccacagccctag

SEQ ID NO: 167090 - DNA, 405 bp, Artificial Sequence
  derived and/or modified sequence
atgaagtccctgacttggattctcggcttgtgggctttagcagcttgtttcaccccaggcgaatctcagagaggcccacggggcccgtacccgcctggcccacttgcaccccctcctccaccctgctttccatttgggaccggattcgtgccaccgccccatcctcctccttacggcccaggcaggtttccacctccactgtcccctccgtatggcccaggtagaatcccacccagtccccctcctccttacggacctggccgaatccagagccactcccttcctcctccctacggaccaggatacccccagccaccatcacagccaaggccctatccaccaggccctccttttttccctgtgaacagtcccacagaccctgccctaccaacacctgcaccttag

SEQ ID NO: 167091 - DNA, 405 bp, Artificial Sequence
  derived and/or modified sequence
atgaagagcctgacttggatcctcggattatgggctttagcggcctgctttacgccgggtgaatctcagcgtggccctcggggtccctacccccctggtcctctggcacctcccccacctccttgttttccctttggaacgggcttcgtccccccgccacacccgcctccttacggccccggcagatttcctcctcccctgagccctccatatggacctggccggatacccccgtcccccccacccccctacggaccgggcaggattcaatcacattctctcccacctccatacgggcccggttaccctcagcccccatcccagccccgcccttacccaccaggcccacctttcttccctgtaaattctccgacagaccctgccttgccaacccctgcgccctag

SEQ ID NO: 167092 - DNA, 785 bp, Artificial Sequence
  derived and/or modified sequence
gccaacagaaatccattacaatatataagagctaagatttcttgtcccttttcacctttatttgccgtctttcaactggcaagagtcattttgaccagcagattaatcaactgtaagacagatcctcacacaaagaggcaactgaaaggatgaaatcactgacttggatcttgggcctttgggctcttgcagcgtgtttcacacctggtgagagtcaaagaggccccaggggaccatatccacctggaccgctggctcctcctcaaccttttggcccaggatttgttccaccacctcctcctccaccctatggtccagggagaatcccacctcctcctcccgcaccctatggtccagggatatttccaccaccccctcctcaaccctaaggtccaccactccatcctgatgccccaggttatccacagcctccttcccgaccaagaccctatccacctggacctccatttttccctgtaaattctccaactgatcctaccctccctactcctgcaccccaaatatgaacaactgcagcaggtgccaccaccaccacaaaagacaccactacccttgtaactactgcttctactacccaaaatatgaattccaacactgcttccaagagacatttacataaaattgcttccatttttggatgagaatgaaaaattccaaaagtgctgagctttggggagaaataatcttagaaagaaattgtagaaaaaacccatgcagacataacatttataccaatgaggcaaaaataaagaattgagcaccaa

SEQ ID NO: 167093 - DNA, 473 bp, Artificial Sequence
  derived and/or modified sequence
gccaacagaaatccattacaatatataagagctaagatttcttgtcccttttcacctttatttgccgtctttcaactggcaagagtcattttgaccagcagattaatcaactgtaagacagatcctcacacaaagaggcaactgaaaggatgaaatcactgacttggatcttgggcctttgggctcttgcagcgtgtttcacacctggtgagagtcaaagaggccccaggggaccatatccacctggaccgctggctcctcctcaaccttttggcccaggatttgttccaccacctcctcctccaccctatggtccagggagaatcccacctcctccctactcctgcaccccaaatatgaacaactgcagcaggtgccaccaccaccacaaaagacaccactacccttgtaactactgcttctactacccaaaatatgaattccaacactgcttccaagagacatttacataa

SEQ ID NO: 167094 - DNA, 489 bp, Artificial Sequence
  derived and/or modified sequence
aacagaaacaagttgctgtgaattactcaacaaggtcctgtgtacttagctgacatgtggtgatggggtgaaaagaatgagtatgtgtgattcttcttaatattgttatttcaccctgattcaagagtcattttgaccagcagattaatcaactgtaagacagatcctcacacaaagaggcaactgaaaggatgaaatcactgacttggatcttgggcctttgggctcttgcagcgtgtttcacacctggtgagagtcaaagaggccccaggggaccatatccacctggaccgctggctcctcctcaaccttttggcccaggatttgttccaccacctcctcctccaccctatggtccagggagaatcccacctcctcctcccgcaccctatggtccagggatatttccaccaccccctcctcaaccctaaggtccaccactccatcctgatgccccaggttatccacagcctccttcccgaccaagac

SEQ ID NO: 167095 - DNA, 405 bp, Artificial Sequence
  derived and/or modified sequence
atgaagagcctgacctggatcctgggcctgtgggccctggccgcctgcttcacccccggcgagagccagagaggccccagaggcccctacccccccggccccctggccccccccccccccccctgcttccccttcggcaccggcttcgtgccccccccccacccccccccctacggccccggcagattccccccccccctgagccccccctacggccccggcagaatcccccccagccccccccccccctacggccccggcagaatccagagccacagcctgccccccccctacggccccggctacccccagccccccagccagcccagaccctacccccccggcccccccttcttccccgtgaacagccccaccgaccccgccctgcccacccccgccccctag

SEQ ID NO: 167096 - protein, 258 aa, Artificial Sequence
  derived and/or modified sequence
MLLVLVVLIPVLVSSGGPEGHYEMLGTCRMVCDPYPARGPGAGARTDGGDALSEQSGAPPPSTLVQGPQGKPGRTGKPGPPGPPGDPGPPGPVGPPGEKGEPGKPGPPGLPGAGGSGAISTATYTTVPRVAFYAGLKNPHEGYEVLKFDDVVTNLGNNYDAASGKFTCNIPGTYFFTYHVLMRGGDGTSMWADLCKNGQVRASAIAQDADQNYDYASNSVILHLDAGDEVFIKLDGGKAHGGNSNKYSTFSGFIIYSD

SEQ ID NO: 167097 - DNA, 777 bp, Artificial Sequence
  derived and/or modified sequence
atgttactggttctggtggtgctaatccctgtcctggtgtcgagtggcggcccagagggacactacgaaatgctcggcacctgtcggatggtgtgtgatccgtatcccgctcgggggcctggagctggagccagaaccgacggaggtgacgccttatctgagcagtctggggctccgcccccctcgacgctggtccaagggccccaaggaaaacctggacgcactggaaagccgggcccccccgggccgcccggcgatcccggtcctccagggccagtcggtccacctggagagaaaggtgaacctgggaagcctggcccacctgggcttcccggtgcagggggctcaggtgccatatctactgccacctatactaccgtgcctcgggtagctttttacgccggccttaagaacccacatgaagggtacgaagtcctgaagttcgatgacgtagttacgaacctcgggaacaactacgacgccgcttccggaaagtttacatgtaacattcctggcacatatttcttcacctaccacgtactgatgcggggaggtgatggcacctcgatgtgggccgatctgtgcaagaatggacaggtgcgcgctagcgccatcgcccaggacgcggatcagaattacgattacgcctccaatagcgtcatattgcaccttgatgccggcgatgaagtatttattaaacttgatggcggcaaagcccacggcggaaattcaaacaaatactctacattctcaggtttcattatttatagcgattag

SEQ ID NO: 167098 - DNA, 777 bp, Artificial Sequence
  derived and/or modified sequence
atgctgctggtgctggtggtgctgatccctgtgctggtgtcctctgggggccctgagggccactatgagatgctgggcacctgcaggatggtgtgtgacccctacccagcccggggccctggggccggggccaggacagatggaggagatgccctgtctgagcagagcggggcccccccacccagcaccctggtgcagggcccccagggcaagccaggccgcacaggcaagccaggccccccaggccccccaggggaccccggccccccaggccctgtgggccccccaggagagaagggggagcccgggaagccaggccccccaggcctgcctggagctgggggcagcggggccatcagcacagccacctacaccaccgtgccccgggtggccttctacgccggcctgaagaacccccatgagggctatgaggtgctgaagtttgatgatgtggtgaccaacctgggcaacaactatgatgctgccagcggcaagttcacctgcaacatccctggcacctacttcttcacctaccacgtgctgatgagaggaggagatggcacctccatgtgggccgacctgtgcaagaatggccaggtgcgggccagcgccatcgcccaggatgctgaccagaactatgactatgccagcaacagcgtcatcctgcacctggatgctggagatgaggtgttcatcaagctggatggcggcaaggcccacggcggcaacagcaacaagtacagcaccttcagcggcttcatcatctacagcgactag

SEQ ID NO: 167099 - DNA, 777 bp, Artificial Sequence
  derived and/or modified sequence
atgctgctggtgctggtggtgctgatccccgtgctggtgagcagcggcgggcctgaaggacactatgagatgttgggaacctgccgtatggtctgcgacccataccctgctcggggacccggagcaggggctcgcaccgacggtggtgacgcactgagcgagcagagtggagccccacctcctagcaccctggtgcaaggaccacagggaaaacctggcaggacaggcaaacctggcccacccggcccgccaggcgatcctggccctcccggacctgtgggacctcctggagaaaagggagaaccaggcaaacctggcccgcccggactccctggcgccgggggctcgggggccatctcgacggccacatacactacagtccctcgcgtggctttttacgccggcctgaagaatccccacgaggggtacgaagtgctgaagttcgacgacgtcgtgacaaaccttggaaacaactacgacgctgcatcaggtaaattcacctgcaatattccaggcacgtatttcttcacctatcacgtcctgatgagagggggtgacggaacatctatgtgggctgacctgtgcaagaatgggcaggtgcgggccagcgccatcgcccaagacgccgaccagaattacgactatgctagcaacagtgtcatcttacacctagatgcgggagatgaggtatttatcaagcttgacggaggcaaggctcatggcggaaactccaataaatatagcacattctccgggtttatcatttatagcgactag

SEQ ID NO: 167100 - DNA, 777 bp, Artificial Sequence
  derived and/or modified sequence
atgttactggtcctagtggtcctaatacccgtgttggtcagtagcggcggacccgaaggccattatgagatgcttggaacttgccgcatggtctgcgatccgtaccctgcacgaggacccggagctggcgcacggacagatggcggtgatgcgctcagtgagcagtccggggctcctcccccttctaccctggtgcaagggccacagggaaaacctggcagaaccggcaagccaggccctccaggacctcctggggatcctggaccccctggacccgtgggacctcccggagagaaaggagagccgggtaaaccgggtcccccaggcctgccaggggctggtgggtcaggcgctattagcaccgctacgtatacgaccgtccccagggtcgctttttacgcaggcctgaagaatcctcacgagggttacgaagttctgaagtttgacgatgtcgtcactaacctgggtaataactatgatgcagccagtggtaaattcacctgcaatatcccgggaacctacttctttacctatcatgtgctgatgagaggcggtgatgggacatcaatgtgggcggatctgtgcaagaatggtcaggtccgcgcatcagccatcgcccaggatgctgatcaaaactacgattacgcttccaattccgtgatcctgcatcttgatgctggagatgaggtcttcattaagcttgatggagggaaagcccacggcggaaacagcaacaagtacagcacattttcagggttcataatttactccgattag

SEQ ID NO: 167101 - DNA, 1500 bp, Artificial Sequence
  derived and/or modified sequence
gcgaggcaggagccggcggctgggctccgcagcgcagccagcgcagcgcggcgccccgggcccggccccatgcccgcagccccgccggaccgtccttgagcgcgggcgcctagcccgcgccccctgcccgccggcaccattgccccgacggcgcggccgggcggcccggcgctccccaggctccgcgcgggccgaaagacgctgctagcggccgccgcgggtgtggtgatgctgctggtgctggtggtgctcatccccgtgctggtgagctcgggcggcccggaaggccactatgagatgctgggcacctgccgcatggtgtgcgacccctaccccgcgcggggccccggcgccggcgcgcggaccgacggcggcgacgccctgagcgagcagagcggcgcgcccccgccttccacgctggtgcagggcccccaggggaagccgggccgcaccggcaagcccggccctccggggcctcccggggacccaggtcctcccggccctgtggggccgccgggggagaagggtgagccaggcaagccgggccctccggggctgccgggcgcggggggcagcggcgccatcagcactgccacctacaccacggtgccgcgcgtggccttctacgccggcctcaagaacccccacgagggttacgaggtactcaagtttgacgacgtggtcaccaacctaggcaacaactacgacgcggccagcggcaagtttacgtgcaacattcccggcacctactttttcacctaccatgtcctcatgcgcggcggcgacggcaccagtatgtgggcagacctctgcaagaatggccaggtgcgggccagtgctattgcccaggacgcggaccagaactacgactacgccagcaacagcgtgatcctgcacctggacgccggcgacgaggtcttcatcaagctggatggaggcaaagcacacggcggcaacagcaacaaatacagcacgttctctggcttcatcatctactccgactgagctccccacgtctccctccacccacgtccctcacccgccggggtcccctccgggcggggcagacgatgactcgcccctcgcccacccgctcgctgcccggccctccccggctatgacgcccccggcccgtgctcaacaccgcctgggccacagctaggccctcccaccggctcgctgcagagccgggcccagcgcgccctgtccccgtgccagggaaccggggttgaccgcccccgcccagcccgcgctatatatttgtacaataggactgtttactgcccacctccgcctgccagcccaccccagcctggggagaggtcgcggcggcgggtttgcttcctgcgctctgagatgagctgccctccgctccctccggggtggcgcgcccgggggaggggggagttgggggctggatagcttcccagcaccctcagagcccccgcccggctgtgccccgtctgaccaaagttataataaaaacattttcaccccgca

SEQ ID NO: 167102 - DNA, 777 bp, Artificial Sequence
  derived and/or modified sequence
atgctgctggtgctggtggtgctgatccccgtgctggtgagcagcggcggccccgagggccactacgagatgctgggcacctgcagaatggtgtgcgacccctaccccgccagaggccccggcgccggcgccagaaccgacggcggcgacgccctgagcgagcagagcggcgcccccccccccagcaccctggtgcagggcccccagggcaagcccggcagaaccggcaagcccggcccccccggcccccccggcgaccccggcccccccggccccgtgggcccccccggcgagaagggcgagcccggcaagcccggcccccccggcctgcccggcgccggcggcagcggcgccatcagcaccgccacctacaccaccgtgcccagagtggccttctacgccggcctgaagaacccccacgagggctacgaggtgctgaagttcgacgacgtggtgaccaacctgggcaacaactacgacgccgccagcggcaagttcacctgcaacatccccggcacctacttcttcacctaccacgtgctgatgagaggcggcgacggcaccagcatgtgggccgacctgtgcaagaacggccaggtgagagccagcgccatcgcccaggacgccgaccagaactacgactacgccagcaacagcgtgatcctgcacctggacgccggcgacgaggtgttcatcaagctggacggcggcaaggcccacggcggcaacagcaacaagtacagcaccttcagcggcttcatcatctacagcgactag

SEQ ID NO: 167103 - protein, 645 aa, Artificial Sequence
  derived and/or modified sequence
MPRSRGGRAAPGPPPPPPPPGQAPRWSRWRVPGRLLLLLLPALCCLPGAARAAAAAAGAGNRAAVAVAVARADEAEAPFAGQNWLKSYGYLLPYDSRASALHSAKALQSAVSTMQQFYGIPVTGVLDQTTIEWMKKPRCGVPDHPHLSRRRRNKRYALTGQKWRQKHITYSIHNYTPKVGELDTRKAIRQAFDVWQKVTPLTFEEVPYHEIKSDRKEADIMIFFASGFHGDSSPFDGEGGFLAHAYFPGPGIGGDTHFDSDEPWTLGNANHDGNDLFLVAVHELGHALGLEHSSDPSAIMAPFYQYMETHNFKLPQDDLQGIQKIYGPPAEPLEPTRPLPTLPVRRIHSPSERKHERQPRPPRPPLGDRPSTPGTKPNICDGNFNTVALFRGEMFVFKDRWFWRLRNNRVQEGYPMQIEQFWKGLPARIDAAYERADGRFVFFKGDKYWVFKEVTVEPGYPHSLGELGSCLPREGIDTALRWEPVGKTYFFKGERYWRYSEERRATDPGYPKPITVWKGIPQAPQGAFISKEGYYTYFYKGRDYWKFDNQKLSVEPGYPRNILRDWMGCNQKEVERRKERRLPQDDVDIMVTINDVPGSVNAVAVVIPCILSLCILVLVYTIFQFKNKTGPQPVTYYKRPVQEWV

SEQ ID NO: 167104 - protein, 593 aa, Artificial Sequence
  derived and/or modified sequence
MPRSRGGRAAPGPPLAVARADEAEAPFAGQNWLKSYGYLLPYDSRASALHSAKALQSAVSTMQQFYGIPVTGVLDQTTIEWMKKPRCGVPDHPHLSRRRRNKRYALTGQKWRQKHITYSIHNYTPKVGELDTRKAIRQAFDVWQKVTPLTFEEVPYHEIKSDRKEADIMIFFASGFHGDSSPFDGEGGFLAHAYFPGPGIGGDTHFDSDEPWTLGNANHDGNDLFLVAVHELGHALGLEHSSDPSAIMAPFYQYMETHNFKLPQDDLQGIQKIYGPPAEPLEPTRPLPTLPVRRIHSPSERKHERQPRPPRPPLGDRPSTPGTKPNICDGNFNTVALFRGEMFVFKDRWFWRLRNNRVQEGYPMQIEQFWKGLPARIDAAYERADGRFVFFKGDKYWVFKEVTVEPGYPHSLGELGSCLPREGIDTALRWEPVGKTYFFKGERYWRYSEERRATDPGYPKPITVWKGIPQAPQGAFISKEGYYTYFYKGRDYWKFDNQKLSVEPGYPRNILRDWMGCNQKEVERRKERRLPQDDVDIMVTINDVPGSVNAVAVVIPCILSLCILVLVYTIFQFKNKTGPQPVTYYKRPVQEWV

SEQ ID NO: 167105 - DNA, 1938 bp, Artificial Sequence
  derived and/or modified sequence
atgcccagaagcagaggcggcagagccgcccccggcccccccccccccccccccccccccggccaggcccccagatggagcagatggagagtgcccggcagactgctgctgctgctgctgcccgccctgtgctgcctgcccggcgccgccagagccgccgccgccgccgccggcgccggcaacagagccgccgtggccgtggccgtggccagagccgacgaggccgaggcccccttcgccggccagaactggctgaagagctacggctacctgctgccctacgacagcagagccagcgccctgcacagcgccaaggccctgcagagcgccgtgagcaccatgcagcagttctacggcatccccgtgaccggcgtgctggaccagaccaccatcgagtggatgaagaagcccagatgcggcgtgcccgaccacccccacctgagcagaagaagaagaaacaagagatacgccctgaccggccagaagtggagacagaagcacatcacctacagcatccacaactacacccccaaggtgggcgagctggacaccagaaaggccatcagacaggccttcgacgtgtggcagaaggtgacccccctgaccttcgaggaggtgccctaccacgagatcaagagcgacagaaaggaggccgacatcatgatcttcttcgccagcggcttccacggcgacagcagccccttcgacggcgagggcggcttcctggcccacgcctacttccccggccccggcatcggcggcgacacccacttcgacagcgacgagccctggaccctgggcaacgccaaccacgacggcaacgacctgttcctggtggccgtgcacgagctgggccacgccctgggcctggagcacagcagcgaccccagcgccatcatggcccccttctaccagtacatggagacccacaacttcaagctgccccaggacgacctgcagggcatccagaagatctacggcccccccgccgagcccctggagcccaccagacccctgcccaccctgcccgtgagaagaatccacagccccagcgagagaaagcacgagagacagcccagaccccccagaccccccctgggcgacagacccagcacccccggcaccaagcccaacatctgcgacggcaacttcaacaccgtggccctgttcagaggcgagatgttcgtgttcaaggacagatggttctggagactgagaaacaacagagtgcaggagggctaccccatgcagatcgagcagttctggaagggcctgcccgccagaatcgacgccgcctacgagagagccgacggcagattcgtgttcttcaagggcgacaagtactgggtgttcaaggaggtgaccgtggagcccggctacccccacagcctgggcgagctgggcagctgcctgcccagagagggcatcgacaccgccctgagatgggagcccgtgggcaagacctacttcttcaagggcgagagatactggagatacagcgaggagagaagagccaccgaccccggctaccccaagcccatcaccgtgtggaagggcatcccccaggccccccagggcgccttcatcagcaaggagggctactacacctacttctacaagggcagagactactggaagttcgacaaccagaagctgagcgtggagcccggctaccccagaaacatcctgagagactggatgggctgcaaccagaaggaggtggagagaagaaaggagagaagactgccccaggacgacgtggacatcatggtgaccatcaacgacgtgcccggcagcgtgaacgccgtggccgtggtgatcccctgcatcctgagcctgtgcatcctggtgctggtgtacaccatcttccagttcaagaacaagaccggcccccagcccgtgacctactacaagagacccgtgcaggagtgggtgtag

SEQ ID NO: 167106 - DNA, 1782 bp, Artificial Sequence
  derived and/or modified sequence
atgcccagaagcagaggcggcagagccgcccccggcccccccctggccgtggccagagccgacgaggccgaggcccccttcgccggccagaactggctgaagagctacggctacctgctgccctacgacagcagagccagcgccctgcacagcgccaaggccctgcagagcgccgtgagcaccatgcagcagttctacggcatccccgtgaccggcgtgctggaccagaccaccatcgagtggatgaagaagcccagatgcggcgtgcccgaccacccccacctgagcagaagaagaagaaacaagagatacgccctgaccggccagaagtggagacagaagcacatcacctacagcatccacaactacacccccaaggtgggcgagctggacaccagaaaggccatcagacaggccttcgacgtgtggcagaaggtgacccccctgaccttcgaggaggtgccctaccacgagatcaagagcgacagaaaggaggccgacatcatgatcttcttcgccagcggcttccacggcgacagcagccccttcgacggcgagggcggcttcctggcccacgcctacttccccggccccggcatcggcggcgacacccacttcgacagcgacgagccctggaccctgggcaacgccaaccacgacggcaacgacctgttcctggtggccgtgcacgagctgggccacgccctgggcctggagcacagcagcgaccccagcgccatcatggcccccttctaccagtacatggagacccacaacttcaagctgccccaggacgacctgcagggcatccagaagatctacggcccccccgccgagcccctggagcccaccagacccctgcccaccctgcccgtgagaagaatccacagccccagcgagagaaagcacgagagacagcccagaccccccagaccccccctgggcgacagacccagcacccccggcaccaagcccaacatctgcgacggcaacttcaacaccgtggccctgttcagaggcgagatgttcgtgttcaaggacagatggttctggagactgagaaacaacagagtgcaggagggctaccccatgcagatcgagcagttctggaagggcctgcccgccagaatcgacgccgcctacgagagagccgacggcagattcgtgttcttcaagggcgacaagtactgggtgttcaaggaggtgaccgtggagcccggctacccccacagcctgggcgagctgggcagctgcctgcccagagagggcatcgacaccgccctgagatgggagcccgtgggcaagacctacttcttcaagggcgagagatactggagatacagcgaggagagaagagccaccgaccccggctaccccaagcccatcaccgtgtggaagggcatcccccaggccccccagggcgccttcatcagcaaggagggctactacacctacttctacaagggcagagactactggaagttcgacaaccagaagctgagcgtggagcccggctaccccagaaacatcctgagagactggatgggctgcaaccagaaggaggtggagagaagaaaggagagaagactgccccaggacgacgtggacatcatggtgaccatcaacgacgtgcccggcagcgtgaacgccgtggccgtggtgatcccctgcatcctgagcctgtgcatcctggtgctggtgtacaccatcttccagttcaagaacaagaccggcccccagcccgtgacctactacaagagacccgtgcaggagtgggtgtag

SEQ ID NO: 167107 - DNA, 1938 bp, Artificial Sequence
  derived and/or modified sequence
atgcccagatctcgcggaggcagggcagcgccaggtcctccgcctcctccccccccaccgggccaggccccaagatggtctagatggagggtgccaggcagactgcttttactcctcctccccgccttatgctgcctacctggcgccgccagggctgctgcagcggcagctggagctggtaacagggccgctgtcgcggtcgcggtcgcccgggccgatgaagctgaggctccctttgcaggacagaattggctgaagagctatgggtacctgttgccatacgactctcgagcctcagcactgcattccgccaaagccctccagtcagctgtgtcgactatgcagcagttttatggaattccagtcacgggagtgctcgaccagactacgattgaatggatgaagaagcccaggtgtggggtccctgaccatccccacctatcgaggaggcggcgcaataagcgctacgcccttaccgggcaaaagtggaggcaaaaacacatcacctactccatccacaattatacccctaaggtgggcgagctcgatactaggaaggccatccggcaagccttcgacgtgtggcagaaagtaacgcccctgacattcgaggaagtgccctaccatgagatcaagtccgatcggaaagaggcagatatcatgatcttctttgcaagcgggttccatggcgattccagtcccttcgatggagagggggggtttttggcccatgcctactttccaggccccggaattggtggcgatacccattttgattcagacgaaccatggacgctcggcaacgccaaccacgacggcaacgaccttttcttagtggcagtacacgaacttggacatgccttaggtctggaacactcaagcgacccttccgccatcatggcgccattctatcagtacatggagactcataacttcaaattgccacaggacgatcttcaaggtattcagaaaatatacggcccccccgcagagcccctggagccaaccagaccgctccccactcttcctgtgagacggatccactctccatctgagcgcaagcacgaaaggcagccacggcccccacgcccgccacttggcgacaggccatcaacacctggaacaaagcccaacatctgtgacggtaattttaataccgttgccctgttcaggggagaaatgttcgtgtttaaggacaggtggttctggaggttacgcaataatagggtacaggaaggttacccaatgcagatagaacagttctggaaaggactccctgccaggattgacgccgcctatgagagagctgatggaagattcgtgttcttcaaaggggataaatattgggtgttcaaggaagtgacagttgaacccggctatccacactcccttggggaactgggtagctgcctcccacgggaggggatcgacactgcgctccgatgggaacctgtggggaaaacctatttcttcaagggagagcggtactggagatactcagaggaaaggcgcgccactgaccccggataccccaagcccatcacggtctggaagggaatccctcaggcgccacagggagcatttatttctaaagagggttattacacctatttctacaaaggaagggactattggaaattcgataatcaaaaactgagcgtcgaacccggctatccccgcaacattttacgagattggatggggtgcaaccaaaaagaggtggagcggcgcaaggagcggcggcttccccaagacgatgtggatataatggtgacgattaacgatgttccaggatccgtgaatgcagtggctgtcgtgattccttgcattctgtccctgtgcatcctggtactggtgtataccatattccagttcaaaaacaagactggcccacagcccgtcacatactataaaaggccagtccaggaatgggtctag

SEQ ID NO: 167108 - DNA, 1782 bp, Artificial Sequence
  derived and/or modified sequence
atgccccgtagccgagggggaagggctgcaccagggcctccacttgccgtggcgagggctgacgaagccgaggccccattcgccggacagaattggctcaagtcttacggctatctgctaccatacgattcaagagcctcagcactccattcagctaaggccctccaatctgccgtgtccaccatgcagcagttctacgggatcccagtgactggagtcctcgaccagaccacgatcgagtggatgaagaaaccccgttgtggtgtgccagatcacccacacctctcaagacgcagaaggaataagagatacgctttgaccggccagaagtggagacaaaagcacataacatactctattcataattatacccccaaggtcggagagctcgacacccgaaaagcaattcgacaagcgttcgacgtttggcaaaaggtcacccccctcaccttcgaggaagtgccctatcacgagataaaaagcgatagaaaggaggcagacattatgattttttttgcttcagggttccatggtgactctagccccttcgacggagagggggggttcctggctcacgcctatttcccagggcctggcatcggaggagacacgcacttcgattcggacgagccttggacacttggaaatgctaatcacgacgggaatgacttgttccttgtggctgtgcatgaactcggtcatgcattgggtctggagcatagctcagacccttcagccatcatggcaccattttaccagtacatggaaacacacaatttcaaactcccacaggacgatcttcagggaattcagaaaatttatggccctccagcggagcccttggagcccactcgacccctccccaccctgccagtgaggaggatccactcccccagtgaaaggaagcatgagcggcagccacgaccaccacgtccacccttgggagataggccctcgacaccgggcacgaagcctaatatttgtgacggcaacttcaataccgttgccctgtttaggggcgaaatgttcgtgtttaaggaccgttggttttggcgcttgagaaacaacagagtccaggagggatatcctatgcagattgaacagttttggaagggactgccggccaggattgatgctgcatatgagagggctgatgggcgtttcgtgtttttcaagggggacaagtattgggtgttcaaagaggttacagtggagcccgggtacccccattctctgggggagttaggcagttgcctcccccgggagggtatcgacacggccctgcgctgggagccggtcggaaagacatacttcttcaagggcgaaaggtactggcgctactcagaggagaggcgtgccacagaccccggatacccgaaacccataactgtttggaagggtattccccaggccccccagggggcctttattagtaaggagggatactatacatatttctataagggtagagactactggaaattcgacaatcagaaattgtctgtggagccaggctatccgagaaatatacttcgagactggatgggctgtaaccagaaagaggtggagcgccgcaaggagcggagactccctcaggacgacgttgatataatggtaacgattaatgatgtccccggatccgttaatgcagtggctgtggtgattccatgcatcctgagcctgtgcatacttgtgctggtgtacacgattttccaattcaaaaataaaacaggaccgcagccagtgacttactacaaacggcctgtacaggagtgggtctag

SEQ ID NO: 167109 - DNA, 1938 bp, Artificial Sequence
  derived and/or modified sequence
atgcccaggagccggggcggccgggccgcccctggccccccacctcctcctcctcctcctggccaggccccccgctggagccgctggagggtgcccggccgcctgctgctgctgctgctgcctgccctgtgctgcctgcctggagctgcccgggctgctgctgctgctgctggagctggcaacagagctgctgtggccgtggccgtggcccgggcagatgaagctgaggccccctttgctggccagaactggctgaagagctatggctacctgctgccctatgacagccgggccagcgccctgcacagcgccaaggccctgcagagcgctgtgtccaccatgcagcagttctacggcatccctgtgactggagtgctggaccagaccaccatcgagtggatgaagaagccccgctgtggggtgcctgaccacccccacctgagcagaagaagaagaaacaagagatatgccctgaccggccagaagtggaggcagaagcacatcacctacagcatccacaactacacccccaaggtgggggagctggacaccaggaaggccatccggcaggcctttgatgtgtggcagaaggtgacccccctgacctttgaggaggtgccctaccacgagatcaagagtgacaggaaggaggccgacatcatgatcttctttgccagcggcttccatggagacagcagcccctttgatggagagggcggcttcctggcccacgcctacttccctggccctggcatcggcggggacacccactttgacagtgatgagccctggaccctgggcaatgccaaccatgatggaaatgacctcttcctggtggccgtgcatgagctgggccacgccctgggcctggagcacagcagtgaccccagcgccatcatggcccccttctaccagtacatggagacccacaacttcaagctgccccaggatgacctgcagggcatccagaagatctacggccccccagctgagcccctggagcccacccggcccctgcccaccctgcctgtgcggcgcatccacagccccagcgagaggaagcatgagcggcagcccaggcctccccggccccccctgggggaccggcccagcaccccaggcaccaagcccaacatctgtgatggcaacttcaacacagtggccctcttccggggggagatgtttgtgttcaaggaccgctggttctggaggctgaggaacaacagagtgcaggagggctaccccatgcagatcgagcagttctggaagggcctgcctgccagaattgatgctgcctatgagcgggcagatggccgctttgtgttcttcaagggggacaagtactgggtgttcaaggaggtgacagtggagcccggctacccccacagcctgggggagctgggcagctgcctgccccgggagggcatcgacacagccctgcgctgggagcctgtgggcaagacctacttcttcaagggggagcgctactggagatacagcgaggagcggcgggccacagaccccggctaccccaagcccatcaccgtgtggaagggcatcccccaggccccccagggcgccttcatcagcaaggagggctactacacctacttctacaagggccgggactactggaagtttgacaaccagaagctgtctgtggagcccggctaccccaggaacatcctgcgggactggatgggctgcaaccagaaggaggtggagaggaggaaggagcggcggctgccccaggatgatgtggacatcatggtgaccatcaatgatgtgcccggctctgtgaatgctgtggccgtggtgatcccctgcatcctgagcctgtgcatcctggtgctggtgtacaccatcttccagttcaagaacaagacaggcccccagcctgtgacctactacaagaggcctgtgcaggagtgggtgtag

SEQ ID NO: 167110 - DNA, 1782 bp, Artificial Sequence
  derived and/or modified sequence
atgcccaggagccggggcggccgggccgcccctggcccccccctggccgtggcccgggcagatgaagctgaggccccctttgctggccagaactggctgaagagctatggctacctgctgccctatgacagccgggccagcgccctgcacagcgccaaggccctgcagagcgctgtgtccaccatgcagcagttctacggcatccctgtgactggagtgctggaccagaccaccatcgagtggatgaagaagccccgctgtggggtgcctgaccacccccacctgagcagaagaagaagaaacaagagatatgccctgaccggccagaagtggaggcagaagcacatcacctacagcatccacaactacacccccaaggtgggggagctggacaccaggaaggccatccggcaggcctttgatgtgtggcagaaggtgacccccctgacctttgaggaggtgccctaccacgagatcaagagtgacaggaaggaggccgacatcatgatcttctttgccagcggcttccatggagacagcagcccctttgatggagagggcggcttcctggcccacgcctacttccctggccctggcatcggcggggacacccactttgacagtgatgagccctggaccctgggcaatgccaaccatgatggaaatgacctcttcctggtggccgtgcatgagctgggccacgccctgggcctggagcacagcagtgaccccagcgccatcatggcccccttctaccagtacatggagacccacaacttcaagctgccccaggatgacctgcagggcatccagaagatctacggccccccagctgagcccctggagcccacccggcccctgcccaccctgcctgtgcggcgcatccacagccccagcgagaggaagcatgagcggcagcccaggcctccccggccccccctgggggaccggcccagcaccccaggcaccaagcccaacatctgtgatggcaacttcaacacagtggccctcttccggggggagatgtttgtgttcaaggaccgctggttctggaggctgaggaacaacagagtgcaggagggctaccccatgcagatcgagcagttctggaagggcctgcctgccagaattgatgctgcctatgagcgggcagatggccgctttgtgttcttcaagggggacaagtactgggtgttcaaggaggtgacagtggagcccggctacccccacagcctgggggagctgggcagctgcctgccccgggagggcatcgacacagccctgcgctgggagcctgtgggcaagacctacttcttcaagggggagcgctactggagatacagcgaggagcggcgggccacagaccccggctaccccaagcccatcaccgtgtggaagggcatcccccaggccccccagggcgccttcatcagcaaggagggctactacacctacttctacaagggccgggactactggaagtttgacaaccagaagctgtctgtggagcccggctaccccaggaacatcctgcgggactggatgggctgcaaccagaaggaggtggagaggaggaaggagcggcggctgccccaggatgatgtggacatcatggtgaccatcaatgatgtgcccggctctgtgaatgctgtggccgtggtgatcccctgcatcctgagcctgtgcatcctggtgctggtgtacaccatcttccagttcaagaacaagacaggcccccagcctgtgacctactacaagaggcctgtgcaggagtgggtgtag

SEQ ID NO: 167111 - DNA, 1938 bp, Artificial Sequence
  derived and/or modified sequence
atgccccggagccggggcggccgggccgcccccggccccccccccccccccccaccccccgggcaggctccgcgttggagtcggtggagggtgcctggccgtctgctcctgctgttactgcccgccctttgttgtctgcccggggctgcacgagcggctgctgcagccgctggtgctggcaaccgggctgccgtcgccgtcgctgtagcgcgggcagatgaggcggaggctccttttgccgggcaaaattggttaaaatcctatgggtatcttctgccctacgacagccgagcctcagcactgcactccgctaaggctctgcaaagcgccgtgagcacaatgcaacagttttatggcattcccgtgaccggggtactcgaccaaactaccattgaatggatgaagaaacctcgttgcggcgttcctgatcacccacatttatccagacgtcgaagaaacaagaggtatgccctaactggacaaaaatggcgccaaaaacacatcacctattccatacataattacacccccaaggtgggtgaactggatacccgaaaggccattcgacaggctttcgatgtgtggcagaaggttacgcctctcactttcgaggaggtgccatatcacgagatcaagtccgaccgcaaagaggctgatatcatgattttctttgcttccggtttccatggagactcgtccccgtttgatggagagggtggcttcctggctcacgcttactttccaggccctgggatcggcggtgacacacattttgatagtgacgaaccatggacacttgggaacgctaaccacgacggcaacgacctctttctggtcgcggtacacgaactggggcacgccctcggcctcgagcacagcagtgatcctagcgctattatggcccctttttaccagtacatggagactcacaacttcaagctcccccaggacgatcttcaaggaattcagaaaatatacggtccacctgccgagcctctggaacctacgagacccttgccgactttgccagtgcggcggatccactcccctagtgaaagaaaacacgagcggcagccccggcccccgaggccaccactcggtgatcgcccatccactcctggtacaaaacccaacatttgcgatggtaacttcaatacggtcgccctttttcgaggcgaaatgttcgtatttaaggaccgttggttctggcgtttgcggaataatcgggtgcaggagggatatcccatgcagatcgaacagttctggaaaggactgccagcaagaatcgacgcagcctacgaacgggccgatggtaggttcgtgtttttcaaaggggataagtattgggtgttcaaggaagtgacagtcgaaccaggttatccacattccctaggtgagctgggttcatgtctgcccagagaggggattgatacagcgctgcgctgggagcctgtgggaaagacatacttcttcaagggagagcgttactggcggtatagcgaggaaaggcgcgctactgatcccgggtatccgaagcccatcactgtttggaagggcattcctcaggcgcctcaaggggcatttatatccaaagagggatactacacttatttttacaaagggagggattactggaagttcgacaatcagaagctctccgtcgaacctggatatcctcggaacatcctgcgtgactggatgggatgtaaccagaaagaggtggagcggcgcaaagaaagaaggctaccccaggatgatgtggacatcatggtgaccattaacgacgttccaggttctgttaacgctgttgccgtggtgattccctgcattctgagcctgtgcattttggtgctcgtatacaccatatttcaatttaagaataaaacaggtccgcagccagtgacctactacaagcgccctgtgcaggagtgggtctag

SEQ ID NO: 167112 - DNA, 1782 bp, Artificial Sequence
  derived and/or modified sequence
atgccccggagccggggcggccgggccgcccccggcccccccctggccgtagccagggcagatgaggccgaggctcctttcgcaggacagaactggcttaaatcttacgggtatctccttccctacgactcgagggcttccgcactgcattcagccaaagcactgcaatccgcagtttctacaatgcagcagttttatggtattcctgtgaccggggtgctggaccagaccaccatagagtggatgaagaaacctcgatgtggagtgcctgatcacccgcacctgtccagacgacgcaggaacaaaagatacgcactgactggacagaagtggagacagaaacatattacttattctattcacaattacacccctaaggtgggagagctggatactaggaaggccatccgacaggcattcgatgtctggcaaaaagtcactccccttacatttgaggaggtcccgtaccatgagatcaagtccgatagaaaagaagccgacatcatgatcttttttgcatctgggtttcacggcgactctagcccttttgacggtgagggcggcttcttggcccatgcatattttccgggccccggaatcggaggcgatactcatttcgatagcgacgaaccctggacacttggaaacgccaaccacgacggcaacgacctgtttctggtagccgtacacgagcttggacacgcacttggactggagcatagtagtgatccatcagccattatggcaccattttaccagtatatggagactcacaacttcaagctcccacaggacgatctgcagggtatacaaaagatttacggtccccccgcagagcctctggaacctaccaggcccctaccaaccctgcccgtgagacgcattcactctccatctgagaggaagcatgagcgccagcctcgaccgccccgaccccctttgggcgacaggccgagtacacccgggacaaaaccgaatatttgcgacgggaattttaacacagtggccctgttccggggcgaaatgttcgttttcaaggacagatggttttggcgactgcggaacaacagggtacaggagggctaccccatgcagattgagcaattttggaaaggtctacccgcgagaattgatgcagcctacgagcgggctgacggtcgcttcgtattcttcaaaggagacaagtactgggtattcaaagaagtcacggtcgagcctggttatccccatagtctcggcgagctgggctcctgtctgcccagggagggtattgataccgccctgagatgggaaccggtagggaaaacttacttctttaagggtgagcgctactggcgctactctgaggaacgtcgcgcaactgaccccggctatcctaagcctattacagtctggaaggggatccctcaggccccacaaggggctttcatcagcaaggaagggtattacacgtacttctataaaggcagggactattggaaattcgacaatcaaaagttgtccgtggagccaggctatccacgcaatattctgagagactggatggggtgtaaccagaaggaagtcgaaagaaggaaggagagacgtctaccccaggacgacgtggacattatggtgacgataaacgacgtgcccggctctgtcaatgctgtggctgtggtgatcccctgcattttgagcctttgtatactcgtcctcgtgtacacaatatttcaattcaaaaacaaaaccggcccacaaccagtgacatactataagcgacctgtccaggagtgggtttag

SEQ ID NO: 167113 - DNA, 1938 bp, Artificial Sequence
  derived and/or modified sequence
atgccgaggagcagaggaggaagagcagcccctggaccccctccaccgcctcctccccctggacaggcgcctaggtggtctagatggcgagtgcctgggagactgttgctcctgcttctccccgctctctgttgtctaccgggagctgccagggccgctgcggctgcggctggggctgggaatcgggctgctgtggccgtggcggtggccagggccgacgaagccgaagcaccctttgctggccagaattggttgaaaagttatggctacctgctgccatatgatagtagggcctccgccctacactcagccaaagctttgcagtccgcagtgtcaaccatgcagcagttttacggcatacctgtgaccggcgtgctagatcagaccactatagaatggatgaagaagcccagatgtggggttcctgaccacccacacctttccaggagacgacgtaacaagagatacgcactgactggccagaagtggcgacagaaacatatcacatattccatccacaattacactcccaaagttggagagctggacacgagaaaagcaataagacaagcctttgacgtgtggcagaaagtgacaccgttaaccttcgaggaagtcccttatcatgagatcaaaagtgatcggaaagaggcagacattatgatcttctttgctagtgggttccatggcgatagtagcccttttgacggcgaaggtggctttctggcccacgcctatttccctggccctggaatcggcggagacacacactttgactccgatgagccttggacgctcggcaacgcgaaccacgacggcaacgacctctttctagtggcagtgcacgagcttggtcatgctcttggtttggagcattctagcgacccgtctgccattatggcgcctttctatcagtacatggaaacccacaacttcaaactgccccaggacgatcttcaaggcattcagaaaatctacggacctccagcggagcccctggaaccgactcggcctctgcctactttgcccgtgcggaggatccattccccgagcgagagaaaacatgagcgccagccaagaccccctcgccctccccttggtgaccgacccagcactccaggtaccaagcctaacatttgtgatggaaactttaacactgtggctttgtttaggggagaaatgtttgtatttaaggaccgatggttttggcgcctccgcaataaccgcgtccaagaaggatatcctatgcaaattgagcagttctggaaaggcctgccggcaagaattgacgcagcttacgaaagagccgacggaagatttgtcttcttcaagggcgacaaatattgggtgttcaaggaggtgaccgtggagcccggatatcctcacagtctcggggagctgggtagctgtctacctcgggagggaatcgatactgcccttagatgggaacctgtgggaaaaacctatttctttaaaggagagcgctattggcggtatagtgaagagcgaagagcgacggaccctgggtaccctaagccgatcacagtctggaagggaataccccaggcaccacagggtgccttcatttctaaggaaggttattacacctacttctacaaaggcagggattattggaagttcgacaatcagaagctgtcagtcgaacctgggtatccacgtaatatcctgagggattggatgggatgtaatcagaaggaagtggaaaggaggaaggagaggcgcttgcctcaagatgacgtggatatcatggtaactatcaatgatgtcccaggtagtgtgaatgccgtggccgttgtaatcccgtgcattctaagcctgtgtattctagtgctggtttataccatcttccagtttaagaacaaaaccggaccccaaccagttacttattacaaacgaccagtccaggagtgggtgtag

SEQ ID NO: 167114 - DNA, 1782 bp, Artificial Sequence
  derived and/or modified sequence
atgcctcggtctcgagggggacgcgctgcccctgggcctcctttggctgtggctcgagccgatgaggctgaggcaccttttgccggtcagaactggctgaagtcttatggctaccttcttccttacgattcacgcgcttctgccctgcatagcgccaaagctcttcagagcgcagtgagcaccatgcagcagttttacggtatacccgtgaccggtgtgcttgatcagacaacaatcgaatggatgaagaagcccagatgtggggttccggaccatcctcatctgtcgcggaggcgcagaaacaagcgttacgcactgactggccaaaaatggcgtcagaagcacatcacttactccattcacaattatacgccaaaggtgggggaattggatacacgcaaggccatcaggcaggcctttgatgtgtggcaaaaggtgactccgctgacgtttgaagaagtgccatatcatgaaataaaaagtgatcggaaggaagccgatatcatgatattttttgcatcaggtttccacggggatagtagccctttcgacggtgaagggggatttctggctcatgcctatttccctggtcccggtatcggcggtgacactcattttgactctgatgagccatggacccttgggaatgcaaatcatgatggtaacgatttgtttctcgttgctgtccacgagttggggcatgcactagggctcgagcacagctctgatccctcggctataatggcccctttttatcagtacatggagacccacaatttcaaactcccacaggacgatctgcagggaatccaaaaaatctacggaccccctgcagaaccgctggagccgacccgcccactgccaaccctgccagtcagaagaatccatagtccatcggagcggaagcatgaaaggcagccgaggcccccacgcccaccattgggcgaccggcctagcacccccggtaccaagcctaatatatgcgatgggaatttcaatacagtggcattgtttcgaggggagatgtttgtcttcaaggaccgttggttctggaggttacgaaataaccgagtgcaagagggttatccgatgcagatcgaacagttttggaagggccttcctgcccgaattgacgccgcatacgagcgcgctgacggcaggtttgttttcttcaagggtgataaatattgggtgttcaaggaagtcactgtggagcccggatatcctcactctctgggcgagctaggctcctgtctccccagagagggcatagatactgctctacgctgggagccagtaggaaaaacctacttcttcaaaggagagcggtattggcgctacagtgaagaacgcagagccacggaccccggttacccaaaacctatcaccgtgtggaaaggtattccgcaggccccacagggcgcttttatctctaaggagggttattacacctatttctacaaaggcagggactattggaagtttgataatcagaagctgagcgtcgaaccaggatatccccgaaatatcctgcgcgattggatgggctgcaaccaaaaagaggttgaacgcaggaaagaacgtagactacctcaagatgatgtggatatcatggtcactatcaacgacgtccccggatccgtaaatgctgtcgctgttgtgattccatgcatccttagcctttgcatcttagtgctcgtctatactattttccagttcaaaaataagacgggtccacagcctgttacgtactataagcgtcccgttcaggaatgggtgtag

SEQ ID NO: 167115 - DNA, 1938 bp, Artificial Sequence
  derived and/or modified sequence
atgccacgaagtaggggtggacgagcggctccagggccacccccgcctccgcctcctcccgggcaggcacctcggtggagccgctggcgcgtgccgggacgcctcctactgttgctgctgcccgctctgtgctgtctacccggcgccgcgagagcagcggccgccgctgcaggggctggtaaccgtgccgccgttgcagtggccgtcgccagagccgacgaagccgaggctccctttgccggccagaactggctgaagagttacgggtacctcttgccctacgattcacgcgcttctgcgcttcacagcgccaaggctctccagtcagctgtgagtaccatgcagcaattctatggcatccctgttacaggagttttggatcagaccaccattgagtggatgaagaaacctcggtgtggggtccctgaccaccctcacctgtcacggcgaaggaggaacaaacgttacgcacttaccggccagaagtggcggcaaaagcacatcacctattccatacacaattacacaccgaaggtgggcgagctcgacacgcgcaaggcgatccgacaggcgttcgatgtctggcaaaaggtaaccccactcacgtttgaagaagtcccataccatgagattaaaagcgataggaaagaggctgacattatgatctttttcgcctccggattccacggggatagttccccattcgatggcgaaggcggattcttagcacacgcctattttcctggtcctggaattggcggagatacccactttgattcggatgagccctggacacttggcaacgcaaaccatgatggtaatgatctgttcttggttgctgtacacgagttagggcacgcccttggcctcgaacattcatcagatccatccgctattatggcccccttttaccaatacatggaaacccataactttaaactgccacaggatgacctccagggaattcaaaaaatttatgggcctccggccgaaccccttgagccgacacgaccactgcccacgctccccgtcaggcggattcactctccttcagaacgtaagcatgagcgccagccccgcccaccacgcccccccctgggcgaccgacccagtacacccgggactaaaccaaacatctgtgacggtaactttaataccgttgcccttttcaggggcgaaatgtttgtcttcaaggatagatggttctggagactacggaacaacagagtgcaagagggatatccaatgcagatcgagcagttttggaagggattacccgctcgaattgacgcggcgtatgagcgagctgacggacgtttcgtgttttttaagggagataaatactgggtcttcaaggaagttacagtagagcctggctacccacacagcttgggagagcttgggtcctgtcttccgagggagggcatcgatacagccctaagatgggagccagttggaaaaacctacttcttcaaaggcgagcggtactggcggtacagcgaggagcgaagggctacagaccccggttaccccaaacctattacagtctggaagggcattcctcaagcacctcagggggcgtttattagcaaagagggctactatacctacttctataaagggcgcgactattggaaattcgacaatcagaaactctccgtggagccgggttaccctagaaatatcctgagggactggatgggctgcaatcagaaggaagtggaaaggcgaaaggagcgaagattaccacaggatgacgtggatattatggtaaccatcaacgatgtccccggatctgtcaatgctgtcgccgttgtcataccctgcatccttagcctgtgcattctagttttggtttacaccatatttcagtttaaaaacaagaccggtccacagcctgtgacctattataaaagaccagtccaggaatgggtgtag

SEQ ID NO: 167116 - DNA, 1938 bp, Artificial Sequence
  derived and/or modified sequence
atgccaagatcccgcgggggcagagccgcacctggccctcctcccccccccccaccccccggccaggccccgcgctggtccaggtggagggtccccggcaggttacttcttctattactgcccgccctgtgctgccttcccggagccgcacgggccgctgccgctgccgccggcgcagggaaccgggccgccgtcgccgtggccgttgcgcgggccgatgaagctgaggctccctttgcgggccagaactggttgaagtcttacggctatctgctaccttatgactcaagggccagtgcacttcacagtgccaaagctctgcaatccgcagtgagtacaatgcagcagttttacggcatcccagtgaccggagtcctcgatcagaccactattgaatggatgaaaaaaccaaggtgcggtgtcccagaccatccccatctgagccgaaggcgtagaaataagcgatatgcattaactggacagaagtggagacagaaacatataacatatagtatccataattacactcccaaagtcggcgaactcgacacccgtaaggctattcgacaggcattcgatgtttggcagaaagttacccctcttacctttgaggaggtaccctaccacgagattaaatccgatcggaaggaagcagatataatgatcttcttcgcatcaggatttcatggggattcgagcccattcgacggagaaggtggattcctggcccacgcgtattttcccggcccggggattggaggggatactcacttcgatagtgacgaaccctggacgctcggaaacgcgaaccatgacggcaatgacctgtttttagtagctgtgcacgaactgggacatgcgctagggctggaacatagtagcgatccaagtgcaatcatggctccattctaccaatacatggaaacacacaatttcaaactaccacaggacgacctgcaaggcatccagaagatctatggtccacccgcagagcccctggaaccgacccgtccattacccacgttgcccgtgcggagaatacacagcccaagcgagcgcaaacacgagagacagccccgtccaccccgacctccgttaggtgacagaccatccacccccggaaccaaacccaatatctgtgacggcaatttcaatacagtggcgctgttcaggggagagatgttcgtcttcaaagataggtggttttggcgcctgcggaacaatcgggtacaggaagggtatcctatgcagattgaacaattctggaaaggtctgcccgcaagaatcgacgccgcgtacgagcgcgctgatggaaggttcgtttttttcaaaggggacaagtactgggtctttaaagaagtcacggtagaacctggttatccacacagcttaggcgagctggggagttgcctgccaagggaaggcatcgacaccgccttgagatgggagcctgtcggaaagacgtatttttttaagggggagagatattggagatatagcgaggaacgccgagcgaccgacccaggataccctaaaccaatcaccgtttggaagggcatacctcaggccccccagggcgcattcattagcaaagagggctactacacatacttctataagggcagagactattggaaattcgacaatcagaagctgtctgtagagccgggctacccaaggaacattcttagagactggatgggatgtaatcagaaagaagtcgagaggcgcaaggagagaaggttaccccaagacgacgtagacattatggttacgattaatgacgtccctggaagtgtgaacgccgtcgcagtcgttatcccatgtatcctctcgctctgcattctcgtgctcgtgtatacgatattccagttcaaaaacaagaccggacctcagcccgtcacttactataaaagacctgtccaggagtgggtttag

SEQ ID NO: 167117 - DNA, 4412 bp, Artificial Sequence
  derived and/or modified sequence
gcgcggaggcgggggcgcgctggcggccgaggcggcggcggcggcggcgaaggcaggcgggccgggcgcgggccccgccgccgggatgccgaggagccggggcggccgcgccgcgccggggccgccgccgccgccgccgccgccgggccaggccccgcgctggagccgctggcgggtccctgggcggctgctgctgctgctgctgcccgcgctctgctgcctcccgggcgccgcgcgggcggcggcggcggcggcgggggcagggaaccgggcagcggtggcggtggcggtggcgcgggcggacgaggcggaggcgcccttcgccgggcagaactggttaaagtcctatggctatctgcttccctatgactcacgggcatctgcgctgcactcagcgaaggccttgcagtcggcagtctccactatgcagcagttttacgggatcccggtcaccggtgtgttggatcagacaacgatcgagtggatgaagaaaccccgatgtggtgtccctgatcacccccacttaagccgtaggcggagaaacaagcgctatgccctgactggacagaagtggaggcaaaaacacatcacctacagcattcacaactataccccaaaagtgggtgagctagacacgcggaaagctattcgccaggctttcgatgtgtggcagaaggtgaccccactgacctttgaagaggtgccataccatgagatcaaaagtgaccggaaggaggcagacatcatgatcttttttgcttctggtttccatggcgacagctccccatttgatggagaagggggattcctggcccatgcctacttccctggcccagggattggaggagacacccactttgactccgatgagccatggacgctaggaaatgccaaccatgacgggaacgacctcttcctggtggctgtgcatgagctgggccacgcgctgggactggagcactccagcgaccccagcgccatcatggcgcccttctaccagtacatggagacgcacaacttcaagctgccccaggacgatctccagggcatccagaagatctatggacccccagccgagcctctggagcccacaaggccactccctacactccccgtccgcaggatccactcaccatcggagaggaaacacgagcgccagcccaggccccctcggccgcccctcggggaccggccatccacaccaggcaccaaacccaacatctgtgacggcaacttcaacacagtggccctcttccggggcgagatgtttgtctttaaggatcgctggttctggcgtctgcgcaataaccgagtgcaggagggctaccccatgcagatcgagcagttctggaagggcctgcctgcccgcatcgacgcagcctatgaaagggccgatgggagatttgtcttcttcaaaggtgacaagtattgggtgtttaaggaggtgacggtggagcctgggtacccccacagcctgggggagctgggcagctgtttgccccgtgaaggcattgacacagctctgcgctgggaacctgtgggcaagacctactttttcaaaggcgagcggtactggcgctacagcgaggagcggcgggccacggaccctggctaccctaagcccatcaccgtgtggaagggcatcccacaggctccccaaggagccttcatcagcaaggaaggatattacacctatttctacaagggccgggactactggaagtttgacaaccagaaactgagcgtggagccaggctacccgcgcaacatcctgcgtgactggatgggctgcaaccagaaggaggtggagcggcggaaggagcggcggctgccccaggacgacgtggacatcatggtgaccatcaacgatgtgccgggctccgtgaacgccgtggccgtggtcatcccctgcatcctgtccctctgcatcctggtgctggtctacaccatcttccagttcaagaacaagacaggccctcagcctgtcacctactataagcggccagtccaggaatgggtgtgagcagcccagagccctctctatccacttggtctggccagccaggcccttcctcaccagggtctgaggggcagctctggccagtgctcaccagggccagcagggccctaggctggggtcgtacagctgaagtggtgggtgcattggcctaggctgagcgtggggcagggaattatgggggctgtgccccagggtgggtgtctggcacccagctgccagccttctgtcctgggcaaactactccctacttaagggaataggccaggctccatccggaggcagggaccatgccaggaggagcccctgtggtcacggcatcctgtggtgtccatgaggtaccacagctccactcctggctggaacccagcaccctctgtgggaagccagcactagctctcatcccccatccgggagataccaccagtcctggtccccttttgccaacacctgctggtcagatgtccccctacccccaccccactgtcctccaaggctacaggacccctgcttctgacacagtgagcaacaagcctgggtttccctgctggcagacggcagatccctcaggaaacctgctccacttgtcagggtctcttcggagacccaggatttagggtcacatgctgcaggcagggctgtggcccagctgggtctgacaaggacccagctgtcacatcgtgaatatttaaatgtcctgtcactactgtcccattttgcaaaggctgcttgaggctttaggtgaactagaggtgactgtcttggtgatgaggccagcatagcggccctcccccaggcgacaaggaccaaggtgctgctaaggccactctagcgcccagacaccccagtagctgagctctgctcctatggctacagagctggggcagaagctgaccccatttctggaggaagatccgagtttgtgaccgtcctccactcccctctattgtcactgtccccagctttgctccagtctgtcacttgcagcctggagctcagcctcaccagttaggtgaggcagagatggctgcagggccaacactggcagagcctgggagtccttcggaaggggaccagggcgtctgaagtgctcagtgcccccactactctgaggccgactccagctactctgaggccgactcaatctctcggctggaagcagtgttttcccagagcttggcccttgctgacctcgctcactgggcccatcttcccacactgctcttagaaggacacccctaccggtagcagccccaagctgagggggctccctttttgaccttcactggcccgcccttcactgtctccagcaggagttcctagggcttggcctgccttgctccacagtacggcggaggcagccctgcttgtcactgaggagccctagacaaggccaatgggttcatcaatgcccactggctctctgccaaagccaaaaaggtgtcaggcagtctccagcgtgctggccgggtctcggatgccacccctgctcactgagcctgcatgggccttgcccccgaccctgtggtctctgggattggggtcggcttaccctgtagcacagacagggactcctgctgccctgggagctgtctcaagcaaaatctcttgtcccagaggtgcccatgtgggtccgctgtgtcccctgtcatcatccttgttttttctcattttggccaagggcaggctccctgggacaggcagggaacaactgcggagatattagtgattcataggtttgtacagtgttttatactttgcaaagcactttattagctcacacctgtccactcacatgaaactcgtgttaggccctgggaggccgacggtaactctcaccgtgccctcagatgaagcacagagaggttgttacttgcccgggccatccagtgggctggctgggtcttgtgtccccatctgtggacccctctagggtctgagatgagatgagaagtgtctcctgtatccacctcttcctggcctcccttcccccacttcctggtccctgtccactcctcaggttggtgctctcacttcttgaaagctctaggcacccccgcctcccgccaggctccccattggctcctggcaggccagctgagaatgaacaggagatggaggcaggcagcccaggctgcagaggtgagggatgtggggccaggcccagagggctcagcctagaggcttccaatctcagattctcctgcctgtggtcatctgtttgtccatcaccccaggacagggcagacagaggggcaaagcactgggggccccagagcctagcttcccctcagcctgggggacatcacagcatttcagtgtcagtcacattttaaactgatcagcctttgtataatgttttttaaatcatttctaaataaaacagaaatacaga

SEQ ID NO: 167118 - DNA, 4174 bp, Artificial Sequence
  derived and/or modified sequence
atgccgaggagccggggcggccgcgccgcgccggggccgccgctggcggtggcgcgggcggacgaggcggaggcgcccttcgccgggcagaactggttaaagtcctatggctatctgcttccctatgactcacgggcatctgcgctgcactcagcgaaggccttgcagtcggcagtctccactatgcagcagttttacgggatcccggtcaccggtgtgttggatcagacaacgatcgagtggatgaagaaaccccgatgtggtgtccctgatcacccccacttaagccgtaggcggagaaacaagcgctatgccctgactggacagaagtggaggcaaaaacacatcacctacagcattcacaactataccccaaaagtgggtgagctagacacgcggaaagctattcgccaggctttcgatgtgtggcagaaggtgaccccactgacctttgaagaggtgccataccatgagatcaaaagtgaccggaaggaggcagacatcatgatcttttttgcttctggtttccatggcgacagctccccatttgatggagaagggggattcctggcccatgcctacttccctggcccagggattggaggagacacccactttgactccgatgagccatggacgctaggaaatgccaaccatgacgggaacgacctcttcctggtggctgtgcatgagctgggccacgcgctgggactggagcactccagcgaccccagcgccatcatggcgcccttctaccagtacatggagacgcacaacttcaagctgccccaggacgatctccagggcatccagaagatctatggacccccagccgagcctctggagcccacaaggccactccctacactccccgtccgcaggatccactcaccatcggagaggaaacacgagcgccagcccaggccccctcggccgcccctcggggaccggccatccacaccaggcaccaaacccaacatctgtgacggcaacttcaacacagtggccctcttccggggcgagatgtttgtctttaaggatcgctggttctggcgtctgcgcaataaccgagtgcaggagggctaccccatgcagatcgagcagttctggaagggcctgcctgcccgcatcgacgcagcctatgaaagggccgatgggagatttgtcttcttcaaaggtgacaagtattgggtgtttaaggaggtgacggtggagcctgggtacccccacagcctgggggagctgggcagctgtttgccccgtgaaggcattgacacagctctgcgctgggaacctgtgggcaagacctactttttcaaaggcgagcggtactggcgctacagcgaggagcggcgggccacggaccctggctaccctaagcccatcaccgtgtggaagggcatcccacaggctccccaaggagccttcatcagcaaggaaggatattacacctatttctacaagggccgggactactggaagtttgacaaccagaaactgagcgtggagccaggctacccgcgcaacatcctgcgtgactggatgggctgcaaccagaaggaggtggagcggcggaaggagcggcggctgccccaggacgacgtggacatcatggtgaccatcaacgatgtgccgggctccgtgaacgccgtggccgtggtcatcccctgcatcctgtccctctgcatcctggtgctggtctacaccatcttccagttcaagaacaagacaggccctcagcctgtcacctactataagcggccagtccaggaatgggtgtgagcagcccagagccctctctatccacttggtctggccagccaggcccttcctcaccagggtctgaggggcagctctggccagtgctcaccagggccagcagggccctaggctggggtcgtacagctgaagtggtgggtgcattggcctaggctgagcgtggggcagggaattatgggggctgtgccccagggtgggtgtctggcacccagctgccagccttctgtcctgggcaaactactccctacttaagggaataggccaggctccatccggaggcagggaccatgccaggaggagcccctgtggtcacggcatcctgtggtgtccatgaggtaccacagctccactcctggctggaacccagcaccctctgtgggaagccagcactagctctcatcccccatccgggagataccaccagtcctggtccccttttgccaacacctgctggtcagatgtccccctacccccaccccactgtcctccaaggctacaggacccctgcttctgacacagtgagcaacaagcctgggtttccctgctggcagacggcagatccctcaggaaacctgctccacttgtcagggtctcttcggagacccaggatttagggtcacatgctgcaggcagggctgtggcccagctgggtctgacaaggacccagctgtcacatcgtgaatatttaaatgtcctgtcactactgtcccattttgcaaaggctgcttgaggctttaggtgaactagaggtgactgtcttggtgatgaggccagcatagcggccctcccccaggcgacaaggaccaaggtgctgctaaggccactctagcgcccagacaccccagtagctgagctctgctcctatggctacagagctggggcagaagctgaccccatttctggaggaagatccgagtttgtgaccgtcctccactcccctctattgtcactgtccccagctttgctccagtctgtcacttgcagcctggagctcagcctcaccagttaggtgaggcagagatggctgcagggccaacactggcagagcctgggagtccttcggaaggggaccagggcgtctgaagtgctcagtgcccccactactctgaggccgactccagctactctgaggccgactcaatctctcggctggaagcagtgttttcccagagcttggcccttgctgacctcgctcactgggcccatcttcccacactgctcttagaaggacacccctaccggtagcagccccaagctgagggggctccctttttgaccttcactggcccgcccttcactgtctccagcaggagttcctagggcttggcctgccttgctccacagtacggcggaggcagccctgcttgtcactgaggagccctagacaaggccaatgggttcatcaatgcccactggctctctgccaaagccaaaaaggtgtcaggcagtctccagcgtgctggccgggtctcggatgccacccctgctcactgagcctgcatgggccttgcccccgaccctgtggtctctgggattggggtcggcttaccctgtagcacagacagggactcctgctgccctgggagctgtctcaagcaaaatctcttgtcccagaggtgcccatgtgggtccgctgtgtcccctgtcatcatccttgttttttctcattttggccaagggcaggctccctgggacaggcagggaacaactgcggagatattagtgattcataggtttgtacagtgttttatactttgcaaagcactttattagctcacacctgtccactcacatgaaactcgtgttaggccctgggaggccgacggtaactctcaccgtgccctcagatgaagcacagagaggttgttacttgcccgggccatccagtgggctggctgggtcttgtgtccccatctgtggacccctctagggtctgagatgagatgagaagtgtctcctgtatccacctcttcctggcctcccttcccccacttcctggtccctgtccactcctcaggttggtgctctcacttcttgaaagctctaggcacccccgcctcccgccaggctccccattggctcctggcaggccagctgagaatgaacaggagatggaggcaggcagcccaggctgcagaggtgagggatgtggggccaggcccagagggctcagcctagaggcttccaatctcagattctcctgcctgtggtcatctgtttgtccatcaccccaggacagggcagacagaggggcaaagcactgggggccccagagcctagcttcccctcagcctgggggacatcacagcatttcagtgtcagtcacattttaaactgatcagcctttgtataatgttttttaaatcatttctaaataaaacagaaatacagagtg

SEQ ID NO: 167119 - RNA, 1938 nt, Artificial Sequence
  derived and/or modified sequence
augccacgaaguagggguggacgagcggcuccagggccacccccgccuccgccuccucccgggcaggcaccucgguggagccgcuggcgcgugccgggacgccuccuacuguugcugcugcccgcucugugcugucuacccggcgccgcgagagcagcggccgccgcugcaggggcugguaaccgugccgccguugcaguggccgucgccagagccgacgaagccgaggcucccuuugccggccagaacuggcugaagaguuacggguaccucuugcccuacgauucacgcgcuucugcgcuucacagcgccaaggcucuccagucagcugugaguaccaugcagcaauucuauggcaucccuguuacaggaguuuuggaucagaccaccauugaguggaugaagaaaccucgguguggggucccugaccacccucaccugucacggcgaaggaggaacaaacguuacgcacuuaccggccagaaguggcggcaaaagcacaucaccuauuccauacacaauuacacaccgaaggugggcgagcucgacacgcgcaaggcgauccgacaggcguucgaugucuggcaaaagguaaccccacucacguuugaagaagucccauaccaugagauuaaaagcgauaggaaagaggcugacauuaugaucuuuuucgccuccggauuccacggggauaguuccccauucgauggcgaaggcggauucuuagcacacgccuauuuuccugguccuggaauuggcggagauacccacuuugauucggaugagcccuggacacuuggcaacgcaaaccaugaugguaaugaucuguucuugguugcuguacacgaguuagggcacgcccuuggccucgaacauucaucagauccauccgcuauuauggcccccuuuuaccaauacauggaaacccauaacuuuaaacugccacaggaugaccuccagggaauucaaaaaauuuaugggccuccggccgaaccccuugagccgacacgaccacugcccacgcuccccgucaggcggauucacucuccuucagaacguaagcaugagcgccagccccgcccaccacgccccccccugggcgaccgacccaguacacccgggacuaaaccaaacaucugugacgguaacuuuaauaccguugcccuuuucaggggcgaaauguuugucuucaaggauagaugguucuggagacuacggaacaacagagugcaagagggauauccaaugcagaucgagcaguuuuggaagggauuacccgcucgaauugacgcggcguaugagcgagcugacggacguuucguguuuuuuaagggagauaaauacugggucuucaaggaaguuacaguagagccuggcuacccacacagcuugggagagcuuggguccugucuuccgagggagggcaucgauacagcccuaagaugggagccaguuggaaaaaccuacuucuucaaaggcgagcgguacuggcgguacagcgaggagcgaagggcuacagaccccgguuaccccaaaccuauuacagucuggaagggcauuccucaagcaccucagggggcguuuauuagcaaagagggcuacuauaccuacuucuauaaagggcgcgacuauuggaaauucgacaaucagaaacucuccguggagccggguuacccuagaaauauccugagggacuggaugggcugcaaucagaaggaaguggaaaggcgaaaggagcgaagauuaccacaggaugacguggauauuaugguaaccaucaacgauguccccggaucugucaaugcugucgccguugucauacccugcauccuuagccugugcauucuaguuuugguuuacaccauauuucaguuuaaaaacaagaccgguccacagccugugaccuauuauaaaagaccaguccaggaauggguguag

SEQ ID NO: 167120 - RNA, 1938 nt, Artificial Sequence
  derived and/or modified sequence
augccaagaucccgcgggggcagagccgcaccuggcccuccucccccccccccaccccccggccaggccccgcgcugguccagguggaggguccccggcagguuacuucuucuauuacugcccgcccugugcugccuucccggagccgcacgggccgcugccgcugccgccggcgcagggaaccgggccgccgucgccguggccguugcgcgggccgaugaagcugaggcucccuuugcgggccagaacugguugaagucuuacggcuaucugcuaccuuaugacucaagggccagugcacuucacagugccaaagcucugcaauccgcagugaguacaaugcagcaguuuuacggcaucccagugaccggaguccucgaucagaccacuauugaauggaugaaaaaaccaaggugcggugucccagaccauccccaucugagccgaaggcguagaaauaagcgauaugcauuaacuggacagaaguggagacagaaacauauaacauauaguauccauaauuacacucccaaagucggcgaacucgacacccguaaggcuauucgacaggcauucgauguuuggcagaaaguuaccccucuuaccuuugaggagguacccuaccacgagauuaaauccgaucggaaggaagcagauauaaugaucuucuucgcaucaggauuucauggggauucgagcccauucgacggagaagguggauuccuggcccacgcguauuuucccggcccggggauuggaggggauacucacuucgauagugacgaacccuggacgcucggaaacgcgaaccaugacggcaaugaccuguuuuuaguagcugugcacgaacugggacaugcgcuagggcuggaacauaguagcgauccaagugcaaucauggcuccauucuaccaauacauggaaacacacaauuucaaacuaccacaggacgaccugcaaggcauccagaagaucuaugguccacccgcagagccccuggaaccgacccguccauuacccacguugcccgugcggagaauacacagcccaagcgagcgcaaacacgagagacagccccguccaccccgaccuccguuaggugacagaccauccacccccggaaccaaacccaauaucugugacggcaauuucaauacaguggcgcuguucaggggagagauguucgucuucaaagauaggugguuuuggcgccugcggaacaaucggguacaggaaggguauccuaugcagauugaacaauucuggaaaggucugcccgcaagaaucgacgccgcguacgagcgcgcugauggaagguucguuuuuuucaaaggggacaaguacugggucuuuaaagaagucacgguagaaccugguuauccacacagcuuaggcgagcuggggaguugccugccaagggaaggcaucgacaccgccuugagaugggagccugucggaaagacguauuuuuuuaagggggagagauauuggagauauagcgaggaacgccgagcgaccgacccaggauacccuaaaccaaucaccguuuggaagggcauaccucaggccccccagggcgcauucauuagcaaagagggcuacuacacauacuucuauaagggcagagacuauuggaaauucgacaaucagaagcugucuguagagccgggcuacccaaggaacauucuuagagacuggaugggauguaaucagaaagaagucgagaggcgcaaggagagaagguuaccccaagacgacguagacauuaugguuacgauuaaugacgucccuggaagugugaacgccgucgcagucguuaucccauguauccucucgcucugcauucucgugcucguguauacgauauuccaguucaaaaacaagaccggaccucagcccgucacuuacuauaaaagaccuguccaggaguggguuuag

SEQ ID NO: 167121 - protein, 322 aa, Artificial Sequence
  derived and/or modified sequence
MARCFSLVLLLTSIWTTRLLVQGSLRAEELSIQVSCRIMGITLVSKKANQQLNFTEAKEACRLLGLSLAGKDQVETALKASFETCSYGWVGDGFVVISRISPNPKCGKNGVGVLIWKVPVSRQFAAYCYNSSDTWTNSCIPEIITTKDPIFNTQTATQTTEFIVSDSTYSVASPYSTIPAPTTTPPAPASTSIPRRKKLICVTEVFMETSTMSTETEPFVENKAAFKNEAAGFGGVPTALLVLALLFFGAAAGLGFCYVKRYVKAFPFTNKNQQKEMIETKVVKEEKANDSNPNEESKKTDKNPEESKSPSKTTVRCLEAEV

SEQ ID NO: 167122 - DNA, 969 bp, Artificial Sequence
  derived and/or modified sequence
atggctcggtgctttagtcttgtgctgttgctgacctcgatttggaccacacggctactggtccaaggttctctgcgggccgaggagctttccattcaagtgtcctgccggatcatggggatcaccttggtcagcaagaaggctaaccagcaactgaactttacagaagctaaggaagcgtgtagacttctgggcctctcattagcaggcaaagaccaggttgaaactgccctcaaagctagcttcgagacatgcagctacggatgggtaggagatggctttgttgtgatcagtagaatatctccaaatccgaaatgtggcaaaaacggggttggggtactcatctggaaagtgccagtgagcagacagttcgccgcctattgttacaactccagtgatacctggaccaattcctgtatacccgagattattacaactaaggatcccatctttaatactcagaccgccacccaaacaaccgagttcatcgtcagcgacagcacatattctgtagcctctccgtactccacgatcccagcacctaccacaacccctcctgcacctgcctcaacgtctattccacggcgcaagaaactgatctgtgtaacggaagtcttcatggaaaccagcaccatgagtacagagacagagccctttgtcgagaacaaggcagccttcaagaacgaggcggctggattcggaggcgtgcctaccgccttgctggtcctggcccttttgttcttcggggctgcagccgggcttggattttgctacgtgaaacgctatgttaaggcatttcccttcacaaataaaaaccaacagaaggaaatgatcgagacaaaggtggttaaggaagaaaaggcgaacgacagcaacccaaatgaggaatcaaaaaaaaccgacaagaacccagaagaatccaaatcaccttcaaaaaccacagtccgctgtctcgaggctgaggtatag

SEQ ID NO: 167123 - DNA, 969 bp, Artificial Sequence
  derived and/or modified sequence
atggcccgctgcttcagcctggtgctgctgctgaccagcatctggaccacccggctgctggtgcagggcagcctgcgggcagaggagctgagcatccaggtgtcctgccgcatcatgggcatcaccctggtgtccaagaaggccaaccagcagctgaacttcacagaggccaaggaggcctgccgcctgctgggcctgagcctggccggcaaggaccaggtggagacagccctgaaggccagctttgagacctgcagctatggctgggtgggagatggctttgtggtgatcagccgcatcagccccaaccccaagtgtgggaagaatggagtgggcgtgctgatctggaaggtgcctgtgtcccggcagtttgctgcctactgctacaacagcagtgacacctggaccaacagctgcatccctgagatcatcaccaccaaggaccccatcttcaacacccagacagccacccagaccacagagttcatcgtgtctgacagcacctacagcgtggccagcccctacagcaccatcccagcccccaccaccaccccaccagccccagccagcaccagcatccccaggaggaagaagctgatctgtgtgacagaggtgttcatggagaccagcaccatgagcacagaaacagagccctttgtggagaacaaggccgccttcaagaatgaggccgccggctttggaggagtgcccacagccctgctggtgctggccctgctcttcttcggggctgctgctggcctgggcttctgctacgtgaagcgctacgtgaaggccttccccttcaccaacaagaaccagcagaaggagatgattgagaccaaggtggtgaaggaggagaaggccaatgacagcaaccccaatgaggagagcaagaagacagacaagaaccctgaggagagcaagagccccagcaagaccaccgtgcgctgcctggaggccgaggtgtag

SEQ ID NO: 167124 - DNA, 3273 bp, Artificial Sequence
  derived and/or modified sequence
agcagggaaatccggatgtctcggttatgaagtggagcagtgagtgtgagcctcaacatagttccagaactctccatccggactagttattgagcatctgcctctcatatcaccagtggccatctgaggtgtttccctggctctgaaggggtaggcacgatggccaggtgcttcagcctggtgttgcttctcacttccatctggaccacgaggctcctggtccaaggctctttgcgtgcagaagagctttccatccaggtgtcatgcagaattatggggatcacccttgtgagcaaaaaggcgaaccagcagctgaatttcacagaagctaaggaggcctgtaggctgctgggactaagtttggccggcaaggaccaagttgaaacagccttgaaagctagctttgaaacttgcagctatggctgggttggagatggattcgtggtcatctctaggattagcccaaaccccaagtgtgggaaaaatggggtgggtgtcctgatttggaaggttccagtgagccgacagtttgcagcctattgttacaactcatctgatacttggactaactcgtgcattccagaaattatcaccaccaaagatcccatattcaacactcaaactgcaacacaaacaacagaatttattgtcagtgacagtacctactcggtggcatccccttactctacaatacctgcccctactactactcctcctgctccagcttccacttctattccacggagaaaaaaattgatttgtgtcacagaagtttttatggaaactagcaccatgtctacagaaactgaaccatttgttgaaaataaagcagcattcaagaatgaagctgctgggtttggaggtgtccccacggctctgctagtgcttgctctcctcttctttggtgctgcagctggtcttggattttgctatgtcaaaaggtatgtgaaggccttcccttttacaaacaagaatcagcagaaggaaatgatcgaaaccaaagtagtaaaggaggagaaggccaatgatagcaaccctaatgaggaatcaaagaaaactgataaaaacccagaagagtccaagagtccaagcaaaactaccgtgcgatgcctggaagctgaagtttagatgagacagaaatgaggagacacacctgaggctggtttctttcatgctccttaccctgccccagctggggaaatcaaaagggccaaagaaccaaagaagaaagtccacccttggttcctaactggaatcagctcaggactgccattggactatggagtgcaccaaagagaatgcccttctccttattgtaaccctgtctggatcctatcctcctacctccaaagcttcccacggcctttctagcctggctatgtcctaataatatcccactgggagaaaggagttttgcaaagtgcaaggacctaaaacatctcatcagtatccagtggtaaaaaggcctcctggctgtctgaggctaggtgggttgaaagccaaggagtcactgagaccaaggctttctctactgattccgcagctcagaccctttcttcagctctgaaagagaaacacgtatcccacctgacatgtccttctgagcccggtaagagcaaaagaatggcagaaaagtttagcccctgaaagccatggagattctcataacttgagacctaatctctgtaaagctaaaataaagaaatagaacaaggctgaggatacgacagtacactgtcagcagggactgtaaacacagacagggtcaaagtgttttctctgaacacattgagttggaatcactgtttagaacacacacacttactttttctggtctctaccactgctgatattttctctaggaaatatacttttacaagtaacaaaaataaaaactcttataaatttctatttttatctgagttacagaaatgattactaaggaagattactcagtaatttgtttaaaaagtaataaaattcaacaaacatttgctgaatagctactatatgtcaagtgctgtgcaaggtattacactctgtaattgaatattattcctcaaaaaattgcacatagtagaacgctatctgggaagctatttttttcagttttgatatttctagcttatctacttccaaactaatttttatttttgctgagactaatcttattcattttctctaatatggcaaccattataaccttaatttattattaacatacctaagaagtacattgttacctctatataccaaagcacattttaaaagtgccattaacaaatgtatcactagccctcctttttccaacaagaagggactgagagatgcagaaatatttgtgacaaaaaattaaagcatttagaaaacttctttgctttcttatttacgtagatgcattatacctttcatgtaaaattaaagtgaggaccagatcatatcatattgtttgcaaaaataaaagggacaatgttggttgttaaaatacaagcatatgtcaaccaaacagcatatatcatatggggctattcatgctccaaacattttattttgagttggccaagtacatacacattaaacagtcctttactagagatgctggccctccatttccatccatttcagaattcaccagggagccagagatccaggatggctcattcgtctcacttttgaccgccctgcttctctagttttctctttccctcccgcttagactgctaattgtcttcttcccctcaccagtgaccccacagctccgtggttccttcggcccagatgccacaacctgctggcataatcttttccggttggcccacggagtataatcttaaaatttgatttcatttccaggcattaaaaatcaagagatttcacatggttacatttctgggttccctctaaaaatggaaagatctggaagtaaagaacccatgttccctcatagcaatcattatctgatactgagtagcagctgtcccctttcaatggggtctgctctttttgtttcaccacagtcctcatgactctctgttgcacactcatgccaaagtaaaggtgccctttcctatgaactttgtaacactgtggccttttcttcacacccagcccacgtccctcatatatatcacctgcctgccccagtaggtctatgagtttgaaactggtttgtcagtccttaagctttatcagcttcatccatttctcagggagtaaagaagaaaagagggaaagcgcctaagtagtgatcttccctctgtgtgttagctgaaa

SEQ ID NO: 167125 - DNA, 969 bp, Artificial Sequence
  derived and/or modified sequence
atggcccggtgcttcagcctggtgctgctgctgaccagcatctggactacaaggctgctcgtacaggggtctctccgagcagaagaactgtcgattcaggttagttgtcggattatgggtatcacgctggttagcaagaaagccaaccaacagctcaacttcaccgaagccaaggaggcctgtagacttctgggcttatctctcgcaggaaaagaccaggttgaaacagcccttaaggcgtccttcgaaacctgttcatacgggtgggtaggggatgggtttgtggtgatcagtcggatctctcctaatcctaagtgtggtaaaaacggagtgggagtcctgatttggaaagttcccgtcagtcgtcaatttgctgcctactgttataactcctcggacacctggactaatagctgtatccctgagattatcacaaccaaggacccaatcttcaatacccagaccgcgacccagacaaccgaatttattgtttctgacagtacctatagtgtggcgagtccctattccaccatccccgctccaactacgacacctcccgcgcccgcctcaacttcgatcccacggcgcaagaagctgatctgcgtgaccgaggtgttcatggagaccagcactatgtctacagagacggaacccttcgtggagaataaagccgccttcaagaacgaggctgccgggttcggaggggtgcctaccgctctgcttgtcctcgccctgctattcttcggagccgccgccggtttagggttttgttatgtgaagcggtatgtcaaggccttcccatttaccaacaaaaaccagcaaaaagagatgatagaaactaaagtggtcaaggaggagaaagcaaatgacagtaatcctaacgaagaatccaaaaaaactgacaagaatcctgaggaaagcaagagcccaagcaagactactgtacgctgtctggaggcggaagtctag

SEQ ID NO: 167126 - DNA, 969 bp, Artificial Sequence
  derived and/or modified sequence
atggcccgatgcttctccttggtgctgctcttaacctctatatggacaactagattactagtccagggttctctgcgcgctgaagaacttagtatccaagtgtcatgccgcattatggggatcacgctcgtgtccaagaaggctaatcaacaactaaatttcactgaggccaaagaggcatgtcggctactgggcctgagtctagccggtaaagatcaagtagagactgccttaaaggccagcttcgagacgtgcagctacggttgggtgggtgacgggtttgtggtgatttcaaggataagccctaatccgaaatgtggaaaaaacggcgtcggcgtgctgatctggaaagtgcccgtgagtagacaatttgctgcttactgttataactcttcagatacatggaccaattcctgtatacccgagattatcaccactaaagaccccatttttaatactcagaccgcgacccagactaccgaatttatagtcagcgatagcacatatagcgttgcgagcccttattccacaattcccgcaccgaccacaactcctcctgctccagcatcaaccagcattcctagacgaaagaagcttatttgcgtcaccgaagtcttcatggagactagcacaatgagtactgaaaccgagccatttgtggagaataaagccgcattcaaaaatgaagcggctggatttgggggagtccctaccgcgctgttagtcctggcgctcctatttttcggagccgctgctggacttggcttttgctatgtgaagaggtacgttaaagcattcccatttacaaataaaaaccagcagaaggaaatgatcgagaccaaagtggtgaaagaggagaaggcaaacgatagcaacccaaatgaggaaagtaagaaaactgataaaaatccagaagaatctaagtctcctagcaaaacaacggtgagatgcctggaggccgaggtctag

SEQ ID NO: 167127 - DNA, 969 bp, Artificial Sequence
  derived and/or modified sequence
atggccagatgcttcagcctggtgctgctgctgaccagcatctggaccaccagactgctggtgcagggcagcctgagagccgaggagctgagcatccaggtgagctgcagaatcatgggcatcaccctggtgagcaagaaggccaaccagcagctgaacttcaccgaggccaaggaggcctgcagactgctgggcctgagcctggccggcaaggaccaggtggagaccgccctgaaggccagcttcgagacctgcagctacggctgggtgggcgacggcttcgtggtgatcagcagaatcagccccaaccccaagtgcggcaagaacggcgtgggcgtgctgatctggaaggtgcccgtgagcagacagttcgccgcctactgctacaacagcagcgacacctggaccaacagctgcatccccgagatcatcaccaccaaggaccccatcttcaacacccagaccgccacccagaccaccgagttcatcgtgagcgacagcacctacagcgtggccagcccctacagcaccatccccgcccccaccaccaccccccccgcccccgccagcaccagcatccccagaagaaagaagctgatctgcgtgaccgaggtgttcatggagaccagcaccatgagcaccgagaccgagcccttcgtggagaacaaggccgccttcaagaacgaggccgccggcttcggcggcgtgcccaccgccctgctggtgctggccctgctgttcttcggcgccgccgccggcctgggcttctgctacgtgaagagatacgtgaaggccttccccttcaccaacaagaaccagcagaaggagatgatcgagaccaaggtggtgaaggaggagaaggccaacgacagcaaccccaacgaggagagcaagaagaccgacaagaaccccgaggagagcaagagccccagcaagaccaccgtgagatgcctggaggccgaggtgtag

SEQ ID NO: 167128 - protein, 269 aa, Artificial Sequence
  derived and/or modified sequence
MQEIIASVDHIKFDLEIAVEQQLGAQPLPFPGMDKSGAAVCEFFLKAACGKGGMCPFRHISGEKTVVCKHWLRGLCKKGDQCEFLHEYDMTKMPECYFYSKFGECSNKECPFLHIDPESKIKDCPWYDRGFCKHGPLCRHRHTRRVICVNYLVGFCPEGPSCKFMHPRFELPMGTTEQPPLPQQTQPPAKQSNNPPLQRSSSLIQLTSQNSSPNQQRTPQVIGVMQSQNSSAGNRGPRPLEQVTCYKCGEKGHYANRCTKGHLAFLSGQ

SEQ ID NO: 167129 - DNA, 810 bp, Artificial Sequence
  derived and/or modified sequence
atgcaagaaatcattgcctcagtggaccatatcaagttcgacctggagattgccgtcgaacagcagctcggagcccagccactgccttttccaggaatggacaagagtggggccgcagtttgtgaatttttcctcaaggccgcctgtggcaagggaggaatgtgccctttccggcatatcagcggtgaaaaaaccgtggtgtgcaaacattggctgcgtggcctctgtaagaaaggcgaccaatgtgagttcctgcacgagtacgatatgaccaaaatgcctgagtgctacttctactcaaaatttggggaatgctccaacaaggagtgtccttttttgcacatagatcctgagtctaagataaaggactgcccttggtacgacagaggcttttgcaagcatggccccctttgccggcaccgacacacacggcgggtcatctgtgtcaactacctggtgggcttttgtcccgagggtcccagttgtaagtttatgcatccccggttcgagctacccatgggcacaactgaacaacccccattgcctcagcagacacagccaccagccaaacaatccaataatccacctctgcaaagatcctccagcctcatccagcttacgtcacagaatagctcaccgaatcagcaaaggacacctcaggtgataggggtaatgcagagccaaaactccagcgctggcaacagggggcccagacccttggagcaggtgacttgctataaatgcggggagaaagggcattacgccaaccgctgtacaaagggccacctggcttttctgtctggacagtag

SEQ ID NO: 167130 - DNA, 810 bp, Artificial Sequence
  derived and/or modified sequence
atgcaggagatcatcgcctctgtggaccacatcaagtttgacctggagattgctgtggagcagcagctgggcgcccagcccctgcccttccctggcatggacaagagcggggctgctgtgtgtgagttcttcctgaaggccgcctgtgggaaaggaggcatgtgccccttccgccacatctctggagagaagacagtggtgtgcaagcactggctgcggggcctgtgcaagaagggggaccagtgtgagttcctgcacgagtatgacatgaccaagatgcctgagtgctacttctacagcaagtttggagagtgcagcaacaaggaatgtcccttcctgcacattgatcctgagagcaagatcaaggactgcccctggtatgaccggggcttctgcaagcacggccccctgtgccgccaccgccacacccggcgggtcatctgtgtgaactacctggtgggcttctgcccagagggccccagctgcaagttcatgcaccccaggtttgagctgcccatgggcaccacagagcagccccccctgccccagcagacccagcccccagccaagcagagcaacaacccccccctgcagaggagcagcagcctcatccagctgaccagccagaacagcagccccaaccagcagaggaccccccaggtgattggagtgatgcagagccagaacagcagcgctggcaacagaggcccccggcccctggagcaggtgacctgctacaagtgtggggagaagggccactacgccaaccgctgcaccaagggccacctggccttcctgagcggccagtag

SEQ ID NO: 167131 - DNA, 810 bp, Artificial Sequence
  derived and/or modified sequence
atgcaggagatcatcgccagcgtggaccacatcaagttcgacctggaaatcgcagttgagcagcagctgggggcgcagccacttcccttccccggcatggacaaatctggggccgccgtgtgtgaattctttctaaaggccgcctgcgggaaaggaggaatgtgcccatttcgccatatttctggtgagaagactgtagtatgcaaacattggctccggggcttgtgcaagaagggagatcagtgcgagtttctgcatgagtatgacatgaccaagatgcctgagtgttacttctatagcaaatttggggaatgctccaacaaagaatgcccctttttgcacatagacccagagtcaaaaattaaagactgcccctggtatgatcgggggttctgtaaacacggaccactatgcagacatcgacacaccaggagggtcatctgcgtgaattatttggttggcttctgtcccgagggtccctcctgcaagtttatgcatcccagatttgagttgcccatgggtacgaccgaacagcccccattgccacagcagacgcagcctccagctaagcagagcaataacccgcccctgcagcgctcttcttcgctgattcaattgaccagccagaacagcagccccaatcaacagaggacacctcaagtgattggggtgatgcagtctcagaattcttccgcaggtaatagggggccaaggccccttgagcaggtaacctgctataaatgtggtgagaagggacattatgccaaccggtgtacgaaaggccatctggcctttttgagcggacagtag

SEQ ID NO: 167132 - DNA, 810 bp, Artificial Sequence
  derived and/or modified sequence
atgcaggaaataattgccagtgtggatcatataaaatttgatttagagattgccgtggaacagcaactgggggctcaaccccttccatttccaggaatggacaaaagcggagctgccgtgtgcgaatttttcctgaaggcagcatgcggaaaagggggtatgtgcccttttagacacatttctggagaaaaaactgtggtgtgcaagcattggctgagagggctgtgcaagaagggtgaccagtgcgagtttctgcatgaatacgacatgactaagatgccagagtgttacttctactctaagttcggagagtgcagcaacaaagaatgccctttcctgcacattgatcctgaatcaaagattaaagattgtccctggtacgacagaggcttttgtaaacacggacctctgtgcagacatcggcatacccgccgtgtgatttgcgtgaattatttagtagggttttgtccggaggggccttcttgcaagtttatgcaccccaggtttgagctgcccatgggtaccactgagcaaccacccctacctcagcagacccagccaccagccaagcagagcaacaaccctccgctgcaaaggtccagctcactgatccagctaacctctcagaacagttctccaaatcagcagaggaccccacaagtgatcggggtaatgcagagccagaatagcagcgctggcaaccgagggcctagacccctggagcaggtgacgtgctataagtgtggtgagaaaggacattacgccaataggtgtactaaaggccacttagcctttttgagtggccagtag

SEQ ID NO: 167133 - DNA, 1691 bp, Artificial Sequence
  derived and/or modified sequence
cgccgccgccatgcaggaaatcatcgccagcgtggaccacatcaagtttgacttggagatcgcggtggagcagcagctgggggcgcagccgctgcccttccccggcatggacaagtcgggcgctgctgtctgtgaattctttttgaaagctgcctgcggcaaagggggcatgtgtccgtttcgccacatcagtggtgagaagacagttgtgtgcaaacactggctgcgtggcctatgcaagaaaggggaccagtgtgagttcctgcatgagtatgacatgaccaagatgcccgagtgctacttctactccaagttcggggagtgcagcaacaaggaatgtcccttcctgcacatcgaccccgagtccaagatcaaggactgtccttggtatgaccgtggcttctgcaagcacggtcccctctgcaggcaccggcacacacggagagtcatctgtgtgaattacctcgtgggattctgcccggaggggccctcgtgtaaattcatgcaccctcgatttgaactgcccatgggaaccaccgagcagcccccactgccgcagcagacacagcctccagcaaagcaaagtaacaatccgccattacaaaggtcgtcctccttgatccagttaacgagtcagaactcttctcccaatcagcagagaaccccgcaggtcatcggggtcatgcagagtcaaaacagcagcgcgggcaaccggggaccccggccactggagcaggtcacctgttacaagtgtggcgagaaaggacactacgccaacagatgcaccaaagggcacttggcctttctcagtggacagtgacagcagctggagccagctccgagcagcccgggggccccgctgttgggagtgtgcatttaactgtttcatgcgcttgttggcgcgactgtggctcgagctggcccgcagacacgtgggtttcatcactctgaggggccacgtctgttagtttcctatcattttgccttagtattttttgaaaaagggacatgtgtcctgtgggtccctgcagtcgacatcatgtttggctgggcatcgatgcctcctttctgggactcccggcacaactcccctcatccagggagggaggcagctgctggggaggggcttggctaggtagttctgtgtggcggtggtcattcccctcattaaacaccagttcttggtgacgccaggggctggtaggtcattcaaagctgtggccagctcacgcctgcttcctccctccctgccctgctgaatcctaaagctgtgcctatatctgtgatttgaatgagggagccctttggggcaaattcaggtgcccccattgcctcaggctggccctggtcccaggtggcagcggttgaggaggggtacagggctctcaagcctgaggttttcttctctgggcttaattttctcttggggtacgtgcctgacagtgtttaaggtgtccgttgaactggagttgcagacttttaaatagatgaccccttcagatcatctgtgcctacctcctgcccatcaggcgtctacactgtcactcagacacctgtggcatgtggaggagactgccctgtcctgagcctggaaaatgtgaaactgtctcctgcaacctgctgggcatgtgggcctggctgtgttcaattgcaagaacaatttttatgaaatggattaaagcttgtttttt

SEQ ID NO: 167134 - DNA, 810 bp, Artificial Sequence
  derived and/or modified sequence
atgcaggagatcatcgccagcgtggaccacatcaagttcgacctggagatcgccgtggagcagcagctgggcgcccagcccctgcccttccccggcatggacaagagcggcgccgccgtgtgcgagttcttcctgaaggccgcctgcggcaagggcggcatgtgccccttcagacacatcagcggcgagaagaccgtggtgtgcaagcactggctgagaggcctgtgcaagaagggcgaccagtgcgagttcctgcacgagtacgacatgaccaagatgcccgagtgctacttctacagcaagttcggcgagtgcagcaacaaggagtgccccttcctgcacatcgaccccgagagcaagatcaaggactgcccctggtacgacagaggcttctgcaagcacggccccctgtgcagacacagacacaccagaagagtgatctgcgtgaactacctggtgggcttctgccccgagggccccagctgcaagttcatgcaccccagattcgagctgcccatgggcaccaccgagcagccccccctgccccagcagacccagccccccgccaagcagagcaacaacccccccctgcagagaagcagcagcctgatccagctgaccagccagaacagcagccccaaccagcagagaaccccccaggtgatcggcgtgatgcagagccagaacagcagcgccggcaacagaggccccagacccctggagcaggtgacctgctacaagtgcggcgagaagggccactacgccaacagatgcaccaagggccacctggccttcctgagcggccagtag

SEQ ID NO: 167135 - protein, 146 aa, Artificial Sequence
  derived and/or modified sequence
MLAGAGRPGLPQGRHLCWLLCAFTLKLCQAEAPVQEEKLSASTSNLPCWLVEEFVVAEECSPCSNFRAKTTPECGPTGYVEKITCSSSKRNEFKSCRSALMEQRLFWKFEGAVVCVALIFACLVIIRQRQLDRKALEKVRKQIESI

SEQ ID NO: 167136 - protein, 117 aa, Artificial Sequence
  derived and/or modified sequence
MAWGWHLSFLSASTSNLPCWLVEEFVVAEECSPCSNFRAKTTPECGPTGYVEKITCSSSKRNEFKSCRSALMEQRLFWKFEGAVVCVALIFACLVIIRQRQLDRKALEKVRKQIESI

SEQ ID NO: 167137 - DNA, 441 bp, Artificial Sequence
  derived and/or modified sequence
atgctcgctggcgccggacgtccgggacttccacagggccgccacctgtgttggctgctttgtgcatttacattgaagctctgtcaggccgaggcacccgtccaggaagaaaaactgtctgccagcaccagcaacctcccatgctggctcgtcgaagagtttgtggtggccgaggagtgttccccctgttctaatttccgcgcaaagactactccagagtgtggcccaactggctatgttgagaagataacgtgctcttcttctaagaggaacgagtttaaatcctgtcgaagtgcgttgatggaacagagactgttctggaagttcgagggggccgtggtctgcgtggctcttatatttgcctgcctcgtgataatcagacagcgacagctcgaccgaaaagctctcgaaaaagtgcggaaacagatcgagtccatctag

SEQ ID NO: 167138 - DNA, 354 bp, Artificial Sequence
  derived and/or modified sequence
atggcctgggggtggcatttgtcatttctgagcgcgtcaaccagcaacctgccctgttggctggtggaagaatttgttgtggcagaggagtgctccccttgctcaaatttccgggctaagaccacacccgaatgtggacctaccggctatgtggaaaagattacctgtagttcatctaagaggaacgagttcaagagctgccggtccgctctaatggaacagcggctgttctggaaattcgagggcgctgtcgtatgtgtcgcccttattttcgcctgcctggtaataattcggcagcgccaactggaccgaaaggctctggaaaaggtccggaaacagatcgaaagtatatag

SEQ ID NO: 167139 - DNA, 354 bp, Artificial Sequence
  derived and/or modified sequence
atggcctggggttggcatttgagctttttgtctgccagcacgtcgaatctgccctgttggctcgtcgaggagttcgtggtggcagaagagtgctcaccatgttccaactttcgtgccaaaacgacccctgagtgcggaccgacaggttatgtggagaaaatcacatgctctagttctaaacggaacgagttcaagtcatgcagaagtgcgctgatggagcagcggctcttttggaaatttgaaggggccgtggtgtgcgtggccctgattttcgcttgcttggtaataattcgtcagcgacagctggacaggaaagcactcgagaaggtgaggaaacagatagagagtatctag

SEQ ID NO: 167140 - DNA, 354 bp, Artificial Sequence
  derived and/or modified sequence
atggcttggggatggcacctgtctttcttgtccgcaagcacgtcaaacctgccttgctggttggtcgaagaatttgtggtagccgaggaatgttcgccctgctcgaattttcgggccaaaaccactccagagtgtgggccgactggctacgtggaaaaaatcacgtgttctagcagcaagcggaatgagttcaagagttgcaggtctgctctgatggaacaacgccttttttggaagttcgaaggcgctgttgtgtgcgtggctctcattttcgcttgcttagtgatcataagacagcgccagctcgatcggaaggccttggaaaaagttcgcaagcagatcgagtcaatctag

SEQ ID NO: 167141 - DNA, 1287 bp, Artificial Sequence
  derived and/or modified sequence
gcaggcgaggcgccaccgacgcggaagactataagccccagcgggcgacgaccgaacgcccccgggaacaccgggccccgagctcggtcccgcgcccgaggatcctccacggggctagatggctgcgtcgggggcgggagcggaggtgagcgggcgctagggccgcgagcccccgccggcccttcctccagcgccctgcggaccccgcagaaggcgctcgcctccctagcccgcaaaaacatatcgatttttctcgctgtggcaacggggacgtcctgatagatcctctgctccaataggcaactccggccttccctgccctgacctggaacctctgggagggctgcagagtaagtgccgcctctgcgctccgacggaggcacgaggcctgtggagtaggtccctctgttccgacaggtgcgacacttggcgctccatgcttgcgggtgccgggaggcctggcctcccccagggccgccacctctgctggttgctctgtgctttcaccttaaagctctgccaagcagaggctcccgtgcaggaagagaagctgtcagcaagcacctcaaatttgccatgctggctggtggaagagtttgtggtagcagaagagtgctctccatgctctaatttccgggctaaaactacccctgagtgtggtcccacaggatatgtagagaaaatcacatgcagctcatctaagagaaatgagttcaaaagctgccgctcagctttgatggaacaacgcttattttggaagttcgaaggggctgtcgtgtgtgtggccctgatcttcgcttgtcttgtcatcattcgtcagcgacaattggacagaaaggctctggaaaaggtccggaagcaaatcgagtccatatagctacattccacccttgtatcctgggtcttagagaccctatctcagacagtgaaagtgaaatggactgatttgcactcttggttctttggagccttgtggtggaatccccttttccccatcttcttctttcagatcattaatgagcagaataaaaagagtaaaatggtttccttcccttctgtaacttggagcaggaagtcatgggggcagagagggaaaggaggtggttacttaaggccccaatctaccaagtcttccccaccacttctcccttgttttccccctcttctactacttatttcaaacttctgggatacaatttcagctaaaacgtttatttctcactcaaaacttatttcccctcaaccctatacccaaagaagaaataaaatcacagatacataacagaa

SEQ ID NO: 167142 - DNA, 1040 bp, Artificial Sequence
  derived and/or modified sequence
accgaacgcccccgggaacaccgggccccgagctcggtcccgcgcccgaggatcctccacggggctagatggctgcgtcgggggcgggagcggaggcaactccggccttccctgccctgacctggaacctctgggagggctgcagagtaagtgccgcctctgcgctccgacggaggcacgaggcctgtggagtaggtccctctgttccgacaggtgcgacacttggcgctccatgcttgcgggtgccgggaggcctggcctcccccagggccgccacctctgctggttgctctgtgctttcaccttaaagctctgccaagcagaggctcccgtgcaggaagagaagctgtcaggtgggtgattgtctgggaacccgacacgtcccgtcgtttgtttttggttttagtatcttccccatataccaagagcacaggtggaaaaggccggcaccacatggaatgagggcaagcgctgtgccgggaagttggatgggcagagcctgggagaaatgttttctgaatggcctggggctggcatttatctttcctttcagcaagcacctcaaatttgccatgctggctggtggaagagtttgtggtagcagaagagtgctctccatgctctaatttccgggctaaaactacccctgagtgtggtcccacaggatatgtagagaaaatcacatgcagctcatctaagagaaatgagttcaaaagctgccgctcagctttgatggaacaacgcttattttggaagttcgaaggggctgtcgtgtgtgtggccctgatcttcgcttgtcttgtcatcattcgtcagcgacaattggacagaaaggctctggaaaaggtccggaagcaaatcgagtccatatagctacattccacccttgtatcctgggtcttagagaccctatctcagacagtgaaagtgaaatggactgatttgcactcttggttctttggagccttgtggtggaatccccttttccccatcttcttctttcagatcattaatgagcagaataaaaagagtaaaatggt

SEQ ID NO: 167143 - DNA, 1216 bp, Artificial Sequence
  derived and/or modified sequence
ctataagccccagcgggcgacgaccgaacgcccccgggaacaccgggccccgagctcggtcccgcgcccgaggatcctccacggggctagatggctgcgtcgggggcgggagcggaggtgagcgggcgctagggccgcgagcccccgccggcccttcctccagcgccctgcggaccccgcagaaggcgctcgcctccctagcccgcaaaaacatatcgatttttctcgctgtggcaacggggacgtcctgatagatcctctgctccaataggcaactccggccttccctgccctgacctggaacctctgggagggctgcagagtaagtgccgcctctgcgctccgacggaggcacgaggcctgtggagtaggtccctctgttccgacaggtgcgacacttggcgctccatgcttgcgggtgccgggaggcctggcctcccccagggccgccacctctgctggttgctctgtgctttcaccttaaagctctgccaagcagaggctcccgtgcaggaagagaagctgtcaggtgggtgattgtctgggaacccgacacgtcccgtcgtttgtttttggttttagtatcttccccatataccaagagcacaggtggaaaaggccggcaccacatggaatgagggcaagcgctgtgccgggaagttggatgggcagagcctgggagaaatgttttctgaatggcctggggctggcatttatctttcctttcagcaagcacctcaaatttgccatgctggctggtggaagagtttgtggtagcagaagagtgctctccatgctctaatttccgggctaaaactacccctgagtgtggtcccacaggatatgtagagaaaatcacatgcagctcatctaagagaaatgagttcaaaagctgccgctcagctttgatggaacaacgcttattttggaagttcgaaggggctgtcgtgtgtgtggccctgatcttcgcttgtcttgtcatcattcgtcagcgacaattggacagaaaggctctggaaaaggtccggaagcaaatcgagtccatatagctacattccacccttgtatcctgggtcttagagaccctatctcagacagtgaaagtgaaatggactgatttgcactcttggttctttggagccttgtggtggaatccccttttccccatcttcttctttcagatcattaatgagcagaataaaaagagtaaaatggt

SEQ ID NO: 167144 - DNA, 520 bp, Artificial Sequence
  derived and/or modified sequence
aataggcaactccggccttccctgccctgacctggaacctctgggagggctgcagatatcttccccatataccaagagcacaggtggaaaaggccggcaccacatggaatgagggcaagcgctgtgccgggaagttggatgggcagagcctgggagaaatgttttctgaatggcctggggctggcatttatctttcctttcagcaagcacctcaaatttgccatgctggctggtggaagagtttgtggtagcagaagagtgctctccatgctctaatttccgggctaaaactacccctgagtgtggtcccacaggatatgtagagaaaatcacatgcagctcatctaagagaaatgagttcaaaagctgccgctcagctttgatggaacaacgcttattttggaagttcgaaggggctgtcgtgtgtgtggccctgatcttcgcttgtcttgtcatcattcgtcagcgacaattggacagaaaggctctggaaaaggtccggaagcaaatcgagtccata

SEQ ID NO: 167145 - DNA, 441 bp, Artificial Sequence
  derived and/or modified sequence
atgctggccggggccggccggcccggcctgccccagggccgccacctgtgctggctgctgtgtgccttcaccctgaagctgtgccaggccgaggcccctgtgcaggaggagaagctgagcgccagcaccagcaacctgccctgctggctggtggaggagtttgtggtggccgaggagtgcagcccctgcagcaacttccgggccaagaccaccccagaatgtggccccaccggctacgtggagaagatcacctgcagcagcagcaagagaaatgagttcaagagctgccgcagcgccctgatggagcagaggctcttctggaagtttgaaggagctgtggtgtgtgtggccctgatctttgcctgcctggtgatcatccggcagaggcagctggacaggaaggccctggagaaggtgaggaagcagatcgagagcatctag

SEQ ID NO: 167146 - DNA, 354 bp, Artificial Sequence
  derived and/or modified sequence
atggcctggggctggcacctgtccttcctgagcgccagcaccagcaacctgccctgctggctggtggaggagtttgtggtggccgaggagtgcagcccctgcagcaacttccgggccaagaccaccccagaatgtggccccaccggctacgtggagaagatcacctgcagcagcagcaagagaaatgagttcaagagctgccgcagcgccctgatggagcagaggctcttctggaagtttgagggcgctgtggtgtgtgtggccctgatctttgcctgcctggtgatcatccggcagaggcagctggacaggaaggccctggagaaggtgaggaagcagatcgagagcatctag

SEQ ID NO: 167147 - DNA, 441 bp, Artificial Sequence
  derived and/or modified sequence
atgctggccggcgccggccggcccggcctgccccagggccggcacctctgttggttgctctgcgcttttaccctaaagctgtgccaagcagaggctcccgttcaggaagagaagttgagcgcttcaaccagtaaccttccctgctggctggtcgaagaatttgtggtcgcagaagagtgtagcccctgttcaaattttcgagctaagaccacgcctgaatgtggacccactggctatgtggagaagattacttgctcctctagcaaaagaaatgagtttaaaagttgccgtagcgcgctcatggagcagcgactgttttggaaattcgagggggccgtggtgtgcgtggctcttatctttgcctgtttagtgattattcgtcagcgtcagctggataggaaggctctagagaaagtcaggaagcagattgagagtatttag

SEQ ID NO: 167148 - DNA, 354 bp, Artificial Sequence
  derived and/or modified sequence
atggcctggggctggcacctgagcttcctgagcgccagcaccagcaacctaccttgctggctggtcgaggaatttgtggtggcagaggagtgctcaccttgctctaacttcagggccaagactacccccgagtgtgggcccaccggatacgtggaaaagattacctgttcaagctccaagcggaacgagtttaagtcctgccgcagtgcgcttatggagcagcggctcttttggaagttcgagggtgcggttgtgtgtgtggccctgattttcgcttgcctcgtcattattagacaacgccagctcgatcgcaaggcactggaaaaagttaggaaacagattgagagtatctag

SEQ ID NO: 167149 - DNA, 354 bp, Artificial Sequence
  derived and/or modified sequence
atggcctggggctggcacctgagcttcctgagcgccagcaccagcaatctcccatgttggctggtggaagagtttgtcgttgctgaggagtgcagtccttgctcgaactttcgcgccaagacaacccccgagtgcggccctaccggttatgttgagaaaataacctgcagctccagcaaacgcaacgagttcaaatcgtgccggtcagccctgatggagcaacggctcttttggaaatttgagggggctgtcgtctgcgtggcactcatatttgcttgcctcgtcatcatcagacagaggcagcttgatcgcaaagccctcgagaaggtgcgtaaacaaatcgagtcgatctag

SEQ ID NO: 167150 - DNA, 354 bp, Artificial Sequence
  derived and/or modified sequence
atggcctggggctggcacctgagcttcctgagcgccagcaccagcaatctgccctgctggctggtggaagagttcgttgtcgctgaggagtgttctccctgtagcaacttccgggccaagaccacgccagagtgtgggcccactggatatgtcgaaaaaatcacttgcagctcaagcaaaagaaatgagtttaaaagctgtcgcagcgccctgatggaacagcggctgttctggaaattcgagggggcggtggtctgcgtcgctcttatattcgcgtgcttagtcattattaggcagaggcagctcgacaggaaggcactcgagaaagtgaggaagcagattgagtccatttag

SEQ ID NO: 167151 - DNA, 441 bp, Artificial Sequence
  derived and/or modified sequence
atgctcgcaggagctggcagacccggactgccacaaggcaggcatctgtgttggctcctatgcgcgttcacactcaagctatgccaggccgaggctcccgtgcaggaggaaaaattaagtgcatcgacgtcgaacctaccctgctggttggttgaggaatttgtcgtggccgaggagtgcagcccgtgtagcaacttcagggccaagacgacgccagagtgtggaccaaccgggtatgtggaaaagattacttgttcttccagcaagagaaatgagtttaagtcttgccgaagtgcactgatggaacagcggctgttctggaaatttgagggggctgtggtttgtgtcgctttgatatttgcttgcctggtgattattcggcaacgccagctggacagaaaggctctcgaaaaagtgcggaaacagatcgagagtatctag

SEQ ID NO: 167152 - DNA, 354 bp, Artificial Sequence
  derived and/or modified sequence
atggcatgggggtggcaccttagttttctctccgcatctacgagcaacctgccctgctggcttgtcgaagaattcgttgtggccgaggagtgttcaccttgttccaacttcagggctaagacaactccggagtgcgggcctactggatatgtcgaaaagataacctgttcttcctctaagagaaacgaattcaaatcttgccggtctgccctgatggagcaacggctattctggaagtttgaaggcgcagtggtatgtgtggctcttatcttcgcttgtctggttatcatcagacagcgccagctggacagaaaggctctggaaaaagtgcgcaaacagatcgagtccatttag

SEQ ID NO: 167153 - DNA, 354 bp, Artificial Sequence
  derived and/or modified sequence
atggcgtggggttggcatctgagtttcctcagcgctagcacaagcaacttgccctgttggctagtcgaggagtttgtggttgcggaggaatgtagtccatgcagtaactttagggccaagacaacaccggagtgtggacccaccggatacgtggaaaagataacctgttcatcatccaagcgaaacgagtttaagagttgcaggtccgccctgatggagcagcggcttttctggaagtttgaaggcgctgtggtatgtgtcgcactcatctttgcttgcttggtgattattcgccagaggcagcttgatcggaaagctctcgagaaggttaggaagcagattgagagcatatag

SEQ ID NO: 167154 - DNA, 354 bp, Artificial Sequence
  derived and/or modified sequence
atggcctggggatggcacctgagttttctgagcgccagcactagcaacctgccatgttggttagtagaagagttcgttgtggccgaagagtgttcaccctgttcaaacttccgcgctaaaacgactcccgaatgtgggccaactgggtacgtcgaaaaaataacatgtagctcctcaaagcggaacgagtttaagtcatgcagatctgcacttatggaacaacggctgttctggaagttcgaaggggctgtagtgtgtgtagccctcatttttgcatgccttgtgatcatccgccaaaggcagctggaccgaaaagctttggaaaaggtccggaagcagatcgagagcatttag

SEQ ID NO: 167155 - DNA, 441 bp, Artificial Sequence
  derived and/or modified sequence
atgctggccggcgccggcagacccggcctgccccagggcagacacctgtgctggctgctgtgcgccttcaccctgaagctgtgccaggccgaggcccccgtgcaggaggagaagctgagcgccagcaccagcaacctgccctgctggctggtggaggagttcgtggtggccgaggagtgcagcccctgcagcaacttcagagccaagaccacccccgagtgcggccccaccggctacgtggagaagatcacctgcagcagcagcaagagaaacgagttcaagagctgcagaagcgccctgatggagcagagactgttctggaagttcgagggcgccgtggtgtgcgtggccctgatcttcgcctgcctggtgatcatcagacagagacagctggacagaaaggccctggagaaggtgagaaagcagatcgagagcatctag

SEQ ID NO: 167156 - DNA, 354 bp, Artificial Sequence
  derived and/or modified sequence
atggcctggggctggcacctgagcttcctgagcgccagcaccagcaacctgccctgctggctggtggaggagttcgtggtggccgaggagtgcagcccctgcagcaacttcagagccaagaccacccccgagtgcggccccaccggctacgtggagaagatcacctgcagcagcagcaagagaaacgagttcaagagctgcagaagcgccctgatggagcagagactgttctggaagttcgagggcgccgtggtgtgcgtggccctgatcttcgcctgcctggtgatcatcagacagagacagctggacagaaaggccctggagaaggtgagaaagcagatcgagagcatctag

SEQ ID NO: 167157 - protein, 951 aa, Artificial Sequence
  derived and/or modified sequence
MATGTGKHKLLSTGPTEPWSIREKLCLASSVMRSGDQNWVSVSRAIKPFAEPGRPPDWFSQKHCASQYSELLETTETPKRKRGEKGEVVETVEDVIVRKLTAERVEELKKVIKETQERYRRLKRDAELIQAGHMDSRLDELCNDIATKKKLEEEEAEVKRKATDAAYQARQAVKTPPRRLPTVMVRSPIDSASPGGDYPLGDLTPTTMEEATSGVTPGTLPSTPVTSFPGIPDTLPPGSAPLEAPMTPVTDDSPQKKMLGQKATPPPSPLLSELLKKGSLLPTSPRLVNESEMAVASGHLNSTGVLLEVGGVLPMIHGGEIQQTPNTVAASPAASGAPTLSRLLEAGPTQFTTPLASFTTVASEPPVKLVPPPVESVSQATIVMMPALPAPSSAPAVSTTESVAPVSQPDNCVPMEAVGDPHTVTVSMDSSEISMIINSIKEECFRSGVAEAPVGSKAPSIDGKEELDLAEKMDIAVSYTGEELDFETVGDIIAIIEDKVDDHPEVLDVAAVEAALSFCEENDDPQSLPGPWEHPIQQERDKPVPLPAPEMTVKQERLDFEETENKGIHELVDIREPSAEIKVEPAEPEPVISGAEIVAGVVPATSMEPPELRSQDLDEELGSTAAGEIVEADVAIGKGDETPLTNVKTEASPESMLSPSHGSNPIEDPLEAETQHKFEMSDSLKEESGTIFGSQIKDAPGEDEEEDGVSEAASLEEPKEEDQGEGYLSEMDNEPPVSESDDGFSIHNATLQSHTLADSIPSSPASSQFSVCSEDQEAIQAQKIWKKAIMLVWRAAANHRYANVFLQPVTDDIAPGYHSIVQRPMDLSTIKKNIENGLIRSTAEFQRDIMLMFQNAVMYNSSDHDVYHMAVEMQRDVLEQIQQFLATQLIMQTSESGISAKSLRGRDSTRKQDASEKDSVPMGSPAFLLSLFDGGTRGRRCAIEADMKMKK

SEQ ID NO: 167158 - DNA, 3198 bp, Artificial Sequence
  derived and/or modified sequence
agacttcggggccaagatggcgacgggaacgggcaaacacaagctgctaagcactggccccacagagccatggtccatccgagagaagctatgtttagcatcttctgtcatgagaagtggcgatcaaaattgggtatcagttagcagagcaatcaagccctttgcagaacctggccgccctccagactggttctctcaaaaacattgtgcttcccagtactcggagcttttagagaccactgagacaccaaaacggaaacgaggtgaaaagggagaagtggtggaaactgttgaagatgttattgttcggaaattgactgctgagcgagttgaagaactaaagaaagtgataaaggaaacccaggagagatatagacggctaaagagagatgcagaactaattcaagctggacacatggacagcagactggatgagctttgcaatgacattgcaacgaaaaagaaattggaagaagaggaggctgaagtaaagaggaaggctacagatgctgcataccaggctcgtcaagcagtaaaaacacccccccggaggttacccactgtgatggttcgctctcctatagattctgcctccccaggaggtgattatccacttggggacttgactccaaccactatggaagaggctacctctggggtaacccccgggactttgccgagtaccccagtcacctcgtttcctgggattcctgacacccttcctccaggctctgcacccttagaagcccccatgaccccagtaacagatgattcaccccagaaaaagatgcttggacagaaagcaactccacccccctcccctctgctgtcagagctcttgaagaagggcagcctcctgcctactagccccagactggtcaatgagagtgaaatggctgtggcttctggccacctgaacagtacaggtgtcctcctggaggtaggcggggtccttcccatgatacatggtggggagatacagcaaacacccaatactgttgcagcctcccctgctgcatcaggtgctcccactctttcccggcttttagaagctggtcctacacagttcaccacacctcttgcttccttcactactgttgccagtgagcctccagttaaacttgtgccaccccctgtagagtctgtgtcccaagctaccattgtcatgatgcctgcgctgccagcaccatcctctgctccggctgtctccactactgaaagtgtagctccagtgagtcaacccgacaactgtgttcccatggaggctgtgggggatccacatactgtgactgtttccatggacagcagtgaaatatccatgatcatcaattctatcaaagaagagtgttttcgatcaggggtagcagaggctcctgttggatcaaaggctcccagcatagatgggaaggaagaattagatctggctgagaagatggatattgctgtgtcttacacaggtgaagagctggattttgagactgttggagacatcattgccatcattgaggacaaggtagatgatcatcctgaagtgctggatgtggcagcagtggaagcagcactgtcattttgtgaagaaaatgatgatcctcagtccctgcctggcccctgggagcatcctatccagcaggagcgggacaagccagtacctctccctgcaccagaaatgacggtcaagcaagagagactggactttgaggaaacggaaaacaagggaatacatgaactggtggacatcagggagcccagtgcagagatcaaggtggaacctgcagaaccagagccagtcatttcaggagccgaaatagtagctggagttgttccagccacaagtatggagccaccagaactcaggagtcaggacttagatgaggaactgggaagtactgcagctggagagattgttgaagcagatgttgccattgggaaaggcgatgagactccacttacaaatgtgaagacagaggcatcccctgaaagcatgttgtctccatcacatggctcaaatcccattgaagatcctttagaggcagagactcagcacaagtttgaaatgtcagactcattgaaagaagaatcagggactatttttggaagccagataaaggatgccccaggtgaggatgaggaggaagatggtgtcagtgaagcggccagcctagaggagcctaaggaagaggatcaaggagaaggctacttgtcagaaatggataatgaacctcctgtgagcgagagtgatgatggcttcagcatacacaatgctacactgcagtcacacacactggcagactccatccccagcagccctgcttcttcacagttctctgtctgtagtgaggatcaggaagctattcaggcacagaaaatttggaagaaagccatcatgcttgtatggagagctgcagctaatcataggtatgccaatgtcttcctgcagcctgttacagatgacatagcacctggctaccacagcattgtgcagaggcctatggatttgtcaactattaagaaaaacatagaaaatggactgatccgaagcacagctgaatttcagcgtgacattatgctgatgtttcagaatgctgtaatgtacaatagctcagaccatgatgtctatcacatggcagtggagatgcagcgagatgtcttggaacagatccagcaattcttggccacgcagttgattatgcaaacatccgagtctgggatcagtgctaaaagtcttcgagggagagattctacccgcaaacaggatgcttcagagaaggacagtgtcccaatgggctctcctgccttccttctctctctctttgatggaggaaccaggggacgccgctgtgccattgaagcagatatgaagatgaaaaagtgaagcctcagagttaccctctttgagccgaacctaaaataaaagtaaacaagatagagcttgggcttgcgggcccagttccagaggtggaagttacagaagaggaggtacctgggccacacgacatgagctggaaaatctctcttagagagttggagtagcacaattgcctgttttagggcagaaaccatgggctatgttaatgtcctaatgtgtagctagcagatcgtagctagtttgtattgtcttgtcaattgtacagactttttaaaaaaaacaaccaccagtgaaatgtgtgtgtatacaataaactgaaaaaaaaaactagc

SEQ ID NO: 167159 - DNA, 2856 bp, Artificial Sequence
  derived and/or modified sequence
atggccaccggcaccggcaagcacaagctgctgagcaccggccccaccgagccctggagcatcagagagaagctgtgcctggccagcagcgtgatgagaagcggcgaccagaactgggtgagcgtgagcagagccatcaagcccttcgccgagcccggcagaccccccgactggttcagccagaagcactgcgccagccagtacagcgagctgctggagaccaccgagacccccaagagaaagagaggcgagaagggcgaggtggtggagaccgtggaggacgtgatcgtgagaaagctgaccgccgagagagtggaggagctgaagaaggtgatcaaggagacccaggagagatacagaagactgaagagagacgccgagctgatccaggccggccacatggacagcagactggacgagctgtgcaacgacatcgccaccaagaagaagctggaggaggaggaggccgaggtgaagagaaaggccaccgacgccgcctaccaggccagacaggccgtgaagaccccccccagaagactgcccaccgtgatggtgagaagccccatcgacagcgccagccccggcggcgactaccccctgggcgacctgacccccaccaccatggaggaggccaccagcggcgtgacccccggcaccctgcccagcacccccgtgaccagcttccccggcatccccgacaccctgccccccggcagcgcccccctggaggcccccatgacccccgtgaccgacgacagcccccagaagaagatgctgggccagaaggccacccccccccccagccccctgctgagcgagctgctgaagaagggcagcctgctgcccaccagccccagactggtgaacgagagcgagatggccgtggccagcggccacctgaacagcaccggcgtgctgctggaggtgggcggcgtgctgcccatgatccacggcggcgagatccagcagacccccaacaccgtggccgccagccccgccgccagcggcgcccccaccctgagcagactgctggaggccggccccacccagttcaccacccccctggccagcttcaccaccgtggccagcgagccccccgtgaagctggtgcccccccccgtggagagcgtgagccaggccaccatcgtgatgatgcccgccctgcccgcccccagcagcgcccccgccgtgagcaccaccgagagcgtggcccccgtgagccagcccgacaactgcgtgcccatggaggccgtgggcgacccccacaccgtgaccgtgagcatggacagcagcgagatcagcatgatcatcaacagcatcaaggaggagtgcttcagaagcggcgtggccgaggcccccgtgggcagcaaggcccccagcatcgacggcaaggaggagctggacctggccgagaagatggacatcgccgtgagctacaccggcgaggagctggacttcgagaccgtgggcgacatcatcgccatcatcgaggacaaggtggacgaccaccccgaggtgctggacgtggccgccgtggaggccgccctgagcttctgcgaggagaacgacgacccccagagcctgcccggcccctgggagcaccccatccagcaggagagagacaagcccgtgcccctgcccgcccccgagatgaccgtgaagcaggagagactggacttcgaggagaccgagaacaagggcatccacgagctggtggacatcagagagcccagcgccgagatcaaggtggagcccgccgagcccgagcccgtgatcagcggcgccgagatcgtggccggcgtggtgcccgccaccagcatggagccccccgagctgagaagccaggacctggacgaggagctgggcagcaccgccgccggcgagatcgtggaggccgacgtggccatcggcaagggcgacgagacccccctgaccaacgtgaagaccgaggccagccccgagagcatgctgagccccagccacggcagcaaccccatcgaggaccccctggaggccgagacccagcacaagttcgagatgagcgacagcctgaaggaggagagcggcaccatcttcggcagccagatcaaggacgcccccggcgaggacgaggaggaggacggcgtgagcgaggccgccagcctggaggagcccaaggaggaggaccagggcgagggctacctgagcgagatggacaacgagccccccgtgagcgagagcgacgacggcttcagcatccacaacgccaccctgcagagccacaccctggccgacagcatccccagcagccccgccagcagccagttcagcgtgtgcagcgaggaccaggaggccatccaggcccagaagatctggaagaaggccatcatgctggtgtggagagccgccgccaaccacagatacgccaacgtgttcctgcagcccgtgaccgacgacatcgcccccggctaccacagcatcgtgcagagacccatggacctgagcaccatcaagaagaacatcgagaacggcctgatcagaagcaccgccgagttccagagagacatcatgctgatgttccagaacgccgtgatgtacaacagcagcgaccacgacgtgtaccacatggccgtggagatgcagagagacgtgctggagcagatccagcagttcctggccacccagctgatcatgcagaccagcgagagcggcatcagcgccaagagcctgagaggcagagacagcaccagaaagcaggacgccagcgagaaggacagcgtgcccatgggcagccccgccttcctgctgagcctgttcgacggcggcaccagaggcagaagatgcgccatcgaggccgacatgaagatgaagaagtag

SEQ ID NO: 167160 - DNA, 2856 bp, Artificial Sequence
  derived and/or modified sequence
atggccaccggaacaggaaaacataaactcctcagcactggcccgaccgagccttggagcattagggagaaactgtgtctcgcctcctccgtgatgcgtagtggcgaccagaactgggtgtccgtttctcgggccataaagccctttgcggagccggggcggccacccgattggttcagtcagaaacactgcgcttctcagtactccgaactgctggaaacgaccgagactcccaaacggaaaaggggagaaaaaggcgaagtggtggagaccgtagaagacgttatcgtgaggaaactgactgccgagcgggttgaggagctgaaaaaggttattaaagagacccaggagagatatcggagactgaagagagatgcggaactcatccaagctgggcatatggactcaaggcttgatgagctgtgtaacgacatagcgaccaagaaaaagctggaggaggaggaggccgaggtcaaacgcaaggcaaccgacgccgcctatcaggcaaggcaggccgtgaaaacccccccccgcagattgcccacagtaatggtacgctctcctattgactctgcgtctcccggaggcgattatcccctgggcgatttgacccccaccaccatggaagaggccacgtccggcgtcacaccaggcacccttccatccaccccagtgacctcctttcccgggattccagatacattgcctcccggttccgctcctctggaggcccccatgacccctgttacggacgattcccctcagaagaaaatgctcgggcaaaaagccacgccccccccaagtccactgctcagcgaattactcaagaagggcagccttctccccacatctccacggctggtcaacgaatccgagatggcagtcgcaagtggccatttaaatagcaccggggtcctcctggaagtgggaggcgtgctccccatgattcatggcggagagattcagcagactccaaacacagttgccgcgagtccagccgcctccggtgccccaactctgagccgcttgcttgaagcaggtccgactcagtttacgacacccctcgcctcattcactactgtggcctcggaacctcctgtgaagctcgtgcctccacctgttgaatctgttagccaggctactattgttatgatgcccgccctgccggctccaagctctgctcccgcggtgtcaaccaccgagagtgttgcccctgtctctcagcccgataactgtgtccccatggaggccgtaggggatccccacaccgttactgtgtccatggatagcagcgagatctctatgattatcaacagtattaaggaagagtgcttccggagcggagtggccgaagccccggtcgggtctaaggccccaagtatcgacggaaaggaggagctggatttggccgagaaaatggatattgcagtgtcgtacaccggagaagaactcgatttcgagactgtgggggatattatcgctatcatcgaggataaggtagatgaccatcccgaagtcctggacgtcgccgcagtggaagctgcactgtccttttgtgaagagaatgacgacccccagtcactgccggggccttgggaacatcctattcaacaagaaagggataagccggtgcctctccctgcacctgaaatgacagttaagcaggagagactcgattttgaggagaccgagaataaaggcatacatgaactcgttgacatccgggaaccttctgcagagattaaagtggaacctgccgagccagagcctgtgatctctggggcggagattgtggccggagtggtccctgcgacctccatggagccgccagagctcagaagccaagacttagacgaagagctcggctctactgctgctggagaaatcgtcgaggcggacgtggcgatcggcaagggggatgagactcccctgaccaacgtgaaaacagaagcgtcacctgagtctatgcttagccctagccacggttccaatccgatcgaggatcccctcgaggccgaaacacagcacaagttcgagatgtcggattctctaaaagaggagtctggaaccatctttggctcgcagatcaaggatgctcccggcgaggacgaagaggaggatggagttagcgaagccgcgagcttggaagagcctaaggaggaagatcagggggaggggtacctttcagagatggataatgagccgccagtctcagagtctgatgacggcttttcaatacacaacgccaccttgcagtcacacactctcgctgattccattcctagttcaccagccagtagccagttcagtgtgtgctcggaggaccaagaggctatacaggctcagaagatttggaagaaagcaatcatgctcgtctggagggctgcagccaatcatcgatatgcaaatgtgttcctgcagccggttactgacgatattgctcccggctatcattccatcgtgcagcgccctatggatttgtcgactattaagaaaaatatagaaaatggcctgattaggagcactgccgaattccaaagggatattatgctgatgtttcagaacgcagtgatgtataacagcagcgaccatgacgtgtaccacatggcagtcgaaatgcagagagatgtactggaacagatccagcagttcctggctacccagctgatcatgcagacctcagaatcggggatttccgctaagtccttgcgggggcgcgatagtacacgaaagcaagatgcgagcgagaaagactcggtccctatggggtctcctgcttttctgctttcgctgttcgatggagggactaggggcagacgttgcgcaatcgaggctgacatgaagatgaaaaagtag

SEQ ID NO: 167161 - DNA, 2856 bp, Artificial Sequence
  derived and/or modified sequence
atggccactggaacaggcaagcacaagctgctgagcacaggccccacagagccctggagcatccgggagaagctgtgcctggccagctctgtgatgaggtctggggaccagaactgggtgtctgtgtcccgggccatcaagccctttgctgagcccggccggcccccagactggttcagccagaagcactgtgccagccagtacagcgagctgctggagaccacagagacccccaagaggaagagaggagagaagggggaggtggtggagaccgtggaggatgtgattgtgaggaagctgacagctgagcgggtggaggagctgaagaaggtgatcaaggagacccaggagcgctaccgccgcctgaagagagatgctgagctgatccaggccggccacatggacagccggctggatgagctgtgcaatgacatcgccaccaagaagaagctggaggaggaggaggccgaggtgaagaggaaggccacagatgctgcctaccaggcccggcaggccgtgaagaccccaccccggcggctgcccaccgtgatggtgcgcagccccattgattctgccagccctggaggagactaccccctgggggacctgacccccaccaccatggaggaggccaccagcggcgtgaccccaggcaccctgcccagcacccctgtgaccagcttccctggcatcccagacaccctgcccccaggcagcgcccccctggaggcccccatgacccctgtgacagatgacagcccccagaagaagatgctgggccagaaggccaccccaccacccagccccctgctgtctgagctgctgaagaagggcagcctgctgcccaccagcccccggctggtgaatgaaagtgagatggctgtggccagcggccacctgaacagcactggagtgctgctggaggtgggcggcgtgctgcccatgattcatggaggagagatccagcagacccccaacacagtggccgccagccctgctgccagcggggcccccaccctgagccggctgctggaggccggccccacccagttcaccacccccctggccagcttcaccaccgtggccagcgagccccctgtgaagctggtgcccccacctgtggagagcgtgtcccaggccaccatcgtgatgatgcctgccctgcctgcccccagcagcgccccagctgtgtccaccacagagagcgtggcccctgtgtcccagcctgacaactgtgtgcccatggaggccgtgggggacccccacacagtgacagtgtccatggacagcagcgagatctccatgatcatcaacagcatcaaggaggagtgcttccgctctggagtggccgaggcccctgtgggcagcaaggcccccagcattgatggcaaggaggagctggacctggccgagaagatggacattgctgtgtcctacaccggggaggagctggactttgagaccgtgggggacatcatcgccatcatcgaggacaaggtggatgaccaccctgaggtgctggatgtggccgctgtggaggccgccctgtccttctgtgaagaaaatgatgacccccagagcctgcccggcccctgggagcaccccatccagcaggagcgggacaagcctgtgcccctgcctgcccctgagatgacagtgaagcaggagcggctggactttgaggagacagagaacaagggcatccacgagctggtggacatccgggagcccagcgctgagatcaaggtggagcctgctgagcctgagcccgtcatctctggagctgagatcgtggccggcgtggtgcctgccacctccatggagcccccagagctgcggagccaggacctggatgaggagctgggcagcacagctgctggggagatcgtggaggctgatgtggccatcggcaaaggagatgagacccccctgaccaacgtgaagacagaggccagccctgagagcatgctgagccccagccacggcagcaaccccatcgaggaccccctggaggccgagacccagcacaagtttgagatgtctgacagcctgaaggaggagagcggcaccatcttcggcagccagatcaaggatgcccctggagaagatgaggaggaggatggagtgtctgaggccgccagcctggaggagcccaaggaggaggaccagggcgagggctacctgtctgagatggacaatgaacctcctgtgtctgagagtgatgatggcttcagcatccacaatgccaccctgcagagccacaccctggccgacagcatccccagcagccctgccagcagccagttctctgtgtgcagcgaggaccaggaggccatccaggcccagaagatctggaagaaggccatcatgctggtgtggagggctgctgccaaccacagatatgccaacgtgttcctgcagcctgtgacagatgacatcgcccctggctaccacagcatcgtgcagaggcccatggacctgagcaccatcaagaagaacattgaaaatggcctcatccgcagcacagctgagttccagagggacatcatgctgatgttccagaatgctgtgatgtacaacagcagtgaccatgatgtgtaccacatggctgtggagatgcagagagatgtgctggagcagatccagcagttcctggccacccagctgatcatgcagaccagcgagagcggcatcagcgccaagagcctgcggggccgggacagcaccaggaagcaggatgccagcgagaaggacagcgtgcccatgggcagccctgccttcctgctgagcctgtttgatggcggcacccggggcagaagatgtgccattgaagctgacatgaagatgaagaagtag

SEQ ID NO: 167162 - DNA, 2856 bp, Artificial Sequence
  derived and/or modified sequence
atggccaccggcaccggcaagcacaagctgctgagcaccggccccactgagccctggtccattcgcgaaaagctctgtttggcctctagcgtcatgcgaagtggggaccaaaactgggttagcgtatctcgggccatcaaaccttttgccgagccagggcggccccctgactggttttcccagaaacactgtgcaagccagtactctgagttgctggagacaactgaaacacccaaacgaaaacgaggggaaaagggcgaggtggtggagactgtcgaggacgtgattgtgcgcaaattgacggcggaacgggtcgaggaattgaagaaagtgatcaaggaaacacaggaacgctaccggagactcaagcgcgacgcagagttgatacaggccggacacatggatagccggctcgacgagctatgtaacgacatcgctaccaaaaaaaaactggaggaggaagaggccgaggtaaagaggaaagctaccgacgccgcatatcaggctagacaggcagtgaaaactccaccaagacgccttccaacggtgatggtgcggtccccgatcgatagcgcgagtcctggaggtgattaccctctgggagacctgacccccacaacaatggaggaggccacatctggagtgacaccaggaaccctgccttccactcctgttacgtcttttcccggaatcccagatactctgccccccggctccgctccactggaagccccaatgacccctgtaaccgacgattcgccccagaaaaagatgctcggacagaaagctacgccacctccgagccctcttttgtctgagctgcttaagaaagggtcacttctgccgacaagccccagactcgtgaatgagtccgagatggccgtggcctccggccacctaaattcaactggggtgctcttagaggtgggcggagtcctgccaatgatacacggcggagagattcaacaaacccccaacactgtggccgctagtcctgctgccagcggggcccctacactgtctagattgctggaggctggtccgacccagttcaccacccctttagcttcattcacgaccgtcgcaagtgagccaccggtaaagctggttcctcctccagtggaatcagtgtctcaagccaccatcgtgatgatgcctgccctgccagctccctcctcagctccggcagtctccacaaccgagtctgtggccccagtcagccagcccgacaactgcgtcccgatggaggctgtgggtgacccacatacagtgacagtctcaatggattcttctgagatctcgatgatcattaactctattaaggaagaatgtttccggtctggagttgcggaagcccctgtggggagcaaagccccttcaatagatggcaaagaggagctggatctcgctgagaaaatggacattgccgtttcatacactggcgaggagttagatttcgagacagtgggcgacattatagccataatagaagataaggtggacgatcaccctgaggtgcttgatgtggccgctgtggaagccgccttgtccttctgcgaggagaatgatgacccacagtctctccccgggccatgggagcaccccattcagcaggagcgggacaaaccggtcccactgcctgcacccgaaatgacggtaaaacaggaacgcctcgattttgaggaaacggagaacaagggcatccacgagcttgtagacattagggagccatctgccgaaattaaggtggaaccagctgagcctgagcctgtgatcagtggggccgaaattgtggcaggggtggtccctgcgactagtatggagccccccgagctgcggagccaggacttggacgaagagttaggctcaaccgcggccggagagattgtggaggcggacgtagcgatcggtaaaggcgatgaaaccccactgaccaatgtgaagacagaagcgtcccctgaatctatgttgagcccaagccacggctccaatcctattgaggatcctcttgaagccgagactcagcataaattcgagatgtctgatagcttaaaggaggagagtggaacaatcttcggcagccagatcaaagacgccccaggcgaagatgaggaggaagacggtgtgagtgaggccgcaagcctagaggagccaaaggaggaggatcagggagagggctatttatcagaaatggataatgagccccctgttagtgaaagtgacgatggcttcagcatccataacgccacactccagagtcacacactggcagatagcatcccatcttctcctgccagcagccagttcagcgtgtgctctgaagatcaggaagctatccaggcccaaaaaatttggaagaaggccattatgctggtctggcgtgctgctgccaatcaccgatacgcgaatgtctttcttcagcctgtaaccgacgacattgccccaggctatcactcgattgtgcagaggcctatggatcttagcactatcaagaaaaacatagaaaacggcctgataaggtcaaccgcagaattccagcgagacatcatgctcatgtttcagaacgccgttatgtacaacagtagcgatcacgacgtctaccatatggctgtggagatgcaacgcgatgtgttagagcaaatccaacaatttctcgccacccagcttatcatgcagacttctgagtctggcattagcgcaaaatccctccgtggtcgcgactccacaagaaagcaggatgcttctgaaaaagactcagttccaatgggctctcccgccttcttactgtctctgttcgacggcggtacgcggggccgccgctgtgctattgaggctgatatgaagatgaagaagtag

SEQ ID NO: 167163 - DNA, 2856 bp, Artificial Sequence
  derived and/or modified sequence
atggctaccggtaccggcaagcacaaactcctctctacgggccctaccgagccttggtctatcagagagaagttgtgcctagcgagctcagtgatgagatccggcgaccagaattgggtgagcgtctcacgggcaatcaagccattcgcggagcctgggcgtcccccagactggtttagtcaaaaacactgcgcctcccagtatagtgagttgctggaaaccacggagacaccaaagagaaaacggggagagaagggcgaggtcgtcgaaaccgtagaagatgtgattgtacggaaactgaccgccgaacgcgtggaagaactcaaaaaggtgattaaggagactcaggaacgctacagacgcctcaaacgagatgcagagctgatacaggctggacacatggactcacgcttggatgaactgtgtaatgatatcgcaaccaagaagaaacttgaggaggaagaggccgaggtgaagcgcaaggccaccgacgcagcttaccaggcccgacaggccgtcaaaactccaccaagaagattgcctaccgttatggtgcgttcacccatcgattccgcttccccaggcggagattacccactcggggaccttacacccacaacgatggaagaagcaactagcggcgtaactccaggcaccctgcccagcaccccagtcacttccttccccggtattccagacactttgccaccgggtagcgctcctctggaggcccctatgacaccagtaaccgacgattccccgcaaaaaaagatgttgggccagaaagcgactccaccaccatcaccccttttgtctgagctgcttaagaagggctccttgcttcccacaagtcccaggttagtgaacgagagtgaaatggccgttgcttcagggcacctgaattccactggggttctgttagaggtaggcggtgttttacctatgatccacggcggagaaatccagcagacgccaaacactgtggctgcctccccagccgcatcaggcgctcctaccctgtcacggctcctggaggcgggacctacgcagtttacaacccccttagcctcttttacgacagtggcctccgaaccccctgttaaactggtgcccccaccagtcgaatccgttagtcaagcaacaatcgtgatgatgcccgcactgcctgccccttcatccgctcccgctgtgtctactaccgaaagtgtggcccctgttagccagcctgataactgtgtgcccatggaagccgttggggatccgcatacagtgacggtgagtatggactcctctgaaatttccatgatcattaatagcatcaaagaggagtgctttcgcagcggcgttgccgaggctccagtagggagcaaggcgccatcaatcgacgggaaggaagagctcgacctcgccgagaagatggacatcgctgtgtcatacacgggagaggaactggacttcgagaccgtgggggacatcattgctattatagaagacaaagtggatgatcaccccgaagtccttgatgtcgcagctgtggaggctgctttgagcttttgcgaggagaatgacgatccacaaagcttgcccggaccatgggaacacccaattcagcaggagcgcgataagcctgtgccgttaccggctccagagatgacagtgaagcaggagcgcttggatttcgaagaaactgagaataagggcatacacgagttggtggatatcagagagccgagcgctgagattaaggtcgagcctgcagagcccgaacccgtgatcagtggcgctgaaattgtcgcgggagtcgttccagctacgtccatggaaccaccagagctgcggtctcaggacctggatgaagaactgggcagtaccgcagctggcgagatcgtggaggcagatgttgcaattggaaagggggatgagactcctctgaccaatgtgaagacagaggccagcccagagagtatgcttagccctagtcacgggtcaaacccaatagaggacccgctggaagctgaaactcagcacaagtttgaaatgagtgactcccttaaggaagagtctggaaccatattcggcagccagatcaaggacgcaccaggcgaagacgaggaagaagatggcgtgtccgaggccgcttccctcgaagagccaaaagaagaagaccaaggggagggctatctttcggagatggataatgagccgcctgtgtccgagagcgacgacggcttctcaatccacaatgcaacccttcagagccatacactggcagacagtatccccagttcccccgcaagctcacaattctctgtctgcagcgaagaccaagaagctatacaggcccagaagatctggaaaaaagccataatgctcgtgtggcgggctgccgcaaaccaccggtatgctaacgtatttctgcagcctgtgacagacgatatagcccctggataccatagtattgttcagagaccgatggacctgagcaccattaaaaagaatattgagaatggtctgatacggtctacagcagaatttcagcgagacatcatgctgatgtttcagaacgcggtgatgtacaacagcagcgaccacgacgtgtatcatatggcggtcgagatgcagagagacgtgctggagcaaattcaacagtttctcgccacacagcttattatgcagactagtgaatccggaatctcagctaagtcactgagaggtcgggactccacacggaaacaagacgcttcagaaaaggattcagtacctatgggcagtcccgctttcctgctcagccttttcgatggaggaacaaggggcagaagatgtgccatcgaagctgatatgaaaatgaaaaagtag

SEQ ID NO: 167164 - protein, 582 aa, Artificial Sequence
  derived and/or modified sequence
MAEFLDDQETRLCDNCKKEIPVFNFTIHEIHCQRNIGMCPTCKEPFPKSDMETHMAAEHCQVTCKCNKKLEKRLLKKHEETECPLRLAVCQHCDLELSILKLKEHEDYCGARTELCGNCGRNVLVKDLKTHPEVCGREGEEKRNEVAIPPNAYDESWGQDGIWIASQLLRQIEALDPPMRLPRRPLRAFESDVFHNRTTNQRNITAQVSIQNNLFEEQERQERNRGQQPPKEGGEESANLDFMLALSLQNEGQASSVAEQDFWRAVCEADQSHGGPRSLSDIKGAADEIMLPCEFCEELYPEELLIDHQTSCNPSRALPSLNTGSSSPRGVEEPDVIFQNFLQQAASNQLDSLMGLSNSHPVEESIIIPCEFCGVQLEEEVLFHHQDQCDQRPATATNHVTEGIPRLDSQPQETSPELPRRRVRHQGDLSSGYLDDTKQETANGPTSCLPPSRPINNMTATYNQLSRSTSGPRPGCQPSSPCVPKLSNSDSQDIQGRNRDSQNGAIAPGHVSVIRPPQNLYPENIVPSFSPGPSGRYGASGRSEGGRNSRVTPAAANYRSRTAKAKPSKQQGAGDAEEEEEE

SEQ ID NO: 167165 - protein, 135 aa, Artificial Sequence
  derived and/or modified sequence
MAEFLDDQETRLCDNCKKEIPVFNFTIHEIHCQRNIGMCPTCKEPFPKSDMETHMAAEHCQVTCKCNKKLEKRLLKKHEETECPLRLAVCQHCDLELSILKLKEHEDYCGARTELCGNCGRNVLVKDLKTHPEVC

SEQ ID NO: 167166 - protein, 164 aa, Artificial Sequence
  derived and/or modified sequence
MAEFLDDQETRLCDNCKKEIPVFNFTIHEIHCQRNIGMCPTCKEPFPKSDMETHMAAEHCQVTCKCNKKLEKRLLKKHEETECPLRLAVCQHCDLELSILKLKEHEDYCGARTELCGNCGRNVLVKDLKTHPELKNKRGRKGIEANSPPKRVVKRVQTWTSCWP

SEQ ID NO: 167167 - protein, 283 aa, Artificial Sequence
  derived and/or modified sequence
MAEFLDDQETRLCDNCKKEIPVFNFTIHEIHCQRNIGMCPTCKEPFPKSDMETHMAAEHCQVTCKCNKKLEKRLLKKHEETECPLRLAVCQHCDLELSILKLKEHEDYCGARTELCGNCGRNVLVKDLKTHPEVCGREGEEKRNEVAIPPNAYDESWGQDGIWIASQLLRQIEALDPPMRLPRRPLRAFESDVFHNRTTNQRNITAQVSIQNNLFEEQERQERNRGQQPPKEGGEESANLDFMLALSLQNEGQASSVAEQDFWRAVCEADQSHGGPRSLSDIK

SEQ ID NO: 167168 - DNA, 1749 bp, Artificial Sequence
  derived and/or modified sequence
atggccgagttcctggacgaccaggagaccagactgtgcgacaactgcaagaaggagatccccgtgttcaacttcaccatccacgagatccactgccagagaaacatcggcatgtgccccacctgcaaggagcccttccccaagagcgacatggagacccacatggccgccgagcactgccaggtgacctgcaagtgcaacaagaagctggagaagagactgctgaagaagcacgaggagaccgagtgccccctgagactggccgtgtgccagcactgcgacctggagctgagcatcctgaagctgaaggagcacgaggactactgcggcgccagaaccgagctgtgcggcaactgcggcagaaacgtgctggtgaaggacctgaagacccaccccgaggtgtgcggcagagagggcgaggagaagagaaacgaggtggccatcccccccaacgcctacgacgagagctggggccaggacggcatctggatcgccagccagctgctgagacagatcgaggccctggacccccccatgagactgcccagaagacccctgagagccttcgagagcgacgtgttccacaacagaaccaccaaccagagaaacatcaccgcccaggtgagcatccagaacaacctgttcgaggagcaggagagacaggagagaaacagaggccagcagccccccaaggagggcggcgaggagagcgccaacctggacttcatgctggccctgagcctgcagaacgagggccaggccagcagcgtggccgagcaggacttctggagagccgtgtgcgaggccgaccagagccacggcggccccagaagcctgagcgacatcaagggcgccgccgacgagatcatgctgccctgcgagttctgcgaggagctgtaccccgaggagctgctgatcgaccaccagaccagctgcaaccccagcagagccctgcccagcctgaacaccggcagcagcagccccagaggcgtggaggagcccgacgtgatcttccagaacttcctgcagcaggccgccagcaaccagctggacagcctgatgggcctgagcaacagccaccccgtggaggagagcatcatcatcccctgcgagttctgcggcgtgcagctggaggaggaggtgctgttccaccaccaggaccagtgcgaccagagacccgccaccgccaccaaccacgtgaccgagggcatccccagactggacagccagccccaggagaccagccccgagctgcccagaagaagagtgagacaccagggcgacctgagcagcggctacctggacgacaccaagcaggagaccgccaacggccccaccagctgcctgccccccagcagacccatcaacaacatgaccgccacctacaaccagctgagcagaagcaccagcggccccagacccggctgccagcccagcagcccctgcgtgcccaagctgagcaacagcgacagccaggacatccagggcagaaacagagacagccagaacggcgccatcgcccccggccacgtgagcgtgatcagacccccccagaacctgtaccccgagaacatcgtgcccagcttcagccccggccccagcggcagatacggcgccagcggcagaagcgagggcggcagaaacagcagagtgacccccgccgccgccaactacagaagcagaaccgccaaggccaagcccagcaagcagcagggcgccggcgacgccgaggaggaggaggaggagtag

SEQ ID NO: 167169 - DNA, 408 bp, Artificial Sequence
  derived and/or modified sequence
atggccgagttcctggacgaccaggagaccagactgtgcgacaactgcaagaaggagatccccgtgttcaacttcaccatccacgagatccactgccagagaaacatcggcatgtgccccacctgcaaggagcccttccccaagagcgacatggagacccacatggccgccgagcactgccaggtgacctgcaagtgcaacaagaagctggagaagagactgctgaagaagcacgaggagaccgagtgccccctgagactggccgtgtgccagcactgcgacctggagctgagcatcctgaagctgaaggagcacgaggactactgcggcgccagaaccgagctgtgcggcaactgcggcagaaacgtgctggtgaaggacctgaagacccaccccgaggtgtgctag

SEQ ID NO: 167170 - DNA, 495 bp, Artificial Sequence
  derived and/or modified sequence
atggccgagttcctggacgaccaggagaccagactgtgcgacaactgcaagaaggagatccccgtgttcaacttcaccatccacgagatccactgccagagaaacatcggcatgtgccccacctgcaaggagcccttccccaagagcgacatggagacccacatggccgccgagcactgccaggtgacctgcaagtgcaacaagaagctggagaagagactgctgaagaagcacgaggagaccgagtgccccctgagactggccgtgtgccagcactgcgacctggagctgagcatcctgaagctgaaggagcacgaggactactgcggcgccagaaccgagctgtgcggcaactgcggcagaaacgtgctggtgaaggacctgaagacccaccccgagctgaagaacaagagaggcagaaagggcatcgaggccaacagcccccccaagagagtggtgaagagagtgcagacctggaccagctgctggccctag

SEQ ID NO: 167171 - DNA, 852 bp, Artificial Sequence
  derived and/or modified sequence
atggccgagttcctggacgaccaggagaccagactgtgcgacaactgcaagaaggagatccccgtgttcaacttcaccatccacgagatccactgccagagaaacatcggcatgtgccccacctgcaaggagcccttccccaagagcgacatggagacccacatggccgccgagcactgccaggtgacctgcaagtgcaacaagaagctggagaagagactgctgaagaagcacgaggagaccgagtgccccctgagactggccgtgtgccagcactgcgacctggagctgagcatcctgaagctgaaggagcacgaggactactgcggcgccagaaccgagctgtgcggcaactgcggcagaaacgtgctggtgaaggacctgaagacccaccccgaggtgtgcggcagagagggcgaggagaagagaaacgaggtggccatcccccccaacgcctacgacgagagctggggccaggacggcatctggatcgccagccagctgctgagacagatcgaggccctggacccccccatgagactgcccagaagacccctgagagccttcgagagcgacgtgttccacaacagaaccaccaaccagagaaacatcaccgcccaggtgagcatccagaacaacctgttcgaggagcaggagagacaggagagaaacagaggccagcagccccccaaggagggcggcgaggagagcgccaacctggacttcatgctggccctgagcctgcagaacgagggccaggccagcagcgtggccgagcaggacttctggagagccgtgtgcgaggccgaccagagccacggcggccccagaagcctgagcgacatcaagtag

SEQ ID NO: 167172 - DNA, 1749 bp, Artificial Sequence
  derived and/or modified sequence
atggcagaattcctggatgatcaagaaacccgattatgtgacaactgcaagaaggaaatcccggtgtttaattttaccatccacgagatccattgccagcgtaacattggtatgtgtcctacctgtaaagaacctttcccgaagtcagacatggaaacccacatggctgccgaacattgccaagtcacttgtaaatgtaataaaaagttggaaaaaagactgctcaagaagcacgaagagactgagtgtccactaagactggccgtgtgtcaacactgcgatctggagctcagcatcctgaaactcaaggaacacgaagattattgcggcgccagaactgaattgtgtggtaactgcggtcggaacgtccttgtgaaggaccttaagacgcatccagaggtttgcggaagggagggcgaggagaaacgcaacgaggtggccataccccctaacgcttatgacgaatcctggggccaggacgggatttggatcgcatcccagcttttgaggcagatcgaagctctggatcctcctatgagattgccaaggcggcccctgagggcattcgaaagcgacgttttccataacagaacgaccaatcagaggaatatcacagctcaggtgagcatccagaacaatctgtttgaggagcaagagcgccaagagcggaacaggggacagcagcccccaaaagagggcggcgaagagagcgccaaccttgatttcatgctggcccttagcttgcaaaatgaagggcaagcaagtagtgtggctgagcaagatttctggagagcagtctgcgaggccgaccagtctcatggcgggccacggtccctgagtgacattaaaggcgctgctgacgaaattatgctgccttgcgagttctgtgaggaactttacccagaggaactgcttatagatcatcagacctcctgcaacccaagccgtgcattgccttctctgaacaccggctccagttcccctagaggcgttgaagaacccgacgtcatcttccagaactttctgcaacaggccgcctctaaccaactcgattcgctgatgggcctgagcaactcccacccggtcgaggagagcatcattatcccttgtgaattttgcggtgtgcagctggaagaggaagtcctttttcaccaccaggatcagtgcgaccagagaccagcaactgccacaaaccacgtgaccgaaggaatccccagattagacagccagcctcaagaaacatcacccgagcttcctcgacgacgggtacggcaccagggcgacctaagtagtggctacctggacgatacgaagcaagaaaccgccaacggacccacctcttgcttaccaccgagtcggccaattaacaatatgaccgcaacctacaatcagctgtcccggtcaacatccggaccacggccaggatgtcagccatcaagcccttgcgttccgaagttgagtaactctgatagccaggatattcagggcagaaaccgggattcccagaatggggccatcgctcctggtcacgttagcgtgatacgtccaccccagaacctctacccagaaaatatcgtgccctccttctccccaggcccctctggcagatacggtgcctccggcaggtccgaaggtgggagaaacagcagggttactccagctgctgctaattaccggtctaggactgctaaggccaagccatccaaacagcagggcgctggcgatgccgaggaagaggaggaggaatag

SEQ ID NO: 167173 - DNA, 1749 bp, Artificial Sequence
  derived and/or modified sequence
atggccgaattcttggacgaccaggagacccgcttgtgtgacaattgtaagaaggagatccccgtctttaatttcacaattcacgagatccattgtcagcggaatatcggaatgtgtcccacatgcaaggaaccgtttcccaagtcagacatggaaacacacatggcggccgagcattgccaggtcacatgtaagtgtaacaagaaactggaaaaacgcctgctcaagaaacatgaggagaccgagtgcccccttcggcttgcggtttgccagcattgtgacctcgagttgagtatactgaaactgaaagagcacgaagactattgcggcgcccgaaccgagttgtgcgggaactgcgggaggaacgtcttagtgaaggatctgaagacccatccagaagtgtgtggaagggaaggcgaggaaaagaggaatgaggtcgccatccctccaaacgcatatgacgaatcatgggggcaagacggtatctggattgcatcccagcttttgaggcagatagaagcactggacccccccatgcgactgcctcggagaccactgcgcgcattcgagtccgatgtatttcataaccgcacaaccaaccaaaggaacatcactgcacaggtcagcatccagaacaatctgtttgaagagcaggagagacaagaacggaatcgcggtcaacagccccccaaggagggcggcgaagagtcagctaacctcgacttcatgctggccctcagcttacagaacgaaggccaagccagctccgtggcggagcaggacttttggcgtgccgtgtgtgaagcagatcagtcccatgggggacctaggtccctgtccgacataaagggtgcagcggacgaaatcatgctcccttgcgagttttgcgaggagctttatccagaagaactgctaattgaccaccagacctcatgcaatccgtcacgggccttgccaagtctaaatacaggatctagttctccacgaggagtagaagagccagacgttatcttccaaaacttcttacagcaggctgcttccaaccagctggatagcctgatgggactgtccaacagtcaccccgtggaggagtctattatcattccttgcgagttttgtggggttcagctagaggaggaagtgctgtttcaccatcaagaccagtgcgatcaacggcccgctactgccaccaaccatgtgacagaaggaattccaaggctcgatagccagccccaggagacgtcaccagagctgcctcgaagacgggtcagacaccagggcgacctgagctccggctacttggacgatactaagcaagagacagccaatggcccaacaagttgcctcccgccatcccgtcctatcaacaatatgacagccacatacaatcagctttcaagatccacatccggtccccgcccaggctgtcaaccgtcctccccttgtgtgcctaaattgtcgaactcggacagtcaggatattcagggacgtaatagggactcacagaacggcgcaatagctcctggacacgtcagtgtcatacggcccccgcagaatctttaccccgaaaacatagttccatccttctccccgggaccaagcgggaggtacggcgcatcaggccggagtgaagggggccgcaatagccgtgtaaccccggcagcagccaattacaggagcaggacagccaaagcgaaaccctcaaagcaacagggagctggcgacgccgaagaggaggaggaagagtag

SEQ ID NO: 167174 - DNA, 408 bp, Artificial Sequence
  derived and/or modified sequence
atggcggaatttttggacgaccaggagacacgtctttgtgataattgtaagaaagagatcccagtgttcaacttcaccatccatgagatacattgtcagagaaatattgggatgtgtcccacttgtaaagagccatttcccaagagtgatatggaaactcacatggcggccgagcattgccaggtaacctgtaagtgtaataaaaaattggaaaaaaggctcctaaagaaacatgaagaaaccgagtgtcctctcaggctggccgtgtgccagcactgcgatctggaactctcaattctgaagctcaaggagcacgaggattactgtggagctaggactgaactgtgcggcaattgcggcagaaacgtcctggtgaaggaccttaaaacacaccccgaggtctgctag

SEQ ID NO: 167175 - DNA, 495 bp, Artificial Sequence
  derived and/or modified sequence
atggcagagtttctagacgatcaggagacccgcctctgtgacaattgcaaaaaggaaatccccgttttcaatttcacaatccacgaaatccattgtcaaaggaacatcgggatgtgtcctacctgtaaggagcctttccccaagtcagatatggagacacacatggccgccgagcattgtcaggtcacgtgcaagtgcaataagaaactcgagaagaggctcctcaagaaacacgaagagacggagtgtcccctgcgactggccgtttgccagcactgtgatctggaactttctattctgaaactgaaggagcacgaagactattgtggtgccaggactgagctgtgtggcaattgcggacggaatgtcctggtcaaagatttgaaaacccatccggagctcaagaataagcgcggtcgcaaggggatcgaagcgaacagtccacccaaacgtgtggttaaacgagtccagacctggacgtcttgttggccctag

SEQ ID NO: 167176 - DNA, 852 bp, Artificial Sequence
  derived and/or modified sequence
atggccgaatttctagacgaccaggagacccgactgtgtgacaactgcaagaaagagatccccgtttttaattttaccatccacgagatccactgtcagagaaacatcggaatgtgccccacctgcaaagaaccgtttcctaagtctgatatggaaactcacatggccgctgagcattgtcaggtgacgtgcaaatgtaacaaaaagttagagaagcgcctgctaaaaaaacacgaggaaaccgaatgccctctccgcctcgccgtctgtcagcattgtgacctagaactgtcaatcttaaagctgaaggagcatgaggattattgcggggcccgcaccgaactgtgcggcaattgtggcaggaatgtcctggtgaaggacctgaagactcatccagaggtgtgtggcagagagggagaggagaagcgaaatgaagttgctatcccccctaacgcatacgatgagagttggggccaggatggcatctggatcgcaagccagctgttgcggcagatcgaagctctggatccacccatgaggctgcctagacgtcctttacgagcgtttgagtccgacgttttccacaataggaccaccaatcagcgaaacatcacagcccaggtgagcatacagaacaacctctttgaggagcaggagcggcaagagagaaaccggggtcagcaaccaccaaaagagggtggggaagagagcgcaaatctagatttcatgttagctctgagtcttcagaatgaaggacaggcctccagcgtggctgaacaagatttttggagggccgtatgtgaggcggaccagtcacacggaggcccccgatcactcagtgatattaagtag

SEQ ID NO: 167177 - DNA, 1749 bp, Artificial Sequence
  derived and/or modified sequence
atggccgagttcctggatgaccaggagacccggctgtgtgacaactgcaagaaggagatccctgtgttcaacttcaccatccacgagatccactgccagaggaacatcggcatgtgccccacctgcaaggagcccttccccaagagtgacatggagacccacatggctgctgagcactgccaggtgacctgcaagtgcaacaagaagctggagaagaggctgctgaagaagcatgaggagacagagtgccccctgcggctggccgtgtgccagcactgtgacctggagctgagcatcctgaagctgaaggagcacgaggactactgtggggccaggacagagctgtgtggcaactgtggcagaaatgtgctggtgaaggacctgaagacccaccctgaggtgtgtggccgggagggggaggagaagagaaatgaggtggccatccccccaaatgcctatgatgagagctggggccaggacggcatctggatcgccagccagctgctgcggcagatcgaggccctggacccccccatgaggctgccccggcggcccctgcgggcctttgaaagtgatgtgttccacaacagaaccaccaaccagaggaacatcacagcccaggtgtccatccagaacaacctgtttgaggagcaggagcggcaggagaggaacagaggccagcagccccccaaggagggcggggaggagagcgccaacctggacttcatgctggccctgagcctgcagaatgaaggccaggccagctctgtggccgagcaggacttctggagggctgtgtgtgaggccgaccagagccatggaggccccaggagcctgagtgacatcaagggagctgctgatgagatcatgctgccctgtgagttctgtgaggagctgtacccagaggagctgctgattgaccaccagaccagctgcaaccccagccgggccctgcccagcctgaacacaggcagcagcagcccccggggcgtggaggagccagatgtgatcttccagaacttcctgcagcaggccgccagcaaccagctggacagcctgatgggcctgagcaacagccaccctgtggaggagagcatcatcatcccctgtgagttctgtggggtgcagctggaggaggaggtgctcttccaccaccaggaccagtgtgaccagaggcctgccacagccaccaaccacgtgacagagggcatcccccggctggacagccagccccaggagaccagccctgagctgcccaggagaagagtgcgccaccagggcgacctgagcagcggctacctggatgacaccaagcaggagacagccaacggccccaccagctgcctgccccccagccggcccatcaacaacatgacagccacctacaaccagctgagccgcagcaccagcggcccccggcccggctgccagcccagcagcccctgtgtgcccaagctgagcaacagcgacagccaggacatccagggcaggaacagagacagccagaatggagccatcgcccctggccacgtgtctgtcatccggcccccccagaacctgtacccagaaaatattgtgcccagcttcagccctggccccagcggccgctatggagccagcggccgctctgagggcggcaggaacagccgggtgaccccagctgctgccaactaccgcagcaggacagccaaggccaagcccagcaagcagcagggcgctggagatgctgaggaggaggaggaggagtag

SEQ ID NO: 167178 - DNA, 408 bp, Artificial Sequence
  derived and/or modified sequence
atggccgagttcctggatgaccaggagacccggctgtgtgacaactgcaagaaggagatccctgtgttcaacttcaccatccacgagatccactgccagaggaacatcggcatgtgccccacctgcaaggagcccttccccaagagtgacatggagacccacatggctgctgagcactgccaggtgacctgcaagtgcaacaagaagctggagaagaggctgctgaagaagcatgaggagacagagtgccccctgcggctggccgtgtgccagcactgtgacctggagctgagcatcctgaagctgaaggagcacgaggactactgtggggccaggacagagctgtgtggcaactgtggcagaaatgtgctggtgaaggacctgaagacccaccctgaggtgtgctag

SEQ ID NO: 167179 - DNA, 495 bp, Artificial Sequence
  derived and/or modified sequence
atggccgagttcctggatgaccaggagacccggctgtgtgacaactgcaagaaggagatccctgtgttcaacttcaccatccacgagatccactgccagaggaacatcggcatgtgccccacctgcaaggagcccttccccaagagtgacatggagacccacatggctgctgagcactgccaggtgacctgcaagtgcaacaagaagctggagaagaggctgctgaagaagcatgaggagacagagtgccccctgcggctggccgtgtgccagcactgtgacctggagctgagcatcctgaagctgaaggagcacgaggactactgtggggccaggacagagctgtgtggcaactgtggcagaaatgtgctggtgaaggacctgaagacccaccctgagctgaagaacaagaggggcaggaaaggaattgaggccaacagcccccccaagagggtggtgaagagggtgcagacctggaccagctgctggccctag

SEQ ID NO: 167180 - DNA, 852 bp, Artificial Sequence
  derived and/or modified sequence
atggccgagttcctggatgaccaggagacccggctgtgtgacaactgcaagaaggagatccctgtgttcaacttcaccatccacgagatccactgccagaggaacatcggcatgtgccccacctgcaaggagcccttccccaagagtgacatggagacccacatggctgctgagcactgccaggtgacctgcaagtgcaacaagaagctggagaagaggctgctgaagaagcatgaggagacagagtgccccctgcggctggccgtgtgccagcactgtgacctggagctgagcatcctgaagctgaaggagcacgaggactactgtggggccaggacagagctgtgtggcaactgtggcagaaatgtgctggtgaaggacctgaagacccaccctgaggtgtgtggccgggagggggaggagaagagaaatgaggtggccatccccccaaatgcctatgatgagagctggggccaggacggcatctggatcgccagccagctgctgcggcagatcgaggccctggacccccccatgaggctgccccggcggcccctgcgggcctttgaaagtgatgtgttccacaacagaaccaccaaccagaggaacatcacagcccaggtgtccatccagaacaacctgtttgaggagcaggagcggcaggagaggaacagaggccagcagccccccaaggagggcggggaggagagcgccaacctggacttcatgctggccctgagcctgcagaatgaaggccaggccagctctgtggccgagcaggacttctggagggctgtgtgtgaggccgaccagagccatggaggccccaggagcctgagtgacatcaagtag

SEQ ID NO: 167181 - DNA, 1749 bp, Artificial Sequence
  derived and/or modified sequence
atggccgagttcctggacgaccaggagacccggctgtgcgacaactgcaaaaaggaaatccccgtgttcaactttacaatccacgaaatacattgtcagcgcaacatcgggatgtgtcccacatgtaaggagccgtttcccaagtcagatatggaaacacatatggccgcggagcactgccaagtgacctgtaaatgtaacaagaagctggagaaaaggctattgaagaaacacgaagagaccgaatgccccctccggctcgcagtatgccagcattgcgacttagaattaagcattctgaagctgaaagagcatgaagactactgtggagcaaggacagagctgtgtggaaactgcgggaggaacgttcttgtgaaggacttaaagactcatcccgaagtatgtggacgcgaaggcgaggagaaacgaaacgaagtggccatacctccaaatgcgtatgatgaatcctggggacaggatggaatttggatcgctagtcagctgctgcggcagatcgaggcattggatcctcccatgcgactgcctcgacgcccactaagagcatttgagagtgatgtgttccacaataggaccaccaatcagcgcaatatcactgcccaagtctccattcagaacaacctgtttgaagaacaggagcggcaggaaaggaaccggggccagcagcctcccaaggaagggggggaagaatctgcaaatctggacttcatgctggctctcagcctgcagaacgagggccaggctagctccgtcgccgaacaggatttttggcgcgccgtgtgcgaggctgatcagtctcacggtgggcctagatctctctccgacatcaagggagcggctgatgagatcatgctgccgtgcgagttctgcgaagaactgtacccggaggaactgctgatcgaccaccagaccagttgcaacccaagcagggctctcccgtcgctcaacactggcagcagttcccctaggggggtggaggagccggatgtgattttccaaaacttccttcagcaggcagctagtaatcagttagatagtctgatggggcttagcaattcacatccagtggaggaatcaatcattataccttgcgaattttgtggcgtccaactggaggaagaggtcctgttccaccaccaggatcaatgtgaccagcggcccgctacggccactaatcatgtgactgaggggatccctagacttgattctcaaccacaggaaacttccccagagcttccaagaagacgcgtccgacatcaaggcgacctgagctccggctacctcgacgacaccaagcaggagaccgctaatgggcctacatcttgcctgcctccctcccgccccatcaacaacatgaccgccacttacaatcaactcagtcggtccacttccggcccgagaccaggatgtcagccttcctccccatgcgttccaaagctgtcgaattctgattcccaggacatccaaggccgtaacagagactctcagaacggcgccatcgcccctggacatgtttctgtgatccgtccaccccagaatctgtatcctgaaaatatagtaccctcctttagccccggccccagcgggaggtacggtgcttccgggcgaagtgaaggcggccggaacagccgggtgacaccggccgcagcgaattataggagccgtaccgctaaggccaaacctagcaaacaacagggagccggcgacgccgaggaagaagaagaagagtag

SEQ ID NO: 167182 - DNA, 1749 bp, Artificial Sequence
  derived and/or modified sequence
atggccgagttcctggacgaccaggagacccggctgtgcgacaactgtaagaaagaaattcccgtcttcaactttacaatccacgagatacactgtcagagaaatattggtatgtgcccaacctgcaaagagccatttcccaaatccgatatggagacacacatggccgccgagcattgccaggttacctgtaaatgtaacaagaaacttgagaagagacttcttaaaaaacatgaggagacagagtgccccctgagactcgccgtgtgtcaacattgcgatctcgagctttcaattctgaagttgaaggaacatgaagactactgtggcgcacggaccgaattgtgtggaaactgtggacgtaatgtactggtcaaggacctgaaaacccatcctgaggtgtgtggcagagagggggaggaaaaaagaaatgaagtggccatccctcctaatgcctacgacgaaagttggggacaggacggtatctggatagccagtcagctgctgcgacagatcgaagctctagatcctcccatgcggctgcctcggcggcccctaagggcatttgagagcgatgtgttccacaatagaacaaccaaccagagaaacatcaccgctcaggtgagcatacagaacaatctgttcgaggagcaagaaaggcaagagcgcaacaggggccagcagcctcccaaggaaggtggtgaggagtcagccaacttagactttatgttagccctatctctccagaacgaggggcaagctagtagtgtcgccgagcaagatttctggcgggccgtgtgcgaggccgaccagtctcacgggggacctaggtctctgagcgacatcaaaggcgctgcagacgaaattatgctgccatgcgagttctgcgaagaactctaccccgaggagctgctcatcgaccaccagacaagttgtaatccctcaagggcacttccttctctcaatacaggctctagtagcccaaggggggtggaggagccagacgttatcttccagaacttcctgcaacaggctgcgtctaatcagctagacagtctgatggggctgagcaacagtcatcccgtggaggagagcatcatcattccctgtgaattctgtggcgtgcaacttgaggaagaggtcctgttccatcaccaagatcaatgcgatcagagaccagccactgctacgaaccacgtgacagaaggtatccctagacttgactctcagccacaggagacttccccggaactgcctcggaggcgcgtaagacaccaaggcgatttgtcaagtggctacctagacgacaccaagcaggaaacagctaacgggccaactagctgcctgcccccctctaggccgattaacaatatgaccgctacgtataatcagctctcacgcagtacttcgggccctcgacctggatgtcaaccttcttccccgtgcgtccctaaactatccaactccgattcgcaggatattcagggccggaaccgggacagtcagaatggagcaatcgcacccggccatgtgtcggtgatccgacctccacaaaatctgtatccagagaacatcgtgccatcctttagccccggacccagtggaagatatggcgcttccgggcggtccgaggggggaagaaatagcagggtcacccccgccgctgccaactaccgatccagaacagcaaaggccaagccctccaagcagcagggggccggtgatgcagaggaggaggaagaggaatag

SEQ ID NO: 167183 - DNA, 408 bp, Artificial Sequence
  derived and/or modified sequence
atggccgagttcctggacgaccaggagacccggctgtgcgacaactgcaagaaagaaatccccgtctttaacttcactatccacgagatacactgtcaacggaacattgggatgtgcccaacatgtaaagaaccatttccaaagagtgacatggagacacacatggcagctgagcactgtcaggttacgtgcaagtgtaacaaaaagcttgaaaagcggctgctcaaaaaacatgaggagaccgaatgtcccctccgcctcgcagtatgccagcactgcgatcttgaactcagcatcctgaagctcaaggagcatgaggattattgtggcgccaggaccgagttatgcggaaactgcggcaggaacgtccttgtaaaggacctcaagactcaccccgaggtgtgctag

SEQ ID NO: 167184 - DNA, 495 bp, Artificial Sequence
  derived and/or modified sequence
atggccgagttcctggacgaccaggagacccggctgtgcgacaactgtaaaaaggaaatcccagtgttcaactttaccatccacgagattcactgccagagaaacattggaatgtgtcccacatgtaaggaaccctttcccaaatcagatatggagactcatatggccgctgaacattgtcaggtcacatgtaaatgcaataaaaagttggagaagcgacttttgaagaagcacgaagagaccgagtgtcctctaaggctggcagtatgtcaacattgtgacttggagctctctatcctcaagctgaaagaacatgaagactactgcggagcaagaacagagctgtgcggcaactgtggcagaaacgtactggtgaaagatttaaagacccatccggagctgaaaaataaacgcgggaggaagggaatcgaagccaactcacctcctaagcgcgtggtcaagcgcgtgcagacctggacctcctgctggccctag

SEQ ID NO: 167185 - DNA, 852 bp, Artificial Sequence
  derived and/or modified sequence
atggccgagttcctggacgaccaggagacccggctgtgcgacaactgtaagaaggaaatacccgtgttcaactttaccatacacgaaattcactgccagcgaaatatcgggatgtgccctacatgcaaggaaccattcccgaaatcagacatggaaacccatatggcagcagaacactgccaggtaacctgcaaatgtaacaagaaactggagaagagacttctgaaaaaacatgaagaaaccgagtgtccccttaggctggccgtctgccagcattgcgaccttgaactcagtatcctgaagctgaaggagcatgaggattactgcggggcccgtactgagctctgcgggaactgtggacggaacgtactcgtgaaggatctaaagacacatccggaggtttgtggccgggagggcgaggaaaaacgaaatgaggtcgccattcctcctaatgcatacgatgagtcctggggacaggacggcatttggattgctagtcagcttctgcgccagattgaggccctggacccgccaatgagattacccaggcgacctctccgcgccttcgagtccgatgtgttccacaatcgcacgaccaaccaaagaaacattaccgctcaggtctcaatccagaacaatctgtttgaggagcaggagcggcaggaaaggaacaggggccagcaaccccccaaagaaggcggggaagagtcggcaaatctagattttatgttagcgctgagccttcagaatgaggggcaggcttcctccgtggcggagcaggacttctggagagccgtgtgtgaggctgaccagtcacacggtggcccaagaagcctcagcgacatcaagtag

SEQ ID NO: 167186 - DNA, 1749 bp, Artificial Sequence
  derived and/or modified sequence
atggcagagtttctggatgaccaggagacccgactttgcgataattgcaagaaagaaatcccagtcttcaatttcacgatccacgagatacattgtcagagaaatatcggtatgtgccccacttgtaaggagccttttcctaaatcggacatggaaacacatatggccgctgagcattgtcaagtgacgtgcaaatgtaacaaaaaactcgagaaaagactgctgaaaaagcacgaagagaccgaatgcccactacgactggctgtatgtcagcactgtgacctcgagttgtcaatacttaaacttaaagagcacgaggactattgcggggcacggacagaactatgcggcaattgcggaagaaatgtgctggtgaaagacctaaaaacccatcccgaagtgtgcgggcgtgaaggagaggagaaaagaaacgaagtggccatacctccgaacgcctacgatgagtcctgggggcaggacggcatctggatcgcaagtcagctcctgaggcagattgaagcattagatccacctatgcgattgcctaggcgtccactacgagccttcgagtcagatgtcttccacaaccgtaccactaatcaaaggaacattactgcccaggtgagcatacagaataatctgtttgaagaacaggagagacaagagcgaaatagaggccagcagccgccaaaggaggggggtgaggagtctgccaacctcgacttcatgttagcgctttctctgcagaatgaggggcaggcctcgtcagtggccgaacaggacttctggcgcgcagtgtgcgaggccgaccagagccacggagggcctagatcactgtccgacatcaagggggctgccgatgagattatgcttccctgcgaattttgtgaagagctgtaccctgaagagctgctgatagatcaccagacctcttgtaatccatcacgcgctctaccttccttgaacacaggaagcagctcgccgcgtggagtggaggagccagacgtgatctttcaaaacttcctgcagcaggccgctagcaatcagctggatagtctgatgggactgtcaaatagccaccctgttgaggagtctatcatcatcccatgcgagttttgcggcgtccagttggaagaggaggtccttttccaccatcaagaccagtgcgaccagcgccctgccacagcaactaaccacgttactgaggggattccgaggctcgatagtcagccccaggagacatctccagaattgccacgcagaagagtccgccaccagggagacctttcctccggataccttgacgacaccaaacaagaaacggccaatgggccaacgtcttgcttacctccatcaaggcccatcaataacatgactgccacttacaaccagctctccaggagcacctccggccctaggccgggttgtcagccaagtagcccatgtgtacctaagctgagcaactccgattcccaagatatccaagggagaaaccgggattctcagaacggcgcaatcgcacccggtcatgtgagcgtgataagacctccccagaatctgtaccccgagaacatagtgccaagcttttcccctggcccttccggcaggtatggagcatctggaagaagtgaaggcggacgaaactcccgcgtgactcctgctgccgcaaactataggtcccgaaccgccaaggcgaaaccctcgaaacagcagggcgctggtgatgcagaagaagaggaagaggaatag

SEQ ID NO: 167187 - DNA, 1749 bp, Artificial Sequence
  derived and/or modified sequence
atggccgaatttctggacgaccaagagactcggctgtgcgataactgtaagaaggagattccagtttttaactttaccattcacgagatccattgtcagcgaaacataggtatgtgcccaacatgcaaagagccctttcctaagagcgacatggaaacacatatggcggcagaacactgccaggtgacttgtaagtgtaacaagaaactagagaagcgcttacttaaaaagcacgaggaaactgagtgccctctccggctcgccgtttgccaacattgtgacctggaactgtcaattctgaaactgaaagagcacgaggactattgtggcgcacggacagagctgtgtggtaattgtgggagaaatgtgctagtcaaagatctgaaaacccacccagaagtgtgcggcagagagggagaggagaagcgaaacgaggtggccatcccccctaacgcctacgatgagagctggggtcaggatgggatctggatcgcatcgcagttgctgcgacaaatagaggcactggatccacccatgagacttccccgtcggccactccgggcatttgagagcgatgttttccacaaccggactacgaatcagcggaacattactgcacaggtctccatacaaaataatttgtttgaagaacaggagcgccaagagcgcaatcgcggtcagcagccgcctaaggagggaggcgaggagagcgctaacttggatttcatgcttgccctatcactgcaaaatgaggggcaagcctcttctgtcgctgagcaggacttttggcgcgcagtatgtgaggctgatcaaagtcatggtggccctagatcactgtctgacatcaaaggcgcagccgatgagattatgctaccttgcgagttttgtgaggagctctacccagaggagctcttgatcgatcaccaaacatcctgtaacccttctcgcgctctccctagtcttaatactggctcatcaagccctcggggtgtggaagaacctgacgtgattttccaaaacttcttgcagcaggctgcaagcaaccagctggactcgctgatgggactgtccaactctcacccagtggaagagagcatcattataccttgtgagttttgcggagttcagctcgaggaagaagtgcttttccatcaccaggatcagtgtgaccagcggccagcgaccgcaaccaatcacgtgaccgagggcatacctcggctcgattcccagcctcaggaaaccagtcctgagctcccaagaaggagagtaagacaccagggcgatctgtcttctggttacctcgacgacaccaaacaggagaccgccaacggccctactagctgtttgccccctagtcggccaatcaacaatatgaccgcaacttataaccaactgtccaggagtacaagcggccctaggccgggttgtcagcccagttccccctgcgttcctaagctgagcaactccgatagccaggatattcaggggcgaaaccgtgattcccaaaacggtgccattgccccaggacatgtatctgtcattcgtcctccccaaaatctgtacccggagaacatagtgccaagcttctcccccggtccaagcggccgttatggggcttctgggagatctgagggtggcaggaattctagagtaacccctgcagcagccaattatagatctagaaccgcaaaagctaagccaagtaaacagcagggggctggcgatgccgaggaggaggaggaagaatag

SEQ ID NO: 167188 - DNA, 408 bp, Artificial Sequence
  derived and/or modified sequence
atggccgagttcttggatgatcaagaaaccagactgtgtgacaattgcaagaaggaaattcccgtgtttaattttaccatccacgagattcactgtcagagaaacataggtatgtgtccgacctgtaaggagcccttccccaaatctgacatggagacgcatatggccgcagagcactgtcaggtgacctgtaaatgtaacaagaaactcgaaaaaaggctgttaaaaaagcacgaagaaaccgaatgccccttgaggctggctgtgtgccagcactgtgacctcgagctctccattcttaagctcaaggaacacgaggactattgcggcgcaaggactgaactttgcggcaattgtgggaggaatgtgctggtgaaagatttgaagacccaccccgaagtgtgctag

SEQ ID NO: 167189 - DNA, 495 bp, Artificial Sequence
  derived and/or modified sequence
atggcagagttcttggatgaccaagagacacggctttgcgataactgtaagaaagagattcccgtgttcaattttactatccacgaaatccactgccagaggaatatcggtatgtgtcctacatgcaaagagcctttccccaagtctgacatggaaacccatatggcagccgagcactgtcaggtgacgtgcaagtgtaataagaagctagagaagcggctgctgaaaaaacacgaagagacggagtgtccccttcggcttgcagtctgtcagcactgcgatttagaactgagcatactcaagctgaaggaacacgaagactattgtggtgctcgcaccgaactttgtggaaattgcggcagaaatgtattagtgaaggatcttaagacccacccagagctgaagaataagcgcggaaggaagggaattgaagccaatagtcccccaaaacgggtcgtaaaacgcgtccagacctggacatcgtgctggccctag

SEQ ID NO: 167190 - DNA, 852 bp, Artificial Sequence
  derived and/or modified sequence
atggcagaattcctggatgaccaagagactcggctgtgcgacaactgcaaaaaagaaatccctgttttcaatttcaccatccatgagattcattgccagagaaacatcgggatgtgccctacatgcaaggagccttttccaaagtctgacatggagacacacatggctgcagagcattgtcaggttacctgcaaatgtaataaaaaactggagaagcgccttttgaaaaaacatgaggaaaccgagtgccccctcagactcgctgtttgccaacactgtgatctcgaattgtccatcctgaaactgaaggagcatgaagattattgtggagctcgtacagagctctgcggcaattgtggccgaaatgtgctcgtaaaggatttgaaaacgcacccagaagtttgcggtagagagggagaggagaaacgcaacgaggtagctattccaccaaacgcctacgacgaatcctgggggcaggatgggatctggatcgcgtcccagctgctgcgtcagatcgaggctttggacccccctatgaggctccccaggagaccactccgcgcttttgagtctgatgtgtttcacaatcgcacgacaaaccaacgtaatataacagcacaggtttcgatccagaataatctgttcgaggagcaagagcggcaggagagaaaccgcggtcagcagcctcctaaggaggggggtgaagagtccgccaatctcgactttatgttggcgttgtccctgcagaacgaaggccaggcctcttcggtggctgaacaggacttctggcgagctgtgtgtgaagctgatcagagtcacggaggacctaggtctttgtcagacattaagtag

SEQ ID NO: 167191 - DNA, 3178 bp, Artificial Sequence
  derived and/or modified sequence
agtgcggggtctgacagaggaggctccgtgtctgcagctagtgtgtcaactcagcgtttctcctctcgtccctggtgaggtgtagcggcggcacgcggctggagatcccctgtggcctccagtttaggaagggtccagcatcccaagggaggggtgtgtgggcgaggggtctctgggcccggggtcgcggctgtgaggagaggatgcccgcgcggcggcatctcaggcacctggaggaggccgcgctttctcctcagggaaccggcgccttggcagcccccggcgacgccgcccccttcgcggcctaggttggtctggtgagccgggaagcgggcgtcgttcgcagcgccgctgtgaccaccgcgtcccgggcggagctgggctcagtgccggcctgggcctagagtccgagcctcgagctgccggcgtggggggtcgcgagtggcctaatgcggcctcgaagccgaaggacccgagtccgagctcgcactccgacccgctggtgctgtggaaaactcaggtggccttccgctttcgtagcctctaaagtggggaccaagactttcacctcttaggattgtagtcgggattaaaagattttcccggaagagctaaagatggctgaatttctagatgaccaggaaactcgactgtgtgacaactgcaaaaaagaaattcctgtgtttaactttaccatccatgagatccactgtcaaaggaacattggtatgtgtcctacctgtaaggaaccatttcccaaatctgacatggagactcacatggctgcagaacactgtcaggtgacctgcaaatgtaacaagaagttggagaagaggctgttaaagaagcatgaggagactgagtgccctttgcggcttgctgtctgccagcactgtgatttagaactttccattctcaaactgaaggaacatgaagattattgtggtgcccggacggaactatgtggcaactgtggtcgcaatgtccttgtgaaagatctgaagactcaccctgaagtttgtgggagagagggggaggaaaagagaaatgaggttgccatacctcctaatgcatatgatgaatcttggggtcaggatggaatctggattgcatcccaactcctcagacaaattgaggctctggacccacccatgaggctgccgcgaaggcccctgagagcctttgaatcagatgttttccacaatagaactaccaaccaaaggaacattacagcccaggtttcaattcagaataatctgtttgaagaacaagagaggcaggaaaggaatagaggccaacagccccccaaagagggtggtgaagagagtgcaaacttggacttcatgttggccctaagtctgcaaaatgaaggccaagcctccagtgtggcagagcaggacttctggagggccgtatgtgaggccgaccagtctcatggcggtcccaggtctctcagtgacataaagggtgcagctgacgagatcatgttgccttgtgaattttgtgaggagctctacccagaggaactgctgattgaccatcagacaagctgtaacccttcacgtgccttaccttcactcaatactggcagctcttcccccagaggggtggaggaacctgatgtcatcttccagaacttcttgcaacaggctgcaagtaaccagttagactctttgatgggcctgagcaattcacaccctgtggaggagagcatcattatcccatgtgaattctgtggggtacagctggaagaggaggtgctgttccatcaccaggaccagtgtgaccaacgcccagccactgcaaccaaccatgtgacagaggggattcctagactggattcccagcctcaagagacctcaccagagctgcccaggaggcgtgtcagacaccagggagacctgtcttctggttacctggatgatactaagcaggaaacagctaatgggcccacctcctgtctgcctcccagccgacccattaacaatatgacagctacctataaccagctatcgagatcaacatcaggccccagacctgggtgccagcccagctctccttgtgtgccgaagctcagcaactcagacagccaggacatccaggggcggaatcgagacagccagaatggggccatagcccctgggcacgtttcagtgattcgccctcctcaaaatctctacccagaaaacattgtgccctctttctcccctgggccttcagggagatacggagctagtggtaggagtgaaggtggcaggaattcccgggtcacccctgcagctgccaactaccgcagcagaactgcaaaggcaaagccttccaagcaacagggagctggggatgcagaagaggaagaggaggagtaatggtgtctccagagactttacatcggttcctgtcttctgtgcacagcagcacttgccgctgtgcaggcccacctctttggctctttgggtgggagagtttttccagattttagatttttctaggttatggccattttgtgtcttttgaggttgtgctgtgggggtttgggtttgagggaagggagcagggtggcggttgaggaacgcttcagccttagctgctacctttcggcagcagtgaaatacaagctgcagcctcggctgccagggctcccttttgacttattgtcgccactgccccttggtgctgtgtggtcccagtggaaggaggggaagattttggaaacctggtagccaccagtaaggtgattctctgccctgttggggcctaaatttgggggcttttgggcaacctctccgtgtactgcgtctgtccacactcgattgggccccaggtgtgtatgaggcgctctggtaaggtgctcaggccagttgcaatgtctgtcagtaacgaggcttttgatgtgttgagctggaggtgagtggaccgggggctgtgttttaagctgcttccttggcatttggcatcactgccttctgttcccgggggagcatggatcttttgtcctcactgctttctaatggggagggctgagggctccctgtccccacagcaggtatgttgggctctgccccagccccacacttgctctgaaaaccaagtgtcagagccccttccccttgtttttattttactgttataataattattaacttccttgtaatagaaataaagtttgtacttggagttc

SEQ ID NO: 167192 - DNA, 2687 bp, Artificial Sequence
  derived and/or modified sequence
cgcgatgggcggaagtggtgaggcagctctgagggccgttgttcagtgcggggtctgacagaggaggctccgtgtctgcagctagtgtgtcaactcagcgtttctcctctcgtccctggaagagctaaagatggctgaatttctagatgaccaggaaactcgactgtgtgacaactgcaaaaaagaaattcctgtgtttaactttaccatccatgagatccactgtcaaaggaacattggtatgtgtcctacctgtaaggaaccatttcccaaatctgacatggagactcacatggctgcagaacactgtcaggtgacctgcaaatgtaacaagaagttggagaagaggctgttaaagaagcatgaggagactgagtgccctttgcggcttgctgtctgccagcactgtgatttagaactttccattctcaaactgaaggaacatgaagattattgtggtgcccggacggaactatgtggcaactgtggtcgcaatgtccttgtgaaagatctgaagactcaccctgaagtttgtgggagagagggggaggaaaagagaaatgaggttgccatacctcctaatgcatatgatgaatcttggggtcaggatggaatctggattgcatcccaactcctcagacaaattgaggctctggacccacccatgaggctgccgcgaaggcccctgagagcctttgaatcagatgttttccacaatagaactaccaaccaaaggaacattacagcccaggtttcaattcagaataatctgtttgaagaacaagagaggcaggaaaggaatagaggccaacagccccccaaagagggtggtgaagagagtgcaaacttggacttcatgttggccctaagtctgcaaaatgaaggccaagcctccagtgtggcagagcaggacttctggagggccgtatgtgaggccgaccagtctcatggcggtcccaggtctctcagtgacataaagggtgcagctgacgagatcatgttgccttgtgaattttgtgaggagctctacccagaggaactgctgattgaccatcagacaagctgtaacccttcacgtgccttaccttcactcaatactggcagctcttcccccagaggggtggaggaacctgatgtcatcttccagaacttcttgcaacaggctgcaagtaaccagttagactctttgatgggcctgagcaattcacaccctgtggaggagagcatcattatcccatgtgaattctgtggggtacagctggaagaggaggtgctgttccatcaccaggaccagtgtgaccaacgcccagccactgcaaccaaccatgtgacagaggggattcctagactggattcccagcctcaagagacctcaccagagctgcccaggaggcgtgtcagacaccagggagacctgtcttctggttacctggatgatactaagcaggaaacagctaatgggcccacctcctgtctgcctcccagccgacccattaacaatatgacagctacctataaccagctatcgagatcaacatcaggccccagacctgggtgccagcccagctctccttgtgtgccgaagctcagcaactcagacagccaggacatccaggggcggaatcgagacagccagaatggggccatagcccctgggcacgtttcagtgattcgccctcctcaaaatctctacccagaaaacattgtgccctctttctcccctgggccttcagggagatacggagctagtggtaggagtgaaggtggcaggaattcccgggtcacccctgcagctgccaactaccgcagcagaactgcaaaggcaaagccttccaagcaacagggagctggggatgcagaagaggaagaggaggagtaatggtgtctccagagactttacatcggttcctgtcttctgtgcacagcagcacttgccgctgtgcaggcccacctctttggctctttgggtgggagagtttttccagattttagatttttctaggttatggccattttgtgtcttttgaggttgtgctgtgggggtttgggtttgagggaagggagcagggtggcggttgaggaacgcttcagccttagctgctacctttcggcagcagtgaaatacaagctgcagcctcggctgccagggctcccttttgacttattgtcgccactgccccttggtgctgtgtggtcccagtggaaggaggggaagattttggaaacctggtagccaccagtaaggtgattctctgccctgttggggcctaaatttgggggcttttgggcaacctctccgtgtactgcgtctgtccacactcgattgggccccaggtgtgtatgaggcgctctggtaaggtgctcaggccagttgcaatgtctgtcagtaacgaggcttttgatgtgttgagctggaggtgagtggaccgggggctgtgttttaagctgcttccttggcatttggcatcactgccttctgttcccgggggagcatggatcttttgtcctcactgctttctaatggggagggctgagggctccctgtccccacagcaggtatgttgggctctgccccagccccacacttgctctgaaaaccaagtgtcagagccccttccccttgtttttattttactgttataataattattaacttccttgtaatagaaataaagtttgtacttgga

SEQ ID NO: 167193 - DNA, 532 bp, Artificial Sequence
  derived and/or modified sequence
agtgcggggtctgacagaggaggctccgtgtctgcagctagtgtgtcaactcagcgtttctcctctcgtccctgaaatgaaagagaaagttcatgtcttcctttgtggttttcaggaagagctaaagatggctgaatttctagatgaccaggaaactcgactgtgtgacaactgcaaaaaagaaattcctgtgtttaactttaccatccatgagatccactgtcaaaggaacattggtatgtgtcctacctgtaaggaaccatttcccaaatctgacatggagactcacatggctgcagaacactgtcaggtgacctgcaaatgtaacaagaagttggagaagaggctgttaaagaagcatgaggagactgagtgccctttgcggcttgctgtctgccagcactgtgatttagaactttccattctcaaactgaaggaacatgaagattattgtggtgcccggacggaactatgtggcaactgtggtcgcaatgtccttgtgaaagatctgaagactcaccctgaagtttgt

SEQ ID NO: 167194 - DNA, 1043 bp, Artificial Sequence
  derived and/or modified sequence
agaggaggctccgtgtctgcagctagtgtgtcaactcagcgtttctcctctcgtccctggaagagctaaagatggctgaatttctagatgaccaggaaactcgactgtgtgacaactgcaaaaaagaaattcctgtgtttaactttaccatccatgagatccactgtcaaaggaacattggtatgtgtcctacctgtaaggaaccatttcccaaatctgacatggagactcacatggctgcagaacactgtcaggtgacctgcaaatgtaacaagaagttggagaagaggctgttaaagaagcatgaggagactgagtgccctttgcggcttgctgtctgccagcactgtgatttagaactttccattctcaaactgaaggaacatgaagattattgtggtgcccggacggaactatgtggcaactgtggtcgcaatgtccttgtgaaagatctgaagactcaccctgaattgaagaacaagagaggcaggaaaggaatagaggccaacagccccccaaagagggtggtgaagagagtgcaaacttggacttcatgttggccctaagtctgcaaaatgaaggccaagcctccagtgtggcagagcaggacttctggagggccgtatgtgaggccgaccagtctcatggcggtcccaggtctctcagtgacataaagggtgcagctgacgagatcatgttgccttgtgaattttgtgaggagctctacccagaggaactgctgattgaccatcagacaagctgtaacccttcacgtgccttaccttcactcaatactggcagctcttcccccagaggggtggaggaacctgatgtcatcttccagaacttcttgcaacaggctgcaagtaaccagttagactctttgatgggcctgagcaattcacaccctgtggaggagagcatcattatcccatgtgaattctgtggggtacagctggaagaggaggtgctgttccatcaccaggaccagtgtgaccaacgcccagccactgcaaccaaccatgtgacagaggggattccta

SEQ ID NO: 167195 - DNA, 983 bp, Artificial Sequence
  derived and/or modified sequence
ggaggctccgtgtctgcagctagtgtgtcaactcagcgtttctcctctcgtccctgcctctaaagtggggaccaagactttcacctcttaggattgtagtcgggattaaaagattttcccggaagagctaaagatggctgaatttctagatgaccaggaaactcgactgtgtgacaactgcaaaaaagaaattcctgtgtttaactttaccatccatgagatccactgtcaaaggaacattggtatgtgtcctacctgtaaggaaccatttcccaaatctgacatggagactcacatggctgcagaacactgtcaggtgacctgcaaatgtaacaagaagttggagaagaggctgttaaagaagcatgaggagactgagtgccctttgcggcttgctgtctgccagcactgtgatttagaactttccattctcaaactgaaggaacatgaagattattgtggtgcccggacggaactatgtggcaactgtggtcgcaatgtccttgtgaaagatctgaagactcaccctgaagtttgtgggagagagggggaggaaaagagaaatgaggttgccatacctcctaatgcatatgatgaatcttggggtcaggatggaatctggattgcatcccaactcctcagacaaattgaggctctggacccacccatgaggctgccgcgaaggcccctgagagcctttgaatcagatgttttccacaatagaactaccaaccaaaggaacattacagcccaggtttcaattcagaataatctgtttgaagaacaagagaggcaggaaaggaatagaggccaacagccccccaaagagggtggtgaagagagtgcaaacttggacttcatgttggccctaagtctgcaaaatgaaggccaagcctccagtgtggcagagcaggacttctggagggccgtatgtgaggccgaccagtctcatggcggtcccaggtctctcagtgacataaagg

SEQ ID NO: 167196 - protein, 172 aa, Artificial Sequence
  derived and/or modified sequence
MMKLKSNQTRTYDGDGYKKRAACLCFRSESEEEVLLVSSSRHPDRWIVPGGGMEPEEEPSVAAVREVCEEAGVKGTLGRLVGIFENQERKHRTYVYVLIVTEVLEDWEDSVNIGRKREWFKIEDAIKVLQYHKPVQASYFETLRQGYSANNGTPVVATTYSVSAQSSMSGIR

SEQ ID NO: 167197 - DNA, 519 bp, Artificial Sequence
  derived and/or modified sequence
atgatgaagctgaagagcaaccagaccagaacctacgacggcgacggctacaagaagagagccgcctgcctgtgcttcagaagcgagagcgaggaggaggtgctgctggtgagcagcagcagacaccccgacagatggatcgtgcccggcggcggcatggagcccgaggaggagcccagcgtggccgccgtgagagaggtgtgcgaggaggccggcgtgaagggcaccctgggcagactggtgggcatcttcgagaaccaggagagaaagcacagaacctacgtgtacgtgctgatcgtgaccgaggtgctggaggactgggaggacagcgtgaacatcggcagaaagagagagtggttcaagatcgaggacgccatcaaggtgctgcagtaccacaagcccgtgcaggccagctacttcgagaccctgagacagggctacagcgccaacaacggcacccccgtggtggccaccacctacagcgtgagcgcccagagcagcatgagcggcatcagatag

SEQ ID NO: 167198 - DNA, 1364 bp, Artificial Sequence
  derived and/or modified sequence
gccttacgccgctgacgcatcgcgcccaagatggcggcgcggtcgtcgtcgggggtggcggcggcagagggggcggcggccctggcggcagcggagacggcagccgtgacggtggcagcggcggcgcgggacctgggcctgggggaatgaggcggccgcggcgggccagcggcggagccgtgtagcggagaagctccccctccctgcttcccttggccgagccgggggcgcgcgcgcacgcggccgtccagagcgggctccccacccctcgactcctgcgacccgcaccgcacccccacccgggcccggaggatgatgaagctcaagtcgaaccagacccgcacctacgacggcgacggctacaagaagcgggccgcatgcctgtgtttccgcagcgagagcgaggaggaggtgctactcgtgagcagtagtcgccatccagacagatggattgtccctggaggaggcatggagcccgaggaggagccaagtgtggcagcagttcgtgaagtctgtgaggaggctggagtaaaagggacattgggaagattagttggaatttttgagaaccaggagaggaagcacaggacgtatgtctatgtgctcattgtcactgaagtgctggaagactgggaagattcagttaacattggaaggaagagggaatggtttaaaatagaagacgccataaaagtgctgcagtatcacaaacccgtgcaggcatcatattttgaaacattgaggcaaggctactcagccaacaatggcaccccagtcgtggccaccacatactcggtttctgctcagagctcgatgtcaggcatcagatgactgaagacttcctgtaagagaaatggaaattggaaactagactgaagtgcaaatcttccctctcaccctggctctttccacttctcacaggcctcctctttcaaataaggcatggtgggcagcaaagaaagggtgtattgataatgttgctgtttggtgttaagtgatggggctttttcttctgtttttattgagggtgggggttgggtgtgtaatttgtaagtacttttgtgcatgatctgtccctccctcttcccacccctgcagtcctctgaagagaggccaacagccttcccctgccttggattctgaagtgttcctgtttgtcttatcctggccctggccagacgttttctttgatttttaattttttttttttattaaaagataccagtatgagatgaaaacttccaataatttgtcctataatgtgctgtacagttcagtagagtggtcactttcactgcagtatacatttatctacacattatatatcggacatataatatgtaaataaatgacttctagaaaga

SEQ ID NO: 167199 - DNA, 519 bp, Artificial Sequence
  derived and/or modified sequence
atgatgaaattgaagagtaaccagacacggacatacgacggagacggatacaagaaacgggccgcatgtctgtgtttcaggagcgagtccgaagaggaggttcttctcgtgtccagctctagacaccccgatcgttggatagttcccggcggaggaatggagccagaggaggaacccagcgtcgccgcagtgcgagaagtctgtgaagaagccggggtgaaaggaacccttggaagactcgtcgggatctttgagaaccaggagagaaagcacaggacatatgtctatgtactgattgtcacagaggtacttgaggactgggaggatagcgtgaatatcggacgaaaaagggagtggttcaaaattgaggacgctataaaagttttacaatatcacaaaccagttcaggcatcatatttcgaaacgctgcggcagggctattccgcaaacaatgggacgccagtcgtggccacgacttactcagtctcagcccagtcttcaatgagcggcattcgttag

SEQ ID NO: 167200 - DNA, 519 bp, Artificial Sequence
  derived and/or modified sequence
atgatgaagctgaagagcaaccagaccaggacctatgatggagatggctacaagaagagagctgcctgcctgtgcttccgctctgagagcgaggaggaggtgctgctggtgagcagcagccgccacccagaccgctggatcgtgcctgggggcggcatggagcctgaggaggagcccagcgtggccgctgtgcgggaggtgtgtgaggaggccggcgtgaagggcaccctgggccgcctggtgggcatctttgagaaccaggagaggaagcacaggacctacgtgtatgtgctgattgtgacagaggtgctggaggactgggaggacagcgtgaacattggaaggaagcgggagtggttcaagattgaagatgccatcaaggtgctgcagtaccacaagcctgtgcaggccagctactttgagaccctgcggcagggctacagcgccaacaacggcacccctgtggtggccaccacctacagcgtgtctgcccagagctccatgagcggcatcagatag

SEQ ID NO: 167201 - DNA, 519 bp, Artificial Sequence
  derived and/or modified sequence
atgatgaagctgaagagcaaccagacccggacctacgacggcgacggatataagaagcgcgccgcatgcctgtgcttccgctccgagtctgaggaggaagtcctgttggtgtcctccagtcggcaccccgatcgatggattgtccctggagggggcatggagcctgaggaagagccgagtgttgccgctgtgcgggaggtctgcgaggaggccggcgtgaaaggaacccttggccgattggtgggaatcttcgagaaccaggagcggaagcaccgtacctacgtgtacgtcctcatcgttaccgaagtcttggaagattgggaggattctgtgaacatcggcagaaaaagggaatggtttaagatcgaggacgctattaaggtcctgcagtatcacaagcccgtgcaggcatcttatttcgagacactgcgacaagggtattccgccaacaacggcacgccggttgtcgctaccacatatagcgtctctgcccagtccagcatgtctgggatccggtag

SEQ ID NO: 167202 - DNA, 519 bp, Artificial Sequence
  derived and/or modified sequence
atgatgaaactgaaaagcaatcagaccagaacatatgatggtgatgggtataaaaagcgagccgcatgcctgtgcttcagaagtgagagcgaggaggaggtactgttggtttccagcagccgacacccagatagatggatagtgcccggaggcggtatggaacctgaggaggaaccgagtgtggcggctgtaagagaggtctgcgaggaggccggtgtgaagggaaccctgggtcgcctggtggggatttttgaaaaccaggagcgaaagcaccggacctacgtgtacgtcctcatcgtgactgaagtcctggaggattgggaggatagtgtcaatatagggaggaagagggagtggttcaaaatagaagacgctatcaaagtcctccaatatcacaaacccgtacaagcctcctactttgagacgctgaggcagggatacagtgccaacaatggcacaccagtcgtggccactacgtattcggtgtcagctcagtcctctatgtcaggtattcggtag

SEQ ID NO: 167203 - protein, 333 aa, Artificial Sequence
  derived and/or modified sequence
MAAAAAGTATSQRFFQSFSDALIDEDPQAALEELTKALEQKPDDAQYYCQRAYCHILLGNYCVAVADAKKSLELNPNNSTAMLRKGICEYHEKNYAAALETFTEGQKLDSADANFSVWIKRCQEAQNGSESEVWTHQSKIKYDWYQTESQVVITLMIKNVQKNDVNVEFSEKELSALVKLPSGEDYNLKLELLHPIIPEQSTFKVLSTKIEIKLKKPEAVRWEKLEGQGDVPTPKQFVADVKNLYPSSSPYTRNWDKLVGEIKEEEKNEKLEGDAALNRLFQQIYSDGSDEVKRAMNKSFMESGGTVLSTNWSDVGKRKVEINPPDDMEWKKY

SEQ ID NO: 167204 - protein, 32 aa, Artificial Sequence
  derived and/or modified sequence
MAAAAAGPAASQRFFQSFSDALIDQDPQAALE

SEQ ID NO: 167205 - DNA, 1847 bp, Artificial Sequence
  derived and/or modified sequence
aagcgcgctagtagcagctctggcagaagcaacggtggcttcgagggatggcggcggctgcaacaggacctgcagcatcccagaggaactgactaaggctttggaacagaaaccagatgatgcacaatattatcgtcaaagagcttattgtcacattcttcttgggaattactgtggtgcagatgctaatttcagtgactggattaaaaggtgtcgaagctcagaatggctcggaatctgaggtgtttgtggagaattatgagaccctcgtgttttactggccctcgctgctgtgccttgccttcctgctgggccgcttcctgcatatgtttgtcaaggctctgagggtgcacctcggctgggagctccaggtggaagaaaaatctgtcctggaagtgcaccagggagagcacgtcaagcagctcctgaggataccccgccctcaagagaaaaaaaagtcttggttccaaaccaggatatatgagtgggatccctgctttcaatttccaagcagaatgattggaaccattgtgttggcattcatctgcctgtatcttttcattgtcatcgagttctgcgtgtttgtgtacgtgagagatgagttggatgtgcttgaaaacaacctggaaagctacatcaccttcacgaaccattcaggggtcctgaccccagtcatcctgcaggtgaaagagctgatcagtgtcaccaaaggagtctgggtggcgaccattttgcccgcgtatctcacgtgtgtgagctatctgttccacattttggtctgttacagaaagcacatgaagaggctatgggcaggagataaacattttcttcctttgaagttccataacccggcctcgtcggagagcatggtggccattgcaaggtactctggctggcaaatagcctatattctgtggggctacctcatcattcacatggtacagagcctatgtggcatggcaatcatgtacagcctggtgctacccatcgtccaaaccagggcctggaaatgctgcaagggctgggcattgggatccttacaatatccatcgttgtgggtctcatgatcctgcagatgtgtatcgctgccagcttcttcctacagccaaagctgggcacggctgacaagcagaagcccctggctctcaacaacaggaaagcgttccacaacttcaactactttctgttcttctacaacgtgctgctgggcctgggtgcctgcctttccaggctgctcatcagttgcctcctcggcatgtggctgattgcccgcatcgacaggaccatcatgcagagtggctatgagggagcagacatggggttcagtgcatggattgggatgctctacatggaccattatcacatcaaccctgtgcttgtcagcttttgccacatcctgatcacaaatcacagggagaagaagctgcagcagagcaccaaatactggtgcctaaatcaatcggcaggtccccatgtctcagctaggtccagaacaaggtggttcctgttgcagaccctaatcgacaacccaagactcaccatgcacagaaaattaaaattagggcacagttcccaggagtcccaaattctgatggcatgctcggagagctgacgctggcccccatcatctgctccaaagccaggctaggacatctgccaccaagagagggctcaatctaaccagcagctgtcccctgcaatgaaatgggatggcacaggcaccatccatgcagatggcagacaacaatggtcactcatgggatggccacctgggctgagggatgaagtttcaggactatttcactcccttggcaaaaaagattaaaaaactaaagaaaagtctgttg

SEQ ID NO: 167206 - DNA, 1002 bp, Artificial Sequence
  derived and/or modified sequence
atggcagctgccgccgctgggacggcgacatcccaacgcttttttcaaagctttagtgacgccctgatcgatgaagaccctcaggcggctctggaggaactgacaaaagcgctagaacagaagcccgatgacgcacagtactactgtcagagagcctactgccacatcttactgggcaattattgcgtcgccgtggctgatgcgaagaagtccctcgagctgaacccaaataattcgaccgccatgctgagaaagggtatctgtgagtatcacgaaaaaaattacgctgccgctctcgaaacattcactgagggccagaaattggattccgccgacgcaaatttttcagtgtggatcaaaagatgccaggaggctcagaatggctccgagagcgaagtgtggacccaccagtccaagatcaaatacgactggtatcagaccgagtcacaggttgtaatcactctgatgataaagaacgtccagaagaacgacgtgaacgtggagttttccgaaaaggagttgtccgctctggtcaaattaccatccggcgaggattataatctgaagctggagctgctgcatcccattattcccgagcaatccacttttaaggtgctttccaccaagatcgaaatcaaattgaagaaacccgaggcggtaaggtgggagaagttggaaggacagggtgatgttcccacacccaaacagttcgtggccgatgtcaaaaacctctaccccagctccagtccctatacacgcaactgggacaaactggttggcgagattaaggaagaagaaaaaaatgaaaagcttgagggggatgcagcactcaaccgtctttttcagcagatttactccgatggctccgacgaagtaaaacgcgcaatgaataaatcgttcatggagtctggcggtaccgttctgtccacaaattggtcagacgtcggcaagagaaaagtcgagataaacccacccgatgatatggaatggaagaaatattag

SEQ ID NO: 167207 - DNA, 1002 bp, Artificial Sequence
  derived and/or modified sequence
atggctgctgctgctgctggaacagccaccagccagcgcttcttccagagcttcagtgatgccctgattgatgaggacccccaggccgccctggaggagctgaccaaggccctggagcagaagccagatgatgcccagtactactgccagagggcctactgccacatcctgctgggcaactactgtgtggccgtggctgatgccaagaagagcctggagctgaaccccaacaacagcacagccatgctgaggaagggcatctgtgagtaccacgagaagaactatgctgctgccctggagaccttcacagagggccagaagctggacagcgcagatgccaacttctctgtgtggatcaagcgctgccaggaggcccagaatggaagtgaaagtgaggtgtggacccaccagagcaagatcaagtatgactggtaccagacagagagccaggtggtgatcaccctgatgatcaagaatgtgcagaagaatgatgtgaatgtggagttcagcgagaaggagctgagcgccctggtgaagctgcccagcggggaggactacaacctgaagctggagctgctgcaccccatcatccctgagcagagcaccttcaaggtgctgagcaccaagattgagatcaagctgaagaagccagaggccgtgcgctgggagaagctggagggccagggagatgtgcccacccccaagcagtttgtggctgatgtgaagaacctgtaccccagcagcagcccctacaccaggaactgggacaagctggtgggggagatcaaggaggaggagaagaatgagaagctggagggagatgctgccctgaacagactcttccagcagatctacagtgatggcagtgatgaggtgaagagggccatgaacaagagcttcatggagagcggcggcaccgtgctgagcaccaactggagcgatgtgggcaagaggaaggtggagatcaaccccccagatgacatggagtggaagaagtactag

SEQ ID NO: 167208 - DNA, 1002 bp, Artificial Sequence
  derived and/or modified sequence
atggccgccgccgccgccggcaccgccaccagccagcggttcttccagagcttcagcgacgcgctcatcgacgaagacccacaggcggccctcgaggagctaaccaaagcgctcgaacaaaagcctgacgacgctcagtactattgccaaagggcatattgtcacattttgctggggaattactgtgtcgcagtggccgacgcgaaaaaaagcctggaactgaatcctaataatagtacagcaatgctgcggaagggaatctgtgaataccatgagaaaaactacgcagccgctctggagacctttaccgaggggcagaaattggacagtgccgatgccaatttctctgtttggatcaagagatgtcaggaagcccagaacggttctgagtctgaggtgtggacccatcagagcaagattaaatacgactggtatcagacagagtcgcaagttgtgattacgcttatgattaagaacgtacagaaaaatgacgttaacgtagaatttagcgagaaggagctcagcgccttggtgaaactgccctcaggtgaagattataatctgaagttggaactcctgcaccccatcataccggaacagtccaccttcaaggtgctgtccaccaagattgagatcaagctgaagaagcccgaggccgtgaggtgggagaaactggagggacaaggcgatgtccctacacctaaacagtttgtggctgacgtgaagaatctgtacccatcttcaagcccatatacccggaactgggataagctggttggcgagataaaagaagaagagaagaacgagaagctcgagggcgatgctgccttgaataggctctttcaacaaatctactctgacggatctgatgaggtgaaaagggctatgaataaatcctttatggagtcaggggggaccgtgctgtccaccaattggtcggacgtcggcaaacgaaaagtggagattaacccaccagatgacatggagtggaagaagtactag

SEQ ID NO: 167209 - DNA, 1002 bp, Artificial Sequence
  derived and/or modified sequence
atggcagcagcagcagccggtaccgcaaccagccagaggttttttcaaagcttcagtgatgccctgattgatgaggatccacaggcagccctggaggagctgactaaggctctggagcagaaaccggatgacgcacagtattactgtcagagagcctattgccatatcctgctgggaaactactgcgtggcagtagcagacgcaaagaaatcactggagctgaaccctaataacagcacagcaatgctgaggaaagggatctgcgaataccacgagaagaactacgcagcagctctggagacctttaccgagggccaaaagttggacagcgccgatgccaacttcagcgtgtggatcaagcgctgccaagaagctcagaacggtagcgaatcagaagtctggacccaccaaagcaagatcaagtacgattggtatcaaactgaaagtcaggtcgtcattacgctgatgataaaaaatgtccaaaaaaacgacgtaaatgtagagttcagcgagaaggaactttcggccctggttaagctgccgagcggcgaggactataatttgaaactggagcttctgcaccccattatacccgaacaaagcacctttaaagtcttgagcactaagatagagataaagctgaaaaaaccagaagctgttcgctgggagaagctcgagggtcagggggacgtgcccaccccaaaacagtttgtggctgatgtgaaaaatctgtatcctagttcaagcccttatacgcgcaattgggacaaattggtaggagagatcaaggaagaggaaaagaacgaaaaactcgagggagatgctgctttaaacagactttttcaacagatctactccgatggcagtgacgaagttaaaagagctatgaacaagtcttttatggagagcggagggactgtgctgagtacgaactggtcggatgtgggcaagcggaaagttgaaatcaatcctcctgatgacatggaatggaagaaatactag

SEQ ID NO: 167210 - DNA, 1520 bp, Artificial Sequence
  derived and/or modified sequence
gaggtggtaaccgtgatagtagcagctccggcggcagcaacagcgactacgagggatggcggcggctgcagcaggaactgcaacatcccagaggtttttccagagcttctcggatgccctaatcgacgaggacccccaggcggcgttagaggagctgactaaggctttggaacagaaaccagatgatgcacagtattattgtcaaagagcttattgtcacattcttcttgggaattactgtgttgctgttgctgatgcaaagaagtctctagaactcaatccaaataattccactgctatgctgagaaaaggaatatgtgaataccatgaaaaaaactatgctgctgccctagaaacttttacagaaggacaaaaattagatagtgcagatgctaatttcagtgtctggattaaaaggtgtcaagaagctcagaatggctcagaatctgaggtgtggactcatcagtcaaaaatcaagtatgactggtatcaaacagaatctcaagtagtcattacacttatgatcaagaatgttcagaagaatgatgtaaatgtggaattttcagaaaaagagttgtctgctttggttaaacttccttctggagaggattacaatttgaaactggaacttcttcatcctataataccagaacagagcacgtttaaagtactttcaacaaagattgaaattaaactgaaaaagccagaggctgtgagatgggaaaagctagaggggcaaggagatgtgcctacgccaaaacaattcgtagcagatgtaaagaacctatatccatcatcatctccttatacaagaaattgggataaattggttggtgagatcaaagaagaagaaaagaatgaaaagttggagggagatgcagctttaaacagattatttcagcagatctattcagatggttctgatgaagtgaaacgtgccatgaacaaatcctttatggagtcgggtggtacagttttgagtaccaactggtctgatgtaggtaaaaggaaagttgaaatcaatcctcctgatgatatggaatggaaaaagtactaaataaattaatttgctctcatcgtattgtgtatattcacctaatgcccattgtgtattgatattgcattcttgaattttgaacactgaatatctttttgaaagattatacttctttacctctttgtgctttagaaattattttccttcaagtgttcaagtctaatgaagaatgaagataacattttatcacttctgtccttaaaggtttcagacatggtgaaactgaataaagcatgtcatttgctcctagatagattcattctatctagttgtggggatggagaaatctttaatggtatattttcggttattgccttatttttgatacagtattctgtcagtaatttattagacctggcagctttgggtgagcttagatttttcaccttcagtgttacattgtgtttgcttttaaaaactgcttttgaatggagttgtaaatacaatttttctatgaagatgt

SEQ ID NO: 167211 - DNA, 1002 bp, Artificial Sequence
  derived and/or modified sequence
atggccgccgccgccgccggcaccgccaccagccagagattcttccagagcttcagcgacgccctgatcgacgaggacccccaggccgccctggaggagctgaccaaggccctggagcagaagcccgacgacgcccagtactactgccagagagcctactgccacatcctgctgggcaactactgcgtggccgtggccgacgccaagaagagcctggagctgaaccccaacaacagcaccgccatgctgagaaagggcatctgcgagtaccacgagaagaactacgccgccgccctggagaccttcaccgagggccagaagctggacagcgccgacgccaacttcagcgtgtggatcaagagatgccaggaggcccagaacggcagcgagagcgaggtgtggacccaccagagcaagatcaagtacgactggtaccagaccgagagccaggtggtgatcaccctgatgatcaagaacgtgcagaagaacgacgtgaacgtggagttcagcgagaaggagctgagcgccctggtgaagctgcccagcggcgaggactacaacctgaagctggagctgctgcaccccatcatccccgagcagagcaccttcaaggtgctgagcaccaagatcgagatcaagctgaagaagcccgaggccgtgagatgggagaagctggagggccagggcgacgtgcccacccccaagcagttcgtggccgacgtgaagaacctgtaccccagcagcagcccctacaccagaaactgggacaagctggtgggcgagatcaaggaggaggagaagaacgagaagctggagggcgacgccgccctgaacagactgttccagcagatctacagcgacggcagcgacgaggtgaagagagccatgaacaagagcttcatggagagcggcggcaccgtgctgagcaccaactggagcgacgtgggcaagagaaaggtggagatcaacccccccgacgacatggagtggaagaagtactag

SEQ ID NO: 167212 - DNA, 194 bp, Artificial Sequence
  derived and/or modified sequence
cggttgatgtttctgcagaagttttcccccttggtcggtggcggagctgctgagcgcgatagtagcagctccggcggcagcaacattgactacgaggaatggcggcggctgccgcaggacctgcagcatcccagaggtttttccagagcttctcagatgctctaatcgaccaggacccccaggcggcgttagag

SEQ ID NO: 167213 - protein, 159 aa, Artificial Sequence
  derived and/or modified sequence
MTLEEVRGQDTVPESTARMQGAGKALHELLLSAQRQGCLTAGVYESAKVLNVDPDNVTFCVLAAGEEDEGDIALQIHFTLIQAFCCENDIDIVRVGDVQRLAAIVGAGEEAGAPGDLHCILISNPNEDAWKDPALEKLSLFCEESRSVNDWVPSITLPE

SEQ ID NO: 167214 - protein, 141 aa, Artificial Sequence
  derived and/or modified sequence
MQGAGKALHELLLSAQRQGCLTAGVYESAKVLNVDPDNVTFCVLAAGEEDEGDIALQIHFTLIQAFCCENDIDIVRVGDVQRLAAIVGAGEEAGAPGDLHCILISNPNEDAWKDPALEKLSLFCEESRSVNDWVPSITLPE

SEQ ID NO: 167215 - DNA, 480 bp, Artificial Sequence
  derived and/or modified sequence
atgaccctggaggaggtgagaggccaggacaccgtgcccgagagcaccgccagaatgcagggcgccggcaaggccctgcacgagctgctgctgagcgcccagagacagggctgcctgaccgccggcgtgtacgagagcgccaaggtgctgaacgtggaccccgacaacgtgaccttctgcgtgctggccgccggcgaggaggacgagggcgacatcgccctgcagatccacttcaccctgatccaggccttctgctgcgagaacgacatcgacatcgtgagagtgggcgacgtgcagagactggccgccatcgtgggcgccggcgaggaggccggcgcccccggcgacctgcactgcatcctgatcagcaaccccaacgaggacgcctggaaggaccccgccctggagaagctgagcctgttctgcgaggagagcagaagcgtgaacgactgggtgcccagcatcaccctgcccgagtag

SEQ ID NO: 167216 - DNA, 426 bp, Artificial Sequence
  derived and/or modified sequence
atgcagggcgccggcaaggccctgcacgagctgctgctgagcgcccagagacagggctgcctgaccgccggcgtgtacgagagcgccaaggtgctgaacgtggaccccgacaacgtgaccttctgcgtgctggccgccggcgaggaggacgagggcgacatcgccctgcagatccacttcaccctgatccaggccttctgctgcgagaacgacatcgacatcgtgagagtgggcgacgtgcagagactggccgccatcgtgggcgccggcgaggaggccggcgcccccggcgacctgcactgcatcctgatcagcaaccccaacgaggacgcctggaaggaccccgccctggagaagctgagcctgttctgcgaggagagcagaagcgtgaacgactgggtgcccagcatcaccctgcccgagtag

SEQ ID NO: 167217 - DNA, 480 bp, Artificial Sequence
  derived and/or modified sequence
atgacactggaggaggtgaggggacaggataccgttcccgagagcactgcaagaatgcagggcgcaggcaaggcattgcacgaactccttttgtccgctcagcggcaggggtgcctgacggcaggggtgtacgagagcgcaaaggtgttgaatgtcgatccagacaatgttacgttttgtgtcctggctgcaggagaagaggacgaaggagacattgctctgcaaattcattttacgttgattcaggccttttgttgcgagaatgatatagacattgttcgcgtaggggatgtgcagagactggcagctatcgtgggagccggcgaagaagccggggcacccggcgacctgcattgcattctgatcagtaatcccaatgaggatgcctggaaagacccagccttagaaaaacttagcctgttctgcgaggaatcgcgatcagtgaatgactgggttcctagcattacactgcccgagtag

SEQ ID NO: 167218 - DNA, 426 bp, Artificial Sequence
  derived and/or modified sequence
atgcagggggctggaaaagcccttcatgaactcctcctgagcgcccagcgccagggctgtcttacggctggagtgtacgaaagtgcgaaagtgctgaatgtggatccggacaacgtgacattctgcgttctcgctgcaggcgaggaagacgagggggacatcgcactccagatacacttcactcttatccaagctttctgctgtgaaaatgacatcgacatcgtcagagtcggcgacgtgcagcggctggccgccatcgttggggcaggcgaagaagcaggcgccccgggcgatctgcattgtattctcatatccaacccaaatgaggatgcttggaaggatcctgctttagagaaactctctctgttctgtgaagaaagccgatcagtgaatgactgggttccttcaatcactctccccgagtag

SEQ ID NO: 167219 - DNA, 1065 bp, Artificial Sequence
  derived and/or modified sequence
cactcgctggtggtgggcgcgccgtgctgagctctggctgtcagtgtgttcgcccgcgtcccctccgcgctctccgcttgtggataactagctgctggttgatcgcactatgactctggaagaagtccgcggccaggacacagttccggaaagcacagccaggatgcagggtgccgggaaagcgctgcatgagttgctgctgtcggcgcagcgtcagggctgcctcactgccggcgtctacgagtcagccaaagtcttgaacgtggaccccgacaatgtgaccttctgtgtgctggctgcgggtgaggaggacgagggcgacatcgcgctgcagatccattttacgctgatccaggctttctgctgcgagaacgacatcgacatagtgcgcgtgggcgatgtgcagcggctggcggctatcgtgggcgccggcgaggaggcgggtgcgccgggcgacctgcactgcatcctcatttcgaaccccaacgaggacgcctggaaggatcccgccttggagaagctcagcctgttttgcgaggagagccgcagcgttaacgactgggtgcccagcatcaccctccccgagtgacagcccggcggggaccttggtctgatcgacgtggtgacgccccggggcgcctagagcgcggctggctctgtggaggggccctccgagggtgcccgagtgcggcgtggagactggcaggcggggggggcgcctggagagcgaggaggcgcggcctcccgaggaggggcccggtggcggcagggccaggctggtccgagctgaggactctgcaagtgtctggagcggctgctcgcccaggaaggcctaggctaggacgttggcctcagggccaggaaggacagactggccgggcaggcgtgactcagcagcctgcgctcggcaggaaggagcggcgccctggacttggtacagttgcaggagcgtgaaggacttagccgactgcgctgctttttcaaaacggatccgggcaatgcttcgttttctaaaggatgctgctgttgaagctttgaattttacaataaactttttgaaacaaa

SEQ ID NO: 167220 - DNA, 977 bp, Artificial Sequence
  derived and/or modified sequence
gctgagctctggctgtcagtgtgttcgcccgcgtcccctccgcgctctccgcttgtggataactagctgctggttgatcgcactatgactctggaagaagtccgcggccaggacacagttccggaaagcacagccaggtgggtttcagggcgctgagaaagccgctggtcggtcggcgaccgtcagggttttccagggtgggaatccgcggggtaggaggggagcgcgggggtccgggcgccagatcccggttggagagccggggtgcaggcgctgagccgggattggagtgtggttggagttggggagccaagggtgtgtgccggtggccggggctggggtctccgccgcgccctccggccggctcccgctcactgcgctggctcctccgcaggatgcagggtgccgggaaagcgctgcatgagttgctgctgtcggcgcagcgtcagggctgcctcactgccggcgtctacgagtcagccaaagtcttgaacgtggaccccgacaatgtgaccttctgtgtgctggctgcgggtgaggaggacgagggcgacatcgcgctgcagatccattttacgctgatccaggctttctgctgcgagaacgacatcgacatagtgcgcgtgggcgatgtgcagcggctggcggctatcgtgggcgccggcgaggaggcgggtgcgccgggcgacctgcactgcatcctcatttcgaaccccaacgaggacgcctggaaggatcccgccttggagaagctcagcctgttttgcgaggagagccgcagcgttaacgactgggtgcccagcatcaccctccccgagtgacagcccggcggggaccttggtctgatcgacgtggtgacgccccggggcgcctagagcgcggctggctctgtggaggggccctccgagggtgcccgagtgcggcgtggagactggcaggcggggggggcgcctggagagcgaggaggcgcggcctcc

SEQ ID NO: 167221 - DNA, 480 bp, Artificial Sequence
  derived and/or modified sequence
atgaccctggaggaggtgcggggccaggacacagtgcctgagagcacagccaggatgcagggcgctgggaaggccctgcacgagctgctgctgagcgcccagaggcagggctgcctgacagctggggtgtatgagagcgccaaggtgctgaatgtggaccctgacaacgtgaccttctgtgtgctggccgccggggaggaggatgaaggagacatcgccctgcagatccacttcaccctcatccaggccttctgctgtgaaaatgacatcgacatcgtgcgggtgggagatgtgcagaggctggccgccatcgtgggcgctggggaggaggccggggcccctggggacctgcactgcatcctgatcagcaaccccaatgaagatgcctggaaggaccctgccctggagaagctgagcctcttctgtgaggagagccgctctgtgaatgactgggtgcccagcatcaccctgcctgagtag

SEQ ID NO: 167222 - DNA, 426 bp, Artificial Sequence
  derived and/or modified sequence
atgcagggcgctgggaaggccctgcacgagctgctgctgagcgcccagaggcagggctgcctgacagctggggtgtatgagagcgccaaggtgctgaatgtggaccctgacaacgtgaccttctgtgtgctggccgccggggaggaggatgaaggagacatcgccctgcagatccacttcaccctcatccaggccttctgctgtgaaaatgacatcgacatcgtgcgggtgggagatgtgcagaggctggccgccatcgtgggcgctggggaggaggccggggcccctggggacctgcactgcatcctgatcagcaaccccaatgaagatgcctggaaggaccctgccctggagaagctgagcctcttctgtgaggagagccgctctgtgaatgactgggtgcccagcatcaccctgcctgagtag

SEQ ID NO: 167223 - DNA, 480 bp, Artificial Sequence
  derived and/or modified sequence
atgaccctggaggaggtgcggggccaggacaccgtgcccgagagcaccgcaaggatgcagggcgctggaaaagctctgcatgaactccttttgtcggctcaaaggcaaggatgcctcacggctggcgtctacgagagcgcaaaggtgctgaacgtggatcccgataacgtgaccttctgcgtgttggcggccggagaggaagacgagggcgacattgccctccaaatacatttcaccctgatccaggccttttgctgtgaaaatgatatcgatatagtaagagtgggagacgtgcagagactagccgctatagtgggtgcgggggaggaagcaggggccccaggcgaccttcactgcatcctgatctcaaatccaaacgaagatgcttggaaagacccagccttggagaagctgtccctgttttgtgaagagtcccgatccgtgaatgactgggtgcccagtattaccctgccagagtag

SEQ ID NO: 167224 - DNA, 426 bp, Artificial Sequence
  derived and/or modified sequence
atgcagggcgccggcaaggccctgcacgagctgctgctgagcgcccaaagacagggctgcttgacagctggggtgtacgaatccgcaaaagtgttaaacgtcgatccagacaatgtgacattttgtgttctggctgccggcgaagaagacgagggtgatatcgcgcttcagattcacttcacactgatccaagccttctgctgtgaaaacgatattgacatcgttcgagtcggggatgttcagagactggctgctattgtgggcgccggcgaagaagccggcgcccccggcgatctacattgtatcctcatttccaatcccaacgaagacgcatggaaggaccccgccctggagaaactgagcctcttttgcgaagagtcacggtctgtgaacgactgggttccttctattacactgccagagtag

SEQ ID NO: 167225 - DNA, 480 bp, Artificial Sequence
  derived and/or modified sequence
atgactctcgaagaagtacgaggccaggatactgttcctgagagtacagctaggatgcagggcgctggcaaggctctgcacgaactgctgctgtcagcccagaggcaaggctgcctgaccgccggagtctacgagtcggccaaggtcctcaatgtggacccggataacgtgacattctgtgtactggccgctggggaggaggacgagggggacatcgctttacaaatacactttacactgatccaagccttctgctgcgaaaacgatatcgatattgtgagagttggcgacgttcagcggctggcggcaattgtcggagcaggcgaagaggccggagcccctggggacctccattgcattctcatctcaaatcccaacgaggatgcctggaaggatcctgccctggagaaattgagcctattttgtgaggagtctcgcagtgtaaatgattgggtcccgtcaatcacgttaccagaatag

SEQ ID NO: 167226 - DNA, 426 bp, Artificial Sequence
  derived and/or modified sequence
atgcagggcgcagggaaggcactgcatgagctcctgctatcggcccagagacaaggatgtctgacagccggagtttacgagagtgccaaagtgttgaatgttgacccagacaacgtgaccttttgtgtgttggctgctggagaggaagatgagggtgacatcgccttacagattcactttaccctgatccaggctttttgttgtgaaaacgacattgatatcgtaagagttggggacgtacaacgacttgccgcaatagtgggagcaggtgaggaggctggtgccccaggcgatcttcattgcatcctgatcagcaacccaaatgaggatgcctggaaagatccagcgcttgaaaagctctctctgttctgtgaggagagcaggtcggtcaatgattgggtgccaagtatcacattgcccgaatag

SEQ ID NO: 167227 - protein, 1098 aa, Artificial Sequence
  derived and/or modified sequence
MAERGGDGGESERFNPGELRMAQQQALRFRGPAPPPNAVMRGPPPLMRPPPPFGMMRGPPPPPRPPFGRPPFDPNMPPMPPPGGIPPPMGPPHLQRPPFMPPPMSSMPPPPGMMFPPGMPPVTAPGTPALPPTEEIWVENKTPDGKVYYYNARTRESAWTKPDGVKVIQQSELTPMLAAQAQVQAQAQAQAQAQAQAQAQAQAQAQAQAQAQAQAQAQAQAQAQAQAQAQAQAQAQAQAQAQVQAQVQAQVQAQAVGASTPTTSSPAPAVSTSTSSSTPSSTTSTTTTATSVAQTVSTPTTQDQTPSSAVSVATPTVSVSTPAPTATPVQTVPQPHPQTLPPAVPHSVPQPTTAIPAFPPVMVPPFRVPLPGMPIPLPGVAMMQIVSCPYVKTVATTKTGVLPGMAPPIVPMIHPQVAIAASPATLAGATAVSEWTEYKTADGKTYYYNNRTLESTWEKPQELKEKEKLEEKIKEPIKEPSEEPLPMETEEEDPKEEPIKEIKEEPKEEEMTEEEKAAQKAKPVATAPIPGTPWCVVWTGDERVFFYNPTTRLSMWDRPDDLIGRADVDKIIQEPPHKKGMEELKKLRHPTPTMLSIQKWQFSMSAIKEEQELMEEINEDEPVKAKKRKRDDNKDIDSEKEAAMEAEIKAARERAIVPLEARMKQFKDMLLERGVSAFSTWEKELHKIVFDPRYLLLNPKERKQVFDQYVKTRAEEERREKKNKIMQAKEDFKKMMEEAKFNPRATFSEFAAKHAKDSRFKAIEKMKDREALFNEFVAAARKKEKEDSKTRGEKIKSDFFELLSNHHLDSQSRWSKVKDKVESDPRYKAVDSSSMREDLFKQYIEKIAKNLDSEKEKELERQARIEASLREREREVQKARSEQTKEIDREREQHKREEAIQNFKALLSDMVRSSDVSWSDTRRTLRKDHRWESGSLLEREEKEKLFNEHIEALTKKKREHFRQLLDETSAITLTSTWKEVKKIIKEDPRCIKFSSSDRKKQREFEEYIRDKYITAKADFRTLLKETKFITYRSKKLIQESDQHLKDVEKILQNDKRYLVLDCVPEERRKLIVAYVDDLDRRGPPPPPTASEPTRRSTK

SEQ ID NO: 167228 - DNA, 4233 bp, Artificial Sequence
  derived and/or modified sequence
agacgtcgggtcggcgggtggatgaacgcggccctctgtaatggcggagcgtggcggggacgggggcgagagtgaacgattcaacccgggggagctcaggatggcccaacagcaggccttgaggttccgaggtccggctcccccaccaaatgcagtgatgcgaggcccaccacctctgatgcgacctcctccaccttttggtatgatgcgaggccctcctccaccaccacggccgccctttggacgtcctccttttgatcctaatatgccgccaatgcctcctccaggagggatacctccacctatgggccctccacacctccagagaccacctttcatgcctcctcccatgagttccatgcctcctcctccgggtatgatgtttccaccaggaatgcctcctgtgactgctcctggtactccagcactacctcctacggaggagatatgggttgaaaataaaactccagatgggaaggtttattattataatgctcggacacgtgaatctgcatggaccaagccagatggagttaaggttattcagcaatcagaactgacacctatgcttgcagcccaggcacaggttcaggctcaggcccaggcgcaggctcaggcccaggcgcaggctcaggcccaggcacaagctcaggcccaggctcaggctcaggcccaggcccaggcccaggcccaggcccaggcccaagcccaagcccaggcccaggctcaggctcaggcacaagctcaggcccaggcccaggctcaggtccaggcccaggtccaggcacaagtgcaagcacaagcagttggagcttccacccctacgaccagtagcccagcacctgcagtatccacttcaacatcatcatccaccccttcctctaccacttctaccacaacaactgctacttcagttgcgcagacagtatcaacacccacaacacaagatcagaccccaagttctgctgtttcagttgccacgcctacagttagtgtttcaactcctgctcctacagccacacctgtgcaaaccgttccccagccgcaccctcagacgttacctcctgctgttcctcattcagtacctcagccaacaacagcaatacctgcttttccaccagtaatggtacctccgtttcgtgttccccttcctggcatgccaattccacttccaggtgtagcaatgatgcaaatagtcagctgcccgtatgtaaagacagtcgctaccaccaagaccggtgtattgccaggaatggcccctcctatcgtacccatgatacatccccaggttgctattgcagcttcacctgctaccttagctggagcaacagcagtttctgaatggactgaatataaaacagcagatgggaagacatattattataataatagaacattagaatcaacctgggaaaaaccccaagaactaaaggaaaaagaaaagttagaagagaagattaaagagccaattaaagaaccctctgaagagcctctgccaatggagacggaggaggaggatcctaaagaagagcctataaaggagataaaggaggagcccaaagaagaggagatgactgaagaagaaaaggctgcccagaaggcaaagccagttgctactgctcctattcctggtactccatggtgtgtcgtttggactggtgatgagcgggtcttcttttataatcccaccactcgtctttctatgtgggaccgacctgatgatctgattggcagggcagatgttgacaaaattattcaggagccccctcataaaaaaggaatggaggaattgaagaaactaaggcacccaactccgacaatgctgtcgatccaaaagtggcaattctctatgagtgcaattaaagaggaacaagaattaatggaagaaattaatgaagatgagcctgttaaagcaaaaaaacggaagagagacgataataaagacattgactcagagaaagaagctgccatggaagctgaaattaaagctgcccgagaaagggccattgtccctctggaggctcgaatgaagcagttcaaggacatgctgctagagagaggggtgtctgctttttcaacgtgggagaaggagttgcacaagatagtttttgatccccggtacttacttctcaatcctaaagagagaaaacaggtgtttgatcagtatgtaaagaccagggcagaggaagaacgcagggaaaagaaaaataaaataatgcaagccaaggaagatttcaaaaaaatgatggaagaagcaaaatttaatccaagagcaacttttagtgaatttgcagccaagcatgctaaagattcaagattcaaagcaattgaaaagatgaaagaccgagaagccttgtttaatgagtttgtggccgctgctaggaagaaagagaaagaagattcgaagaccagaggtgagaagattaaatcggatttctttgaactattatctaatcatcacttggacagtcagtctcgatggagcaaagtaaaagacaaagtagaaagtgatccacgttacaaagcagtagatagttcatcaatgagagaagaccttttcaaacagtacattgaaaaaatagccaagaatttagactcagaaaaagaaaaggagcttgaaaggcaagcccgcattgaggcaagccttcgagaacgagaaagggaggttcaaaaggcccgttcagaacaaacaaaagaaatagatcgagagagagagcagcacaaacgagaagaagctatccagaatttcaaagctcttctgtctgacatggtacgttcttcagatgtgtcatggtctgatactcgtaggaccctccgaaaagatcaccgctgggaatctggatccttattggaaagagaggagaaagagaagctttttaatgaacacattgaagcacttaccaaaaaaaagagagagcactttaggcaacttctggatgaaacttctgcaattaccttaacatccacgtggaaagaagtaaaaaaaatcattaaggaagatcctcgatgtattaagttctcctccagtgacaggaaaaaacaaagagaatttgaagaatatatcagagacaaatatatcacagccaaagctgacttcaggacgcttttgaaagagaccaaatttataacatatagatccaaaaaattaatccaagaatcagatcagcacctgaaagatgtagaaaaaattttacagaatgacaaacggtatctagtactggactgtgtgccagaggagaggcgtaaactgattgtggcatatgttgatgacctggatcgccggggtccacccccacctcccacagcatcggagcccacgagacgatcaacaaaataattctaaatactcttccataggggcatctattcaaaatgcttgcatgagccaattttcaggtttttacatatatgtgcattagtcaacctattgcgaaaccatctgacaaacagaaggagaagcatttgtgaacagtttctgaacagaacactttggaaatatttatgcttttctttgtgtggcatgactgacatacatactcaaatataggctgtctctagtaaatcttaaaatcttgaagctaaaattcatccttttatgaggtgtggaagtcagtgacttggtgacgttcttcctagcagtgttaatacatgcaagaagtaagagcatttgtggcttgaacttgccagatgcaaataccacagactccaagaaaacccgagttggggtttgttttgttttgattttttttttttaaagcgggtaaaagagaaaacactgaaaattgaattcttatcttccagaggctacaattattataatggacaatacttttacctttgtctctaaagatcagattagttttatttgttcacttacgtgctttgattatcccctctgaattatagaccgagtcttgttgtttagcctaagagaagatttatgtagtaatttcttctcaggtatggaaccacggtcataactaacatgttggccagaatagaaccactggttaaacatattttattcaccattaagtgatctttatcaatattctggattagacaacaaattacctttctgggtgtttcttgtaaactatactcctgtttgaatgttaaactttgttgctaaagtttaattttaagatgtttgaatgttcagtttatgtatttgaactacaataaaccaaccctttttataaaaaaaaaaaaaaaaaaaaaaaaaaaaaaaaa

SEQ ID NO: 167229 - DNA, 3297 bp, Artificial Sequence
  derived and/or modified sequence
atggccgagagaggcggcgacggcggcgagagcgagagattcaaccccggcgagctgagaatggcccagcagcaggccctgagattcagaggccccgcccccccccccaacgccgtgatgagaggccccccccccctgatgagaccccccccccccttcggcatgatgagaggccccccccccccccccagaccccccttcggcagaccccccttcgaccccaacatgccccccatgcccccccccggcggcatccccccccccatgggccccccccacctgcagagaccccccttcatgcccccccccatgagcagcatgccccccccccccggcatgatgttcccccccggcatgccccccgtgaccgcccccggcacccccgccctgccccccaccgaggagatctgggtggagaacaagacccccgacggcaaggtgtactactacaacgccagaaccagagagagcgcctggaccaagcccgacggcgtgaaggtgatccagcagagcgagctgacccccatgctggccgcccaggcccaggtgcaggcccaggcccaggcccaggcccaggcccaggcccaggcccaggcccaggcccaggcccaggcccaggcccaggcccaggcccaggcccaggcccaggcccaggcccaggcccaggcccaggcccaggcccaggcccaggcccaggcccaggcccaggcccaggcccaggcccaggtgcaggcccaggtgcaggcccaggtgcaggcccaggccgtgggcgccagcacccccaccaccagcagccccgcccccgccgtgagcaccagcaccagcagcagcacccccagcagcaccaccagcaccaccaccaccgccaccagcgtggcccagaccgtgagcacccccaccacccaggaccagacccccagcagcgccgtgagcgtggccacccccaccgtgagcgtgagcacccccgcccccaccgccacccccgtgcagaccgtgccccagccccacccccagaccctgccccccgccgtgccccacagcgtgccccagcccaccaccgccatccccgccttcccccccgtgatggtgccccccttcagagtgcccctgcccggcatgcccatccccctgcccggcgtggccatgatgcagatcgtgagctgcccctacgtgaagaccgtggccaccaccaagaccggcgtgctgcccggcatggccccccccatcgtgcccatgatccacccccaggtggccatcgccgccagccccgccaccctggccggcgccaccgccgtgagcgagtggaccgagtacaagaccgccgacggcaagacctactactacaacaacagaaccctggagagcacctgggagaagccccaggagctgaaggagaaggagaagctggaggagaagatcaaggagcccatcaaggagcccagcgaggagcccctgcccatggagaccgaggaggaggaccccaaggaggagcccatcaaggagatcaaggaggagcccaaggaggaggagatgaccgaggaggagaaggccgcccagaaggccaagcccgtggccaccgcccccatccccggcaccccctggtgcgtggtgtggaccggcgacgagagagtgttcttctacaaccccaccaccagactgagcatgtgggacagacccgacgacctgatcggcagagccgacgtggacaagatcatccaggagcccccccacaagaagggcatggaggagctgaagaagctgagacaccccacccccaccatgctgagcatccagaagtggcagttcagcatgagcgccatcaaggaggagcaggagctgatggaggagatcaacgaggacgagcccgtgaaggccaagaagagaaagagagacgacaacaaggacatcgacagcgagaaggaggccgccatggaggccgagatcaaggccgccagagagagagccatcgtgcccctggaggccagaatgaagcagttcaaggacatgctgctggagagaggcgtgagcgccttcagcacctgggagaaggagctgcacaagatcgtgttcgaccccagatacctgctgctgaaccccaaggagagaaagcaggtgttcgaccagtacgtgaagaccagagccgaggaggagagaagagagaagaagaacaagatcatgcaggccaaggaggacttcaagaagatgatggaggaggccaagttcaaccccagagccaccttcagcgagttcgccgccaagcacgccaaggacagcagattcaaggccatcgagaagatgaaggacagagaggccctgttcaacgagttcgtggccgccgccagaaagaaggagaaggaggacagcaagaccagaggcgagaagatcaagagcgacttcttcgagctgctgagcaaccaccacctggacagccagagcagatggagcaaggtgaaggacaaggtggagagcgaccccagatacaaggccgtggacagcagcagcatgagagaggacctgttcaagcagtacatcgagaagatcgccaagaacctggacagcgagaaggagaaggagctggagagacaggccagaatcgaggccagcctgagagagagagagagagaggtgcagaaggccagaagcgagcagaccaaggagatcgacagagagagagagcagcacaagagagaggaggccatccagaacttcaaggccctgctgagcgacatggtgagaagcagcgacgtgagctggagcgacaccagaagaaccctgagaaaggaccacagatgggagagcggcagcctgctggagagagaggagaaggagaagctgttcaacgagcacatcgaggccctgaccaagaagaagagagagcacttcagacagctgctggacgagaccagcgccatcaccctgaccagcacctggaaggaggtgaagaagatcatcaaggaggaccccagatgcatcaagttcagcagcagcgacagaaagaagcagagagagttcgaggagtacatcagagacaagtacatcaccgccaaggccgacttcagaaccctgctgaaggagaccaagttcatcacctacagaagcaagaagctgatccaggagagcgaccagcacctgaaggacgtggagaagatcctgcagaacgacaagagatacctggtgctggactgcgtgcccgaggagagaagaaagctgatcgtggcctacgtggacgacctggacagaagaggccccccccccccccccaccgccagcgagcccaccagaagaagcaccaagtag

SEQ ID NO: 167230 - DNA, 3297 bp, Artificial Sequence
  derived and/or modified sequence
atggccgagcgtggtggggacgggggagaatccgagcggttcaaccccggagaactccgaatggctcagcagcaggcactgaggttccgcgggccagcccccccacccaacgcagtgatgcgaggtccaccacccctgatgcgccctcctccgccattcgggatgatgcggggcccacctccccctccccggccgcccttcggaaggccgcccttcgatcctaacatgccacctatgcccccgccggggggtattccgccacctatgggcccgccacacctccagaggcctccttttatgcccccaccaatgtcctccatgccaccaccccccggcatgatgtttccccccggaatgcccccagttactgcgccaggcacccctgctcttccacccacagaggagatctgggtggaaaacaagaccccagatggtaaggtctattactataatgcgcgaacgcgggagtccgcttggactaaacccgatggggtgaaagtcatccaacagtccgaattgacccccatgctggccgcacaggctcaggtccaggcccaggcacaggctcaggcacaggcgcaggcccaggctcaggcacaagcccaggcacaggcccaggcccaggcccaggcccaggcccaggctcaggcgcaggctcaggcccaggcccaggctcaggcacaggcccaagctcaggcgcaagcgcaggcccaggcccaggcccaggtacaggcccaggtgcaggctcaggtccaagcccaggcagtcggagcttccacacctacaacttcgagcccggccccggccgtctccacgtctaccagctccagtacaccatcaagcactacgagcaccacaactactgcaacgtccgtcgcgcaaactgtgtccactccaactactcaggatcagacaccatcctctgctgtgagtgtggctaccccaaccgtgtcagtaagtacgccagcaccaacagctacccctgttcagactgtccctcagccacatccacagactctgccgccagccgtcccccacagcgtgcctcagcctacgactgccattcccgcgtttcctccggtcatggttcctccattccgggtgcctctacccggaatgccgataccacttccaggggttgccatgatgcagattgtgagttgcccctacgtgaagactgtggccaccaccaagacaggcgtactgccaggcatggccccacccatcgtcccaatgatccacccccaagtcgcaattgcagcatctcccgctacactggccggcgccaccgctgtgtcggagtggacagaatacaaaactgctgatggcaagacctactactacaacaaccgcacgttagaatcaacatgggaaaagccccaggaactgaaagaaaaagagaaacttgaggaaaagattaaggagcccatcaaggagccaagcgaagagccgcttccaatggaaactgaagaggaggatccgaaagaggagcccattaaggagattaaagaggaaccaaaggaggaggagatgactgaggaggagaaggcggctcagaaggcgaaacctgtagccacagcgcctatcccgggaacaccatggtgtgtagtgtggacaggagacgagcgcgtctttttctacaacccgaccactcgcctgtccatgtgggataggccagatgatctgatcggtcgcgctgatgttgacaaaatcattcaggaaccaccccacaagaaaggcatggaagagttgaagaagctgagacatccgactccaacgatgctgagtattcaaaagtggcaattttccatgtccgcgatcaaggaagaacaagagctgatggaggagatcaatgaggatgaacccgtgaaagccaagaaaagaaagcgcgacgataacaaggacattgattctgagaaggaggccgcgatggaggcagaaattaaagccgcgcgggaacgggcgatagtgcccctggaggcgcgtatgaagcagttcaaggacatgttattagagcggggggtgtccgccttctctacgtgggagaaagagctgcacaagatagtatttgacccaaggtacctgctactgaacccaaaagagaggaagcaggtttttgaccagtatgttaagacccgggcagaggaagagcgcagggagaagaaaaacaagataatgcaggctaaggaggatttcaagaaaatgatggaggaggccaagtttaatccgagagccaccttttccgaattcgcagccaagcatgcaaaagatagcaggtttaaggcgatcgaaaagatgaaagatcgggaggctctatttaatgagttcgtcgcagctgcaaggaagaaggagaaggaggattctaagactagaggtgaaaaaataaagagcgactttttcgagctgctatccaaccaccacttggatagtcagtctagatggtccaaggtcaaggacaaggtggaaagcgacccacggtacaaggccgtggactcctctagtatgcgtgaggacctgtttaagcagtatattgaaaaaattgccaagaacctcgacagcgagaaggaaaaagaacttgaacgccaggctaggattgaggcctccctccgggaacgcgagagggaagtgcagaaggcccgctccgagcagacaaaagagatcgacagagagagggaacagcacaaacgggaagaggctatccaaaactttaaagcactcttatctgacatggtaagaagctccgatgtatcttggtcagataccagacgcaccctgcgcaaagaccacagatgggagagtggaagtctcctcgagagagaggaaaaggaaaaactgtttaacgaacacatcgaagccctcactaagaagaagagagagcatttcaggcagttgctggatgaaacctctgcaatcaccctgacctccacttggaaggaggtcaaaaagattattaaagaggatcccaggtgcattaaattttccagttctgaccgtaaaaaacagagggaatttgaagagtacatccgcgataagtatattaccgccaaagctgacttcaggaccctcttaaaggaaactaagtttattacttatcgctcaaagaagttaattcaggaaagcgaccagcatctgaaggatgtagagaaaattctgcaaaatgataaaagatatctcgtccttgattgcgtccccgaagagcgccggaaactgatcgtcgcttacgtggatgacctagacaggcgggggcccccgccccctcccaccgcatccgaacctacaaggcgttctactaaatag

SEQ ID NO: 167231 - DNA, 3297 bp, Artificial Sequence
  derived and/or modified sequence
atggccgagagaggaggagatggaggagagagcgagcgcttcaaccctggagagctgaggatggcccagcagcaggccctgcgcttccggggccctgcccctcctccaaatgctgtgatgaggggccccccacccctgatgaggcctcctcctccatttggcatgatgaggggccccccacctccaccccggcccccatttggccggcccccatttgaccccaacatgccacccatgcctcctcctgggggcatccccccacccatgggccccccccacctgcagaggcctcccttcatgcccccacccatgagctccatgcctcctcctcctggcatgatgttccccccaggcatgcctcctgtgacagcccctggcaccccagccctgcccccaacagaggagatctgggtggagaacaagaccccagatggcaaggtgtactactacaatgcccggacccgggagagcgcctggaccaagccagatggagtgaaggtgatccagcagagcgagctgacccccatgctggccgcccaggcccaggtgcaggcccaggcccaggcccaggcccaggcccaggcccaggcccaggcccaggcccaggcccaggcccaggcccaggcccaggcccaggcccaggcccaggcccaggcccaggcccaggcccaggcccaggcccaggcccaggcccaggcccaggcccaggcccaggcccaggcccaggtgcaggcccaggtgcaggcccaggtgcaggcccaggccgtgggcgccagcacccccaccaccagcagccctgccccagctgtgtccaccagcaccagcagcagcacccccagcagcaccaccagcaccaccaccacagccacctctgtggcccagacagtgtccacccccaccacccaggaccagacccccagcagcgctgtgtctgtggccacccccaccgtgtctgtgtccaccccagcccccacagccacccctgtgcagacagtgccccagccccacccccagaccctgcccccagctgtgccccacagcgtgccccagcccaccacagccatcccagccttcccccctgtgatggtgccccccttccgggtgcccctgcccggcatgcccatccccctgcccggggtggccatgatgcagatcgtgtcctgcccctacgtgaagacagtggccaccaccaagacaggagtgctgcccggcatggccccacccatcgtgcccatgatccacccccaggtggccatcgccgccagccctgccaccctggccggggccacagctgtgtctgagtggacagagtacaagacagcagatggcaagacctactactacaacaacagaaccctggagagcacctgggagaagccccaggagctgaaggagaaggagaagctggaggagaagatcaaggagcccatcaaggagcccagcgaggagcccctgcccatggagacagaggaggaggaccccaaggaggagcccatcaaggagatcaaggaggagcccaaggaggaggagatgacagaggaggagaaggccgcccagaaggccaagcctgtggccacagcccccatccctggcaccccctggtgtgtggtgtggacaggagatgagagggtcttcttctacaaccccaccacccggctgtccatgtgggacagaccagatgacctgattggccgggcagatgtggacaagatcatccaggagcccccccacaagaagggcatggaggagctgaagaagctgcggcaccccacccccaccatgctgagcatccagaagtggcagttctccatgtctgccatcaaggaggagcaggagctgatggaggagatcaatgaagatgagcctgtgaaggccaagaagaggaagagagatgacaacaaggacatcgacagcgagaaggaggccgccatggaggccgagatcaaggccgcccgggagcgggccatcgtgcccctggaggccaggatgaagcagttcaaggacatgctgctggagcggggcgtgtctgccttcagcacctgggagaaggagctgcacaagatcgtgtttgacccccgctacctgctgctgaaccccaaggagaggaagcaggtgtttgaccagtatgtgaagaccagggctgaggaggagcggcgggagaagaagaacaagatcatgcaggccaaggaggacttcaagaagatgatggaggaggccaagttcaacccccgggccaccttcagcgagtttgctgccaagcacgccaaggacagccgcttcaaggccatcgagaagatgaaggaccgggaggccctcttcaatgaatttgtggccgccgccaggaagaaggagaaggaggacagcaagaccagaggagagaagatcaagagtgacttctttgagctgctgagcaaccaccacctggacagccagagccgctggagcaaggtgaaggacaaggtggagagtgacccccgctacaaggctgtggacagcagctccatgagagaagatctcttcaagcagtacatcgagaagatcgccaagaacctggacagcgagaaggagaaggagctggagcggcaggccagaattgaggccagcctgcgggagcgggagcgggaggtgcagaaggcccggtctgagcagaccaaggagattgaccgggagcgggagcagcacaagcgggaggaggccatccagaacttcaaggccctgctgagtgacatggtgcgcagcagtgatgtgtcctggagcgacaccaggaggaccctgaggaaggaccaccgctgggagagcggcagcctgctggagcgggaggagaaggagaagctgttcaatgagcacatcgaggccctgaccaagaagaagcgggagcacttccggcagctgctggatgagaccagcgccatcaccctgaccagcacctggaaggaggtgaagaagatcatcaaggaggacccccgctgcatcaagttcagcagcagtgacaggaagaagcagcgggagtttgaggagtacatccgggacaagtacatcacagccaaggctgacttccgcaccctgctgaaggagaccaagttcatcacctaccgcagcaagaagctgatccaggagagtgaccagcacctgaaggatgtggagaagatcctgcagaatgacaagcgctacctggtgctggactgtgtgcctgaggagaggaggaagctgattgtggcctacgtggatgacctggaccggcggggccccccacctccacccacagccagcgagcccacccggcgcagcaccaagtag

SEQ ID NO: 167232 - DNA, 3297 bp, Artificial Sequence
  derived and/or modified sequence
atggccgagcggggcggcgacggcggcgagagcgagcggttcaacccaggcgagctccggatggctcagcagcaggcactgaggttccgtgggcctgcaccccccccaaatgccgtgatgcgcgggccccctcccctcatgagaccacccccccctttcgggatgatgagaggaccccccccgcctcccagaccaccttttgggagaccaccctttgatcccaacatgccaccaatgccaccaccaggcggaattccacctcctatggggcctcctcacctgcaaagacccccatttatgcctccgccgatgagctctatgccgcccccacccggcatgatgttcccacccggaatgccacccgtgaccgcccccggtaccccagcactgccccctaccgaagagatctgggtcgaaaacaaaacccccgatggcaaagtatattactataatgctagaacccgcgagtcagcttggacaaagcctgacggagtcaaggttatacagcagagtgagttaactccaatgctggccgcccaggcacaggtccaggctcaggcacaggcccaagcccaagctcaggcacaggctcaagcccaggcacaggcccaggcccaggcacaggcccaggcccaagcccaagcccaggcccaagcccaggcacaagcacaggctcaggcccaggcacaggctcaggcacaggcccaagcccaagcacaggcacaggtccaagcacaggttcaggcccaggtccaggcgcaggctgtcggtgcctctactcccaccaccagcagtccggccccagccgttagcaccagcactagctcatcaactcctagttctactacctccacaacgaccacagccacatcagtagcacaaactgtgtccactcccacaacccaggaccagacccctagttcagccgtgtctgttgcaacaccaactgtgagcgtgtcaaccccagcccctactgctactccagtacagaccgtgccccaaccacacccccaaacgctgcccccagcggtgccacattcggtgccccagcccaccaccgcgataccagcattccctcctgtgatggttcctccttttcgcgtgcctctgcccgggatgcccattcctcttcctggcgttgcaatgatgcagattgtgtcatgtccttacgtgaagaccgtggctacaaccaaaactggggtactgccaggaatggcgccaccaatcgttcctatgatccacccccaggtggccattgccgcttcaccagccaccctggccggggctacggcagtgagcgagtggactgagtacaaaacagctgacggcaagacttactactacaacaacagaacactcgaatcgacgtgggagaaacctcaggagctgaaagagaaagaaaaactggaagagaaaattaaagagcccatcaaagaaccatccgaagaaccactgccaatggagaccgaagaagaggatccaaaagaagagcccataaaagagatcaaggaggagccgaaggaggaggagatgaccgaggaggaaaaagccgctcagaaagctaagccggtggccacagctcccatccctggcacgccatggtgtgtggtgtggaccggcgacgagagggtgttcttttacaatccgactacccgcttgtctatgtgggatagacctgacgacctgatcggccgagctgacgtggataaaatcatacaggagcctccacataaaaaaggcatggaagaattgaagaaactgcggcatccaacaccaactatgctctcaatacagaagtggcagttttccatgtcagctatcaaagaggagcaggagctcatggaggaaattaacgaagatgagccggtgaaagcaaaaaagcggaaaagagatgacaacaaagatatcgatagcgagaaggaagccgctatggaggctgaaatcaaagctgctcgggaaagagctatcgttccattagaggctcgcatgaaacagttcaaggacatgttactcgagcgcggcgtgtctgctttttccacatgggagaaagagcttcacaaaatcgtttttgatccaaggtacctcctgttaaatcccaaggagcgtaagcaagtatttgatcagtatgtcaaaacccgagccgaggaggagaggagggaaaagaaaaataaaatcatgcaggcaaaggaggacttcaagaaaatgatggaagaggctaagttcaaccctcgggccacattcagcgagtttgcagcaaagcacgcaaaggacagccggttcaaggcaattgagaagatgaaggatcgggaggcactgttcaacgaattcgtcgctgcagccagaaaaaaagagaaggaggattcaaaaaccagaggagagaaaattaaaagcgacttcttcgagctactttctaatcaccatctggactctcagagccgatggagcaaagtgaaggataaggtcgagagcgacccacggtacaaggcagtggacagttcttcaatgcgggaagacctcttcaaacagtacatcgaaaagatagcaaagaacctggatagtgagaaagagaaagaacttgagcggcaagcacgtattgaggcttccctccgcgagcgggagcgggaggtgcagaaggcaaggtctgagcagactaaggagatcgacagagagcgagagcaacacaagagagaagaagccatccagaacttcaaagccttgctttccgacatggtgcggagctcagatgtctcttggagcgacacaagaaggaccttgagaaaggatcataggtgggagagcggttccttgctcgagcgagaggagaaagaaaagttgttcaatgaacacattgaggctctaacaaagaaaaagagggagcatttcaggcaactgctcgacgaaactagtgccataaccctaactagcacctggaaggaagttaaaaagattatcaaggaggacccgagatgtatcaaattctcatcatctgacagaaagaaacagcgcgagttcgaagagtacatcagagataagtatatcaccgcaaaagcagactttcgtacgctgctgaaggaaaccaagttcataacttacaggtccaagaaactgatacaggagtccgatcagcatttaaaggacgtcgagaagatactgcagaacgacaagaggtatttggtactggattgcgtaccagaggagaggcgtaagcttatagtagcctatgttgatgatttggacagacgcggcccaccaccaccgcctaccgcgagtgagccgacaagaaggagcactaagtag

SEQ ID NO: 167233 - DNA, 3297 bp, Artificial Sequence
  derived and/or modified sequence
atggcagagcgcggtggggacggcggtgagtctgagagattcaatcccggagaactgcgaatggcccagcagcaggcccttcgcttccggggtcctgcccctccccctaacgccgttatgagagggccacccccattaatgagaccacctccccctttcggaatgatgagaggacctcctccacctccgaggccccctttcggccgtcctccatttgatccgaacatgccccctatgccaccaccaggcggaatcccccctcctatggggccaccacacctccaacgcccacccttcatgccaccccctatgagctccatgcccccaccccctgggatgatgtttccacctgggatgcccccagtgactgccccagggactcctgccttgccgccaaccgaagagatctgggtggagaacaagacccccgatggcaaagtttactactacaacgcccgtactcgcgagtctgcctggacaaagccagatggagttaaggttatccagcagagcgagctgacccccatgctggccgctcaggcacaggtgcaggcacaggcccaggcacaagcgcaggcgcaggcccaggcacaggcccaagcacaggcccaggcccaggctcaggcccaagcccaagcccaggcccaggcgcaggcacaggcccaggcacaagcccaggcccaggcacaagcacaggcacaggcccaggcccaggcacaggctcaagtacaagcgcaagtgcaggctcaggtgcaagcccaggcagtaggagcgtcaactcctactacatcaagtcccgcacccgctgtgagcacaagtacaagcagttctactccctccagcacaacatccactacaacgacagctacatcagtcgcccaaactgtgagcaccccaaccacccaggatcagaccccttcttccgctgttagtgtagccactccgactgtttctgtgtctacccccgctccaactgccactccagtgcaaaccgtgcctcagccgcatccccagaccctgcccccagccgtgccccactctgtcccacagcctactacggccatcccagcgttcccgccagtcatggttccgccattccgcgtgcccttgcctgggatgcctattccattgccaggcgtagccatgatgcagatcgtgagttgcccctacgtcaagactgtggcgacgacgaagactggcgtgctgcctggtatggctccccctattgtgcccatgatccatcctcaggtcgccatcgctgcatctcccgctaccctcgccggagcaacagctgtcagcgagtggaccgagtacaagacagccgatggtaaaacatattactataacaaccggacactcgaatcgacatgggagaagcctcaggaattgaaagagaaggaaaaactcgaggagaaaatcaaagagccgattaaggaaccatcagaggaacctctgcctatggaaaccgaggaggaagacccaaaggaggaacctataaaagaaataaaggaggaacccaaggaagaggagatgaccgaagaagagaaggccgctcagaaagccaagcctgtcgcaaccgcccctatcccgggaaccccgtggtgtgtggtatggaccggcgacgagagggtgtttttctacaaccctactacgcgcctttccatgtgggacaggccagacgacctgattggcagggcagatgtggataaaattatccaggaacctccccacaagaagggcatggaggaactcaagaagttacgtcaccccacaccaacaatgctgtccattcaaaagtggcaatttagcatgagcgcgattaaggaggagcaggagctaatggaggaaatcaacgaagacgaacccgtaaaggcgaaaaaaagaaagcgagacgacaataaggatatcgacagtgagaaagaggctgcaatggaagccgaaatcaaagctgcccgtgaacgcgctattgttccactcgaagcaagaatgaaacagtttaaggacatgctgctggaaagaggtgtgtcggctttttccacatgggagaaggagctgcacaagatagtgtttgacccccgttacctgctgctaaatcccaaagagagaaagcaggtgtttgatcaatacgtaaagaccagggcagaggaagagcgtcgggagaaaaaaaataagattatgcaggcgaaggaagactttaaaaagatgatggaggaggccaagttcaatccgagagccacattctctgagttcgcggctaagcatgctaaggattctcgttttaaagctatcgaaaaaatgaaagacagggaagcgttgttcaatgaattcgtcgcagctgctcgaaaaaaagaaaaggaggatagcaaaacgcgcggtgaaaagattaagtccgacttcttcgagctgctgtccaaccaccacctggattcgcagtctagatggagcaaggtcaaagacaaggtcgagtcggatccgcgatacaaagccgtggactcttcgtctatgcgcgaggacctctttaagcagtatatagagaagattgcaaagaaccttgactcagagaaggagaaggaactggaaagacaggccagaatcgaagcatcattgcgagaaagagagcgtgaggttcagaaggctcggtccgaacagacaaaggagatagatagagagcgggagcaacataaaagagaggaggccatccagaacttcaaggctctgcttagtgacatggtgcgttcgagcgatgtttcgtggagtgacactcgcaggactttgcgtaaagatcaccgctgggaatctgggagcctgctggagagagaggaaaaagaaaaactgtttaatgagcacatcgaggctctcaccaaaaagaaacgcgaacacttcagacagcttctggatgagacgtccgccatcaccctgacgagcacttggaaggaagtcaagaagatcatcaaggaggatccgcgatgcatcaaattctcttccagtgataggaagaagcagagggagtttgaggagtatattagggacaaatatattactgccaaggccgatttcagaacgttactgaaggagacgaagtttataacctaccggtctaaaaagctgatccaggagtctgaccaacatctgaaggatgtggagaagattctccagaatgacaaacggtatctggtgctcgactgcgtgccagaggagcgcaggaagctgattgtagcttatgtagacgatctcgacaggcgcggacccccaccacctccaaccgcctcagagcctacacggaggtcaaccaagtag

SEQ ID NO: 167234 - DNA, 4654 bp, Artificial Sequence
  derived and/or modified sequence
acgtcgggtcggcgggtggatgaacgcggccctctgtaatggcggagcgtggcggggacgggggcgagagtgaacgattcaacccgggggagctcaggatggcccaacagcaggccttgaggttccgaggtccggctcccccaccaaatgcagtgatgcgaggcccaccacctctgatgcgacctcctccaccttttggtatgatgcgaggccctcctccaccaccacggccgccctttggacgtcctccttttgatcctaatatgccgccaatgcctcctccaggagggatacctccacctatgggccctccacacctccagagaccacctttcatgcctcctcccatgagttccatgcctcctcctccgggtatgatgtttccaccaggaatgcctcctgtgactgctcctggtactccagcactacctcctacggaggagatatgggttgaaaataaaactccagatgggaaggtttattattataatgctcggacacgtgaatctgcatggaccaagccagatggagttaaggttattcagcaatcagaactgacacctatgcttgcagcccaggcacaggttcaggctcaggcccaggcgcaggctcaggcccaggcgcaggctcaggcccaggcacaagctcaggcccaggctcaggctcaggcccaggcccaggcccaggcccaggcccaggcccaagcccaagcccaggcccaggctcaggctcaggcacaagctcaggcccaggcccaggctcaggtccaggcccaggtccaggcacaagtgcaagcacaagcagttggagcttccacccctacgaccagtagcccagcacctgcagtatccacttcaacatcatcatccaccccttcctctaccacttctaccacaacaactgctacttcagttgcgcagacagtatcaacacccacaacacaagatcagaccccaagttctgctgtttcagttgccacgcctacagttagtgtttcaactcctgctcctacagccacacctgtgcaaaccgttccccagccgcaccctcagacgttacctcctgctgttcctcattcagtacctcagccaacaacagcaatacctgcttttccaccagtaatggtacctccgtttcgtgttccccttcctggcatgccaattccacttccaggtgtagcaatgatgcaaatagtcagctgcccgtatgtaaagacagtcgctaccaccaagaccggtgtattgccaggaatggcccctcctatcgtacccatgatacatccccaggttgctattgcagcttcacctgctaccttagctggagcaacagcagtttctgaatggactgaatataaaacagcagatgggaagacatattattataataatagaacattagaatcaacctgggaaaaaccccaagaactaaaggaaaaagaaaagttagaagagaagattaaagagccaattaaagaaccctctgaagagcctctgccaatggagacggaggaggaggatcctaaagaagagcctataaaggagataaaggaggagcccaaagaagaggagatgactgaagaagaaaaggctgcccagaaggcaaagccagttgctactgctcctattcctggtactccatggtgtgtcgtttggactggtgatgagcgggtcttcttttataatcccaccactcgtctttctatgtgggaccgacctgatgatctgattggcagggcagatgttgacaaaattattcaggagccccctcataaaaaaggaatggaggaattgaagaaactaaggcacccaactccgacaatgctgtcgatccaaaagtggcaattctctatgagtgcaattaaagaggaacaagaattaatggaagaaattaatgaagatgagcctgttaaagcaaaaaaacggaagagagacgataataaagacattgactcagagaaagaagctgccatggaagctgaaattaaagctgcccgagaaagggccattgtccctctggaggctcgaatgaagcagttcaaggacatgctgctagagagaggggtgtctgctttttcaacgtgggagaaggagttgcacaagatagtttttgatccccggtacttacttctcaatcctaaagagagaaaacaggtgtttgatcagtatgtaaagaccagggcagaggaagaacgcagggaaaagaaaaataaaataatgcaagccaaggaagatttcaaaaaaatgatggaagaagcaaaatttaatccaagagcaacttttagtgaatttgcagccaagcatgctaaagattcaagattcaaagcaattgaaaagatgaaagaccgagaagccttgtttaatgagtttgtggccgctgctaggaagaaagagaaagaagattcgaagaccagaggtgagaagattaaatcggatttctttgaactattatctaatcatcacttggacagtcagtctcgatggagcaaagtaaaagacaaagtagaaagtgatccacgttacaaagcagtagatagttcatcaatgagagaagaccttttcaaacagtacattgaaaaaatagccaagaatttagactcagaaaaagaaaaggagcttgaaaggcaagcccgcattgaggcaagccttcgagaacgagaaagggaggttcaaaaggcccgttcagaacaaacaaaagaaatagatcgagagagagagcagcacaaacgagaagaagctatccagaatttcaaagctcttctgtctgacatggtacgttcttcagatgtgtcatggtctgatactcgtaggaccctccgaaaagatcaccgctgggaatctggatccttattggaaagagaggagaaagagaagctttttaatgaacacattgaagcacttaccaaaaaaaagagagagcactttaggcaacttctggatgaaacttctgcaattaccttaacatccacgtggaaagaagtaaaaaaaatcattaaggaagatcctcgatgtattaagttctcctccagtgacaggaaaaaacaaagagaatttgaagaatatatcagagacaaatatatcacagccaaagctgacttcaggacgcttttgaaagagaccaaatttataacatatagatccaaaaaattaatccaagaatcagatcagcacctgaaagatgtagaaaaaattttacagaatgacaaacggtatctagtactggactgtgtgccagaggagaggcgtaaactgattgtggcatatgttgatgacctggatcgccggggtccacccccacctcccacagcatcggagcccacgagacgatcaacaaaataattctaaatactcttccataggggcatctattcaaaatgcttgcatgagccaattttcaggtttttacatatatgtgcattagtcaacctattgcgaaaccatctgacaaacagaaggagaagcatttgtgaacagtttctgaacagaacactttggaaatatttatgcttttctttgtgtggcatgactgacatacatactcaaatataggctgtctctagtaaatcttaaaatcttgaagctaaaattcatccttttatgaggtgtggaagtcagtgacttggtgacgttcttcctagcagtgttaatacatgcaagaagtaagagcatttgtggcttgaacttgccagatgcaaataccacagactccaagaaaacccgagttggggtttgttttgttttgattttttttttttaaagcgggtaaaagagaaaacactgaaaattgaattcttatcttccagaggctacaattattataatggacaatacttttacctttgtctctaaagatcagattagttttatttgttcacttacgtgctttgattatcccctctgaattatagaccgagtcttgttgtttagcctaagagaagatttatgtagtaatttcttctcaggtatggaaccacggtcataactaacatgttggccagaatagaaccactggttaaacatattttattcaccattaagtgatctttatcaatattctggattagacaacaaattacctttctgggtgtttcttgtaaactatactcctgtttgaatgttaaactttgttgctaaagtttaattttaagatgtttgaatgttcagtttatgtatttgaactacaataaaccaaccctttttatatatctgtattgtatatgattattgttacttaatttttaagagcttattttaacctgtttttaaaagcagcaaatagaatttcccacaaagtaagttgactctaaatcttaagtattacctagtttttaaaggtttgaatataataatgcagtatttgcagtataaaaaggaaggaatttgtagagaatcattttggtgctcaagtctcttagcagtgccttattgcctcatagcaagaagatgctggggttttttttgtttttgtcctttgtattaatgtatgatggtttgcgcctttttggcattctttcaacatgtcgtgtacatcacaccatgaatcagttcctaattgatatatctagctttacctcccgagttaaaaaaaaatctttttattttatgccttcataggttgctcgtttcagagtgccacataaataaaatgtttaacaaaa

SEQ ID NO: 167235 - protein, 184 aa, Artificial Sequence
  derived and/or modified sequence
MAEPQPPSGGLTDEAALSCCSDADPSTKDFLLQQTMLRVKDPKKSLDFYTRVLGMTLIQKCDFPIMKFSLYFLAYEDKNDIPKEKDEKIAWALSRKATLELTHNWGTEDDETQSYHNGNSDPRGFGHIGIAVPDVYSACKRFEELGVKFVKKPDDGKMKGLAFIQDPDGYWIEILNPNKMATLM

SEQ ID NO: 167236 - DNA, 555 bp, Artificial Sequence
  derived and/or modified sequence
atggcagaaccccaaccaccatctggaggcctgaccgatgaggccgccctcagctgttgttccgatgcagatccatcaacgaaagactttttattgcagcagactatgcttagagtgaaggatcctaagaaatctctggacttctacacccgggtgctgggcatgaccctaatccagaaatgtgattttccgataatgaagttcagcctgtattttctcgcgtatgaggacaagaatgacatcccaaaggaaaaagacgaaaagatcgcttgggctttgtcccggaaggcaacactggaactcactcataattggggcactgaggacgatgaaacccagtcttaccataatgggaattcggatcccagaggcttcggacacataggaattgcagtccccgatgtgtacagtgcctgtaaaagattcgaggagctcggggttaagttcgttaagaagccagatgatggcaaaatgaaaggcctcgcttttattcaggaccccgacggttattggatagagatcctcaacccaaacaaaatggcaacccttatgtag

SEQ ID NO: 167237 - DNA, 1994 bp, Artificial Sequence
  derived and/or modified sequence
ctagttaaggcggcacagggccgaggcgtagtgtgggtgactcctccgttccttgggtcccgtcgtctgtgatactgcagcgcagccatggcagaaccgcagcccccgtccggcggcctcacggacgaggccgccctcagttgctgctccgacgcggaccccagtaccaaggattttctattgcagcagaccatgctacgagtgaaggatcctaagaagtcactggatttttatactagagttcttggaatgacgctaatccaaaaatgtgattttcccattatgaagttttcactctacttcttggcttatgaggataaaaatgacatccctaaagaaaaagatgaaaaaatagcctgggcgctctccagaaaagctacacttgagctgacacacaattggggcactgaagatgatgagacccagagttaccacaatggcaattcagaccctcgaggattcggtcatattggaattgctgttcctgatgtatacagtgcttgtaaaaggtttgaagaactgggagtcaaatttgtgaagaaacctgatgatggtaaaatgaaaggcctggcatttattcaagatcctgatggctactggattgaaattttgaatcctaacaaaatggcaaccttaatgtagtgctgtgagaattctcctttgagatttcagaagaaaggaaacaatgtgattcaagatatttacataccagaagcatctaggactgatggatcactgtcccgattcaaattattcttcagtccatttccccttcctatttcagctgttccttttcacctaactgttcagtcattctggttttcaagcagtgctttatctcatgtccttgaatatagttgtgtaactttattttttaggtaataattagaacagttcccttcagaggctgcatttgccttcttctgccacctaaatattacttcccttcaaatctgcctttgaatcatcatttttaaaaaaaaattaacatgtttttgttgtagttatcttctggggtttcaattcctcagaaacaacttttttcacaacggaaaggaaagaacactagtgttctttcagtaaagtacaaagtgtttattttacaaaagagtaggtactcttgagagcaattcaaatcatgctgacaaggatactgatagaaaaagtgatttcttcttattataaagtacatttaaagttcaaggactaaccttatttatttgggaaaggggaggaggaaggaaatgatatggtacccagacactgggctaggctgcaactttatctcatttaatactcccagctgtcatgtgagaaagaaagcaggctaggcatgtgaaatcactttcatggattattaatggatttaagagggcatcaatcagctcaactcaagatttcataatcatttttagtatttagattgtgcctcaaagttgtagtacctcacaatacctccactggtttcctgttgtaaaaaccttcagtgagtttgaccattgtgctcttggctcttgggctggagtaccgtggtgagggagtaaacactagaagtctttagtacaaaactgctctagggacacctggtgattcctacacaagtgatgtttatatttctcataaagagtcttccctatcccaaggtcttcatgatgccagtagccatatatgataaattatgttcagtgataacttagttatcagaaatcagctcagtggtcttccccgccatgattcacatttgatgagtttttaaaaatcaaagtgattttgaaaatctctaatggctcagaaaataaaaacatccagtttgtggatgactatatttagatttctctagactctagtggaagacctttggaaaggccatgccaaccgtgcttgtactgctagaagcactttatgtttcctttttgggtgaaatggatttatgtgagtgctttaaacaaatagcaatacttatagactgaaataaaatgaaacttcaaataaga

SEQ ID NO: 167238 - DNA, 555 bp, Artificial Sequence
  derived and/or modified sequence
atggccgagccccagccccccagcggcggcctgacagatgaagctgccctgagctgctgcagtgatgctgaccccagcaccaaggacttcctgctgcagcagaccatgctgcgggtgaaggaccccaagaagagcctggacttctacaccagggtgctgggcatgaccctcatccagaagtgtgacttccccatcatgaagttcagcctgtacttcctggcctatgaggacaagaatgacatccccaaggagaaggatgagaagatcgcctgggccctgagcaggaaggccaccctggagctgacccacaactggggcacagaagatgatgagacccagagctaccacaatggaaacagcgacccccggggcttcggccacatcggcattgctgtgcctgatgtgtacagcgcctgcaagagatttgaggagctgggcgtgaagtttgtgaagaagccagatgatggcaagatgaagggcctggccttcatccaggaccctgatggctactggattgagatcctgaaccccaacaagatggccaccctgatgtag

SEQ ID NO: 167239 - DNA, 555 bp, Artificial Sequence
  derived and/or modified sequence
atggccgagccccagccccccagcggcggcctgaccgacgaggccgccctgtcctgctgctctgatgctgatccatcaactaaggactttctgctgcagcaaacgatgctacgcgtgaaggaccctaagaagtccctggatttttacacccgggtgctggggatgaccttgattcagaagtgtgacttccccattatgaagttttccctctactttctggcctacgaagacaagaacgatatccctaaagagaaagacgagaagatagcctgggcattatccagaaaggccactctcgaattgacgcataactggggaaccgaagatgatgagacccagtcgtatcacaacggtaactccgatccaagagggttcggtcatatcggcatcgccgtgcctgacgtttatagcgcctgtaaaaggtttgaggaacttggcgtgaagttcgtaaaaaaacccgatgacgggaagatgaaagggctggctttcattcaggacccagacggctactggattgagatcctgaatcctaacaaaatggccacccttatgtag

SEQ ID NO: 167240 - DNA, 555 bp, Artificial Sequence
  derived and/or modified sequence
atggcggagccccagccgccaagcggcggactgacagatgaggccgctttgtcatgttgttcggacgcggatcccagtaccaaggattttctcctccagcagacaatgttgcgcgtcaaggaccccaaaaaatcactggatttctacactcgcgtcctgggcatgaccctgatacagaagtgcgattttcccattatgaagttcagcttgtactttctggcctatgaggacaaaaacgatatccccaaggagaaggacgagaagatcgcttgggctttgtcacgcaaggctacacttgagctcacgcataattgggggaccgaagatgacgaaacgcagagttaccataatggcaactctgaccccagagggtttggtcacattggaatcgcagtcccagacgtctacagcgcctgcaagcgctttgaggagttgggagtgaaatttgtgaaaaagcccgacgacggtaaaatgaaggggctggcctttattcaggatcctgacggatactggatcgaaatcctcaacccgaataagatggccactctcatgtag

SEQ ID NO: 167241 - DNA, 555 bp, Artificial Sequence
  derived and/or modified sequence
atggccgagccccagccccccagcggcggcctgaccgacgaggccgccctgagctgctgcagcgacgccgaccccagcaccaaggacttcctgctgcagcagaccatgctgagagtgaaggaccccaagaagagcctggacttctacaccagagtgctgggcatgaccctgatccagaagtgcgacttccccatcatgaagttcagcctgtacttcctggcctacgaggacaagaacgacatccccaaggagaaggacgagaagatcgcctgggccctgagcagaaaggccaccctggagctgacccacaactggggcaccgaggacgacgagacccagagctaccacaacggcaacagcgaccccagaggcttcggccacatcggcatcgccgtgcccgacgtgtacagcgcctgcaagagattcgaggagctgggcgtgaagttcgtgaagaagcccgacgacggcaagatgaagggcctggccttcatccaggaccccgacggctactggatcgagatcctgaaccccaacaagatggccaccctgatgtag

SEQ ID NO: 167242 - protein, 1210 aa, Artificial Sequence
  derived and/or modified sequence
MAAAAGAAAAAAAEGEAPAEMGALLLEKETRGATERVHGSLGDTPRSEETLPKATPDSLEPAGPSSPASVTVTVGDEGADTPVGATPLIGDESENLEGDGDLRGGRILLGHATKSFPSSPSKGGSCPSRAKMSMTGAGKSPPSVQSLAMRLLSMPGAQGAAAAGSEPPPATTSPEGQPKVHRARKTMSKPGNGQPPVPEKRPPEIQHFRMSDDVHSLGKVTSDLAKRRKLNSGGGLSEELGSARRSGEVTLTKGDPGSLEEWETVVGDDFSLYYDSYSVDERVDSDSKSEVEALTEQLSEEEEEEEEEEEEEEEEEEEEEEEEDEESGNQSDRSGSSGRRKAKKKWRKDSPWVKPSRKRRKREPPRAKEPRGVNGVGSSGPSEYMEVPLGSLELPSEGTLSPNHAGVSNDTSSLETERGFEELPLCSCRMEAPKIDRISERAGHKCMATESVDGELSGCNAAILKRETMRPSSRVALMVLCETHRARMVKHHCCPGCGYFCTAGTFLECHPDFRVAHRFHKACVSQLNGMVFCPHCGEDASEAQEVTIPRGDGVTPPAGTAAPAPPPLSQDVPGRADTSQPSARMRGHGEPRRPPCDPLADTIDSSGPSLTLPNGGCLSAVGLPLGPGREALEKALVIQESERRKKLRFHPRQLYLSVKQGELQKVILMLLDNLDPNFQSDQQSKRTPLHAAAQKGSVEICHVLLQAGANINAVDKQQRTPLMEAVVNNHLEVARYMVQRGGCVYSKEEDGSTCLHHAAKIGNLEMVSLLLSTGQVDVNAQDSGGWTPIIWAAEHKHIEVIRMLLTRGADVTLTDNEENICLHWASFTGSAAIAEVLLNARCDLHAVNYHGDTPLHIAARESYHDCVLLFLSRGANPELRNKEGDTAWDLTPERSDVWFALQLNRKLRLGVGNRAIRTEKIICRDVARGYENVPIPCVNGVDGEPCPEDYKYISENCETSTMNIDRNITHLQHCTCVDDCSSSNCLCGQLSIRCWYDKDGRLLQEFNKIEPPLIFECNQACSCWRNCKNRVVQSGIKVRLQLYRTAKMGWGVRALQTIPQGTFICEYVGELISDAEADVREDDSYLFDLDNKDGEVYCIDARYYGNISRFINHLCDPNIIPVRVFMLHQDLRFPRIAFFSSRDIRTGEELGFDYGDRFWDIKSKYFTCQCGSEKCKHSAEAIALEQSRLARLDPHPELLPELGSLPPVNT

SEQ ID NO: 167243 - protein, 1210 aa, Artificial Sequence
  derived and/or modified sequence
MAAAAGAAAAAAAEGEAPAEMGALLLEKETRGATERVHGSLGDTPRSEETLPKANPDSLEPAGPSSPASVTVTVGDEGADTPVGATPLIGDESENLEGDGDLRGGRILLGHATKSFPSSPSKGGSCPSRAKMSMTGAGKSPPSVQSLAMRLLSMPGAQGAAAAGSEPPPATTSPEGQPKVHRARKTMSKPGNGQPPVPEKRPPEIQHFRMSDDVHSLGKVTSDLAKRRKLNSGGGLSEELGSARRSGEVTLTKGDPGSLEEWETVVGDDFSLYYDSYSVDERVDSDSKSEVEALTEQLSEEEEEEEEEEEEEEEEEEEEEEEEDEESGNQSDRSGSSGRRKAKKKWRKDSPWVKPSRKRRKREPPRAKEPRGVNGVGSSGPSEYMEVPLGSLELPSEGTLSPNHAGVSNDTSSLETERGFEELPLCSCRMEAPKIDRISERAGHKCMATESVDGELSGCNAAILKRETMRPSSRVALMVLCETHRARMVKHHCCPGCGYFCTAGTFLECHPDFRVAHRFHKACVSQLNGMVFCPHCGEDASEAQEVTIPRGDGVTPPAGTAAPAPPPLSQDVPGRADTSQPSARMRGHGEPRRPPCDPLADTIDSSGPSLTLPNGGCLSAVGLPLGPGREALEKALVIQESERRKKLRFHPRQLYLSVKQGELQKVILMLLDNLDPNFQSDQQSKRTPLHAAAQKGSVEICHVLLQAGANINAVDKQQRTPLMEAVVNNHLEVARYMVQRGGCVYSKEEDGSTCLHHAAKIGNLEMVSLLLSTGQVDVNAQDSGGWTPIIWAAEHKHIEVIRMLLTRGADVTLTDNEENICLHWASFTGSAAIAEVLLNARCDLHAVNYHGDTPLHIAARESYHDCVLLFLSRGANPELRNKEGDTAWDLTPERSDVWFALQLNRKLRLGVGNRAIRTEKIICRDVARGYENVPIPCVNGVDGEPCPEDYKYISENCETSTMNIDRNITHLQHCTCVDDCSSSNCLCGQLSIRCWYDKDGRLLQEFNKIEPPLIFECNQACSCWRNCKNRVVQSGIKVRLQLYRTAKMGWGVRALQTIPQGTFICEYVGELISDAEADVREDDSYLFDLDNKDGEVYCIDARYYGNISRFINHLCDPNIIPVRVFMLHQDLRFPRIAFFSSRDIRTGEELGFDYGDRFWDIKSKYFTCQCGSEKCKHSAEAIALEQSRLARLDPHPELLPELGSLPPVNT

SEQ ID NO: 167244 - protein, 922 aa, Artificial Sequence
  derived and/or modified sequence
SEVEALTEQLSEEEEEEEEEEEEEEEEEEEEEEEEDEESGNQSDRSGSSGRRKAKKKWRKDSPWVKPSRKRRKREPPRAKEPRGVNGVGSSGPSEYMEVPLGSLELPSEGTLSPNHAGVSNDTSSLETERGFEELPLCSCRMEAPKIDRISERAGHKCMATESVDGELSGCNAAILKRETMRPSSRVALMVLCETHRARMVKHHCCPGCGYFCTAGTFLECHPDFRVAHRFHKACVSQLNGMVFCPHCGEDASEAQEVTIPRGDGVTPPAGTAAPAPPPLSQDVPGRADTSQPSARMRGHGEPRRPPCDPLADTIDSSGPSLTLPNGGCLSAVGLPLGPGREALEKALVIQESERRKKLRFHPRQLYLSVKQGELQKVILMLLDNLDPNFQSDQQSKRTPLHAAAQKGSVEICHVLLQAGANINAVDKQQRTPLMEAVVNNHLEVARYMVQRGGCVYSKEEDGSTCLHHAAKIGNLEMVSLLLSTGQVDVNAQDSGGWTPIIWAAEHKHIEVIRMLLTRGADVTLTDNEENICLHWASFTGSAAIAEVLLNARCDLHAVNYHGDTPLHIAARESYHDCVLLFLSRGANPELRNKEGDTAWDLTPERSDVWFALQLNRKLRLGVGNRAIRTEKIICRDVARGYENVPIPCVNGVDGEPCPEDYKYISENCETSTMNIDRNITHLQHCTCVDDCSSSNCLCGQLSIRCWYDKDGRLLQEFNKIEPPLIFECNQACSCWRNCKNRVVQSGIKVRLQLYRTAKMGWGVRALQTIPQGTFICEYVGELISDAEADVREDDSYLFDLDNKDGEVYCIDARYYGNISRFINHLCDPNIIPVRVFMLHQDLRFPRIAFFSSRDIRTGEELGFDYGDRFWDIKSKYFTCQCGSEKCKHSAEAIALEQSRLARLDPHPELLPELGSLPPVNT

SEQ ID NO: 167245 - protein, 209 aa, Artificial Sequence
  derived and/or modified sequence
MPVAVMAESAFSFKKLLDQCENQELEAPGGIATPPVYGQLLALYLLHNDMNNARYLWKRIPPAIKSANSELGGIWSVGQRIWQRDFPGIYTTINAHQWSETVQPIMEALRDATRRRAFALVSQAYTSIIADDFAAFVGLPVEEAVKGILEQGWQADSTTRMVLPRKPVAGALDVSFNKFIPLSEPAPVPPIPNEQQLARLTDYVAFLEN

SEQ ID NO: 167246 - protein, 160 aa, Artificial Sequence
  derived and/or modified sequence
MNNARYLWKRIPPAIKSANSELGGIWSVGQRIWQRDFPGIYTTINAHQWSETVQPIMEALRDATRRRAFALVSQAYTSIIADDFAAFVGLPVEEAVKGILEQGWQADSTTRMVLPRKPVAGALDVSFNKFIPLSEPAPVPPIPNEQQLARLTDYVAFLEN

SEQ ID NO: 167247 - DNA, 630 bp, Artificial Sequence
  derived and/or modified sequence
atgcccgtggccgtgatggccgagagcgccttcagcttcaagaagctgctggaccagtgcgagaaccaggagctggaggcccccggcggcatcgccaccccccccgtgtacggccagctgctggccctgtacctgctgcacaacgacatgaacaacgccagatacctgtggaagagaatcccccccgccatcaagagcgccaacagcgagctgggcggcatctggagcgtgggccagagaatctggcagagagacttccccggcatctacaccaccatcaacgcccaccagtggagcgagaccgtgcagcccatcatggaggccctgagagacgccaccagaagaagagccttcgccctggtgagccaggcctacaccagcatcatcgccgacgacttcgccgccttcgtgggcctgcccgtggaggaggccgtgaagggcatcctggagcagggctggcaggccgacagcaccaccagaatggtgctgcccagaaagcccgtggccggcgccctggacgtgagcttcaacaagttcatccccctgagcgagcccgcccccgtgccccccatccccaacgagcagcagctggccagactgaccgactacgtggccttcctggagaactag

SEQ ID NO: 167248 - DNA, 4007 bp, Artificial Sequence
  derived and/or modified sequence
attccctctggctgcggttccgagaatagcctggaaggaggcaggggtcccggctggagaagcgtggctccggggtggggcgtgcagggctagcccgggcgggggacgctgcccaacaagcaggtttgcggagactcacaccttagattctgagtttttaagcttgtttcctcagagcagggaactcacgaacgtttcgtgagcacctacggtatgcagggtacggtgcggagccctagcgtcactgacgaccgggacagccgagcagctgcaggatccgtcgtgttccccagcaattttaatatttaaaaattcgttactgttgctgttacttgttttctatgtattggatgtcttcgtgaagaaccctcaaaagtgcaacgaactcctccctgccagagggcggccgcgcgctctgagtacagcttcccgcggagccggccaggtcctccagggcaccgagaaagccggccagaacggcggcgccctatcccggccgcagcgatgtctgacggcgccccggaactgacggtctggtacgcaggggcgctcggcggcaacggcggctttaaacgtcatcgcgggcgcgacgcctgagggacagtctggggtttggctgtccggacggtgcagcggcgaggccggccgcgaagatgccagtggcggtgatggcggaaagcgcctttagtttcaaaaagttgctggatcagtgcgagaaccaggagctcgaggcccctggaggaattgctacacccccagtgtatggtcagcttctagctttatatttgctccataatgacatgaataatgcaagatatctttggaaaagaataccacctgctataaaatctgcaaattctgaacttgggggaatttggtcagtaggacaaagaatctggcagagagatttccctgggatctatacaaccatcaacgctcaccagtggtctgagacggtccagccaattatggaagcacttagagatgcaacaaggagacgcgcctttgccctggtctctcaagcgtatacttcaatcatcgccgatgattttgcagcctttgttggacttcctgtagaagaggctgtgaaaggcatattagaacaaggatggcaagctgattccaccacaagaatggttctgcccagaaagccagttgcaggggccctggatgtttcctttaacaagtttattcccttatcagagcctgctccagttcccccaatacccaatgaacagcagttagccagactgacggattatgtggctttccttgaaaactgatttatcactctgagttcaagattcatcttcagaatcctgtatactgacaaacgtagaaatgtaaagtttgtattttcaatttattggatggcttaagcacctcagcattccttactatgtgataaaatacatatagaatataagatatactatatacattttgtccataaacgttatgctgaatagttgttgaaacagttctcattttgtagtatttaataatctggatggagcctgtcagtattacagttagttttctagtgactcataaaataagatttcctgtttcatgtagaatagtgtttgtcaactgtcttttctctgtcccagcacatgccgtactcttatatgtaccattggttgataattataatgattcatttggacttgaagaaagattgtccccaggcacagtatctgaatcactggggattatgattcaccctctttggagaacatgctctcttttcaccccccacctcctgagagccactaatgtaagatacagaaacatagctgaggaacaaatagaccatttccatactaaaccagtttgttaactttagattttttccaatagtgtgagtatatccattgctggcagtggagggcttgccatgaaaatgcaacttatttaagacatttatgagacatattaacttgtgctgtcgccttttagaaggagaaacttaagtgtggaatgcattatatgggcaaagaagctatgaagatacatgatacactttgtacaactatcctgcagcccattggttgcttatatttatcgcttggctcaagttctgccctttggagaaatactgagcaagtctttcattctctgtgtgacagccctctgaatatttgaagttgtttgttgtaacttaaggttataacagcccttagttcatttactctgcatttgttcaataaatatttaactgaattcttcaattatttcatctaagatagtttctggaaatttcactctcgatctttctgtggacacaatctattttgtcattgtgtctatatgaatctcttaagtagaaatgagttgtatggtgaatctgtgtagtgataattatataatttatttattttgaatgcattttagtggctatttcagtttttcttaacatatatgggaatactttttgaattgcaattttatttaacccggataggtaagtcatattaaaattccttgttttacagttgaggaaatgggaattcaagaagtcagaggatcaggagagtgatcaagagaatgacagtgccagtttttttaacttccaggtattaagtacaaattgtatccatggttattttttaaaagcagattagagtcaatccaaatattcattaataggggattgtttgaataaacagcagtgtagactacgcaggtgtaaaaggagtgaagatctctatactaaactggaatgatctccagagtgagaacatagaaagcacatgtagtttatatggttattttgagggtaacaaaaggagaatgattacaattatatatatgtacatatttccttatatttcaaaactaagcaattgggggatatatacaaaatgaatataatagttccctaaagaggaaggagaggacagtgaactactacatagagaaaaaataatctcaagtgatcaaacacaatatttcaattttacattgtcagtgggatatacactaaggacagaaaaaaatcttagactaatgaatgtggtttttcatgattaatttcacaaaatcttgatatcttttttattattaaaagtatagattaaattaataatcatgtaacattagaccccagtaatcttaaatttgacatggaaacctcattatatgctttatttttctttgtaaacagtaaatatttcccactcctgtctacatgaaaaggtctagagtaattacagttcagtaacaatgagcaccactagtacccagatggtgttctttcattttcatttgcaattaaaaggaatcagaacttatttgcaaaacagctaatagttccagggcagtaagtgtacaagttcatatctggtacaagatgtccaggattcaaggaggctcttaaagacttgggattctgtcaaagggttatacaagccaacttgaagggatttctacaggccatgtaaaaatgagacagtttgagcatgaaatatttgtatatgtgtctgtttttaactcttaataacctcatcactgtacaagaaaggcagggtaagtgcttgatttcacttccctttattatcagttctcaggacaaattgatatgctgccaatctctaaagcaacaaaatcgaacctgtagggtagtcaaaaagctcatgctggaaaattccaccgaataaagataaaagttagaaaaacggtacttgcagcccttaatgaaacaaagaagggatcatggaaatatatatcaatgctgttgagaccacagggtaagaaattgagattgagcatgaaatatgtccagtacatccatcagcctgtctttgtgctctggctatttctgagccagccatctgtgtacaagtgtagcctgacagcaccctgtttcagatccattggatatctctaaaatttgctctgggacttaccctggcactactatcaggatgcccacacaaacctgattgggcagcccatcagcagttgtgaacatgacatggtgaataaacactctcttccttgtc

SEQ ID NO: 167249 - DNA, 630 bp, Artificial Sequence
  derived and/or modified sequence
atgcctgtcgccgtgatggcggagagcgccttcagctttaagaaactcctggaccagtgtgaaaaccaggagcttgaagcccccggcggcatcgcaaccccaccagtgtatggacagcttctggctctttatcttctgcataatgacatgaataatgcccggtatttgtggaagagaattccgccagccatcaaatctgccaactccgagctcggtgggatctggtcagttgggcaacgcatttggcaaagagactttccaggcatttataccaccataaatgctcaccagtggagtgaaacagtgcagcctattatggaagccctgcgcgacgccacaaggaggcgtgccttcgccctggtttcccaggcctataccagcatcattgcagatgactttgctgcgtttgtggggctcccagtggaagaggctgtgaagggtattctcgagcaaggatggcaggcagactccacgacaagaatggtattgccgaggaaacccgtcgccggcgccctggacgtgagtttcaacaaattcattcccctgtcggagcctgcccccgttccaccgatccccaacgagcagcagctggcccgccttacggactacgtggcttttctcgagaactag

SEQ ID NO: 167250 - DNA, 630 bp, Artificial Sequence
  derived and/or modified sequence
atgcctgtggccgtgatggccgagagcgccttctccttcaagaagctgctggaccagtgtgagaaccaggagctggaggcccctgggggcatcgccaccccacctgtgtatggccagctgctggccctgtacctgctgcacaatgacatgaacaatgcccgctacctgtggaagagaattcctccagccatcaagagcgccaacagcgagctgggcggcatctggagcgtgggccagaggatctggcagagggacttccctggcatctacaccaccatcaatgcccaccagtggagcgagaccgtgcagcccatcatggaggccctgagagatgccaccaggagaagagcctttgccctggtgtcccaggcctacaccagcatcatcgcagatgactttgctgcctttgtgggcctgcctgtggaggaggccgtgaagggcatcctggagcagggctggcaggccgacagcaccaccaggatggtgctgcccaggaagcctgtggccggggccctggatgtgtccttcaacaagttcatccccctgtctgagcccgcccctgtgccccccatccccaatgagcagcagctggcccggctgacagattatgtggccttcctggagaactag

SEQ ID NO: 167251 - DNA, 1654 bp, Artificial Sequence
  derived and/or modified sequence
aaacgtcatcgcgggcgcgacgcctgagggacagtctggggtttggctgtccggacggtgcagcggcgaggccggccgcgaagatgccagtggcggtgatggcggaaagcgcctttagtttcaaaaagttgctggatcagtgcgagaaccaggagctcgaggacgcttgatgtaatgggcagaatcagaatgcttcaggaatctgtcgaatttgtttcttataatagcccctggaggaattgctacacccccagtgtatggtcagcttctagctttatatttgctccataatgacatgaataatgcaagatatctttggaaaagaataccacctgctataaaatctgcaaattctgaacttgggggaatttggtcagtaggacaaagaatctggcagagagatttccctgggatctatacaaccatcaacgctcaccagtggtctgagacggtccagccaattatggaagcacttagagatgcaacaaggagacgcgcctttgccctggtctctcaagcgtatacttcaatcatcgccgatgattttgcagcctttgttggacttcctgtagaagaggctgtgaaaggcatattagaacaaggatggcaagctgattccaccacaagaatggttctgcccagaaagccagttgcaggggccctggatgtttcctttaacaagtttattcccttatcagagcctgctccagttcccccaatacccaatgaacagcagttagccagactgacggattatgtggctttccttgaaaactgatttatcactctgagttcaagattcatcttcagaatcctgtatactgacaaacgtagaaatgtaaagtttgtattttcaatttattggatggcttaagcacctcagcattccttactatgtgataaaatacatatagaatataagatatactatatacattttgtccataaacgttatgctgaatagttgttgaaacagttctcattttgtagtatttaataatctggatggagcctgtcagtattacagttagttttctagtgactcataaaataagatttcctgtttcatgtagaatagtgtttgtcaactgtcttttctctgtcccagcacatgccgtactcttatatgtaccattggttgataattataatgattcatttggacttgaagaaagattgtccccaggcacagtatctgaatcactggggattatgattcaccctctttggagaacatgctctcttttcaccccccacctcctgagagccactaatgtaagatacagaaacatagctgaggaacaaatagaccatttccatactaaaccagtttgttaactttagattttttccaatagtgtgagtatatccattgctggcagtggagggcttgccatgaaaatgcaacttatttaagacatttatgagacatattaacttgtgctgtcgccttttagaaggagaaacttaagtgtggaatgcattatatgggcaaagaagctatgaagatacatgatacactttgtacaactatcctgcagcccattggttgcttatatttatcgcttggctcaagttctgccctttggagaaatactgagcaagtctttcattctctgtgtgacagccctctgaatatttgaagttgtttgtt

SEQ ID NO: 167252 - DNA, 630 bp, Artificial Sequence
  derived and/or modified sequence
atgcccgtggccgtgatggccgagagcgccttcagcttcaagaagctgctggaccagtgcgagaaccaagagctcgaagcgcccggcggcatagccaccccgcctgtttacggccagctgcttgcgctttacctgttacacaacgatatgaataatgcccggtatctctggaagcgaataccccccgctatcaagagtgcaaatagcgagctggggggtatatggagcgtaggccagaggatctggcaacgggactttccaggtatttatacgactatcaatgcacaccagtggtcagaaaccgtgcagcccatcatggaagcattacgggacgccacacgacgcagggctttcgccctggtcagccaggcctacacaagtataattgccgacgacttcgccgcgtttgtagggctcccggtggaggaggctgtgaaaggcatactggagcagggctggcaagctgattccactacccgcatggtgctaccacgaaaacctgttgctggcgccctcgacgttagtttcaataaatttattccactgagcgagccagctcccgtcccccccatacccaatgagcaacagcttgctagattaactgattatgtggctttcctggagaactag

SEQ ID NO: 167253 - DNA, 630 bp, Artificial Sequence
  derived and/or modified sequence
atgcctgtcgctgttatggctgagagcgctttttccttcaagaagcttctcgaccagtgtgagaaccaggagctggaagccccaggtgggatcgcaacccccccagtttatggacagctgctggccctgtacttactgcacaacgacatgaataacgctagatacctgtggaagcgcatccctcccgcaatcaagagtgccaatagtgagctcgggggaatctggtcagttggtcaacgcatctggcaacgggacttcccgggaatttacacaaccataaacgcgcatcaatggtccgagactgtgcagcctattatggaagccctgcgggatgctacacgcaggcgtgcatttgctctagtgtcacaggcatacacaagtattattgcagatgatttcgccgctttcgtgggcttgcccgttgaggaggccgtgaagggcatcttggagcaaggttggcaggccgactccacaacgcgcatggtcttgcctcgcaagcctgtcgcgggagccttggatgtctcttttaataagttcattccactgtccgaacccgcacctgttcctcccatcccaaatgaacaacagttagcaagactgactgattacgtggcgttccttgagaactag

SEQ ID NO: 167254 - protein, 549 aa, Artificial Sequence
  derived and/or modified sequence
MRRPRGEPGPRAPRPTEGATCAGPGESWSPSPNSMLRVLLSAQTSPARLSGLLLIPPVQPCCLGPSKWGDRPVGGGPSAGPVQGLQRLLEQAKSPGELLRWLGQNPSKVRAHHYSVALRRLGQLLGSRPRPPPVEQVTLQDLSQLIIRNCPSFDIHTIHVCLHLAVLLGFPSDGPLVCALEQERRLRLPPKPPPPLQPLLRGGQGLEAALSCPRFLRYPRQHLISSLAEARPEELTPHVMVLLAQHLARHRLREPQLLEAIAHFLVVQETQLSSKVVQKLVLPFGRLNYLPLEQQFMPCLERILAREAGVAPLATVNILMSLCQLRCLPFRALHFVFSPGFINYISGTPHALIVRRYLSLLDTAVELELPGYRGPRLPRRQQVPIFPQPLITDRARCKYSHKDIVAEGLRQLLGEEKYRQDLTVPPGYCTDFLLCASSSGAVLPVRTQDPFLPYPPRSCPQGQAASSATTRDPAQRVVLVLRERWHFCRDGRVLLGSRALRERHLGLMGYQLLPLPFEELESQRGLPQLKSYLRQKLQALGLRWGPEGG

SEQ ID NO: 167255 - DNA, 1827 bp, Artificial Sequence
  derived and/or modified sequence
ccgatagctgcttcgggattggcgtccgggcggctatctaggggctgctgggaagatggcggactcggtggctagccgatgaggaggccgcggggggaacccggcccccgggccccgagaccgactgagggagcgacctgcgcagggcccggggagtcatggtctccatcacccaactccatgcttcgagtcctgctctctgctcagacctcccctgctcggctgtctggcctgctgctgatccctccagtacagccctgctgtttggggcccagcaaatggggggaccggcctgttggaggaggccccagtgcaggtcctgtgcaaggactgcagcggcttctggaacaggcgaagagccctggggagctgctgcgctggctgggccagaaccccagcaaggtgcgcgcccaccactactcggtggcgcttcgtcgtctgggccagctcttggggtctcggccacggccccctcctgtggagcaggtcacactgcaggacttgagtcagctcatcatccgaaactgcccctcctttgacattcacaccatccacgtgtgtctgcaccttgcagtcttacttggctttccatctgatggtcccctggtgtgtgccctggaacaggagcgaaggctccgcctccctccgaagccacctccccctttgcagccccttctccgaggtgggcaagggttggaagctgctctaagctgcccccgttttctgcggtatccacggcagcatctgatcagcagcctggcagaggcaaggccagaggaactgactccccacgtgatggtgctcctggcccagcacctggcccggcaccggttgcgggagccccagcttctggaagccattgcccacttcctggtggttcaggaaacgcaactcagcagcaaggtggtacagaagttggtcctgccctttgggcgactgaactacctgcccctggaacagcagtttatgccctgccttgagaggatcctggctcgggaagcaggggtggcacccctggctacagtcaacatcttgatgtcactgtgccaactgcggtgcctgcccttcagagccctgcactttgttttttcccctggcttcatcaactacatcagtggcacccctcatgctctgattgtgcgtcgctacctctccctgctggacacggccgtggagctggagctcccaggataccggggtccccgccttccccgaaggcagcaagtgcccatctttccccagcctctcatcaccgaccgtgcccgctgcaagtacagtcacaaggacatagtagctgaggggttgcgccagctgctgggggaggagaaataccgccaggacctgactgtgcctccaggctactgcacagacttcctgctgtgcgccagcagctctggtgctgtgcttcccgtgaggacccaggaccccttcctgccatacccaccaaggtcctgcccacagggccaggctgcctctagcgccactactcgagaccctgcccagagggtggtgctggtgttgcgggaacgctggcatttctgccgggacggccgggtgctgctgggctcgagggccctgagggagcggcacctaggcctgatgggctaccagctcctgccgctacccttcgaggaactggagtcccagagaggcctgccccagctcaagagctacctgaggcagaagctccaggccctgggcctgcgctgggggcctgaagggggctgaggggttgatgtggggttcaggatggcccccccatggggggtggatgatttgcactttggttccctgtgttttgatttctcattaaagttcctttccttc

SEQ ID NO: 167256 - DNA, 1650 bp, Artificial Sequence
  derived and/or modified sequence
atgagacggccccggggcgagcctggaccccgggcgcctaggcctaccgaaggcgcaacctgtgctggtcccggggagtcatggtcaccttccccgaacagtatgctgagggttctgctgtcagcacagacttcccctgcacgactttccggactgctgctaattcctccagtacaaccttgttgtctcgggccctctaagtggggagacaggcccgtgggcgggggccctagcgcgggccccgtacagggattacaacggcttctcgagcaggcgaagtctccgggggaactgcttcgttggttgggccagaacccctcaaaagtgagagcacatcactacagtgttgccctgagacggctgggccaactgcttggttcccgcccgcgaccccccccagttgagcaagtgactctgcaggacctgtcccaactgatcattcggaactgccccagtttcgatattcatactattcatgtctgccttcatcttgcagtactgctggggttcccttccgatggcccgctggtgtgtgcactggagcaggagaggaggttacggctccctcccaaacccccgccgccactacagccccttttaagaggtggacaaggccttgaggccgctctgtcttgtccacgtttcctgaggtacccaagacaacatctgatcagcagtctcgccgaagcgaggcctgaagagctcaccccccacgtaatggttctgctcgcgcagcacctggcccggcaccggctgagagaaccccagctgctggaagccatcgcccacttcctcgttgtgcaggaaacccagttatcttcaaaagtagttcagaagctggtgctcccattcggcagattaaactacctgccactggaacagcagtttatgccgtgtctggaacgtattctggctagggaagctggcgtcgcgccgctggcaactgtgaacatccttatgtctttatgtcagctgcggtgcttgccatttagggcactccattttgtcttctctccgggcttcattaattatatctcgggaactccacatgctctgatcgtgcgacgatatctgtctctccttgataccgccgttgaattggaattacccggctatcgcggccccaggctgccccgacgacagcaggtcccgattttccctcaaccactaatcaccgatagggcacggtgcaaatattcccacaaagatatagtcgctgaggggctacgacagctgctaggagaagagaagtatcggcaggatctgacggtgccacccggatactgcaccgacttcctattatgcgcgtctagttctggagccgtactgcctgtgcggacccaggatccgttcctcccgtaccctccccgtagttgcccgcagggccaggccgcttctagcgccactacccgagatccagcccagcgggtggttttggtcctgcgggagcgctggcatttctgtagggacggccgagtgttgttgggttctcgggcccttagggaacgccacctcggcctgatgggttatcagcttctccctcttcctttcgaggaactggagtcccagaggggcctacctcaactgaagagttacctgcgacaaaagttgcaggctctggggctgcgctggggcccggaaggcggttag

SEQ ID NO: 167257 - DNA, 1650 bp, Artificial Sequence
  derived and/or modified sequence
atgaggcggcccagaggagagcccggcccccgggccccccggcccacagagggcgccacctgtgccggccctggagagagctggagccccagccccaacagcatgctgcgggtgctgctgagcgcccagaccagccctgcccggctgagcggcctgctgctgatcccccctgtgcagccctgctgcctgggccccagcaagtggggagacaggcctgtgggcggcggccccagcgctggccctgtgcagggcctgcagaggctgctggagcaggccaagagccctggagagctgctgcgctggctgggccagaaccccagcaaggtgcgggcccaccactacagcgtggccctgcggcggctgggccagctgctgggcagccggcccaggcctcctcctgtggagcaggtgaccctgcaggacctgagccagctgatcatccggaactgccccagctttgacatccacaccatccacgtgtgcctgcacctggccgtgctgctgggcttccccagtgatggccccctggtgtgtgccctggagcaggagcggcggctgcggctgccccccaagcccccaccacccctgcagcccctgctgcggggcggccagggcctggaggccgccctgagctgcccccgcttcctgcgctacccccggcagcacctgatcagcagcctggccgaggcccggcctgaggagctgaccccccacgtgatggtgctgctggcccagcacctggcccggcaccggctgcgggagccccagctgctggaggccatcgcccacttcctggtggtgcaggagacccagctgagcagcaaggtggtgcagaagctggtgctgcccttcggccgcctgaactacctgcccctggagcagcagttcatgccctgcctggagcgcatcctggcccgggaggccggcgtggcccccctggccaccgtgaacatcctgatgagcctgtgccagctgcgctgcctgcccttccgggccctgcactttgtgttcagccctggcttcatcaactacatcagcggcaccccccacgccctgattgtgcggcgctacctgagcctgctggacacagctgtggagctggagctgcccggctaccggggcccccggctgccccggcggcagcaggtgcccatcttcccccagcccctcatcacagaccgggcccgctgcaagtacagccacaaggacatcgtggccgagggcctgcggcagctgctgggggaggagaagtaccggcaggacctgactgtgcccccaggctactgcacagacttcctgctgtgtgccagcagcagtggagctgtgctgcctgtgaggacccaggaccccttcctgccctacccacccaggagctgcccccagggccaggccgccagcagcgccaccacccgggaccctgcccagagggtggtgctggtgctgcgggagcgctggcacttctgcagagatggccgggtgctgctgggcagccgggccctgcgggagcggcacctgggcctgatgggctaccagctgctgcccctgccctttgaggagctggagagccagaggggcctgccccagctgaagagctacctgcggcagaagctgcaggccctgggcctgcgctggggccctgagggcggctag

SEQ ID NO: 167258 - DNA, 1650 bp, Artificial Sequence
  derived and/or modified sequence
atgcggcggccccggggcgagcccggcccccgggccccccggcccaccgaaggcgctacatgcgctggtccaggggagtcatggtctccatctccaaacagcatgcttagagtgctgctatccgcacagacaagccctgcccgtctgtccggactgctacttattccccccgtgcagccctgttgtctgggaccgagcaagtggggcgatagaccagtggggggagggccctcagcaggtcctgtgcagggtctccagagactactggaacaggccaaaagcccgggggagctactccgctggctgggtcagaacccatctaaggtaagggcacaccactactccgtggcgctacgccgactcggacaactgctaggcagcaggcctcgcccaccccccgtagaacaggtaaccctgcaggacctcagtcagctgattatccggaactgtccatcctttgatatccacacaattcatgtttgtctgcacctcgctgtgctgctgggtttcccatccgacggacctctcgtttgtgcactggagcaggaaaggcgcttgagactccccccaaagcctccaccccccttacagccacttcttcgggggggtcagggactcgaggccgccctcagttgccctcggtttctgcgctatcctcgccagcacctgatttcctccttggccgaggctcggccggaagaactgacaccacacgttatggtgctcttagcccagcaccttgcccggcatagactgcgagagcctcagctgctcgaggccattgcgcatttcctggtggttcaggagactcagctgtccagcaaggtggtgcaaaagctggtgctgccttttggaagactgaactacctgcctcttgagcagcaattcatgccatgtctggagcgcatcttagccagagaggccggcgtcgcacccctcgccaccgtgaatatactaatgtccctttgccaattgcggtgcctgccctttcgggctcttcactttgtgtttagccccggcttcatcaattacattagcggaactccccatgctcttatcgtacgccggtatttaagcctcctggatacggctgtggagctggagcttcctggataccgaggtccccgtctcccacggagacagcaagtcccgatcttccctcagcccttgatcacggaccgcgcacgctgtaagtacagccataaggatattgtggctgaaggtctgaggcaactcctgggcgaagagaagtatcgacaggatctgacagtccctccaggatactgtactgattttctactgtgcgcttcctctagcggcgctgtgctgccagtcaggacgcaggaccctttcttaccctacccaccccgaagttgtccacaagggcaggccgcgagtagcgcaaccactcgggatcccgctcagagagttgttctggtcttgcgggagcgctggcacttctgccgcgatggacgtgtcttgctcggctcgagggcactgagggagagacaccttggactgatgggttaccagctcttacctttgccgttcgaagaacttgaatcccagagagggcttccccaacttaaaagctaccttcggcagaagctgcaggcactgggccttcggtggggacccgaagggggttag

SEQ ID NO: 167259 - DNA, 1650 bp, Artificial Sequence
  derived and/or modified sequence
atgcgtcgacccaggggtgagcccggtccccgtgctccaaggccaacagaaggagccacatgcgctggaccaggggaatcatggagcccttcccctaactctatgttgagggtgcttctttctgcgcagactagtccagctaggctgtccggccttttgctgatcccgcctgtgcagccttgctgcctcggacccagcaagtggggagacaggccagtgggagggggtccaagcgccggtcctgtccaaggcctccagcggctgttagagcaggccaagtccccaggagagctgttgcgatggttgggtcagaatcccagtaaggtgcgggctcaccactacagcgtggcccttcggagactgggacaactgcttgggtcccgaccccgacctccgcctgtggaacaagtgactctacaagatttgagccaactcattattagaaactgccccagtttcgatatccacactattcatgtgtgtctgcatctggctgtgctcctggggttcccgagcgacggtcctttagtatgtgcgctcgaacaagagcgcagactgaggcttccccctaagccgcctccgccacttcaaccactacttcggggaggccagggcctggaggccgctctgtcctgtccccgattcctgcggtatccaagacagcacttgatctccagcctggccgaggctcgcccagaagagctgactcctcatgttatggtcctgcttgctcagcaccttgctcggcatcggctgagagagcctcagttgctggaggccatagctcacttccttgtggtgcaggaaactcagcttagcagtaaagtcgttcagaagctcgtgctgccatttggacgcctcaattatctgcccttagaacagcagtttatgccatgtctcgagcgcatcctggctcgggaggccggtgtggcacccctggctaccgttaatattctgatgagtctatgtcagttgcgttgtcttccttttagggccttgcacttcgtattcagtcctggcttcattaactacatctccggcacaccacacgcactcattgttcggcgttatctctctctgctcgataccgctgtcgagctggagctcccgggataccgaggcccacgactaccacggaggcagcaggtgccaatttttccccagcctctgattacggaccgagccaggtgcaagtactctcataaggatatcgtcgcggaagggttgcgacaactgttgggagaagagaagtaccgacaggacctgaccgtccccccaggatattgcacggattttctgttgtgtgctagttcctctggagctgtgctgcccgtcagaacgcaagatccctttctcccctatcctcctagaagttgcccccagggccaagccgcaagcagcgcaaccactagagaccccgctcagcgcgtcgtgctcgtgctgcgggaacgctggcacttttgccgcgacggacgcgtactcctggggtctcgtgccctgcgagagcggcacctcggcctgatgggctatcagctgctgcctctgccttttgaagagcttgaatcccagagggggctgcctcaacttaagagctatcttcggcagaagctgcaggccttgggcctccggtggggtcccgaggggggttag

SEQ ID NO: 167260 - DNA, 1650 bp, Artificial Sequence
  derived and/or modified sequence
atgagaagacccagaggcgagcccggccccagagcccccagacccaccgagggcgccacctgcgccggccccggcgagagctggagccccagccccaacagcatgctgagagtgctgctgagcgcccagaccagccccgccagactgagcggcctgctgctgatcccccccgtgcagccctgctgcctgggccccagcaagtggggcgacagacccgtgggcggcggccccagcgccggccccgtgcagggcctgcagagactgctggagcaggccaagagccccggcgagctgctgagatggctgggccagaaccccagcaaggtgagagcccaccactacagcgtggccctgagaagactgggccagctgctgggcagcagacccagacccccccccgtggagcaggtgaccctgcaggacctgagccagctgatcatcagaaactgccccagcttcgacatccacaccatccacgtgtgcctgcacctggccgtgctgctgggcttccccagcgacggccccctggtgtgcgccctggagcaggagagaagactgagactgccccccaagccccccccccccctgcagcccctgctgagaggcggccagggcctggaggccgccctgagctgccccagattcctgagataccccagacagcacctgatcagcagcctggccgaggccagacccgaggagctgaccccccacgtgatggtgctgctggcccagcacctggccagacacagactgagagagccccagctgctggaggccatcgcccacttcctggtggtgcaggagacccagctgagcagcaaggtggtgcagaagctggtgctgcccttcggcagactgaactacctgcccctggagcagcagttcatgccctgcctggagagaatcctggccagagaggccggcgtggcccccctggccaccgtgaacatcctgatgagcctgtgccagctgagatgcctgcccttcagagccctgcacttcgtgttcagccccggcttcatcaactacatcagcggcaccccccacgccctgatcgtgagaagatacctgagcctgctggacaccgccgtggagctggagctgcccggctacagaggccccagactgcccagaagacagcaggtgcccatcttcccccagcccctgatcaccgacagagccagatgcaagtacagccacaaggacatcgtggccgagggcctgagacagctgctgggcgaggagaagtacagacaggacctgaccgtgccccccggctactgcaccgacttcctgctgtgcgccagcagcagcggcgccgtgctgcccgtgagaacccaggaccccttcctgccctacccccccagaagctgcccccagggccaggccgccagcagcgccaccaccagagaccccgcccagagagtggtgctggtgctgagagagagatggcacttctgcagagacggcagagtgctgctgggcagcagagccctgagagagagacacctgggcctgatgggctaccagctgctgcccctgcccttcgaggagctggagagccagagaggcctgccccagctgaagagctacctgagacagaagctgcaggccctgggcctgagatggggccccgagggcggctag

SEQ ID NO: 167261 - protein, 127 aa, Artificial Sequence
  derived and/or modified sequence
MPKSKELVSSSSSGSDSDSEVDKKLKRKKQVAPEKPVKKQKTGETSRALSSSKQSSSSRDDNMFQIGKMRYVSVRDFKGKVLIDIREYWMDPEGEMKPGRKGISLNPEQWSQLKEQISDIDDAVRKL

SEQ ID NO: 167262 - protein, 66 aa, Artificial Sequence
  derived and/or modified sequence
MPKSKELVSSSSSGSDSDSEVDKKLKRKKQVAPEKPVKKQKTGETSRALSSSKQSSSSRDDNMFQV

SEQ ID NO: 167263 - protein, 123 aa, Artificial Sequence
  derived and/or modified sequence
MPKSKELVSSSSSGSDSDSEVDKKLKRKKQVAPEKPVKKQKTGETSRALSSSKQSSSSRDDNMFQIGKMRYVSVRDFKGKVLIDIREYWMDPEGEMKPGRKGISLNPEQWSQLKEQILVALWQ

SEQ ID NO: 167264 - DNA, 384 bp, Artificial Sequence
  derived and/or modified sequence
atgcccaagtcgaaggaactggtgtcctcatccagttcaggtagcgatagtgactcggaagtcgacaagaaacttaagcgaaaaaaacaggttgcgcctgagaagccggtgaagaaacagaagacgggagagacctcccgagcactgtcaagtagtaagcaatcctcctcaagccgggacgacaatatgtttcagataggcaagatgcggtatgttagcgtgagagactttaagggaaaggtcctgattgatatccgcgagtattggatggacccagagggcgaaatgaagccaggccgtaaagggatatcactaaaccccgaacagtggtcccagctcaaggagcagatttccgatattgacgacgccgtccggaagttgtag

SEQ ID NO: 167265 - DNA, 384 bp, Artificial Sequence
  derived and/or modified sequence
atgcctaagtctaaagagctcgtgtccagctcttctagcggctcggacagtgatagtgaagtggataaaaaactgaagcggaagaaacaagtcgccccagaaaagcccgtgaaaaagcaaaagacgggagagaccagccgagccctttcaagctccaagcagagctccagcagccgcgacgacaacatgtttcagattggcaaaatgcgatatgtgtccgttcgggatttcaaaggcaaggtgcttatcgatattagagagtactggatggatcctgaaggggagatgaaaccagggcggaaaggcatcagcttgaatccggagcagtggtctcagctcaaggagcagatatccgacatcgatgacgcagtgcgcaaactttag

SEQ ID NO: 167266 - DNA, 384 bp, Artificial Sequence
  derived and/or modified sequence
atgcctaagagcaaggaactggtctcctcctccagttctgggtccgattcggacagtgaggtggataagaaattaaaaaggaaaaagcaggttgcaccagagaaacccgttaagaagcagaagacaggggagacatcccgagctttgtccagcagcaagcagtcctcctccagcagagacgacaatatgttccaaataggaaaaatgcgttacgtatctgtgcgcgattttaagggcaaagtccttattgatatccgtgagtattggatggaccccgaaggagaaatgaagcctggaagaaaaggaatttccctaaatcctgagcagtggtctcaactgaaagaacaaatctcagacatcgatgacgccgtgaggaaactgtag

SEQ ID NO: 167267 - DNA, 201 bp, Artificial Sequence
  derived and/or modified sequence
atgcctaagagtaaggagctggtttcttcctcttcttctgggagcgatagcgattctgaggtggataaaaagctgaagaggaaaaagcaggtggcacccgagaagccagtcaagaagcagaaaactggcgaaaccagtcgtgctctaagctcttcaaagcagagcagttcgagtcgggatgacaatatgttccaggtttag

SEQ ID NO: 167268 - DNA, 384 bp, Artificial Sequence
  derived and/or modified sequence
atgccaaagtccaaggaacttgtttccagttcatcgagtggctcggattccgatagcgaagttgataaaaaactgaaaaggaaaaaacaggttgcgcccgaaaagccagtgaaaaagcagaagaccggtgagactagccgagcgttatcatcttctaagcagagctcatcatctagagatgacaacatgtttcagattggcaaaatgaggtatgtatctgtccgcgattttaaggggaaggtcctgattgacatcagggagtactggatggaccctgagggcgaaatgaagcccggacgtaagggcatcagcctgaatccagaacagtggtcccagttaaaagagcagatcagtgatattgatgatgctgtgaggaaattgtag

SEQ ID NO: 167269 - DNA, 384 bp, Artificial Sequence
  derived and/or modified sequence
atgccaaaatcgaaggagctggtgtcttccagctcctcaggatccgactccgatagcgaagtcgataagaaacttaagcgcaagaaacaggtggcgccagaaaagcctgtgaaaaagcaaaagacaggagagacttcgagggcactttcttcctctaaacagtcatctagctcgagggacgataatatgttccagatagggaagatgcgatatgtttccgtgcgagacttcaaaggaaaagtgctcattgatatcagggagtattggatggatccggaaggcgagatgaaaccagggagaaaaggaatcagcctgaacccagagcagtggtcccagttgaaggaacagattagcgacatcgatgatgccgttcggaagctttag

SEQ ID NO: 167270 - DNA, 372 bp, Artificial Sequence
  derived and/or modified sequence
atgccgaagtcaaaggaactcgtttcctcttcatcaagtgggtccgactccgactctgaagtggataaaaagctcaaaaggaagaaacaggtcgcaccagagaaacccgtgaagaaacagaagacaggtgagaccagcagagctctgtcctccagcaagcagtcttccagctcgcgagacgacaacatgttccagatcggaaagatgcgttatgtctccgtgagggactttaagggtaaggtgttgatcgatattagggagtactggatggaccctgagggcgagatgaagcctggaaggaaggggatttcccttaatcccgagcagtggagccagttgaaggaacagattctggttgccctgtggcagtag

SEQ ID NO: 167271 - DNA, 384 bp, Artificial Sequence
  derived and/or modified sequence
atgcccaagagcaaggagctggtgagcagcagcagcagcggcagtgacagcgacagcgaggtggacaagaagctgaagaggaagaagcaggtggcccctgagaagcctgtgaagaagcagaagacaggagagaccagccgggccctgagcagcagcaagcagagcagcagcagcagagatgacaacatgttccagatcggcaagatgagatatgtgtctgtgcgggacttcaagggcaaggtgctgattgacatccgggagtactggatggaccctgagggggagatgaagccaggcaggaagggcatcagcctgaaccctgagcagtggagccagctgaaggagcagatcagtgacattgatgatgctgtgaggaagctgtag

SEQ ID NO: 167272 - DNA, 201 bp, Artificial Sequence
  derived and/or modified sequence
atgcccaagagcaaggagctggtgagcagcagcagcagcggcagtgacagcgacagcgaggtggacaagaagctgaagaggaagaagcaggtggcccctgagaagcctgtgaagaagcagaagacaggagagaccagccgggccctgagcagcagcaagcagagcagcagcagcagagatgacaacatgttccaggtgtag

SEQ ID NO: 167273 - DNA, 372 bp, Artificial Sequence
  derived and/or modified sequence
atgcccaagagcaaggagctggtgagcagcagcagcagcggcagtgacagcgacagcgaggtggacaagaagctgaagaggaagaagcaggtggcccctgagaagcctgtgaagaagcagaagacaggagagaccagccgggccctgagcagcagcaagcagagcagcagcagcagagatgacaacatgttccagatcggcaagatgagatatgtgtctgtgcgggacttcaagggcaaggtgctgattgacatccgggagtactggatggaccctgagggggagatgaagccaggcaggaagggcatcagcctgaaccctgagcagtggagccagctgaaggagcagatcctggtggccctgtggcagtag

SEQ ID NO: 167274 - DNA, 384 bp, Artificial Sequence
  derived and/or modified sequence
atgcccaagagcaaggagctggtgagcagcagcagcagcggcagcgactccgactctgaagttgataagaaactgaagaggaagaagcaagtggcgccagagaaacctgtgaaaaagcagaaaactggtgaaacttctcgggccctttcttcttccaaacagtcaagcagttcacgtgatgacaacatgttccagatcggaaagatgcgctatgtttccgtgcgtgactttaagggaaaggtcctgatcgacataagagaatattggatggatcccgagggagagatgaagcccggaagaaaggggatatctctgaaccctgaacaatggagccagttgaaggagcaaatatcagacattgacgacgccgtacgcaagctgtag

SEQ ID NO: 167275 - DNA, 384 bp, Artificial Sequence
  derived and/or modified sequence
atgcccaagagcaaggagctggtgagcagcagcagcagcggcagcgactccgattcagaagtggataagaagctaaagcgaaaaaagcaggtggcccccgagaaacccgtcaaaaagcagaagactggcgaaaccagccgggcactgtcatcatcaaagcaatcctctagcagcagagatgacaatatgtttcagattgggaagatgaggtatgtatccgtgcgggacttcaaggggaaagttctaattgatattagggagtactggatggatcctgagggagaaatgaagcctgggcgtaaaggcatctcccttaatcctgaacagtggtctcagcttaaggagcaaatttcagacattgatgacgctgtgcgcaaactgtag

SEQ ID NO: 167276 - DNA, 384 bp, Artificial Sequence
  derived and/or modified sequence
atgcccaagagcaaggagctggtgagcagcagcagcagcggcagcgattcggactctgaagtggacaagaagttgaaacgaaagaagcaggtggccccggaaaagcccgtaaaaaaacagaagaccggcgaaacttccagggcgctgtcatcttctaagcagagtagttcttcaagagacgacaacatgttccaaatcggcaagatgcggtatgtctctgtccgcgacttcaagggtaaggtcttgatcgatataagagaatactggatggaccctgagggagaaatgaagcccggccgcaaagggatttcacttaacccggagcagtggagtcagttaaaagaacagatcagcgacattgacgacgcagtaagaaagctctag

SEQ ID NO: 167277 - DNA, 201 bp, Artificial Sequence
  derived and/or modified sequence
atgcccaagagcaaggagctggtgagcagcagcagcagcggcagcgattccgattccgaggtggacaagaagctcaagcgaaagaaacaggttgcgccagaaaaacctgttaaaaaacagaagactggcgaaacctcccgcgcattatcatctagtaagcagagcagctcttctagagatgacaacatgtttcaggtgtag

SEQ ID NO: 167278 - DNA, 384 bp, Artificial Sequence
  derived and/or modified sequence
atgcccaagagcaaggagctggtgagcagcagcagcagcggcagcgacagcgattctgaggttgataaaaagttgaaaagaaagaaacaggtggcacccgagaaaccagtaaagaagcagaagactggcgaaaccagccgcgctctctcctctagtaaacagtccagctccagcagggacgacaacatgttccagatcggaaagatgcgctatgtaagtgtgagggattttaaagggaaagtgctaattgacattagggaatactggatggatcctgagggtgaaatgaaacctggtaggaagggcatcagcctgaaccccgagcagtggtcccagctcaaagaacaaatttctgatatagacgacgcagtccggaagctctag

SEQ ID NO: 167279 - DNA, 384 bp, Artificial Sequence
  derived and/or modified sequence
atgcccaagagcaaggagctggtgagcagcagcagcagcggcagcgattcggactcggaggtggataagaagctcaagaggaagaagcaggtcgcgcctgaaaaacctgtgaagaagcaaaaaactggggagaccagtagggccttatcctctagcaagcagtctagttcaagtagggacgataacatgttccagattggcaagatgcgttacgtgtctgttcgtgacttcaaaggaaaggtgctgatagacattagagagtactggatggacccggagggcgaaatgaaaccagggcggaagggtatttctctcaaccccgagcagtggtcccagctcaaggagcagatatccgatattgatgacgctgtgagaaaactttag

SEQ ID NO: 167280 - DNA, 372 bp, Artificial Sequence
  derived and/or modified sequence
atgcccaagagcaaggagctggtgagcagcagcagcagcggcagcgacagtgattccgaggtggacaaaaaactgaagcggaagaagcaggtggcccccgagaagccagtgaaaaaacagaaaacaggagaaacttcacgggccctgtcatcctccaaacagtcgtccagcagccgagacgacaacatgttccaaattggaaaaatgaggtacgtgagcgtgagagatttcaaggggaaggtgctgatcgatatcagggaatactggatggatcccgagggggagatgaaacctgggagaaaaggaattagtctgaatcctgaacagtggtcacagcttaaagaacagatccttgttgccctttggcagtag

SEQ ID NO: 167281 - DNA, 3507 bp, Artificial Sequence
  derived and/or modified sequence
gccccatcacgtgaccgcagccccagcgcggcggggccggcgtctcctggctgccgtcacttccggttctctgtcagtcgcgagcgaacgaccaagagggtgttcgactgctagagccgagcgaagcgatgcctaaatcaaaggaacttgtttcttcaagctcttctggcagtgattctgacagtgaggttgacaaaaagttaaagaggaaaaagcaagttgctccagaaaaacctgtaaagaaacaaaagacaggtgagacttcgagagccctgtcatcttctaaacagagcagcagcagcagagatgataacatgtttcagattgggaaaatgaggtacgttagtgttcgcgattttaaaggcaaagtgctaattgatattagagaatattggatggatcctgaaggtgaaatgaaaccaggaagaaaaggtatttctttaaatccagaacaatggagccagctgaaggaacagatttctgacattgatgatgcagtaagaaaactgtaaaattcgagccatataaataaaacctgtactgttctagttgttttaatctgtctttttacattggcttttgttttctaaatgttctccaagctattgtatgtttggattgcagaagaatttgtaagatgaatacttttttttaatgtgcattattaaaaatattgagtgaagctaattgtcaactttattaaggattactttgtctgcccaccacctagtgtaaaataaaatcaagtaatacaatcttaactgttgtggccttttttgatcataagagttggtactgtttaaggccaaaagtaacagtttttatagatcttttagtttcaactcagcttttacaataaaaaggatttgtattgcattgagtttataaacttttggtttgtgaacttcatatttgatcttttctcttccaatcaaatgtctaggcttgtttgacttccacccccaatggtttttcactctttttatttacttcattttcctttaataacttaatctcttcatgttcagtttttacttcactctttattcttttctttgattatggtatgcttatttggaaagtcagtgaaactgtcaaaatgttatctcaataagatacttatatgagaactacaatcaccgaatctactgtattcaatattagcagatctaatttgataaacaacatggcttgtgtgaaaactgagcaggtgtttgtttacccatagtgttctgtgtagttattgcttagtctgcagaaaataatgacttagatgagatgtctgacttgctttcacttattaaacatgttcaccatgggatgatgtctgtaacatcagatattgttcaactagactaggatttaataaaaattgtgaaagcttactggcctaacattttattttataatattgggtatgaattatatgtagccagagatgtcattaagctttactgttatagtaggtaatatggttagtttgtagggaaaagagcatatgagcacatgcttgtgtattttggcctttgccccagtagaacagaccaatggcattctagacttgatgatactaagttttagcagacactagtaagtggtttgtatttaaccatactgatgaagcagacagattgaggcacagattttagtggctttgtggcaataaatagggcatggtgtgccttaggaaaagaatgtttataaagggaattataactgaaattaaaggaggcggcagtgaagaggaaataattctcttctatctaaatgatatacatatgatattttgagatttttataacagcagtggaacacaattctaggtagagtagaaaaaggaaagttttaaagacatataaaagattcttgttgacaaattatttttggtagcaaatctcaaatggttacctgctattaaggtctgccatattagagttttgcactattttgctaccaagtttgattcatacatctaaaacattttgtagttacttgtcaaggacttaatttgaaaatcatttgccaggccacatagttatcaatttttttttctatcagctattctgttgtatttctaaaacattttttagatgactttttaaagtatatttagcagtaaccttatgaggttcaaattggtaaatctcttgtaatttagccttcatcgaataataggtaccagtgtattaaaaatgtgtattttttgcagccccttgaaccagagtaggttcagagaaactcccaaagtttgtactttagacacatcatgcttgattggtaacttccctccttttttggggaacatgtttgtgtcctattaacttaattggatagatttttaaatatttcttatttttggcacacggaaagggtagttcgagtacagaactttgatttttggtgtagatgcagagggaatgatgggtaaatttcctaggtttatgtgaatttagggggtgtatgcattttgaaacaatctactaacagatggtgctgaaatctattacctacatgttttctagttgttcagcattatgttaatgaagcctccatataaggagtgtttctctggcacagttggtaagttgactgctaacttcatttaaatgtgttactggatatgcagtatactgaaattattaatcagtttgtgtataggaaaagagaactgggttaaaagcaaattaacttgttctgaaaagaaagtatagattaattttgttttctgtttaaattttatctccttggtaaagatttttttttcctgggcagaaaacttggcatttttaggcgtagataccttaccttacaatgccaaaatgaatttaattccagtactcaggtttttccctttaacagactctatgtgtatcagggctttctaatgggtttttcctcttcgtttttaaaatgtgagtagcatttgaccaatttccagtgctcttagcattttacttaaagaacaaccactacaaaagaaaatctttgtaatttgattgtcttttgctttgcttcattaatgcctaagaacttaagaatactcctacctcattagctactcaagatgctgtgacgatcaaatctattctacataatgcgtttagaaacaaagacttgggtgaaaaatgaaataagtatattctgacttggctattgaggggaaaattcagtattaagtgttcctcacaggagatatgttagcagaatactataaaagtttgaaatttttaaaaagtaaaagtacttaaatttaggtatctctcctgaaattctttgcagttcattttttatggcagttaatccagtgaaacactcaaaagtttttttttttttaaaagtgtttttccagataaactgtagggtgaacattcacataatcacaaatatgtaattctgtaattgtggaatgcttgtatgctttgttttcgtacatcttccatggagatgtctgaatataatactccatctgtgaatattttaaatgttgaaataaaagtaagaaatgtg

SEQ ID NO: 167282 - DNA, 562 bp, Artificial Sequence
  derived and/or modified sequence
gaccaagagggtgttcgactgctagagccgagcgaagctggtttcagtatcagttacttgaattacaagctgcttctccccccacccccacattggaacaggctcattaaggatgcctaaatcaaaggaacttgtttcttcaagctcttctggcagtgattctgacagtgaggttgacaaaaagttaaagaggaaaaagcaagttgctccagaaaaacctgtaaagaaacaaaagacaggtgagacttcgagagccctgtcatcttctaaacagagcagcagcagcagagatgataacatgtttcagattgggaaaatgaggtacgttagtgttcgcgattttaaaggcaaagtgctaattgatattagagaatattggatggatcctgaaggtgaaatgaaaccaggaagaaaaggtatttctttaaatccagaacaatggagccagctgaaggaacagatttctgacattgatgatgcagtaagaaaactgtaaaattcgagccatataaataaaacctgtactgttctagttgttttaatctgtctttttacattggct

SEQ ID NO: 167283 - DNA, 908 bp, Artificial Sequence
  derived and/or modified sequence
aaaacagtcctcttagtgcaccagaagggaccttttggcaagtggcatcttgccagaaaattaactcaaaacaaatccctaacagctcagagatggtggaggggaatttcagaaacagtcagcagggcagggccatgcaactgcttacaggaattgcctcactcacactttgatgttgattctctgcagagcttccgctgcttcaaaacggcgtgcaggagtcagagacattacatcaggaagatactgcagagatattctactccatctcattcattgtacaggatgcctaaatcaaaggaacttgtttcttcaagctcttctggcagtgattctgacagtgaggttgacaaaaagttaaagaggaaaaagcaagttgctccagaaaaacctgtaaagaaacaaaagacaggtgagacttcgagagccctgtcatcttctaaacagagcagcagcagcagagatgataacatgtttcagattgggaaaatgaggtacgttagtgttcgcgattttaaaggcaaagtgctaattgatattagagaatattggatggatcctgaaggtgaaatgaaaccaggaagaaaaggtatttctttaaatccagaacaatggagccagctgaaggaacagatttctgacattgatgatgcagtaagaaaactgtaaaattcgagccatataaataaaacctgtactgttctagttgttttaatctgtctttttacattggcttttgttttctaaatgttctccaagctattgtatgtttggattgcagaagaatttgtaagatgaatacttttttttaatgtgcattattaaaaatattgagtgaagctaattgtcaactttattaaggattactttgtctgcccaccacctagtgtaaaataaaatcaagtaat

SEQ ID NO: 167284 - DNA, 580 bp, Artificial Sequence
  derived and/or modified sequence
gttcgactgctagagccgagcgaagcgtgagtgcgcgggaccccctacccctactcctcggggcccccaccctcccagccgggccgtgagctgccttcggccctccactcctctcgccggcaatggccgcgggaaatggcggctctgccttacctcccccttcccctcggcgtccccggcccccttctccgtttctgactccacgcctgacgcgctgtgggcccttccgcggtagactcctgtccccggggagccgagtcgaggcggcgggcgctgcggcccggggcggtagattgagggcggccggggagtgaggagtcgcggggagagagtcgcggcgtccccgggacaatgcggcggcggcctgcctaggctcattaaggatgcctaaatcaaaggaacttgtttcttcaagctcttctggcagtgattctgacagtgaggttgacaaaaagttaaagaggaaaaagcaagttgctccagaaaaacctgtaaagaaacaaaagacaggtgagacttcgagagccctgtcatcttctaaacagagcagcagcagcagagatgataacatgtttcaggt

SEQ ID NO: 167285 - DNA, 684 bp, Artificial Sequence
  derived and/or modified sequence
gcagagcttccgctgcttcaaaacggcgtgcaggagtcagagacattacatcaggaagatactgcagagatattctactccatctcattcattgtacagattctaaactccctgaaggagacaaattaccagtggacaagaacacagcctctggagtccaataggcctggtgcattcattagggatgcctaaatcaaaggaacttgtttcttcaagctcttctggcagtgattctgacagtgaggttgacaaaaagttaaagaggaaaaagcaagttgctccagaaaaacctgtaaagaaacaaaagacaggtgagacttcgagagccctgtcatcttctaaacagagcagcagcagcagagatgataacatgtttcagattgggaaaatgaggtacgttagtgttcgcgattttaaaggcaaagtgctaattgatattagagaatattggatggatcctgaaggtgaaatgaaaccaggaagaaaaggtatttctttaaatccagaacaatggagccagctgaaggaacagatttctgacattgatgatgcagtaagaaaactgtaaaattcgagccatataaataaaacctgtactgttctagttgttttaatctgtctttttacattggcttttgttttctaaatgttctccaagctattgtatgtttggattgcagaaga

SEQ ID NO: 167286 - DNA, 771 bp, Artificial Sequence
  derived and/or modified sequence
gtcagtcgcgagcgaacgaccaagagggtgttcgactgctagagccgagcgaagccaaaggctgaagatttcgtttctctttttaaagttgcgttttgtataaattctacaatagtggtttcagtatcagttacttgaattacaagctgcttctccccccacccccacattggaacaggctcattaaggatgcctaaatcaaaggaacttgtttcttcaagctcttctggcagtgattctgacagtgaggttgacaaaaagttaaagaggaaaaagcaagttgctccagaaaaacctgtaaagaaacaaaagacaggtgagacttcgagagccctgtcatcttctaaacagagcagcagcagcagagatgataacatgtttcagattgggaaaatgaggtacgttagtgttcgcgattttaaaggcaaagtgctaattgatattagagaatattggatggatcctgaaggtgaaatgaaaccaggaagaaaaggtatttctttaaatccagaacaatggagccagctgaaggaacagatttctgacattgatgatgcagtaagaaaactgtaaaattcgagccatataaataaaacctgtactgttctagttgttttaatctgtctttttacattggcttttgttttctaaatgttctccaagctattgtatgtttggattgcagaagaatttgtaagatgaatacttttttttaatgtgcattattaaaaatattgagtgaagctaattgtcaactttattaaggattac

SEQ ID NO: 167287 - DNA, 1424 bp, Artificial Sequence
  derived and/or modified sequence
acttccggttctctgtcagtcgcgagcgaacgaccaagagggtgttcgactgctagagccgagcgaagcgatgcctaaatcaaaggaacttgtttcttcaagctcttctggcagtgattctgacagtgaggttgacaaaaagttaaagaggaaaaagcaagttgctccagaaaaacctgtaaagaaacaaaagacaggtgagacttcgagagccctgtcatcttctaaacagagcagcagcagcagagatgataacatgtttcagattgggaaaatgaggtacgttagtgttcgcgattttaaaggcaaagtgctaattgatattagagaatattggatggatcctgaaggtgaaatgaaaccaggaagaaaaggtatttctttaaatccagaacaatggagccagctgaaggaacagattttagtggctttgtggcaataaatagggcatggtgtgccttaggaaaagaatgtttataaagggaattataactgaaattaaaggaggcggcagtgaagaggaaataattctcttctatctaaatgatatacatatgatattttgagatttttataacagcagtggaacacaattctaggtagagtagaaaaaggaaagttttaaagacatataaaagattcttgttgacaaattatttttggtagcaaatctcaaatggttacctgctattaaggtctgccatattagagttttgcactattttgctaccaagtttgattcatacatctaaaacattttgtagttacttgtcaaggacttaatttgaaaatcatttgccaggccacatagttatcaatttttttttctatcagctattctgttgtatttctaaaacattttttagatgactttttaaagtatatttagcagtaaccttatgaggttcaaattggtaaatctcttgtaatttagccttcatcgaataataggtaccagtgtattaaaaatgtgtattttttgcagccccttgaaccagagtaggttcagagaaactcccaaagtttgtactttagacacatcatgcttgattggtaacttccctccttttttggggaacatgtttgtgtcctattaacttaattggatagatttttaaatatttcttatttttggcacacggaaagggtagttcgagtacagaactttgatttttggtgtagatgcagagggaatgatgggtaaatttcctaggtttatgtgaatttagggggtgtatgcattttgaaacaatctactaacagatggtgctgaaatctattacctacatgttttctagttgttcagcattatgttaatgaagcctccatataaggagtgtttctctggcacagttggtaagttgactgctaacttcatttaaatgtgttactggatatgcagtatactgaaattattaatcagt

SEQ ID NO: 167288 - DNA, 384 bp, Artificial Sequence
  derived and/or modified sequence
atgcctaaaagcaaagaactggtgtcttcttcttcgtctggctctgatagcgacagcgaagttgacaagaaactgaagagaaagaagcaagtggcccctgagaagccggtgaagaaacagaaaacaggggagacctctagggcgctgagctcctccaaacagagttcttcatctagagatgataacatgtttcagatcggaaagatgcgttatgtgagcgttagagatttcaaaggtaaggtattgatcgacattcgggaatattggatggaccctgaaggtgaaatgaagcccggtagaaaaggtatttctctaaaccccgaacagtggtcacagttaaaggaacagatttccgatatcgatgacgctgtacggaagctgtag

SEQ ID NO: 167289 - DNA, 384 bp, Artificial Sequence
  derived and/or modified sequence
atgccgaaaagtaaagaactagttagcagtagctcctccggcagtgactcggattctgaagtggacaaaaagcttaaacgcaagaagcaggtggcacccgaaaagccggtgaagaagcaaaagacaggcgaaacttcacgcgcactctcttcatctaaacagagttcaagctctagagatgataacatgtttcagatagggaagatgaggtatgtgagcgtgcgggacttcaaaggaaaggttctgatcgacatcagagagtattggatggatcccgaaggggaaatgaagccagggaggaagggaatttcactgaatcccgagcagtggtcccaactaaaggaacagatcagcgacattgacgacgcggtgcgcaagttgtag

SEQ ID NO: 167290 - DNA, 384 bp, Artificial Sequence
  derived and/or modified sequence
atgccaaagtctaaggaattggtttcttcatcaagcagcggctctgattccgactctgaagtggataaaaaactaaagaggaagaagcaagtggcacccgaaaaacccgtcaagaagcaaaagaccggggagactagtcgcgcactttcgagcagtaagcaaagcagttcatcccgcgatgataatatgttccaaattggtaaaatgagatacgtctctgtgagggatttcaagggaaaggtgctgatcgatattcgagagtattggatggatcccgagggggaaatgaagcccggtcggaagggtatctctcttaatcccgaacagtggtcgcaactcaaagagcagatctccgacatcgatgacgccgtgcgcaaactgtag

SEQ ID NO: 167291 - DNA, 201 bp, Artificial Sequence
  derived and/or modified sequence
atgcccaagtctaaagaactggttagtagctcctcctcagggtcggattccgactcggaggtggacaaaaagctgaagcgaaaaaaacaggtggctcctgaaaagccagtgaaaaagcagaaaacgggtgagacaagtcgcgcactcagcagctctaagcagagttcttcctccagagacgacaatatgttccaagtctag

SEQ ID NO: 167292 - DNA, 384 bp, Artificial Sequence
  derived and/or modified sequence
atgcctaagagcaaagagctggtgtcaagctcttcctctggatcagattctgacagcgaagtggataagaagttgaagagaaagaagcaggtggctcctgaaaagccagttaaaaagcagaaaaccggtgaaacgtccagagccctgagttcttccaaacagtcctcttcctcccgcgacgacaacatgttccagatcggaaaaatgcggtatgtgagtgtgcgagacttcaagggtaaagtactgattgacataagagaatactggatggatccggagggcgaaatgaaaccgggaagaaaaggcatttccctcaaccctgagcagtggtcccagctcaaggaacaaataagtgacattgatgacgctgtgcgcaagctctag

SEQ ID NO: 167293 - DNA, 384 bp, Artificial Sequence
  derived and/or modified sequence
atgccaaaatctaaagagctggtgtctagtagttcttcaggttcagattcggactccgaggtcgataagaagttaaagaggaagaagcaggttgctccagaaaagcctgtgaagaaacaaaagaccggcgagacctcacgcgctctgtcgagcagtaagcagtcctccagctctcgcgatgacaatatgttccagatcgggaagatgagatatgtaagcgttcgggattttaaagggaaggtgctcatcgacataagggaatactggatggatcccgagggcgaaatgaagcctggacgcaagggaatctcattgaatccagaacagtggtctcagctcaaggagcagatcagcgatatagacgatgccgtccgtaagctctag

SEQ ID NO: 167294 - DNA, 372 bp, Artificial Sequence
  derived and/or modified sequence
atgcccaagtcgaaagaactcgtgagtagctcatcttcagggtccgactctgattcggaagtagacaagaaattgaagagaaagaaacaagttgcccctgaaaagccggtgaagaagcagaagactggcgaaaccagccgagctttatctagttctaagcaaagcagcagtagccgggatgacaatatgttccaaatcggcaaaatgagatatgtttctgtgcgcgatttcaaaggcaaggttctcatcgacattagagagtactggatggaccccgagggtgaaatgaagcctggccgaaagggtatttctcttaaccccgagcagtggagccagttgaaagaacagatcctagtcgctctctggcagtag

SEQ ID NO: 167295 - DNA, 384 bp, Artificial Sequence
  derived and/or modified sequence
atgcccaagagcaaggagctggtgagcagcagcagcagcggcagcgacagcgacagcgaggtggacaagaagctgaagagaaagaagcaggtggcccccgagaagcccgtgaagaagcagaagaccggcgagaccagcagagccctgagcagcagcaagcagagcagcagcagcagagacgacaacatgttccagatcggcaagatgagatacgtgagcgtgagagacttcaagggcaaggtgctgatcgacatcagagagtactggatggaccccgagggcgagatgaagcccggcagaaagggcatcagcctgaaccccgagcagtggagccagctgaaggagcagatcagcgacatcgacgacgccgtgagaaagctgtag

SEQ ID NO: 167296 - DNA, 201 bp, Artificial Sequence
  derived and/or modified sequence
atgcccaagagcaaggagctggtgagcagcagcagcagcggcagcgacagcgacagcgaggtggacaagaagctgaagagaaagaagcaggtggcccccgagaagcccgtgaagaagcagaagaccggcgagaccagcagagccctgagcagcagcaagcagagcagcagcagcagagacgacaacatgttccaggtgtag

SEQ ID NO: 167297 - DNA, 372 bp, Artificial Sequence
  derived and/or modified sequence
atgcccaagagcaaggagctggtgagcagcagcagcagcggcagcgacagcgacagcgaggtggacaagaagctgaagagaaagaagcaggtggcccccgagaagcccgtgaagaagcagaagaccggcgagaccagcagagccctgagcagcagcaagcagagcagcagcagcagagacgacaacatgttccagatcggcaagatgagatacgtgagcgtgagagacttcaagggcaaggtgctgatcgacatcagagagtactggatggaccccgagggcgagatgaagcccggcagaaagggcatcagcctgaaccccgagcagtggagccagctgaaggagcagatcctggtggccctgtggcagtag

SEQ ID NO: 167298 - protein, 453 aa, Artificial Sequence
  derived and/or modified sequence
MALVRALVCCLLTAWHCRSGLGLPVAPAGGRNPPPAIGQFWHVTDLHLDPTYHITDDHTKVCASSKGANASNPGPFGDVLCDSPYQLILSAFDFIKNSGQEASFMIWTGDSPPHVPVPELSTDTVINVITNMTTTIQSLFPNLQVFPALGNHDYWPQDQLPVVTSKVYNAVANLWKPWLDEEAISTLRKGGFYSQKVTTNPNLRIISLNTNLYYGPNIMTLNKTDPANQFEWLESTLNNSQQNKEKVYIIAHVPVGYLPSSQNITAMREYYNEKLIDIFQKYSDVIAGQFYGHTHRDSIMVLSDKKGSPVNSLFVAPAVTPVKSVLEKQTNNPGIRLFQYDPRDYKLLDMLQYYLNLTEANLKGESIWKLEYILTQTYDIEDLQPESLYGLAKQFTILDSKQFIKYYNYFFVSYDSSVTCDKTCKAFQICAIMNLDNISYADCLKQLYIKHNY

SEQ ID NO: 167299 - DNA, 1362 bp, Artificial Sequence
  derived and/or modified sequence
atggccctggtgagagccctggtgtgctgcctgctgaccgcctggcactgcagaagcggcctgggcctgcccgtggcccccgccggcggcagaaaccccccccccgccatcggccagttctggcacgtgaccgacctgcacctggaccccacctaccacatcaccgacgaccacaccaaggtgtgcgccagcagcaagggcgccaacgccagcaaccccggccccttcggcgacgtgctgtgcgacagcccctaccagctgatcctgagcgccttcgacttcatcaagaacagcggccaggaggccagcttcatgatctggaccggcgacagccccccccacgtgcccgtgcccgagctgagcaccgacaccgtgatcaacgtgatcaccaacatgaccaccaccatccagagcctgttccccaacctgcaggtgttccccgccctgggcaaccacgactactggccccaggaccagctgcccgtggtgaccagcaaggtgtacaacgccgtggccaacctgtggaagccctggctggacgaggaggccatcagcaccctgagaaagggcggcttctacagccagaaggtgaccaccaaccccaacctgagaatcatcagcctgaacaccaacctgtactacggccccaacatcatgaccctgaacaagaccgaccccgccaaccagttcgagtggctggagagcaccctgaacaacagccagcagaacaaggagaaggtgtacatcatcgcccacgtgcccgtgggctacctgcccagcagccagaacatcaccgccatgagagagtactacaacgagaagctgatcgacatcttccagaagtacagcgacgtgatcgccggccagttctacggccacacccacagagacagcatcatggtgctgagcgacaagaagggcagccccgtgaacagcctgttcgtggcccccgccgtgacccccgtgaagagcgtgctggagaagcagaccaacaaccccggcatcagactgttccagtacgaccccagagactacaagctgctggacatgctgcagtactacctgaacctgaccgaggccaacctgaagggcgagagcatctggaagctggagtacatcctgacccagacctacgacatcgaggacctgcagcccgagagcctgtacggcctggccaagcagttcaccatcctggacagcaagcagttcatcaagtactacaactacttcttcgtgagctacgacagcagcgtgacctgcgacaagacctgcaaggccttccagatctgcgccatcatgaacctggacaacatcagctacgccgactgcctgaagcagctgtacatcaagcacaactactag

SEQ ID NO: 167300 - DNA, 1362 bp, Artificial Sequence
  derived and/or modified sequence
atggccctcgtccgcgcccttgtgtgttgcttactgaccgcctggcattgcaggagtggactggggctgcctgtcgcccctgctggtggtcgcaatccccccccagctatcggacagttttggcatgtcacagatcttcacctcgacccaacttatcatatcacagatgatcacactaaagtgtgtgctagcagtaaaggtgctaatgcaagtaatcctgggccctttggagacgtgttgtgtgactctccataccagcttattctctcggctttcgattttataaagaactctggccaggaggcatcattcatgatatggactggcgactctcctccccatgtgccagtgccagaactgagtaccgacaccgtcatcaatgtgatcaccaatatgaccacaacgatccaaagcctgtttcccaacctgcaggttttccctgcccttgggaatcacgactattggccacaggatcagctgcctgtagtgacttcgaaagtctacaacgcggttgccaacctttggaagccctggcttgatgaagaggcaatctcgacattgcgaaaaggcggcttttatagtcagaaggtgaccaccaaccctaacctgagaattatcagccttaatacaaatctttactatgggcccaacatcatgacattgaataagacagacccggcaaaccagttcgagtggctcgagtctacactcaacaattcccagcagaacaaggagaaagtctacattattgctcacgtgccagtcggatacttaccatcctcacagaatataacagccatgagagagtattataatgaaaagctaatcgacatattccaaaagtattccgacgtaatcgccgggcagttttatggccacactcacagagacagcatcatggtattgagtgacaagaagggatccccggttaattccttattcgtcgctcccgccgtgacacctgtgaaatctgttctcgagaaacagactaacaaccccggtatccgcttattccagtacgatcccagggattataagctgctcgacatgctacagtactatttgaacttgacggaggccaatcttaagggggaatctatttggaaattagagtacatactgacgcagacatacgatatcgaagatcttcagccagagagcctctatggactggccaagcaattcacaatactcgactctaaacagtttatcaagtactacaattactttttcgtgtcttacgacagttccgtcacatgtgacaaaacgtgcaaagcgtttcaaatatgcgcaattatgaatctagacaatattagctatgctgattgcttgaaacagctctatattaaacataactactag

SEQ ID NO: 167301 - DNA, 1362 bp, Artificial Sequence
  derived and/or modified sequence
atggccctggtgcgggccctggtgtgctgcctgctgacagcctggcactgccgcagcggcctgggcctgcctgtggccccagctgggggcagaaatcctcctccagccatcggccagttctggcacgtgacagacctgcacctggaccccacctaccacatcacagatgaccacaccaaggtgtgtgccagcagcaagggggccaatgccagcaaccctggcccctttggagatgtgctgtgtgacagcccctaccagctgatcctgagcgcctttgacttcatcaagaacagcggccaggaggccagcttcatgatctggacaggagacagccccccccacgtgcctgtgcctgagctgagcacagacaccgtcatcaacgtcatcaccaacatgaccaccaccatccagagcctcttccccaacctgcaggtgtttcctgccctgggcaaccacgactactggccccaggaccagctgcctgtggtgaccagcaaggtgtacaatgctgtggccaacctgtggaagccctggctggatgaggaggccatcagcaccctgaggaaaggaggcttctacagccagaaggtgaccaccaaccccaacctgcgcatcatcagcctgaacaccaacctgtactacggccccaacatcatgaccctgaacaagacagatcctgccaaccagtttgagtggctggagagcaccctgaacaacagccagcagaacaaggagaaggtgtacatcatcgcccacgtgcctgtgggctacctgcccagcagccagaacatcacagccatgagggagtactacaatgagaagctgattgacatcttccagaagtacagtgatgtgattgctggccagttctacggccacacccaccgggacagcatcatggtgctgagtgacaagaagggcagccctgtgaacagcctgtttgtggccccagctgtgacccctgtgaagtctgtgctggagaagcagaccaacaaccctggcatccgcctcttccagtatgacccccgggactacaagctgctggacatgctgcagtactacctgaacctgacagaggccaacctgaagggggagagcatctggaagctggagtacatcctgacccagacctatgacatcgaggacctgcagcctgagagcctgtatggcctggccaagcagttcaccatcctggacagcaagcagttcatcaagtactacaactacttctttgtgtcctatgacagctctgtgacctgtgacaagacctgcaaggccttccagatctgtgccatcatgaacctggacaacatctcctatgctgactgcctgaagcagctgtacatcaagcacaactactag

SEQ ID NO: 167302 - DNA, 1362 bp, Artificial Sequence
  derived and/or modified sequence
atggccctggtgcgggccctggtgtgctgcctgctgaccgcctggcactgccgtagtgggctgggccttcccgtggcccctgcaggcgggaggaatcctcctccggccattggccagttttggcatgtcaccgaccttcaccttgatccaacctaccacataaccgatgatcacacgaaggtctgcgcaagtagcaaaggagcaaacgccagtaatcccggcccattcggtgacgtgctgtgcgacagcccctaccagctgatcctcagtgcctttgactttatcaagaactctgggcaggaagcctctttcatgatctggacgggagactcacctccccacgtgccggtgcccgagctgtctactgataccgtaatcaatgtcatcaccaacatgacaaccacaatccagtctctgttcccaaacctgcaagttttcccagccctgggaaatcacgactactggccgcaggatcagttacccgtcgtaacatccaaggtgtataacgccgtggctaatctatggaagccttggcttgatgaggaggctatctcgacattaaggaaaggaggcttctactcccaaaaggtcacaactaaccctaatctgcgaattatctcccttaatacaaacttgtattacggtcccaacataatgactcttaataaaaccgatcctgccaaccagttcgaatggctggaatccactctcaacaactcccagcaaaacaaggagaaggtctatataatcgcgcacgtccctgttgggtacctgccctcttctcagaatatcaccgcaatgcgtgaatactacaacgaaaagcttattgatattttccaaaaatatagtgatgtgattgccggccaattttacgggcacacgcatagggactccatcatggtgctgtccgacaagaagggatctcctgttaacagcctgtttgtcgcccctgcggttacgccagtgaaatcagtgctcgagaaacagacaaataaccctgggatccgcctgtttcaatacgacccaagagactacaaacttctcgacatgctacaatattatctgaacttaacagaggctaatctcaagggagaatcaatttggaaattggaatacattctcacacagacttatgatatcgaagacctgcagcccgagagcctgtacggtttagctaaacagtttactatcctggatagtaagcaattcatcaaatattataattatttttttgtaagctacgatagcagcgtgacatgcgacaagacgtgcaaggctttccagatatgcgctattatgaacctcgacaacatctcctatgctgactgtcttaaacagctttatattaagcataattattag

SEQ ID NO: 167303 - DNA, 1362 bp, Artificial Sequence
  derived and/or modified sequence
atggctctggtgcgcgcacttgtctgctgcctgctcaccgcctggcattgtcgaagcggcctggggctccccgtcgctcccgcaggcggtcggaacccccctccagccatcggacagttctggcatgttactgatttacacctggatcctacgtatcatattaccgatgatcatactaaggtgtgcgcctcgagcaagggagcgaacgcatctaaccccggaccctttggagacgtcctgtgtgatagcccgtatcaattgattctctctgcctttgacttcatcaaaaactctggtcaggaagcttcatttatgatttggacgggagactctccgccacacgtgcccgtgcccgagcttagtacagacactgtcattaacgtcatcaccaatatgacaaccaccattcaatctctgttccctaatctccaggtgtttccagctctaggcaatcacgactactggccccaggaccagctacccgttgtcacatccaaagtctataatgccgtagcaaacttgtggaagccttggctggatgaggaagcaataagcaccctccgcaaggggggattttatagccagaaggtgaccaccaaccccaatttaagaataatctccctcaacactaacctctactacggtcccaacatcatgacactcaataagaccgacccagccaatcaattcgagtggttggaatctacgctgaacaatagccagcagaacaaagaaaaggtgtatatcatcgcccacgtcccagttggctacctgcccagcagccagaacatcaccgcaatgcgtgagtactataatgaaaagctgatagatatctttcagaaatacagtgacgtgattgcgggtcagttctacggacatacccacagggactccattatggtcttgtcagacaagaagggttctcctgtgaattctttgttcgtcgccccagcggttacccctgtgaaaagcgtgcttgagaagcagaccaacaaccctggcattcggctcttccaatatgatcctcgcgactacaagctcttggacatgctccaatactacctgaacctgactgaggctaacctcaaaggtgaatcaatctggaaattggagtacatccttacacagacatatgatattgaagatctccaacccgaatcactctatggtctggctaagcaattcaccattctggatagcaaacagtttatcaaatactataactacttcttcgtaagttacgactccagcgttacttgtgacaaaacctgtaaagccttccagatatgtgccatcatgaacctggacaatatctcttacgccgattgccttaaacaactgtacataaaacacaactattag

SEQ ID NO: 167304 - DNA, 1851 bp, Artificial Sequence
  derived and/or modified sequence
cgctaaacagcagctgaaggtcaggcgaactgactcgctgcggaatctgcctttgcacgtgatcagtcggacgtctacacccgcagccgtcttctgtctccgcctcaccctcaggcctgacggtccgagtggagctgcgggacagcccgaacctccaggtcagccccgcggccctccatggcgctggtgcgcgcactcgtctgctgcctgctgactgcctggcactgccgctccggcctcgggctgcccgtggcgcccgcaggcggcaggaatcctcctccggcgataggacagttttggcatgtgactgacttacacttagaccctacttaccacatcacagatgaccacacaaaagtgtgtgcttcatctaaaggtgcaaatgcctccaaccctggcccttttggagatgttctgtgtgattctccatatcaacttattttgtcagcatttgattttattaaaaattctggacaagaagcatctttcatgatatggacaggggatagcccacctcatgttcctgtacctgaactctcaacagacactgttataaatgtgatcactaatatgacaaccaccatccagagtctctttccaaatctccaggttttccctgcgctgggtaatcatgactattggccacaggatcaactgcctgtagtcaccagtaaagtgtacaatgcagtagcaaacctctggaaaccatggctagatgaagaagctattagtactttaaggaaaggtggtttttattcacagaaagttacaactaatccaaaccttaggatcatcagtctaaacacaaacttgtactacggcccaaatataatgacactgaacaagactgacccagccaaccagtttgaatggctagaaagtacattgaacaactctcagcagaataaggagaaggtgtatatcatagcacatgttccagtggggtatctgccatcttcacagaacatcacagcaatgagagaatactataatgagaaattgatagatatttttcaaaaatacagtgatgtcattgcaggacaattttatggacacactcacagagacagcattatggttctttcagataaaaaaggaagtccagtaaattctttgtttgtggctcctgctgttacaccagtgaagagtgttttagaaaaacagaccaacaatcctggtatcagactgtttcagtatgatcctcgtgattataaattattggatatgttgcagtattacttgaatctgacagaggcgaatctaaagggagagtccatctggaagctggagtatatcctgacccagacctacgacattgaagatttgcagccggaaagtttatatggattagctaaacaatttacaatcctagacagtaagcagtttataaaatactacaattacttctttgtgagttatgacagcagtgtaacatgtgataagacatgtaaggcctttcagatttgtgcaattatgaatcttgataatatttcctatgcagattgcctcaaacagctttatataaagcacaattactagtatttcacagtttttgctaatagaaaatgctgattctgattctgagatcaatttgtgggaattttacataaatctttgttaattactgagtgggcaagtagacttcctgtctttgctttctttttttttttctttttgatgccttaatgtagatatctttatcattctgaattgtattatatatttaaagtgctcattaatagaatgatggatgtaaattggatgtaaatattcagtttatataattatatctaatttgtacccttgttgaaattgtcatttatacaataaagcgaattctttatctctaaa

SEQ ID NO: 167305 - protein, 1040 aa, Artificial Sequence
  derived and/or modified sequence
MAAAPALKHWRTTLERVEKFVSPLYFTDCNLRGRLFGASCPVAVLSSFLTPERLPYQEAVQRDFRPAQVGDSFGPTWWTCWFRVELTIPEAWVGQEVHLCWESDGEGLVWRDGEPVQGLTKEGEKTSYVLTDRLGERDPRSLTLYVEVACNGLLGAGKGSMIAAPDPEKMFQLSRAELAVFHRDVHMLLVDLELLLGIAKGLGKDNQRSFQALYTANQMVNVCDPAQPETFPVAQALASRFFGQHGGESQHTIHATGHCHIDTAWLWPFKETVRKCARSWVTALQLMERNPEFIFACSQAQQLEWVKSRYPGLYSRIQEFACRGQFVPVGGTWVEMDGNLPSGEAMVRQFLQGQNFFLQEFGKMCSEFWLPDTFGYSAQLPQIMHGCGIRRFLTQKLSWNLVNSFPHHTFFWEGLDGSRVLVHFPPGDSYGMQGSVEEVLKTVANNRDKGRANHSAFLFGFGDGGGGPTQTMLDRLKRLSNTDGLPRVQLSSPRQLFSALESDSEQLCTWVGELFLELHNGTYTTHAQIKKGNRECERILHDVELLSSLALARSAQFLYPAAQLQHLWRLLLLNQFHDVVTGSCIQMVAEEAMCHYEDIRSHGNTLLSAAAAALCAGEPGPEGLLIVNTLPWKRIEVMALPKPGGAHSLALVTVPSMGYAPVPPPTSLQPLLPQQPVFVVQETDGSVTLDNGIIRVKLDPTGRLTSLVLVASGREAIAEGAVGNQFVLFDDVPLYWDAWDVMDYHLETRKPVLGQAGTLAVGTEGGLRGSAWFLLQISPNSRLSQEVVLDVGCPYVRFHTEVHWHEAHKFLKVEFPARVRSSQATYEIQFGHLQRPTHYNTSWDWARFEVWAHRWMDLSEHGFGLALLNDCKYGASVRGSILSLSLLRAPKAPDATADTGRHEFTYALMPHKGSFQDAGVIQAAYSLNFPLLALPAPSPAPATSWSAFSVSSPAVVLETVKQAESSPQRRSLVLRLYEAHGSHVDCWLHLSLPVQEAILCDLLERPDPAGHLTLRDNRLKLTFSPFQVLSLLLVLQPPPH

SEQ ID NO: 167306 - DNA, 3123 bp, Artificial Sequence
  derived and/or modified sequence
atggcagccgcccctgcccttaagcattggcgcactacactggaacgcgtggaaaagtttgtcagccccctgtatttcaccgactgtaacttaaggggacggctttttggagccagttgccccgtagcggttctaagtagttttctaacgccagagaggctcccctatcaggaggccgtccagcgcgacttccgtcctgcccaagtcggggacagcttcggaccgacctggtggacctgttggtttcgcgtggaacttacaatcccagaagcttgggtaggccaagaggtgcacctgtgctgggaatccgatggagaagggctagtctggagagacggcgaacctgtacaaggactaacaaaggagggggagaagacatcctacgtcctgacggataggctgggggaacgggacccacggagtctcaccctatacgtagaagtggcttgtaatggtctgttgggcgctgggaaggggagtatgattgcagcccccgaccctgaaaaaatgtttcagctttcgagagccgagttggctgtgttccaccgagatgttcacatgctgctggttgatctggaactcctcctgggcatcgccaaaggacttggtaaggataaccagcgctcctttcaggcgctttacactgccaaccagatggtgaatgtatgcgatccagcccaacctgaaacattcccagtagctcaggccttagccagtcggttcttcgggcaacacgggggcgaaagccagcatactatacatgcaactgggcattgccacattgacactgcttggctgtggccctttaaagaaaccgttcgcaaatgcgccaggtcttgggttaccgcacttcagttaatggaacgtaatcctgaattcatttttgcctgttcacaagcccagcagctcgaatgggtcaagtcgcgctaccctggactgtacagccgtattcaggagtttgcatgccgcggccagttcgtgccagtggggggcacctgggttgagatggatgggaatctgcctagcggcgaggcaatggtcagacagtttctgcaggggcagaattttttcctgcaagagttcggtaagatgtgcagcgaattttggctgccagacaccttcggatatagtgctcagttgccccagattatgcacgggtgcgggatcaggcgctttctgacacagaagctgtcatggaatctcgtcaattctttcccacaccacacgtttttttgggagggcttggatgggtctagagtgctcgtccattttcctccaggagacagttacggaatgcaggggtccgtggaggaggttctgaagaccgtagcaaacaatagagacaaaggccgagccaaccatagcgcctttctcttcggtttcggggacggcggcgggggaccaacccaaacaatgctggatcgactgaagcgactctctaacacggatggattgccgagagtacagctgtcatccccaagacaacttttcagcgcgctcgagtccgacagcgagcagctctgcacatgggtgggggaattattccttgaattgcacaatggaacctacaccactcatgctcagattaagaaggggaaccgtgaatgcgagcggatcttacacgacgtggagttgctgagctcgttggctctggctcgatctgcccagttcctgtaccctgccgcccaactgcagcacctgtggaggttactgctgcttaatcagtttcacgatgtggttacagggagctgtatccagatggtggctgaggaggctatgtgccactatgaggacattagaagccacggaaatacactcctctcagccgcagcagcagcactgtgcgcaggagaaccaggacctgaaggccttttgattgttaacacccttccttggaagcgcatcgaggtgatggccctccctaaacccgggggcgcacatagcctggccctcgtaaccgtgccatctatgggctacgcgcctgtgccacccccgacttcattgcagccacttctgcctcagcaaccagtgttcgtagttcaagaaactgacgggagtgttaccttagacaacggcataatcagagtgaagctggaccctaccgggcggctcacgtccctggtgctggttgcaagtggacgtgaggctattgccgaaggcgccgtcggcaatcagttcgtcctgtttgacgacgtgcctttatattgggacgcatgggacgtaatggattatcacctagaaactaggaaacctgtactcggacaggctggcactttggctgtgggcacagagggtggactgagaggatctgcgtggtttttactgcagatctctcccaattccaggttgagccaggaggtggtcctggatgtaggctgcccttatgtgcggttccacaccgaggtccactggcacgaggcacacaagtttctcaaggttgaatttcctgccagagtacggtcctcccaggccacatatgaaattcaattcgggcacctccagaggcccacacactacaacacctcgtgggattgggccaggtttgaggtgtgggcccatagatggatggacctctccgaacacggcttcggtctggcactgctgaatgactgtaaatacggggcctccgttcggggaagtatcctgtcgctcagcctgttgagggcccccaaggcccccgatgccactgccgacacaggtcgacatgagtttacctacgctctcatgccacataagggatccttccaagacgcaggcgtgattcaggcagcatactcgctaaacttccctttgctcgcgctgcctgcccctagtccagcccctgcgacctcgtggtctgctttctccgtgagtagtcctgctgtggtgttggaaaccgtgaagcaagctgagtcctccccccaacgccgtagtctcgtgcttcgcttgtatgaagcgcacggcagtcacgtcgactgctggttacatttatccctccctgtacaggaagccattctgtgtgacctattggagcgtccagacccagcagggcacctcacgctccgcgataataggttaaagttaactttctctccttttcaggtgctgtctctattgctggtgctgcagccacctccccattag

SEQ ID NO: 167307 - DNA, 3123 bp, Artificial Sequence
  derived and/or modified sequence
atggctgctgccccagccctgaagcactggaggaccaccctggagcgggtggagaagtttgtgagccccctgtacttcacagactgcaacctgcggggccgcctgtttggagccagctgccctgtggccgtgctgagcagcttcctgaccccagagcggctgccctaccaggaggccgtgcagagggacttccggcctgcccaggtgggggacagctttggccccacctggtggacctgctggttccgggtggagctgaccatccctgaggcctgggtgggccaggaggtgcacctgtgctgggagagtgatggagagggcctggtgtggagagatggagagcctgtgcagggcctgaccaaggagggggagaagaccagctatgtgctgacagaccggctgggggagcgggaccccaggagcctgaccctgtatgtggaggtggcctgcaatggcctgctgggcgctgggaagggctccatgattgctgccccagaccctgagaagatgttccagctgagcagagctgagctggccgtgttccacagagatgtgcacatgctgctggtggacctggagctgctgctgggcatcgccaagggcctgggcaaggacaaccagaggagcttccaggccctgtacacagccaaccagatggtgaatgtgtgtgaccctgcccagcctgagaccttccctgtggcccaggccctggccagccgcttcttcggccagcacggcggggagagccagcacaccatccacgccaccggccactgccacatcgacacagcctggctgtggcccttcaaggagaccgtgaggaaatgtgcccgctcctgggtgacagccctgcagctgatggagagaaatcctgagttcatctttgcctgcagccaggcccagcagctggagtgggtgaagagccgctacccaggcctgtacagccgcatccaggagtttgcctgccggggccagtttgtgcctgtgggcggcacctgggtggagatggatggcaacctgcccagcggggaggccatggtgcggcagttcctgcagggccagaacttcttcctgcaggagtttgggaagatgtgcagcgagttctggctgcctgacaccttcggctacagcgcccagctgccccagatcatgcacggctgcggcatccgccgcttcctgacccagaagctgtcctggaacctggtgaacagcttcccccaccacaccttcttctgggagggcctggatggcagccgggtgctggtgcacttccccccaggggacagctatggcatgcagggctctgtggaggaggtgctgaagacagtggccaacaacagagacaagggccgggccaaccacagcgccttcctgtttggatttggagatggcggcggcggccccacccagaccatgctggaccggctgaagaggctgagcaacacagatggcctgccccgggtgcagctgagcagcccccggcagctgttcagcgccctggagagtgacagcgagcagctgtgcacctgggtgggggagctgttcctggagctgcacaacggcacctacaccacccacgcccagatcaagaagggcaacagagaatgtgagcgcatcctgcatgatgtggagctgctgagcagcctggccctggcccggagcgcccagttcctgtacccagctgcccagctgcagcacctgtggaggctgctgctgctgaaccagttccatgatgtggtgacaggcagctgcatccagatggtggccgaggaggccatgtgccactatgaggacatccgcagccacggcaacaccctgctgtctgctgctgctgctgccctgtgtgccggggagcccggccctgagggcctgctgattgtgaacaccctgccctggaagagaattgaggtgatggccctgcccaagccaggaggagcccacagcctggccctggtgacagtgcccagcatgggctacgcccctgtgcccccacccaccagcctgcagcccctgctgccccagcagcctgtgtttgtggtgcaggagacagatggctctgtgaccctggacaatggcatcatccgggtgaagctggaccccaccggccgcctgaccagcctggtgctggtggccagcggccgggaggccatcgccgagggcgctgtgggcaaccagtttgtgctgtttgatgatgtgcccctgtactgggatgcctgggatgtgatggactaccacctggagaccaggaagcctgtgctgggccaggccggcaccctggccgtgggcacagaaggaggcctgcggggcagcgcctggttcctgctgcagatcagccccaacagccggctgagccaggaggtggtgctggatgtgggctgcccctacgtgcgcttccacacagaggtgcactggcatgaggcccacaagttcctgaaggtggagttccctgcccgggtgcgcagcagccaggccacctatgagatccagtttggccacctgcagaggcccacccactacaacacctcctgggactgggccaggtttgaggtgtgggcccaccgctggatggacctgtctgaacatggcttcggcctggccctgctgaatgactgcaagtatggagcctctgtgcggggcagcatcctgagcctgagcctgctgcgggcccccaaggccccagatgccacagctgacaccggcagacatgagttcacctacgccctgatgccccacaagggcagcttccaggatgctggggtcatccaggccgcctacagcctgaacttccccctgctggccctgcctgcccccagccctgccccagccacctcctggagcgccttctctgtgagcagccctgctgtggtgctggagaccgtgaagcaggccgagagcagcccccagaggaggagcctggtgctgcggctgtatgaggcccacggcagccacgtggactgctggctgcacctgagcctgcctgtgcaggaggccatcctgtgtgacctgctggagaggccagaccctgctggccacctgaccctgcgggacaaccggctgaagctgaccttcagccccttccaggtgctgagcctgctgctggtgctgcagcccccaccccactag

SEQ ID NO: 167308 - DNA, 3254 bp, Artificial Sequence
  derived and/or modified sequence
ggagcgagagcccggcgatggcggctgcgccggccttgaagcactggcgcaccacgctggagcgggtggagaagttcgtgtcgccgctctactttaccgactgtaacctccgcggcaggctttttggggccagctgccctgtggctgtgctctccagcttcctgacgccggagagacttccctaccaggaggcagtccagcgggacttccgccccgcgcaggtcggcgacagcttcggacccacatggtggacctgctggttccgggtggagctgaccatcccagaggcatgggtgggccaggaagttcacctttgctgggaaagtgatggagaaggtctggtgtggcgtgatggagaacctgtccagggtttaaccaaagagggtgagaagaccagctatgtcctgactgacaggctgggggaaagagacccccgaagcctcactctctatgtggaagtagcctgcaatgggctcctgggggccgggaagggaagcatgattgcagcccctgaccctgagaagatgttccagctgagccgggctgagctagctgtgttccaccgggatgtccacatgctcctggtggatctggagctgctgctgggcatagccaagggcctcgggaaggacaaccagcgcagcttccaggccctgtacacagccaatcagatggtgaacgtgtgtgaccctgcccagcccgagaccttcccagtggcccaggccctggcctccaggttctttggccaacatgggggtgaaagccaacacaccattcatgccacagggcactgccacattgatacagcctggctttggcccttcaaagagactgtgaggaaatgtgcccggagctgggtgaccgccctgcagctcatggagcggaaccctgagttcatctttgcctgctcccaggcgcagcagctggaatgggtgaagagccgctaccctggcctgtactcccgcatccaggagtttgcgtgccgtgggcagtttgtgcctgtggggggcacctgggtggagatggatgggaacctgcccagtggagaggccatggtgaggcagtttttgcagggccagaacttctttctgcaggagtttgggaagatgtgctctgagttctggctgccggacacctttggctactcagcacagctcccccagatcatgcacggctgtggcatcaggcgctttctcacccagaaattgagctggaatttggtgaactccttcccacaccatacatttttctgggagggcctggatggctcccgtgtactggtccacttcccacctggcgactcctatgggatgcagggcagcgtggaggaggtgctgaagaccgtggccaacaaccgggacaaggggcgggccaaccacagtgccttcctctttggctttggggatgggggtggtggccccacccagaccatgctggaccgcctgaagcgcctgagcaatacggatgggctgcccagggtgcagctatcttctccaagacagctcttctcagcactggagagtgactcagagcagctgtgcacgtgggttggggagctcttcttggagctgcacaatggcacatacaccacccatgcccagatcaagaaggggaaccgggaatgtgagcggatcctgcacgacgtggagctgctcagtagcctggccctggcccgcagtgcccagttcctatacccagcagcccagctgcagcacctctggaggctccttcttctgaaccagttccatgatgtggtgactggaagctgcatccagatggtggcagaggaagccatgtgccattatgaagacatccgttcccatggcaatacactgctcagcgctgcagccgcagccctgtgtgctggggagccaggtcctgagggcctcctcatcgtcaacacactgccctggaagcggatcgaagtgatggccctgcccaaaccgggcggggcccacagcctagccctggtgacagtgcccagcatgggctatgctcctgttcctccccccacctcactgcagcccctgctgccccagcagcctgtgttcgtagtgcaagagactgatggctccgtgactctggacaatggcatcatccgagtgaagctggacccaactggtcgcctgacgtccttggtcctggtggcctctggcagggaggccattgctgagggcgccgtggggaaccagtttgtgctatttgatgatgtccccttgtactgggatgcatgggacgtcatggactaccacctggagacacggaagcctgtgctgggccaggcagggaccctggcagtgggcaccgagggcggcctgcggggcagcgcctggttcttgctacagatcagccccaacagtcggcttagccaggaggttgtgctggacgttggctgcccctatgtccgcttccacaccgaggtacactggcatgaggcccacaagttcctgaaggtggagttccctgctcgcgtgcggagttcccaggccacctatgagatccagtttgggcacctgcagcgacctacccactacaatacctcttgggactgggctcgatttgaggtgtgggcccatcgctggatggatctgtcagaacacggctttgggctggccctgctcaacgactgcaagtatggcgcgtcagtgcgaggcagcatcctcagcctctcgctcttgcgggcgcctaaagccccggacgctactgctgacacggggcgccacgagttcacctatgcactgatgccgcacaagggctctttccaggatgctggcgttatccaagctgcctacagcctaaacttccccctgttggctctgccagcccccagcccagcgcccgccacctcctggagtgcgttttccgtgtcttcacccgcggtcgtattggagaccgtcaagcaggcggagagcagcccccagcgccgctcgctggtcctgaggctgtatgaggcccacggcagccacgtggactgctggctgcacttgtcgctgccggttcaggaggccatcctctgcgatctcttggagcgaccagaccctgctggccacttgacccttcgggacaaccgcctgaagctcaccttttctcccttccaagtgctgtccctgttgctcgtgcttcagcctccgccacactgagtccctggggctggggttttgtttgtagaaggctctggggactcctaatttctgcttccccagcctaaagcagggatcagtcttttcttgtggaataaatccttggatcgggaa

SEQ ID NO: 167309 - DNA, 3123 bp, Artificial Sequence
  derived and/or modified sequence
atggccgccgcccccgccctgaagcactggcggaccaccctggagagagtggagaagttcgtttctccactctactttactgactgcaacctcagaggaaggctgtttggcgcttcctgcccagtggccgtccttagttcattcctcaccccagagcggctcccttaccaggaggccgtacagcgagactttcgacccgcacaggtgggtgacagcttcggacctacttggtggacctgctggtttagggtggaactaaccattcctgaggcctgggtagggcaggaggttcacctgtgttgggagtcggacggggaggggctggtttggagggatggagagccagtgcagggcttaacgaaggaaggtgaaaaaaccagctacgttctgaccgaccgactgggggagagggatccgagatcccttaccctatacgtcgaggtggcttgcaatgggcttcttggcgctgggaaaggctccatgatcgcagcacccgatcccgagaagatgttccagctatctcgcgctgagctggccgtgtttcacagagacgtgcacatgttactagtagatctggaactgctccttggaattgccaaaggattgggtaaggataatcagagaagcttccaggctctgtataccgcaaaccagatggtcaatgtctgcgaccctgcgcagccagaaaccttcccggtagctcaggctctggcctccagatttttcgggcaacatggtggggagtcccagcataccatacatgcaactggtcactgccacatcgacacggcctggctgtggccctttaaagagaccgtgcgcaaatgtgccagatcgtgggtgaccgcactccagttaatggagcgaaatcctgaattcattttcgcctgttctcaggcccagcaattggagtgggtgaagtctaggtaccccggtctctattctagaatccaggaatttgcttgcagaggtcagtttgtacccgtcggaggtacctgggtggaaatggacggaaacctgccttcaggcgaggcaatggtccgacagtttcttcagggacaaaattttttcctgcaggagttcggcaagatgtgctccgaattctggttgcccgacacttttggatactccgctcagcttccacagatcatgcacggttgcggaattcggaggttcctgactcagaaactgtcttggaacctggtgaactcctttcctcaccacacgttcttttgggaaggactcgacgggtcaagggtgctcgtccacttccccccaggtgatagttacggcatgcagggaagcgtggaggaggtattgaagacagtggccaacaatcgggacaaaggtagggccaaccacagcgcgttcttgttcggattcggcgacggaggaggaggccccacccagactatgctggataggctgaagcgactgtcaaacaccgatgggctgccccgagttcagttgtcatcccctcgccagctttttagcgctctggagtcagattccgaacagctatgcacctgggtgggcgagctgttccttgaactccacaacggcacctacaccacccatgctcaaatcaagaaagggaatcgggagtgtgagcgaatcctgcacgacgtggagctcttaagcagcttggccctggcacgatcagcccagtttctgtatcccgctgctcagctccagcatttgtggcgcctccttctgttgaatcaattccacgacgtagttacaggatcctgcatccagatggtggcagaagaagccatgtgtcattacgaggacatcagatcacacggaaacactctactgtcagcagccgcagccgccctgtgtgcgggagaacccggcccagagggcttgctgattgtcaataccctgccttggaagcggatcgaggtcatggctttacccaagcccggcggagctcacagcctagcattagtgaccgtccctagcatgggctatgcacccgttccgcctccaacctccttgcaaccgctgctgccccaacagcctgtgtttgtggttcaggagactgacggaagcgtgactctggacaacggcataatcagagtgaagctggatccaacgggcagactgacatccctggtcttagtcgcaagcggcagagaggccattgccgagggcgctgtcggaaaccaatttgtgctgttcgacgatgtgccattgtattgggacgcttgggacgtgatggactatcatcttgagacgcggaaaccggttctcggccaggctggcacgctggctgttggcacagaggggggtctccggggatcagcatggtttttactccagatcagtcctaatagtcggctttcccaggaggtggttttggacgtcggatgcccctatgtgcgattccacaccgaggttcattggcacgaagcacacaagtttctgaaagttgagtttcccgccagggtcaggagttcgcaggccacttatgagatacagtttggacacctccaacgccctactcactacaacaccagctgggactgggcacggtttgaagtctgggcacaccggtggatggacctttccgagcatggtttcgggctggccctgctgaacgattgtaaatacggtgcatcagtccgtgggtcaatcctgtcactgtcattacttcgggccccaaaggcgcctgacgcaacagccgataccggacgccacgagtttacttatgccctcatgcctcacaaaggtagtttccaggacgctggggtaattcaggccgcgtactctctcaatttccctctccttgctctgccagctccaagccccgcaccagcaacctcctggtctgcattcagcgtgtcgtcccctgctgtggtgctggagacagtcaagcaggctgaatcttcgccgcagaggaggagtcttgttttgagactgtacgaggcacatggttcacacgttgattgttggttgcacttgtccctgcctgtgcaggaagccatcctgtgtgacttgctcgaacggccagatcccgccgggcacctcacactgagagataatcggcttaaacttaccttcagcccctttcaggttctgagccttctacttgtactgcagccgcctccacactag

SEQ ID NO: 167310 - DNA, 3123 bp, Artificial Sequence
  derived and/or modified sequence
atggcagcagccccagccctcaaacattggcgcactaccctggagagggtagaaaaattcgttagcccgctctactttactgactgcaatctccggggaagactcttcggcgcatcctgcccggtggccgtgctcagttcctttctgactccagaaagattaccctaccaagaagccgtccagagggactttagacccgctcaagtgggggactcttttgggcctacctggtggacctgctggtttcgcgtggagctcactatccccgaggcctgggtggggcaagaggtgcacctctgttgggagtcggacggggaagggctagtgtggagggacggggagcccgtgcagggcctcaccaaggaaggggagaaaacgagctacgttcttactgacagattaggcgaacgcgaccctcgctctctcacattgtacgtagaagtcgcatgcaacggactcctaggcgcagggaaaggctccatgatcgctgccccagatccggagaaaatgttccagctttcccgagctgagctggccgtgttccacagggacgttcacatgttacttgtggacctggagttactcctcggcattgccaagggcttaggaaaggacaatcagaggtccttccaagccttatatacagcaaatcagatggtaaatgtgtgtgacccggctcagcccgagactttccctgttgcccaggcgcttgcctcacgattcttcggacagcacggtggggagtctcagcacaccatacatgccaccggccattgccatattgatacagcgtggctgtggccattcaaggaaaccgtccggaaatgcgcacgcagctgggtgactgccctacaactaatggagcgcaatccggaattcatctttgcttgttcacaggcccagcagcttgagtgggtaaagagcagatatcccggtttatacagccgtattcaggagttcgcttgtcgagggcaatttgttccagtcggaggtacatgggtagagatggacggcaatctgccctctggggaggcgatggttcggcagtttctgcaggggcaaaacttcttcttgcaggagtttggcaagatgtgcagcgagttctggctgcccgatacattcggctatagcgctcagttgccacagattatgcacggttgtggcatcaggcgcttcctgacccaaaaactctcttggaacttagttaacagcttcccacaccacactttcttttgggaaggcctagacggctcacgggtgttagtgcacttcccaccaggggattcctatggaatgcagggctccgtggaggaagttctgaaaaccgtggctaacaaccgtgataagggacgtgccaaccatagtgcgtttttgttcggattcggagatgggggaggcggtcccactcaaaccatgctggatcggctgaaaaggctttccaataccgacggactgccaagagtccaattgtccagccctcgccagcttttttccgccctggagtctgatagcgaacagctttgcacttgggtcggtgagctgtttctcgagctgcataatgggacatataccacacacgctcaaatcaagaagggcaaccgtgagtgtgaaaggatcctgcatgacgtggagcttctgtcctcgctcgctttggccagatccgctcagtttctctatcctgccgcacagttgcagcacttgtggcggttgctgctacttaaccagtttcatgacgtggtgactgggagctgcattcagatggtggccgaggaagccatgtgccactacgaagacattcgctctcacgggaacacactcctttcggcagccgcagctgcactttgcgcaggcgaaccaggaccagaagggctgctgatcgtgaatacccttccttggaagagaatcgaggtcatggcactgccaaagcccggaggcgctcactctctagccctggtgacggtgccttccatgggttatgcccctgtacccccacccacctctctacagcctctcctgcctcagcaacccgtcttcgtggttcaggaaaccgacggtagcgtgacgcttgataatggaatcatacgcgtgaagctggatcccacaggacgccttacatccctggttctcgtagcctctggacgggaagccattgctgaaggcgcagttggcaaccagtttgtgctgttcgatgacgtcccactgtattgggacgcgtgggacgtgatggattaccacctggaaacaagaaagcctgttctcggtcaggcaggcacactggctgtgggaaccgaaggtggactgaggggctcggcatggttcctgctacagatttctcccaatagtcgcttgagccaagaggtcgtacttgatgttggttgcccttatgttagattccacacagaagtgcactggcatgaggcccataaattcttaaaagtcgaatttcccgctcgtgtcaggtcctcgcaagccacatatgaaatccaattcggacatcttcaacggcctacacattataataccagctgggattgggcgagatttgaagtgtgggcccatagatggatggacctgtccgagcacggctttggcttggctctgctgaacgattgcaaatacggagcatcagttcggggatccatactgtcactctcactactacgggctccaaaggcgcctgatgcaactgctgataccggcagacatgagttcacttatgcactgatgcctcataagggcagtttccaggatgccggagtgattcaggccgcttattccctcaattttccgttattagcgttgcctgcccctagccccgcacccgctacttcatggtccgcattctccgtcagttctccagctgtggtacttgaaaccgtaaagcaggcagaatcttcacctcagcgccgaagtctcgtgttaagattgtatgaggctcatggatcacacgtggactgctggctgcatctttctctccccgtccaagaagccatcttatgcgacctgctggaaaggccagatcccgctggacatctcactctgagagataatcggctcaaactcaccttctcccctttccaggtgctgtcccttctgctcgtgctccaacctccacctcactag

SEQ ID NO: 167311 - DNA, 3123 bp, Artificial Sequence
  derived and/or modified sequence
atggccgccgcccccgccctgaagcactggagaaccaccctggagagagtggagaagttcgtgagccccctgtacttcaccgactgcaacctgagaggcagactgttcggcgccagctgccccgtggccgtgctgagcagcttcctgacccccgagagactgccctaccaggaggccgtgcagagagacttcagacccgcccaggtgggcgacagcttcggccccacctggtggacctgctggttcagagtggagctgaccatccccgaggcctgggtgggccaggaggtgcacctgtgctgggagagcgacggcgagggcctggtgtggagagacggcgagcccgtgcagggcctgaccaaggagggcgagaagaccagctacgtgctgaccgacagactgggcgagagagaccccagaagcctgaccctgtacgtggaggtggcctgcaacggcctgctgggcgccggcaagggcagcatgatcgccgcccccgaccccgagaagatgttccagctgagcagagccgagctggccgtgttccacagagacgtgcacatgctgctggtggacctggagctgctgctgggcatcgccaagggcctgggcaaggacaaccagagaagcttccaggccctgtacaccgccaaccagatggtgaacgtgtgcgaccccgcccagcccgagaccttccccgtggcccaggccctggccagcagattcttcggccagcacggcggcgagagccagcacaccatccacgccaccggccactgccacatcgacaccgcctggctgtggcccttcaaggagaccgtgagaaagtgcgccagaagctgggtgaccgccctgcagctgatggagagaaaccccgagttcatcttcgcctgcagccaggcccagcagctggagtgggtgaagagcagataccccggcctgtacagcagaatccaggagttcgcctgcagaggccagttcgtgcccgtgggcggcacctgggtggagatggacggcaacctgcccagcggcgaggccatggtgagacagttcctgcagggccagaacttcttcctgcaggagttcggcaagatgtgcagcgagttctggctgcccgacaccttcggctacagcgcccagctgccccagatcatgcacggctgcggcatcagaagattcctgacccagaagctgagctggaacctggtgaacagcttcccccaccacaccttcttctgggagggcctggacggcagcagagtgctggtgcacttcccccccggcgacagctacggcatgcagggcagcgtggaggaggtgctgaagaccgtggccaacaacagagacaagggcagagccaaccacagcgccttcctgttcggcttcggcgacggcggcggcggccccacccagaccatgctggacagactgaagagactgagcaacaccgacggcctgcccagagtgcagctgagcagccccagacagctgttcagcgccctggagagcgacagcgagcagctgtgcacctgggtgggcgagctgttcctggagctgcacaacggcacctacaccacccacgcccagatcaagaagggcaacagagagtgcgagagaatcctgcacgacgtggagctgctgagcagcctggccctggccagaagcgcccagttcctgtaccccgccgcccagctgcagcacctgtggagactgctgctgctgaaccagttccacgacgtggtgaccggcagctgcatccagatggtggccgaggaggccatgtgccactacgaggacatcagaagccacggcaacaccctgctgagcgccgccgccgccgccctgtgcgccggcgagcccggccccgagggcctgctgatcgtgaacaccctgccctggaagagaatcgaggtgatggccctgcccaagcccggcggcgcccacagcctggccctggtgaccgtgcccagcatgggctacgcccccgtgcccccccccaccagcctgcagcccctgctgccccagcagcccgtgttcgtggtgcaggagaccgacggcagcgtgaccctggacaacggcatcatcagagtgaagctggaccccaccggcagactgaccagcctggtgctggtggccagcggcagagaggccatcgccgagggcgccgtgggcaaccagttcgtgctgttcgacgacgtgcccctgtactgggacgcctgggacgtgatggactaccacctggagaccagaaagcccgtgctgggccaggccggcaccctggccgtgggcaccgagggcggcctgagaggcagcgcctggttcctgctgcagatcagccccaacagcagactgagccaggaggtggtgctggacgtgggctgcccctacgtgagattccacaccgaggtgcactggcacgaggcccacaagttcctgaaggtggagttccccgccagagtgagaagcagccaggccacctacgagatccagttcggccacctgcagagacccacccactacaacaccagctgggactgggccagattcgaggtgtgggcccacagatggatggacctgagcgagcacggcttcggcctggccctgctgaacgactgcaagtacggcgccagcgtgagaggcagcatcctgagcctgagcctgctgagagcccccaaggcccccgacgccaccgccgacaccggcagacacgagttcacctacgccctgatgccccacaagggcagcttccaggacgccggcgtgatccaggccgcctacagcctgaacttccccctgctggccctgcccgcccccagccccgcccccgccaccagctggagcgccttcagcgtgagcagccccgccgtggtgctggagaccgtgaagcaggccgagagcagcccccagagaagaagcctggtgctgagactgtacgaggcccacggcagccacgtggactgctggctgcacctgagcctgcccgtgcaggaggccatcctgtgcgacctgctggagagacccgaccccgccggccacctgaccctgagagacaacagactgaagctgaccttcagccccttccaggtgctgagcctgctgctggtgctgcagccccccccccactag

SEQ ID NO: 167312 - protein, 674 aa, Artificial Sequence
  derived and/or modified sequence
MNSGAMRIHSKGHFQGGIQVKNEKNRPSLKSLKTDNRPEKSKCKPLWGKVFYLDLPSVTISEKLQKDIKDLGGRVEEFLSKDISYLISNKKEAKFAQTLGRISPVPSPESAYTAETTSPHPSHDGSSFKSPDTVCLSRGKLLVEKAIKDHDFIPSNSILSNALSWGVKILHIDDIRYYIEQKKKELYLLKKSSTSVRDGGKRVGSGAQKTRTGRLKKPFVKVEDMSQLYRPFYLQLTNMPFINYSIQKPCSPFDVDKPSSMQKQTQVKLRIQTDGDKYGGTSIQLQLKEKKKKGYCECCLQKYEDLETHLLSEQHRNFAQSNQYQVVDDIVSKLVFDFVEYEKDTPKKKRIKYSVGSLSPVSASVLKKTEQKEKVELQHISQKDCQEDDTTVKEQNFLYKETQETEKKLLFISEPIPHPSNELRGLNEKMSNKCSMLSTAEDDIRQNFTQLPLHKNKQECILDISEHTLSENDLEELRVDHYKCNIQASVHVSDFSTDNSGSQPKQKSDTVLFPAKDLKEKDLHSIFTHDSGLITINSSQEHLTVQAKAPFHTPPEEPNECDFKNMDSLPSGKIHRKVKIILGRNRKENLEPNAEFDKRTEFITQEENRICSSPVQSLLDLFQTSEEKSEFLGFTSYTEKSGICNVLDIWEEENSDNLLTAFFSSPSTSTFTGF

SEQ ID NO: 167313 - DNA, 2025 bp, Artificial Sequence
  derived and/or modified sequence
atgaattctggcgctatgcgtattcacagcaaaggtcattttcaagggggcatacaagtcaaaaatgagaagaatcgccctagtctgaaatctctcaagaccgacaatagaccagagaagagcaagtgtaagccactgtggggtaaggtattctacctggatctgccatctgttaccatctccgaaaagctgcagaaggacatcaaagacctggggggaagggtggaagagtttctatcaaaagacatctcatatttgatcagcaataaaaaggaggctaaattcgcacagacattagggaggatttcccccgtacccagcccagagtccgcctataccgccgaaaccacctcaccccacccttcacacgacggctctagttttaagtcccccgatactgtctgtctttcccggggtaagctgttggtggaaaaggcgattaaagatcacgactttatcccatctaacagcatcttaagcaacgccttgtcatggggcgtgaagatccttcatatagatgatattagatactatatagaacagaaaaaaaaggaactttatttgctcaagaagtcaagcacgagcgtacgggatggcgggaagcgggtggggtcaggagcccaaaaaacacggacaggtcgcttgaaaaagccgttcgttaaggtcgaagatatgagccagctctacagacctttctacctccagctgacgaatatgccgttcatcaactactctattcagaagccatgtagtccgttcgacgtggacaagcctagctccatgcagaaacagacacaagttaagctcaggatccagactgatggagataaatatgggggaacttctatccaactgcagctgaaggaaaagaagaagaaaggctattgtgaatgttgtctacaaaagtacgaggatctcgagacacatctcttgtctgaacaacaccgtaacttcgctcaatctaatcagtaccaggtggtggacgatattgtctccaaattggtcttcgactttgttgagtacgaaaaggacacccccaagaaaaaacggatcaaatattccgttggaagtttgtcacctgtgagcgcaagtgtcctcaagaagacagagcagaaggaaaaggtggagctgcagcacatttcccagaaagactgtcaggaagatgacacaacagtgaaagagcaaaactttctctacaaagaaacacaggaaacagagaagaaactgctcttcatcagcgagcccataccgcatccatcaaatgaactgcgcggcctgaacgagaagatgagcaataaatgctccatgctgagcaccgctgaagacgacatcaggcagaatttcacccagctcccattgcacaagaacaagcaagaatgcatcctggatatctcagaacacacgctttcagagaacgatctggaggagttgcgtgtggaccactacaagtgcaatatccaggccagtgttcatgtatccgatttttccactgataactctggcagccagccaaagcagaagtcagataccgtgctgtttccagccaaggacctcaaggagaaggacttgcattccatttttacacatgattcaggactgattactatcaacagctctcaggagcacctcacagttcaagccaaagccccttttcacacaccccccgaggagcctaatgagtgcgattttaagaacatggattcccttcctagcgggaaaatacaccgcaaggtcaagatcatcctcgggcgcaatcgaaaggagaaccttgaacccaacgccgagttcgacaagagaactgaattcattactcaggaagaaaataggatttgcagtagtcccgtgcagagcctgctcgacttgtttcaaactagcgaggagaaaagcgagttcctggggttcaccagttacacagaaaagtctggcatctgcaatgttctcgacatctgggaggaggaaaattctgacaatctccttacagctttcttctctagcccttctaccagtacatttaccggtttttag

SEQ ID NO: 167314 - DNA, 2025 bp, Artificial Sequence
  derived and/or modified sequence
atgaacagcggggccatgaggatccacagcaagggccacttccagggcggcatccaggtgaagaatgagaagaaccggcccagcctgaagagcctgaagacagacaacagacctgagaagagcaagtgcaagcccctgtggggcaaggtgttctacctggacctgcccagcgtgaccatcagcgagaagctgcagaaggacatcaaggacctgggcggccgggtggaggagttcctgagcaaggacatctcctacctgatcagcaacaagaaggaggccaagtttgcccagaccctgggccgcatcagccctgtgcccagccctgagagcgcctacacagctgagaccaccagcccccaccccagccatgatggcagcagcttcaagagcccagacacagtgtgcctgagccggggcaagctgctggtggagaaggccatcaaggaccatgacttcatccccagcaacagcatcctgagcaatgccctgtcctggggcgtgaagatcctgcacattgatgacatccgctactacatcgagcagaagaagaaggagctgtacctgctgaagaagagcagcacctctgtgagagatggcggcaagagggtgggcagcggggcccagaagaccaggacaggccgcctgaagaagccctttgtgaaggtggaggacatgagccagctgtaccggcccttctacctgcagctgaccaacatgcccttcatcaactacagcatccagaagccctgcagcccctttgatgtggacaagcccagctccatgcagaagcagacccaggtgaagctgcgcatccagacagatggagacaagtatggaggcaccagcatccagctgcagctgaaggagaagaagaagaagggctactgtgagtgctgcctgcagaagtatgaggacctggagacccacctgctgtctgagcagcacaggaactttgcccagagcaaccagtaccaggtggtggatgacatcgtgtccaagctggtgtttgattttgtggagtatgagaaggacacccccaagaagaagaggatcaagtacagcgtgggcagcctgagccctgtgtctgcctctgtgctgaagaagacagagcagaaggagaaggtggagctgcagcacatcagccagaaggactgccaggaggatgacaccaccgtgaaggagcagaacttcctgtacaaggagacccaggagacagagaagaagctgctcttcatcagcgagcccatcccccaccccagcaatgagctgcggggcctgaatgagaagatgagcaacaagtgcagcatgctgagcacagcagaagatgacatccggcagaacttcacccagctgcccctgcacaagaacaagcaggagtgcatcctggacatcagcgagcacaccctgtctgaaaatgacctggaggagctgcgggtggaccactacaagtgcaacatccaggcctctgtgcacgtgtctgacttcagcacagacaacagcggcagccagcccaagcagaagagtgacacagtgctcttccctgccaaggacctgaaggagaaggacctgcacagcatcttcacccatgattctggcctcatcaccatcaacagcagccaggagcacctgactgtgcaggccaaggcccccttccacaccccacctgaggagcccaatgaatgtgacttcaagaacatggacagcctgcccagcggcaagatccacaggaaggtgaagatcatcctgggcaggaacaggaaggagaacctggagcccaatgctgagtttgacaagaggacagagttcatcacccaggaggagaaccgcatctgcagcagccctgtgcagagcctgctggacctcttccagaccagcgaggagaagtctgagttcctgggcttcaccagctacacagagaagagcggcatctgcaatgtgctggacatctgggaggaggagaacagcgacaacctgctgacagccttcttcagcagccccagcaccagcaccttcaccggcttctag

SEQ ID NO: 167315 - DNA, 2025 bp, Artificial Sequence
  derived and/or modified sequence
atgaacagcggcgccatgcggatccacagcaagggccacttccagggaggaatccaagttaaaaacgagaaaaataggccctcactgaagagcctgaagaccgataaccgtccagagaaaagcaaatgtaagcctctgtggggcaaagtattctacctggacctgccctctgtcacgatctctgaaaagttacagaaagatatcaaggacttgggcgggcgcgtggaagaattcctgagcaaagatataagctacctaatctctaataagaaggaagccaaatttgcccaaaccttgggtcggattagtcctgtgccttccccagagagtgcctatacagccgagaccaccagccctcacccgtcacatgacggatcttcctttaaatcccctgacactgtgtgtctcagtagaggcaaactgctagtggagaaggctattaaagaccatgactttatcccgagtaactcgattctgtcgaatgccctgagctggggagtcaaaatcctgcacattgatgatatccggtactatattgaacagaaaaagaaggaactttaccttctgaagaagtcctctacttccgtacgagacggaggcaagcgtgtgggctcaggagcccagaagacacggaccggcagattgaaaaaaccttttgtcaaagtagaggatatgtcgcagttgtaccgccccttttatctacaattaactaacatgccctttatcaattacagcatccagaagccatgcagccccttcgacgtcgacaagccaagtagtatgcaaaagcagacccaggtcaagctgcgtatccagacagacggcgacaaatacgggggcacatctatccagctccaacttaaagagaagaagaagaaggggtactgcgaatgctgcctgcagaaatatgaggacttagagacccatctcctctctgagcagcatagaaacttcgcccaatctaaccagtatcaggtagttgacgatattgtgtctaagctggtcttcgactttgtcgagtacgaaaaggacacaccaaaaaaaaaaaggattaagtatagtgttggtagcctatccccggtgtctgcttctgtgctgaaaaaaactgaacagaaggagaaggtagagctccaacacatctcccaaaaggattgtcaggaggacgatacaactgtaaaagagcagaactttttatacaaggaaacacaagagaccgaaaagaaactgctttttatttcagagccgattccgcatccctctaatgagctaagaggcctgaacgaaaaaatgtctaataagtgttccatgctgagcaccgcggaggatgacatccggcagaattttacgcagttgccgcttcacaaaaataaacaagagtgcatactggatataagtgaacacactctctctgaaaatgatttggaggagctgagagtggaccactataaatgcaacatccaggcctccgtccacgtcagtgatttttccactgacaatagcggctcccagccgaaacagaagagtgataccgttttgtttcctgcgaaagatctcaaggagaaggacttacattccattttcacacatgattctggtctaattactatcaactcaagtcaagagcacctcacagttcaggccaaggcccctttccacactccaccagaggagcctaacgaatgcgactttaagaatatggattcactgccctccgggaagattcataggaaagtcaagattatcctgggccgcaatagaaaagagaatttggagcccaatgcagaattcgataagagaacagaattcatcacacaagaggagaataggatctgctccagtcccgtgcagtctcttctggacctttttcaaacttctgaggaaaagtcagaattcctcggtttcacctcctacactgagaaatcgggaatctgtaacgttctggatatctgggaagaggagaacagtgacaacctgttgacagccttcttctcaagtccaagcacgtctacgttcactggcttttag

SEQ ID NO: 167316 - DNA, 2025 bp, Artificial Sequence
  derived and/or modified sequence
atgaacagtggggctatgcggattcactctaaagggcactttcagggcggaatccaggtgaaaaacgagaaaaatagaccctctctcaagagcctgaaaaccgataatcgtcctgagaagtccaaatgtaagccactctggggcaaagttttctacttggatctcccatccgttaccataagtgaaaagctccagaaggacattaaagacctgggcggacgcgtagaagaatttttgtccaaggatatatcctacctcatctctaacaagaaggaggctaagtttgctcagacactaggtcggatctccccggtgccttctcccgagtctgcctataccgcagagactacttccccccatccatcccacgacggtagctcttttaaatcccctgataccgtttgcttaagtcgtgggaaactgctggtcgaaaaggcaattaaagaccatgattttataccatcaaactcaattctctctaatgcacttagctggggtgtgaaaatacttcatatcgacgatattcgctattacatagagcagaagaagaaggagctctatctgctgaaaaagagtagcacatctgttagggacggcggaaagcgagtaggctccggagcccagaagactcgaactgggagactgaagaagccattcgtgaaggtggaagacatgtcccagctgtaccggcctttctatcttcagttgactaatatgcccttcatcaattactccatccagaagccctgcagtccgtttgatgtcgataagccatcaagcatgcagaaacagacccaggttaagctcaggatacagacggacggggataaatatggaggtacctcaattcaactacagctcaaagaaaaaaaaaaaaaggggtactgcgaatgctgtctacaaaagtatgaagatctggaaacccaccttcttagcgagcaacacagaaattttgcccaatctaatcagtaccaggttgtggacgatatcgtgtctaagttagtctttgactttgtggagtacgaaaaagacacacccaagaaaaagcgaataaagtattctgtgggctccctctcgcctgtgtcagcttctgtgctgaagaagacagaacagaaagaaaaggtggagttgcagcacataagccagaaggactgtcaggaggatgatactacggtaaaagaacagaatttcctgtataaagaaacacaggagacagaaaagaaattgctcttcatcagtgaacccatcccgcaccctagtaatgagctaagaggccttaacgaaaagatgagcaataagtgctcaatgctgagtacagctgaggatgatattaggcagaacttcacacagctccccctgcataagaataagcaggaatgtatcctcgacatctccgagcacacgttgtctgaaaacgatctcgaggagctgcgtgtggaccactataaatgcaacatacaagccagcgtgcatgtgtccgacttttccactgacaacagcggatctcagcctaagcagaagagtgatacagtgcttttcccggctaaagatctcaaagaaaaggacctccattccattttcacgcatgactccggactgatcaccattaacagttcccaggagcatctcaccgtacaagcaaaggctcccttccatactccccctgaggagcccaacgagtgcgactttaaaaatatggatagcctgccttcgggaaaaatccatcggaaggtcaagattatactggggcgtaaccgcaaagaaaatttagaacccaatgcggagtttgataagcggacagaattcatcactcaggaggaaaacaggatctgcagtagccccgtccaatcactactcgacctctttcaaacttctgaggaaaagagcgaattccttggatttaccagttacaccgaaaagagtgggatctgcaatgttctggatatctgggaagaggagaactccgacaatctcctcaccgctttttttagttctccatccacgtctacttttacggggttctag

SEQ ID NO: 167317 - DNA, 3907 bp, Artificial Sequence
  derived and/or modified sequence
ctctctgaggctgcgccaagacctgaagcggcggaccgagagcccgggtctgagactgagagagcaacggaatggaggcggggtagaggcggaaacacaacctgcagggccagagcgaggcgcgagaaggacggcggcgtgagggggcggggcgcgcagcgcgagaaggcaggcacgaggggcgagcgcgaggcggggcacggcgcgtggcgtgagacggggcggggcgcgcgtatcggcgccgcggccgcgtgacgcgttttcaaatcttcaaccgccgcagcccactcgtttgtgctttgcgccttcctcctccgcgccttggagccggatccggccccggaaacccgacctgcagacgcggtacctctactgcgtagaggccgtagctggcggaaggagagaggcggccgtcctgtcaacaggccgggggaagccgtgctttcgcggctgcccggtgcgacactttctccggacccagcatgtaggtgccgggcgactgccatgaactccggagccatgaggatccacagtaaaggacatttccagggtggaatccaagtcaaaaatgaaaaaaacagaccatctctgaaatctctgaaaactgataacaggccagaaaaatccaaatgtaagccactttggggaaaagtattttaccttgacttaccttctgtcaccatatctgaaaaacttcaaaaggacattaaggatctgggagggcgagttgaagaatttctcagcaaagatatcagttatcttatttcaaataagaaggaagctaaatttgcacaaaccttgggtcgaatttctcctgtaccaagtccagaatctgcatatactgcagaaaccacttcacctcatcccagccatgatggaagttcatttaagtcaccagacacagtgtgtttaagcagaggaaaattattagttgaaaaagctatcaaggaccatgattttattccttcaaatagtatattatcaaatgccttgtcatggggagtaaaaattcttcatattgatgacattagatactacattgaacaaaagaaaaaagagttgtatttactcaagaaatcaagtacttcagtaagagatgggggcaaaagagttggtagtggtgcacaaaaaacaagaacaggaagactcaaaaagccttttgtaaaggtggaagatatgagccaactttataggccattttatcttcagctgaccaatatgccttttataaattattctattcagaagccctgcagtccatttgatgtagacaagccatctagtatgcaaaagcaaactcaggttaaactaagaatccaaacagatggcgataagtatggtggaacctcaattcaactccagttgaaagagaagaagaaaaaaggatattgtgaatgttgcttgcagaaatatgaagatctagaaactcaccttctaagtgagcaacacagaaactttgcacagagtaaccagtatcaagttgttgatgatattgtatctaagttagtttttgactttgtggaatatgaaaaggacacacctaaaaagaaaagaataaaatacagtgttggatccctttctcctgtttctgcaagtgtcctgaaaaagactgaacaaaaggaaaaagtggaattgcaacatatttctcagaaagattgccaggaagatgatacaacagtgaaggagcagaatttcctgtataaagagacccaggaaactgaaaaaaagctcctgtttatttcagagcccatcccccacccttcaaatgaattgagagggcttaatgagaaaatgagtaataaatgttccatgttaagtacagctgaagatgacataagacagaattttacacagctacctctacataaaaacaaacaggaatgcattcttgacatttccgaacacacattaagtgaaaatgacttagaagaactaagggtagatcactataaatgtaacatacaggcatctgtacatgtttctgatttcagtacagataatagtggatctcaaccaaaacagaagtcagatactgtgctttttccagcaaaggatctcaaggaaaaggaccttcattcaatatttactcatgattctggtctgataacaataaacagttcacaagagcacctaactgttcaggcaaaggctccattccatactcctcctgaggaacccaatgaatgtgacttcaagaatatggatagtttaccttctggtaaaatacatcgaaaagtgaaaataatattaggacgaaatagaaaagaaaatctggaaccaaatgctgaatttgataaaagaactgaatttattacacaagaagaaaacagaatttgtagttcaccggtacagtctttactagacttgtttcagactagtgaagagaaatcagaatttttgggtttcacaagctacacagaaaagagtggtatatgcaatgttttagatatttgggaagaggaaaattcagataatctgttaacagcgtttttctcgtccccttcaacttctacatttactggcttttagaatttaaaaaatgcatacttttcagaagtgataaggatcatattcttgaaatttttataaatatgtatggaaattcttaggatttttttaccagctttgtttacagacccaaatgtaaatattaaaaataaatatttgcaattttctacagaattgaatacctgttaaagaaaaattacagaataaacttgtgactggtcttgttttacattatatatatgttcgtaattgtttcctgagaattacaatgaataataatttgctttgtcactgaaaaccaccagtgaagtgcaatttggggaatatcaaacttagcattatacatttggatattctagttgtattgtaaattttaaaagattatcaggataacatgaccttgccttgaaaaacctaaatttcatacagaaaggaaaaatacatttctatgcttgaattctggaaatcatcagaaatattgacacttgagggtcactggtggaccatgctagtattttggtgctgagtaattagattatgtataggggtaactggaagccatgaaggaaggacttaaccaggctaccaagtggaatataatttatctgctatttttaattacttaccttgtaaataactttaataatattcaaaagttgactctcctgtggctcatgccacaggatcccagcactttgggaggccgaggcaggctgatcacgaggtcagaagatcaagaccatcctggccaacatggtgaaaccttgtctactaaaaatacaaaaaattagctgggcatggcggcatgcgcctgtagtcccagctactccctccagaggctgagaattgcttgaacctgggaagtgcaggttgcagtgagccaagattgtgccactgtattccagactgggtgacagagtgagactccatctcaaaaaaaaaaaagttgactctaccccctaatttggtaggagatgaaggagaaaaggatggcattgaattatagatacagttttgggatatatacaaggattgccttgatctggcacttactgatacaagcatttggagaagagaaaattcaaatataagaaatttcaatttgaatctgtggatataaggcatttgcctttgagtatgttcttgtaggagtaagactaccaccagtgacattcaattggttctattgcatagtacatgaatctattgtcactaaaaattaggttactaatcttaatttttttgaaatatatgattctcagtacaggactaattcatatgcttttcctgcatacattattttgatcatttggataacatcaatgaacactggctttttaacacctttgtttttcataccagtacctgaagtaggctcaataaaagagtctttacagtg

SEQ ID NO: 167318 - DNA, 2025 bp, Artificial Sequence
  derived and/or modified sequence
atgaacagcggcgccatgagaatccacagcaagggccacttccagggcggcatccaggtgaagaacgagaagaacagacccagcctgaagagcctgaagaccgacaacagacccgagaagagcaagtgcaagcccctgtggggcaaggtgttctacctggacctgcccagcgtgaccatcagcgagaagctgcagaaggacatcaaggacctgggcggcagagtggaggagttcctgagcaaggacatcagctacctgatcagcaacaagaaggaggccaagttcgcccagaccctgggcagaatcagccccgtgcccagccccgagagcgcctacaccgccgagaccaccagcccccaccccagccacgacggcagcagcttcaagagccccgacaccgtgtgcctgagcagaggcaagctgctggtggagaaggccatcaaggaccacgacttcatccccagcaacagcatcctgagcaacgccctgagctggggcgtgaagatcctgcacatcgacgacatcagatactacatcgagcagaagaagaaggagctgtacctgctgaagaagagcagcaccagcgtgagagacggcggcaagagagtgggcagcggcgcccagaagaccagaaccggcagactgaagaagcccttcgtgaaggtggaggacatgagccagctgtacagacccttctacctgcagctgaccaacatgcccttcatcaactacagcatccagaagccctgcagccccttcgacgtggacaagcccagcagcatgcagaagcagacccaggtgaagctgagaatccagaccgacggcgacaagtacggcggcaccagcatccagctgcagctgaaggagaagaagaagaagggctactgcgagtgctgcctgcagaagtacgaggacctggagacccacctgctgagcgagcagcacagaaacttcgcccagagcaaccagtaccaggtggtggacgacatcgtgagcaagctggtgttcgacttcgtggagtacgagaaggacacccccaagaagaagagaatcaagtacagcgtgggcagcctgagccccgtgagcgccagcgtgctgaagaagaccgagcagaaggagaaggtggagctgcagcacatcagccagaaggactgccaggaggacgacaccaccgtgaaggagcagaacttcctgtacaaggagacccaggagaccgagaagaagctgctgttcatcagcgagcccatcccccaccccagcaacgagctgagaggcctgaacgagaagatgagcaacaagtgcagcatgctgagcaccgccgaggacgacatcagacagaacttcacccagctgcccctgcacaagaacaagcaggagtgcatcctggacatcagcgagcacaccctgagcgagaacgacctggaggagctgagagtggaccactacaagtgcaacatccaggccagcgtgcacgtgagcgacttcagcaccgacaacagcggcagccagcccaagcagaagagcgacaccgtgctgttccccgccaaggacctgaaggagaaggacctgcacagcatcttcacccacgacagcggcctgatcaccatcaacagcagccaggagcacctgaccgtgcaggccaaggcccccttccacaccccccccgaggagcccaacgagtgcgacttcaagaacatggacagcctgcccagcggcaagatccacagaaaggtgaagatcatcctgggcagaaacagaaaggagaacctggagcccaacgccgagttcgacaagagaaccgagttcatcacccaggaggagaacagaatctgcagcagccccgtgcagagcctgctggacctgttccagaccagcgaggagaagagcgagttcctgggcttcaccagctacaccgagaagagcggcatctgcaacgtgctggacatctgggaggaggagaacagcgacaacctgctgaccgccttcttcagcagccccagcaccagcaccttcaccggcttctag

SEQ ID NO: 167319 - protein, 262 aa, Artificial Sequence
  derived and/or modified sequence
MKTPFGKTPGQRSRADAGHAGVSANMMKKRTSHKKHRSSVGPSKPVSQPRRNIVGCRIQHGWKEGNGPVTQWKGTVLDQVPVNPSLYLIKYDGFDCVYGLELNKDERVSALEVLPDRVATSRISDAHLADTMIGKAVEHMFETEDGSKDEWRGMVLARAPVMNTWFYITYEKDPVLYMYQLLDDYKEGDLRIMPDSNDSPPAEREPGEVVDSLVGKQVEYAKEDGSKRTGMVIHQVEAKPSVYFIKFDDDFHIYVYDLVKTS

SEQ ID NO: 167320 - DNA, 789 bp, Artificial Sequence
  derived and/or modified sequence
atgaagacccccttcggcaagacccccggccagagaagcagagccgacgccggccacgccggcgtgagcgccaacatgatgaagaagagaaccagccacaagaagcacagaagcagcgtgggccccagcaagcccgtgagccagcccagaagaaacatcgtgggctgcagaatccagcacggctggaaggagggcaacggccccgtgacccagtggaagggcaccgtgctggaccaggtgcccgtgaaccccagcctgtacctgatcaagtacgacggcttcgactgcgtgtacggcctggagctgaacaaggacgagagagtgagcgccctggaggtgctgcccgacagagtggccaccagcagaatcagcgacgcccacctggccgacaccatgatcggcaaggccgtggagcacatgttcgagaccgaggacggcagcaaggacgagtggagaggcatggtgctggccagagcccccgtgatgaacacctggttctacatcacctacgagaaggaccccgtgctgtacatgtaccagctgctggacgactacaaggagggcgacctgagaatcatgcccgacagcaacgacagcccccccgccgagagagagcccggcgaggtggtggacagcctggtgggcaagcaggtggagtacgccaaggaggacggcagcaagagaaccggcatggtgatccaccaggtggaggccaagcccagcgtgtacttcatcaagttcgacgacgacttccacatctacgtgtacgacctggtgaagaccagctag

SEQ ID NO: 167321 - DNA, 789 bp, Artificial Sequence
  derived and/or modified sequence
atgaaaactccctttgggaaaactcccggccagcgcagccgggcagacgctgggcatgccggagtgagcgccaatatgatgaagaagcgaacctcacataaaaaacacagatcttccgtgggtccatccaaacccgtgtcccaacctaggcggaatattgtgggctgtagaattcagcatgggtggaaggaggggaatggaccagtgactcagtggaagggcacagtgctggatcaggtaccagtcaatcccagcctatacctgataaagtatgatggctttgattgtgtctatggcttagagctgaacaaagacgagcgagtttccgctctcgaagtcctccctgatagagtggccaccagcagaatatctgacgcccacctagcggataccatgattggaaaggctgtagagcatatgtttgagaccgaggacggcagcaaagacgagtggcggggaatggtgttggcccgggcccccgttatgaacacttggttctatatcacttacgaaaaggacccagtgctctacatgtaccaacttcttgacgattataaagagggtgacctccgaattatgcctgacagcaacgacagcccacccgccgaacgggagcctggggaggtggtcgactcactggttggtaaacaggtggagtacgctaaggaagacggttcgaaacggacaggaatggtgatacaccaagttgaggcaaaaccctccgtgtattttatcaagttcgacgatgacttccacatctacgtttacgacctggtgaagacctcttag

SEQ ID NO: 167322 - DNA, 789 bp, Artificial Sequence
  derived and/or modified sequence
atgaaaaccccttttggtaaaacgccagggcagcgcagtcgggccgatgccggacacgctggcgtgtcggctaacatgatgaaaaaaagaacgtcccataaaaagcaccgatcttccgttggcccatcaaagcccgtttctcaacccaggagaaacatagttggctgtagaatccaacatggatggaaggaaggcaatgggccagtcacacagtggaagggtactgtgctggaccaggtgcctgtgaatccatctctatacctgatcaaatacgatggatttgactgcgtgtatggattggagctcaataaggatgagagggtgtccgctctggaagtgctgccagatcgggtcgccaccagcagaatcagtgacgctcatctggcagataccatgataggcaaggccgtcgagcacatgttcgaaacagaagacggttcgaaggacgagtggcgcggtatggtcctggcacgggcccccgtaatgaatacatggttctatattacatatgaaaaggaccccgtgctgtatatgtatcagctgttggatgattacaaagaaggtgacctgaggataatgcccgatagtaacgacagtcctcccgcggaaagagaaccgggcgaggtagtcgactccctggttgggaaacaagtggaatatgcaaaagaggacggttccaagcggactggcatggtcattcaccaggtggaagctaagccatcagtatactttattaaattcgacgacgacttccacatctatgtttacgacctcgtgaaaacttcttag

SEQ ID NO: 167323 - DNA, 789 bp, Artificial Sequence
  derived and/or modified sequence
atgaagaccccatttgggaagaccccaggccagaggagcagagcagatgctggccacgccggcgtgtctgccaacatgatgaagaagaggaccagccacaagaagcacaggagctctgtgggccccagcaagcctgtgtcccagcccaggagaaatattgtgggctgccgcatccagcacggctggaaggagggcaatggacctgtgacccagtggaagggcaccgtgctggaccaggtgcctgtgaaccccagcctgtacctgatcaagtatgatggctttgactgtgtgtatggcctggagctgaacaaggatgagcgggtgtctgccctggaggtgctgcctgacagagtggccaccagccgcatcagtgatgcccacctggccgacaccatgattggcaaggctgtggagcacatgtttgaaacagaagatggcagcaaggatgagtggaggggcatggtgctggcccgggcccctgtgatgaacacctggttctacatcacctatgagaaggaccctgtgctgtacatgtaccagctgctggatgactacaaggagggggacctgcgcatcatgccagacagcaatgacagccccccagctgagcgggagcccggggaggtggtggacagcctggtgggcaagcaggtggagtatgccaaggaggatggcagcaagaggacaggcatggtgatccaccaggtggaggccaagcccagcgtgtacttcatcaagtttgatgatgacttccacatctacgtgtatgacctggtgaagaccagctag

SEQ ID NO: 167324 - DNA, 789 bp, Artificial Sequence
  derived and/or modified sequence
atgaagacccccttcggcaagacccccggccagcggagccgggccgacgctggtcacgccggcgtcagtgccaacatgatgaaaaagcgcacatctcataaaaagcacaggagcagtgtagggccctcaaagcccgtgagccagccacgtcgtaacattgttggttgccgcattcagcatggatggaaagaaggaaatgggcccgtcacccaatggaagggaaccgttctggaccaggtgcctgtgaacccatctctttacctgataaaatacgacggattcgactgcgtgtatggacttgagctgaacaaggacgaacgggtctcggccctagaggtcctcccggaccgagtagccacaagtcgcatatctgacgcccatttagccgacaccatgattgggaaggcagtggagcacatgttcgaaactgaagatggttccaaagacgaatggaggggcatggtcctcgctcgggctccagtcatgaacacctggttctacatcacttatgagaaggacccagtactgtacatgtaccaactactggatgattacaaggaaggcgacctgcgaataatgccggattctaacgatagcccccccgctgaacgagaacccggggaagtcgtggacagcctagttgggaagcaggttgagtatgccaaggaggacggcagcaagaggactggaatggtgatccaccaagtcgaggccaagccaagcgtgtacttcattaaatttgacgacgactttcatatttacgtgtacgatcttgtaaagacaagctag

SEQ ID NO: 167325 - DNA, 789 bp, Artificial Sequence
  derived and/or modified sequence
atgaagacccccttcggcaagacccccggccagcggagccgggccgatgccggacatgcaggggtcagtgctaacatgatgaaaaaaagaacgtcacacaaaaagcatcggtctagcgttggtccctcaaagccagtctctcagcccagacgcaatattgtggggtgtcgcatccagcatggttggaaagagggcaacggccccgttactcagtggaaaggcaccgttctggaccaggttcctgtgaatccgagcttgtatcttattaaatacgacggcttcgactgtgtttatgggttggaactgaataaggatgagcgcgttagcgcgctagaggttttgccagatcgagtggcaactagccggataagcgatgctcacttagccgataccatgattgggaaagctgttgaacacatgttcgagacagaggacggctcaaaagatgaatggaggggcatggtcctggcacgcgcccccgttatgaatacctggttctatatcacctatgaaaaagatcccgtgctgtacatgtaccaactcctcgacgactataaagaaggcgacctcaggatcatgccagactcaaacgattcaccccccgctgagagggagcccggagaggtggtggattcactcgtgggcaagcaggtcgagtacgccaaagaagatgggtccaagcgcactggcatggtgatccatcaggtggaggctaagccctctgtttatttcatcaagtttgacgatgattttcatatctatgtgtacgacctcgtaaagacttcctag

SEQ ID NO: 167326 - DNA, 789 bp, Artificial Sequence
  derived and/or modified sequence
atgaagaccccatttggaaaaacccccggtcagagatcgcgcgcagatgcgggtcacgccggtgtgtccgcgaacatgatgaagaagagaacatcccacaaaaagcacaggagcagtgtgggccctagcaagcctgtatctcagccgaggaggaacatcgtggggtgtcggatccagcatgggtggaaggagggaaatgggccagtcacccaatggaagggcacagtgctggaccaggtccctgttaacccttccctctatctcattaagtacgatggcttcgattgcgtttacggcctggaactgaataaggatgaacgagtgtccgcactggaggttcttccagacagggtcgccacaagtcgtatatccgacgcccacttggccgatactatgataggcaaggcagtcgaacacatgtttgaaactgaggacgggagtaaagatgaatggcgcggaatggtgctggccagggcaccagtcatgaatacatggttttacattacttatgaaaaagaccccgttctatatatgtaccagctcctggatgactacaaagagggcgatctcaggataatgccagatagcaacgattcgccccctgccgagcgggagccaggcgaggtggtcgattcactggtggggaagcaggtggaatacgctaaggaggacggaagtaaacggacagggatggtgattcaccaggtcgaggcaaagcctagcgtgtacttcataaaattcgatgatgacttccatatttatgtatacgatctcgtgaaaacatcgtag

SEQ ID NO: 167327 - DNA, 789 bp, Artificial Sequence
  derived and/or modified sequence
atgaaaacccctttcggtaagacacccggacagaggagtcgggcagacgccggtcacgctggggtcagtgctaacatgatgaaaaagcggacatctcataaaaagcaccgcagttcagtcggcccttcaaaaccggtgtcacagccccgacgtaacattgtggggtgcagaattcagcatggctggaaagagggtaacggcccagtgacacaatggaaaggtacagtgctggatcaggtgcctgtgaatccatctttgtatctcattaaatatgacggctttgactgtgtgtatggtctggaactgaacaaagacgagcgggtaagcgcccttgaggtgctcccagatcgtgtggctaccagtagaatctcagacgctcacctggccgatactatgattggaaaggcggtagaacatatgtttgagactgaggacgggtcgaaggacgagtggcgtggaatggtgctagcacgcgcacccgtgatgaacacttggttttacatcacgtacgagaaggaccctgtcttatacatgtaccagctgctcgatgattataaggagggagacctgcgcattatgccagatagcaatgattcccctccagctgagcgcgagcctggggaagttgtcgactcgcttgtcggcaagcaggtcgagtacgccaaggaggatggctctaaacggacaggtatggtcattcaccaggtagaggccaaaccttccgtctactttatcaaattcgatgacgactttcatatttatgtgtacgaccttgtgaaaactagctag

SEQ ID NO: 167328 - DNA, 4484 bp, Artificial Sequence
  derived and/or modified sequence
tccgcggcgagggagcgggggcggggaggcgccgtctggctcaggctggggccggcgggagcgcgaacgagcgacggcggaacccgtgggcctgtggactgcagcctcggcggtcagcagagtgcttgtgatttcacgtatttttgctgaactcgtaaaagagacacttggatggtggattaaccagaacactaacattctgtgaaaagtttcaaattggagaatattgaattttcaccctagtccagcagctccgctgctcacttaaatacagatgaatgaagaccccattcggaaagacacctggccagcggtccagagctgatgcaggccatgctggagtatctgccaacatgatgaagaagaggacatcccacaaaaaacatcggagcagtgtgggtccgagcaaacctgtttcccagccccggcggaacatcgtaggctgcaggattcagcatgggtggaaagaggggaatggccctgttacccagtggaaaggaaccgttctggaccaggtgcctgtaaatccttctttgtatcttataaaatacgatggatttgactgtgtttatggactagaacttaataaagatgaaagagtttctgcgcttgaagtcctccctgatagagttgcgacatctcgaatcagcgatgcacacttggcagacacaatgattggcaaagcagtggaacatatgtttgagacagaggatggttctaaagatgagtggaggggaatggtcttagcacgtgcacctgtcatgaacacatggttttacattacctatgagaaagaccctgtcttgtacatgtaccaactcttagatgattacaaagaaggcgaccttcgcattatgcctgattccaatgattcacctccagcagaaagggaaccaggagaagttgtggacagcctggtaggcaaacaagtggaatatgccaaagaagatggctcgaaaaggactggcatggtcattcatcaagtagaagccaagccctccgtctatttcatcaagtttgatgatgatttccatatttatgtctacgatttggtgaaaacatcctagatgtcatcacaaactctgccaaatttgtggaactatgaaatgtattatttgtagacataaagacttgattgctttccagtttaatgaaagcttaaatgtccctgcgaacccacaatctctgccagcagaactggttttgttctgaatagtacagattgatgtgaacacaaagcattttgtgtaaggagaacccctttcttttaaaagaagtctgtctatttcgaggggagttacaggcaagtttggtaaaagttaagctagtatcatagtcatttaaaattgtaatagatcttaaccattttccccctcaccctaactctcttattctgccgccacaatgcaagcatagtttgatgttttcgttattgccttttttgagatgtatgtatctgtatctacctatatctatatgtgtgtatacatatataatatatacacacagatacaagtgtacacacacacaccacacaccacacacaccccactggcagtctttgtggattaggatgggggtgacataattttcttgagtttaacaggagtgctttacccaagtcagtcatggatatgatatcactgctctttatttaaaagtaaactttgggcacaggaaccatatgggaacattcagcttgtttaaaaaaaaaaaatcagaagttcagagcaccttttcaatctggagcccttaaaccataagtccaaatatgaattatttgtgaacagttaatgacccatattagaattttacaatctggtgaacaatctgggtaaaaggctacctttaattctaagcttcatttttttttgggggggggttacattttaatcataaattcttttttgcaaagcccaggttcttgttccacacagtgtaatgtaggtgtattttggacagcacatatggtccattgtgtacaagtcagtaatctggatttcagtacatggatttaaaaggcaacaatccatcactggtttgtgtgtttttggttaagtttctggaagaatacaatgcttttatattggaagtataagttttgagtggcattgttgccttctaacaagctctctgggacttttaaagttttattactattattgctaatgtatgattatggtcagagactttcaacccaccccttcctgcctacccctggcttttcctcacaaagaatgtctagacaaacagcagcttagtctcctgacacctcttgtggggtgcatgttcctgctccaggtatgctgttcatgtggattcattccattcagtggccccttggggtttgcatgccagtgaagcgttaccatagaagagccagccgtttgtgttcgcttggtaggtgtaagtaatagcagcccttagccacggagtctttatgtggtttattcctgcaaggttgttttaaactgaaatagaactgctagtgtgattggttgatcagcaaaacagctgctctcattttgttttggaggaaccctggtggtttgacagccaggagaaaggccatatgtgaaaccagtctcttgtggagattggaaatcctccctgatatttgggcagagcctaaacgtgcatgcttgtcactcaaacaccagaagtttgaatcagaggtctgagtgacctcttttgtggctgttcttgatggtttccaggcctcgttatgcatggtttgcttgatgcccattttttgtgccttgtgctgttggatggtaacgaccactcaccatgtaaacacagtacctcagttttctgtccacagctgcagtcgctctgtccctcgtgcttcactgtgggcagccagggacaagcttctgaaagcagtgtgatacccaagtcataggtgcttctcgtatgtgaacaggtgtcattctacagatctgttatgtgttttcctgttgactcttaagagtccctgcatgtaaatctcaaagctgagcctggctcccagagtccagactgacattacagcgcaagagtttgcaagtgtgtccagcatgcaccaactgtgcagaacttggctcggtaactttgcgtggaaaaataaagtacattttgaagtatcttgagggttgggtcaattgagacatttctagcattacttaatgacttgcattgtggtttttctgcaagcaactttaatgactttttttataccacatggtctcccagtttctagatgaatgcaacatgatgatggtgatgatgacgatgagtttaatcattgttcatttattgcctttagggctgagggaaagggaaggtttgtttttttttctccccattttcccccattctgtctttcttttggtgacttacaccacatgtaatgacgctatgactaattctgctcccaagcccttgtatcttgggcttcattttaggctcatgtgtcagatctgcatgcattgcttgcatttttctggtatctgaatgttggttccttgttccaggaattcaacattaatttccaaaagtatcatgggacttgtgacaatacaagacatgaatctatgtataaaatttatcggcctttctcatttacctgctctagtattattgtattgtgtgtgcgtgcgtgtgtgatgtcaggctgccacgtaaaacttcagagaaaaatcttaaaagcagaccatccttttttgcatgctctattctaagtagaatgttcaatgtaactgactaaaattgcatgttaaagatatttaggtttttttgttttctttatttttatttgttttcagtttcctgtatatttgcttactgtgccgttttagtggttttaggataaaaatgcactggtgaagcaaatgtagtgccaacagaaggtgattttccagttgtaaatgtcatgcagcatttgaagggactgtgttttcttaaaaaaaaatcacagttacttctaaaccagatttcatttcttttattgttttatgtgccaaaccacgaagtgcattgggcttcaatctctgaacactgtagacccattagaagactgttccgattgttacaaattgtagtgcctgaaaacactcttaagctgattgtcttaacaaaatgaaagttctccaaagacaaaacagaacaattattataacaaaataattatggttgaaatgtctgtggttccttggaaatgctgcgctctttgtgtttttccatcattagtgcagttggaatgaatgtgtataggtcagaggtcttcgtgttcacattttaaaattaggtaaatgacctcatctttcaagcttgaattcatttttaattttaattttattttatacaatgtgtagacagttccctgttctctgcatttagaagtatacacaatataaatctgttaattctgtaagtaatttttataattatgatgtaactctatcttatccttaaaacatttaaaataaaccctttatgtgcaa

SEQ ID NO: 167329 - DNA, 2082 bp, Artificial Sequence
  derived and/or modified sequence
gagcgggggcggggaggcgccgtctggctcaggctggggccggcgggagcgcgaacgagcgacggcggaacccgtgggcctgtggactgcagcctcggcggtcagcagcaatgaggtcttactgtgtagcccaggctgctctggaactcctggactcaagtgatcttcctaccttggtcttccaaagtgttgggattacagatggagtttcgctcttgttgcccaggctggagtgtagtagcatgatctcggctcactgcaacctccgcctcctgagttcaagtgattctcctgcctcagcctcccgagtatctgggattacaggaagtttatctcgacaatgctagttgcagtctgtgtgaccctgaccaagttattttaatgtctgtgctgcagtttttcagtttccaagatggaatagttatagtgcatatcttcctcatggttgtgaggagtgcatgacacatagcgagtgctcagtgaacagtcatttttctgagtgcttgtgatttcacgtatttttgctgaactcgtaaaagagacacttggatggtggattaaccagaacactaacattctgtgaaaagtttcaaattggagaatattgaattttcaccctagtccagcagctccgctgctcacttaaatacagatgaatgaagaccccattcggaaagacacctggccagcggtccagagctgatgcaggccatgctggagtatctgccaacatgatgaagaagaggacatcccacaaaaaacatcggagcagtgtgggtccgagcaaacctgtttcccagccccggcggaacatcgtaggctgcaggattcagcatgggtggaaagaggggaatggccctgttacccagtggaaaggaaccgttctggaccaggtgcctgtaaatccttctttgtatcttataaaatacgatggatttgactgtgtttatggactagaacttaataaagatgaaagagtttctgcgcttgaagtcctccctgatagagttgcgacatctcgaatcagcgatgcacacttggcagacacaatgattggcaaagcagtggaacatatgtttgagacagaggatggttctaaagatgagtggaggggaatggtcttagcacgtgcacctgtcatgaacacatggttttacattacctatgagaaagaccctgtcttgtacatgtaccaactcttagatgattacaaagaaggcgaccttcgcattatgcctgattccaatgattcacctccagcagaaagggaaccaggagaagttgtggacagcctggtaggcaaacaagtggaatatgccaaagaagatggctcgaaaaggactggcatggtcattcatcaagtagaagccaagccctccgtctatttcatcaagtttgatgatgatttccatatttatgtctacgatttggtgaaaacatcctagatgtcatcacaaactctgccaaatttgtggaactatgaaatgtattatttgtagacataaagacttgattgctttccagtttaatgaaagcttaaatgtccctgcgaacccacaatctctgccagcagaactggttttgttctgaatagtacagattgatgtgaacacaaagcattttgtgtaaggagaacccctttcttttaaaagaagtctgtctatttcgaggggagttacaggcaagtttggtaaaagttaagctagtatcatagtcatttaaaattgtaatagatcttaaccattttccccctcaccctaactctcttattctgccgccacaatgcaagcatagtttgatgttttcgttattgccttttttgagatgtatgtatctgtatctacctatatctatatgtgtgtatacatatataatatatacacacagatacaagtgtacacacacacaccacacaccacacacaccccactggcagtctttgtggattaggatgggggtgacataattttcttgagtttaacaggagtgctttacccaagtcagtcatggatatgatatcactgctctttatttaaaagtaaactttgggcacaggaaccatatgggaacattcagcttgtt

SEQ ID NO: 167330 - protein, 455 aa, Artificial Sequence
  derived and/or modified sequence
MFTEGEEMYLQGSTVWHPDCKQSTKTEEKLRLPNIRRSSSDFFYSKSLIRRTGRSPSLQPTRTSSESIYSRPGSSIPGSPGHTIYAKVDNEILDYKDLAAIPKVKAIYDIERPDLITYEPFYTSGYDDKQERQSLGESPRTLSPTPSAEGYQDVRDRMIHRSTSQGSINSPVYSRHSYTPTTSRSPQHFHRPDQGINIYRKPPIYKQHAALAAQSKSSEDIIKFSKFPAAQAPDPSETPKIETDHWPGPPSFAVVGPDMKRRSSGREEDDEELLRRRQLQEEQLMKLNSGLGQLILKEEMEKESRERSSLLASRYDSPINSASHIPSSKTASLPGYGRNGLHRPVSTDFAQYNSYGDVSGGVRDFQTLPDGHMPAMRMDRGVSMPNMLEPKIFPYEMLMVTNRGRNKILREVDRTRLERHLAPEVFREIFGMSIQEFDRLPLWRRNDMKKKAKLF

SEQ ID NO: 167331 - protein, 455 aa, Artificial Sequence
  derived and/or modified sequence
MFTEGEEMYLQGSTVWHPDCKQSTKTEEKLRLPNIRRSSSDFFYSKSLIRRTGRSPSLQPTRTSSESIYSRPGSSIPGSPGHTIYAKVDNEILDYKDLAAIPKVKAIYDIERPDLITYEPFYTSGYDDKQERQSLGESPRTLSPTPSAEGYQDVRDRMIHRSTSQGSINSPVYSRHSYTPTTSRSPQHFHRPDQGINIYRKPPIYKQHAALAAQSKSSEDIIKFSKFPAAQAPDPSETPKIETDHWPGPPSFAVVGPDMKRRSSGREEDDEELLRRRQLQEEQLMKLNSGLGQLILKEEMEKESRERSSLLASRYDSPINSASHIPSSKTASLPGYGRNGLHRPVSTDFAQYNSYGDVSGGVRDYQTLPDGHMPAMRMDRGVSMPNMLEPKIFPYEMLMVTNRGRNKILREVDRTRLERHLAPEVFREIFGMSIQEFDRLPLWRRNDMKKKAKLF

SEQ ID NO: 167332 - DNA, 1368 bp, Artificial Sequence
  derived and/or modified sequence
atgttcaccgagggcgaggagatgtacctgcagggcagcaccgtgtggcaccccgactgcaagcagagcaccaagaccgaggagaagctgagactgcccaacatcagaagaagcagcagcgacttcttctacagcaagagcctgatcagaagaaccggcagaagccccagcctgcagcccaccagaaccagcagcgagagcatctacagcagacccggcagcagcatccccggcagccccggccacaccatctacgccaaggtggacaacgagatcctggactacaaggacctggccgccatccccaaggtgaaggccatctacgacatcgagagacccgacctgatcacctacgagcccttctacaccagcggctacgacgacaagcaggagagacagagcctgggcgagagccccagaaccctgagccccacccccagcgccgagggctaccaggacgtgagagacagaatgatccacagaagcaccagccagggcagcatcaacagccccgtgtacagcagacacagctacacccccaccaccagcagaagcccccagcacttccacagacccgaccagggcatcaacatctacagaaagccccccatctacaagcagcacgccgccctggccgcccagagcaagagcagcgaggacatcatcaagttcagcaagttccccgccgcccaggcccccgaccccagcgagacccccaagatcgagaccgaccactggcccggcccccccagcttcgccgtggtgggccccgacatgaagagaagaagcagcggcagagaggaggacgacgaggagctgctgagaagaagacagctgcaggaggagcagctgatgaagctgaacagcggcctgggccagctgatcctgaaggaggagatggagaaggagagcagagagagaagcagcctgctggccagcagatacgacagccccatcaacagcgccagccacatccccagcagcaagaccgccagcctgcccggctacggcagaaacggcctgcacagacccgtgagcaccgacttcgcccagtacaacagctacggcgacgtgagcggcggcgtgagagacttccagaccctgcccgacggccacatgcccgccatgagaatggacagaggcgtgagcatgcccaacatgctggagcccaagatcttcccctacgagatgctgatggtgaccaacagaggcagaaacaagatcctgagagaggtggacagaaccagactggagagacacctggcccccgaggtgttcagagagatcttcggcatgagcatccaggagttcgacagactgcccctgtggagaagaaacgacatgaagaagaaggccaagctgttctag

SEQ ID NO: 167333 - DNA, 1368 bp, Artificial Sequence
  derived and/or modified sequence
atgttcaccgagggcgaggagatgtacctgcagggcagcaccgtgtggcaccccgactgcaagcagagcaccaagaccgaggagaagctgagactgcccaacatcagaagaagcagcagcgacttcttctacagcaagagcctgatcagaagaaccggcagaagccccagcctgcagcccaccagaaccagcagcgagagcatctacagcagacccggcagcagcatccccggcagccccggccacaccatctacgccaaggtggacaacgagatcctggactacaaggacctggccgccatccccaaggtgaaggccatctacgacatcgagagacccgacctgatcacctacgagcccttctacaccagcggctacgacgacaagcaggagagacagagcctgggcgagagccccagaaccctgagccccacccccagcgccgagggctaccaggacgtgagagacagaatgatccacagaagcaccagccagggcagcatcaacagccccgtgtacagcagacacagctacacccccaccaccagcagaagcccccagcacttccacagacccgaccagggcatcaacatctacagaaagccccccatctacaagcagcacgccgccctggccgcccagagcaagagcagcgaggacatcatcaagttcagcaagttccccgccgcccaggcccccgaccccagcgagacccccaagatcgagaccgaccactggcccggcccccccagcttcgccgtggtgggccccgacatgaagagaagaagcagcggcagagaggaggacgacgaggagctgctgagaagaagacagctgcaggaggagcagctgatgaagctgaacagcggcctgggccagctgatcctgaaggaggagatggagaaggagagcagagagagaagcagcctgctggccagcagatacgacagccccatcaacagcgccagccacatccccagcagcaagaccgccagcctgcccggctacggcagaaacggcctgcacagacccgtgagcaccgacttcgcccagtacaacagctacggcgacgtgagcggcggcgtgagagactaccagaccctgcccgacggccacatgcccgccatgagaatggacagaggcgtgagcatgcccaacatgctggagcccaagatcttcccctacgagatgctgatggtgaccaacagaggcagaaacaagatcctgagagaggtggacagaaccagactggagagacacctggcccccgaggtgttcagagagatcttcggcatgagcatccaggagttcgacagactgcccctgtggagaagaaacgacatgaagaagaaggccaagctgttctag

SEQ ID NO: 167334 - DNA, 1368 bp, Artificial Sequence
  derived and/or modified sequence
atgtttacagaaggcgaagaaatgtacctccagggaagtacggtgtggcaccctgattgcaagcaatccacaaagaccgaggagaagctccgattacctaatatccggaggtcttcatctgacttcttttactctaaatccctgatccggagaactggtcgctccccctccctccaacccacaaggactagcagcgagtcaatctacagcaggcctggcagctcaatccctggttcccccggacacaccatttatgctaaggtggataatgaaatcctggattataaagaccttgcggctatacctaaggtgaaagccatttacgatattgaaagaccagaccttataacctacgagcctttttacacaagtggctatgatgataaacaggagagacaatctctgggggagagcccccgcaccttaagccctaccccgtcagcagaaggatatcaagacgtccgggaccgaatgattcaccgctccacaagtcagggctctatcaattccccagtctatagccgtcattcatacacccccacaacatctaggtctccacagcacttccatagaccagaccagggaattaacatctaccgcaagcccccaatctacaagcagcatgctgccctggccgcccagagcaagtcaagcgaggacataattaagttcagcaaatttcccgcagcacaggcccccgacccgtccgaaacacctaagatcgaaacagatcattggccagggccgccatccttcgcagtggtcggccctgacatgaaacgcaggtcatctggacgtgaagaggatgatgaagagctgcttaggaggcgccaactgcaggaagaacaattaatgaagctgaactccggcctggggcagttgatcctgaaggaagagatggagaaggagtcccgtgaacgcagttcattactggcctcacgctacgattccccgataaattcagcaagtcacatacctagctctaagaccgcatctcttcccgggtacggtcgcaatggcctccaccgcccagtttccaccgacttcgcccagtacaacagctacggcgacgtgtcaggaggtgtacgggactttcaaaccctccccgatggacacatgccggctatgcgcatggacagaggggttagtatgcccaacatgcttgaaccaaaaatcttcccttacgaaatgctcatggtcacgaaccggggccgtaacaagatcttgcgcgaggtggatcggaccagactggagaggcacctggccccggaggtcttccgggagattttcggaatgtccatccaggaattcgatcgtctgcccctgtggcgtcgaaatgatatgaaaaaaaaagcaaagctgttttag

SEQ ID NO: 167335 - DNA, 1368 bp, Artificial Sequence
  derived and/or modified sequence
atgttcacagagggtgaggagatgtacctgcaaggcagcactgtttggcacccagactgtaagcagtcaaccaaaacggaggagaaactaaggcttcctaatatacggagaagtagctccgatttcttctactccaaaagcctgatccggcgcaccgggaggtctccttcactacagccaacccgcacaagcagcgaatcgatctattcccgcccaggatcgagtatccctggttcacctggacacactatctatgccaaagttgataatgagattctggattacaaggatctggcagccatcccaaaagtgaaggccatctacgatattgagcgccccgacctgatcacatatgaaccattctacaccagtgggtatgatgataaacaggagagacagagcttaggtgaaagtccccggaccctgtctcccactccctccgcagaagggtaccaggatgtaagggacaggatgattcaccgctccacatcacagggctcaataaatagtccagtgtactcacgccattcatatacacctactacatcccgtagtcctcagcatttccataggccggatcaggggatcaatatctatcgcaaacctccaatttacaagcagcatgctgcactcgcagcacaatctaaaagctctgaggatattataaaatttagcaagttcccggccgctcaggctcccgatccaagtgagacgcccaagatcgaaaccgatcactggcccggtccaccttcgttcgccgtggtgggccccgatatgaagcggaggtcctctggccgcgaggaagatgacgaggagctcttgcggcggagacaactccaggaggagcagcttatgaagcttaactcaggcctcggacagctgattctcaaagaggagatggagaaagagtcccgggaaagaagttcattactggccagtagatacgattctccaattaattccgcttcccacatcccaagttctaaaactgccagccttccaggctatgggcgtaatggcctgcacagaccggtgagcactgatttcgcgcaatacaattcttatggcgatgtatccggcggcgtcagggactatcagaccctcccggatggccacatgccggctatgcgcatggataggggcgtgtcgatgcctaatatgctggagcctaaaattttcccgtacgaaatgctgatggtcaccaatagggggcggaataaaatcctgcgcgaggtggacagaaccaggctggagcgtcatttggctcctgaagtgtttcgtgagatcttcggtatgtcgattcaggagttcgatcgcctccctctgtggagacgaaacgatatgaaaaagaaagccaagctgttctag

SEQ ID NO: 167336 - DNA, 1368 bp, Artificial Sequence
  derived and/or modified sequence
atgttcacagaaggagaggagatgtacctgcagggcagcacagtgtggcacccagactgcaagcagagcaccaagacagaggagaagctgcggctgcccaacatccgccgcagcagcagtgacttcttctacagcaagagcctcatccggaggacaggccgcagccccagcctgcagcccaccaggaccagcagcgagagcatctacagccggcccggcagcagcatccctggcagccctggccacaccatctatgccaaggtggacaatgagatcctggactacaaggacctggccgccatccccaaggtgaaggccatctatgacatcgagaggccagacctgatcacctatgagcccttctacaccagcggctatgatgacaagcaggagcggcagagcctgggggagagccccaggaccctgagccccaccccatctgctgagggctaccaggatgtgcgggacaggatgatccacaggagcaccagccagggcagcatcaacagccctgtgtacagccgccacagctacacccccaccaccagccgcagcccccagcacttccacaggccagaccagggcatcaacatctacaggaagccacccatctacaagcagcacgccgccctggccgcccagagcaagagcagcgaggacatcatcaagttcagcaagtttcctgctgcccaggccccagaccccagcgagacccccaagattgaaacagaccactggccaggccccccatcctttgctgtggtgggccctgacatgaagagaagaagcagcggccgggaggaggatgatgaggagctgctgcggcggcggcagctgcaggaggagcagctgatgaagctgaacagcggcctgggccagctgatcctgaaggaggagatggagaaggagagccgggagaggagcagcctgctggccagccgctatgacagccccatcaacagcgccagccacatccccagcagcaagacagccagcctgcccggctacggcagaaatggcctgcacaggcctgtgtccacagactttgcccagtacaacagctatggagatgtgtctggaggagtgcgggacttccagaccctgcctgatggccacatgcctgccatgaggatggacagaggagtgtccatgcccaacatgctggagcccaagatcttcccctatgagatgctgatggtgaccaacagaggaagaaacaagatcctgcgggaggtggacaggacccggctggagcggcacctggcccctgaggtgttccgggagatcttcggcatgagcatccaggagtttgaccggctgcccctgtggaggagaaatgacatgaagaagaaggccaagctgttctag

SEQ ID NO: 167337 - DNA, 1368 bp, Artificial Sequence
  derived and/or modified sequence
atgttcacagaaggagaggagatgtacctgcagggcagcacagtgtggcacccagactgcaagcagagcaccaagacagaggagaagctgcggctgcccaacatccgccgcagcagcagtgacttcttctacagcaagagcctcatccggaggacaggccgcagccccagcctgcagcccaccaggaccagcagcgagagcatctacagccggcccggcagcagcatccctggcagccctggccacaccatctatgccaaggtggacaatgagatcctggactacaaggacctggccgccatccccaaggtgaaggccatctatgacatcgagaggccagacctgatcacctatgagcccttctacaccagcggctatgatgacaagcaggagcggcagagcctgggggagagccccaggaccctgagccccaccccatctgctgagggctaccaggatgtgcgggacaggatgatccacaggagcaccagccagggcagcatcaacagccctgtgtacagccgccacagctacacccccaccaccagccgcagcccccagcacttccacaggccagaccagggcatcaacatctacaggaagccacccatctacaagcagcacgccgccctggccgcccagagcaagagcagcgaggacatcatcaagttcagcaagtttcctgctgcccaggccccagaccccagcgagacccccaagattgaaacagaccactggccaggccccccatcctttgctgtggtgggccctgacatgaagagaagaagcagcggccgggaggaggatgatgaggagctgctgcggcggcggcagctgcaggaggagcagctgatgaagctgaacagcggcctgggccagctgatcctgaaggaggagatggagaaggagagccgggagaggagcagcctgctggccagccgctatgacagccccatcaacagcgccagccacatccccagcagcaagacagccagcctgcccggctacggcagaaatggcctgcacaggcctgtgtccacagactttgcccagtacaacagctatggagatgtgtctggaggagtgcgggactaccagaccctgcctgatggccacatgcctgccatgaggatggacagaggagtgtccatgcccaacatgctggagcccaagatcttcccctatgagatgctgatggtgaccaacagaggaagaaacaagatcctgcgggaggtggacaggacccggctggagcggcacctggcccctgaggtgttccgggagatcttcggcatgagcatccaggagtttgaccggctgcccctgtggaggagaaatgacatgaagaagaaggccaagctgttctag

SEQ ID NO: 167338 - DNA, 1368 bp, Artificial Sequence
  derived and/or modified sequence
atgttcaccgagggcgaggagatgtacctgcagggcagcaccgtgtggcatcctgactgtaagcaaagcaccaaaactgaggagaagcttaggctgcctaatattcgtcggagtagcagcgacttcttttacagcaagtccttgattcgccggaccggacgctcacctagtctccagcctacccgtacatcaagcgaaagcatttactcacgaccaggatctagcatcccaggctcccctggccacacaatctatgccaaagttgataacgagatccttgattacaaagatctggctgccatacctaaagttaaggcaatctacgatatagagagacccgacctcatcacctacgagccgttctatacatcaggctacgacgacaaacaggagagacagagcctgggcgaaagccccagaacactcagtccaaccccgtccgctgagggctatcaggacgtaagggataggatgattcaccggtcgacctctcagggctctatcaacagtccagtgtactcccggcattcatacacacccaccacctctaggagcccccagcactttcacagacccgatcagggcattaatatctacagaaaaccccccatttataagcagcatgccgctctggcggcacagagtaagagctccgaggatattatcaaatttagcaaatttcccgctgcccaagctcctgacccctcagagacacctaagattgagacagaccattggcccggaccaccaagcttcgctgtagtgggcccggacatgaagcggagaagtagcggaagggaagaggatgatgaagagcttctcagaagaaggcagcttcaggaggagcagctgatgaagcttaacagcggattgggccagctgatcttgaaagaagagatggagaaggagtcccgcgaacggagctcgctcctggctagccgctatgatagccctatcaattctgccagtcacataccctccagcaaaacggcttcactgccaggctatgggagaaatggtctgcaccgcccagtttcaacagattttgcacaatataactcctacggggatgtttcaggtggggtgcgcgacttccagacactgcctgacggacatatgcctgcaatgcgtatggatcggggagtgtccatgccaaacatgctggagcctaagattttcccatacgagatgctgatggtgacaaataggggccggaacaagatcctcagggaggtggaccgtaccagattggaacggcacctggccccggaggtctttcgtgagatctttggcatgagtattcaggaattcgaccgcttacccctttggaggcgaaacgacatgaaaaagaaagcaaagctattctag

SEQ ID NO: 167339 - DNA, 1368 bp, Artificial Sequence
  derived and/or modified sequence
atgttcaccgagggcgaggagatgtacctgcagggcagcaccgtgtggcacccagactgcaaacagtctaccaaaaccgaggagaaattacgactgcccaacattagaagaagttcaagcgactttttttactccaagtctcttattcgtagaacggggcgcagtccctccctccagccgaccaggaccagttctgagtccatctactctcgccctggctccagtatacccggctccccagggcacacaatctacgccaaggtggacaacgagattctggattacaaggacctcgcagccatccctaaggtgaaagctatctacgatatcgagcggcccgacttgataacctacgagccgttctatacctccggctacgacgataagcaagaacgacagagtctgggggagtccccaaggaccctctcacccactccctccgccgaggggtaccaggatgtgagagatcgtatgatccaccggagcacatcccaaggttcaattaacagccccgtttactcccgccattcttatacacctacaacttcaagaagcccccagcactttcaccgtcccgaccagggaataaacatttacaggaagccccccatctacaaacagcacgccgccctcgcagcccaatctaagtctagcgaagatattatcaaattttctaagtttccagcggcccaagcccccgacccctctgaaaccccaaagattgagaccgatcattggccaggacctcctagcttcgccgtcgtggggccagatatgaaaaggagatcgtcaggtcgggaggaggacgacgaggagctcctccgccgccggcaacttcaagaggagcagctgatgaagctcaacagtggcctgggccagttgatacttaaggaggagatggaaaaagaaagcagagagaggagttcgctcttagcatctaggtatgactctcccataaactcagcctctcatattccttcttcaaagacagcaagtttgcctggatacggccgcaacggcctgcataggcccgtgagcacagactttgcccagtacaattcttatggtgacgtatctgggggtgtgcgggactaccaaacacttcctgacggacatatgccagcaatgagaatggatcggggagtgagtatgccaaacatgctggagccaaagatcttcccctatgaaatgctgatggtgacaaaccgcgggcggaacaagatcctcagggaagttgacaggactcggctggagaggcatctggctcccgaggtttttcgagagatatttggaatgagtatacaggagttcgaccgccttccattatggcgcagaaatgacatgaagaagaaggctaaactgttctag

SEQ ID NO: 167340 - DNA, 1368 bp, Artificial Sequence
  derived and/or modified sequence
atgtttaccgagggcgaagaaatgtacttgcaaggttctacagtgtggcaccctgactgcaaacagagcaccaaaactgaggagaaactgcgcctgccgaacatccgacgatcaagcagtgacttcttttacagcaaatcccttatcagaaggacaggtcgctcgccaagcttgcagccaaccaggacttcctccgagagcatttactccaggccaggtagcagcatcccaggtagcccagggcacacgatctacgctaaagttgacaatgagatcctggactacaaagatttagctgctattcctaaggtgaaagccatctatgatatcgaaaggcccgacctcataacctacgagccgttttatacatccggctatgacgacaaacaggaaagacaatcgctgggcgagtcacctcggactcttagtcccacccctagtgcagaaggataccaggacgtgagagacagaatgattcataggtccacaagccagggaagcattaatagccctgtgtacagtcgtcacagctatacgccaactacctctcggtcacctcaacattttcatagacccgaccaggggatcaacatttatcgaaagccccctatctataagcagcatgccgctctggcagctcagtccaaaagctctgaggatatcatcaagtttagcaagttccccgctgcacaagctcctgacccctccgagactccaaaaatcgaaaccgaccactggcccggtcctccaagttttgctgtggtgggtccagacatgaaaaggcgctccagcggaagggaggaagatgacgaggaactcctgcggcgaaggcaactacaggaggagcaacttatgaaacttaattccggtctggggcagctgatcctaaaggaggaaatggaaaaagagtcacgtgaacgcagcagtcttctggcttccagatatgacagtcctatcaatagtgcttcacacatacctagttccaagacagcgagcctgccgggatatggaagaaacggcctgcaccggcctgtctctacagatttcgcacagtacaatagctacggcgatgtgtctggcggagtccgggattttcagactctgccagatggccacatgccggcaatgcgaatggacagaggcgtgagcatgcctaacatgcttgagcccaaaatatttccctatgagatgcttatggtcacaaatcggggacggaataaaatcttgcgcgaggttgatcggacccgactggaacggcatctcgcgcctgaggtgtttcgggaaatctttggcatgagtatacaggaatttgatcgcctgccactgtggaggagaaacgacatgaagaaaaaagccaagctgttttag

SEQ ID NO: 167341 - DNA, 1368 bp, Artificial Sequence
  derived and/or modified sequence
atgtttaccgaaggagaggaaatgtatctgcagggttctacagtctggcaccccgattgtaagcagtcaaccaagacagaggagaagctaagactaccaaacatccggaggtcatcctccgatttcttctatagtaagagcttgattagacgaacaggccgtagtcctagcctacagccgactcgcactagttcagaatccatctattccagaccaggcagctccatccccggttcgccaggtcacaccatctacgctaaagtagataatgaaatcctcgactataaagacctggcagcaattcctaaagtgaaggccatctacgacatagaaaggcccgacctcatcacatacgagcccttctatacctccgggtatgacgacaaacaggagaggcagtctctgggagaatcacctcggaccctttcaccaactccaagcgctgaagggtaccaggacgtgcgagacaggatgatccacaggtccaccagtcagggtagcatcaactcacccgtctactcgcggcattcatatacccccactacttcacgaagcccccagcactttcatcgacctgatcagggaataaacatttacaggaagcctccgatatacaagcagcacgctgctctagccgctcagtccaaatcatctgaagatattattaaattttcaaaattcccagctgcccaggcacccgatccgtccgaaactcccaaaatcgagaccgaccactggcctggcccaccaagttttgctgtggtcggccctgacatgaaaaggcgatcgtccggcagagaagaagatgatgaagagctgctgcgtcgtagacagcttcaggaggaacaactgatgaagttgaactcagggctgggccagctgattctgaaggaagagatggagaaagaatctcgggagcgttcaagcctgttagcgtcacgctatgacagccccatcaattcagcgtcccatattccctcctcgaagacagccagtctgcctggctatggacgcaacgggttacatcgcccagtgagtacagattttgcacagtacaattcgtatggcgacgtgtcaggtggagttcgggactaccagacattgccagatggccacatgccagcaatgcgcatggacaggggagtgtctatgcctaacatgcttgagcccaagattttcccttacgagatgctgatggtgacaaatcgcggacggaacaaaatattgcgcgaggttgatcgaacgcgcttggagagacatttagctcccgaggttttccgcgagatctttggcatgtctattcaagagttcgaccgactacccttgtggaggagaaacgacatgaagaagaaggcgaaactgttttag

SEQ ID NO: 167342 - protein, 362 aa, Artificial Sequence
  derived and/or modified sequence
MAAAEEEPKPKKLKVEAPQALRENILFGMGNPLLDISAVVDKDFLDKYSLKPNDQILAEDKHKELFDELVKKFKVEYHAGGSTQNSIKVAQWMIQQPHKAATFFGCIGIDKFGEILKRKAAEAHVDAHYYEQNEQPTGTCAACITGDNRSLIANLAAANCYKKEKHLDLEKNWMLVEKARVCYIAGFFLTVSPESVLKVAHHASENNRIFTLNLSAPFISQFYKESLMKVMPYVDILFGNETEAATFAREQGFETKDIKEIAKKTQALPKMNSKRQRIVIFTQGRDDTIMATESEVTAFAVLDQDQKEIIDTNGAGDAFVGGFLSQLVSDKPLTECIRAGHYAASIIIRRTGCTFPEKPDFH

SEQ ID NO: 167343 - DNA, 1089 bp, Artificial Sequence
  derived and/or modified sequence
atggcagctgccgaggaagagccaaagcccaaaaagctgaaagtggaagcgccacaggcgctgagggagaatatcttgttcggtatgggtaaccccttgctggacatcagtgccgtggtcgataaggattttttggataagtattcccttaagcccaacgatcagatcctggcagaagataagcataaggagctttttgatgagctagtgaagaagttcaaggtagagtatcatgctgggggatccacacaaaacagtataaaggtagcccagtggatgatacagcagccacataaggccgccacctttttcggatgcattggcattgataagttcggcgaaatcttgaagcggaaagcggccgaggcccacgttgacgctcactattatgagcagaacgagcaacctactgggacatgcgccgcatgcatcaccggagacaacaggtctttaatcgctaacctggccgcagctaactgctacaagaaggagaaacacttggacctggagaaaaattggatgctcgtagagaaagcacgtgtgtgttacatagccggcttctttctgactgtatctcccgaaagtgtcctcaaggtggcacaccatgctagtgagaataaccgtatattcaccttgaacctgtctgccccatttatttcccagttttacaaagaatctcttatgaaagtgatgccgtacgtagatatcctcttcggtaacgaaaccgaggccgcaacctttgcaagggagcaggggtttgagaccaaggacatcaaggagatagccaagaaaacccaggccctgcccaaaatgaattctaagcgacagcgcatagtcattttcactcagggcagagatgataccatcatggcgacagaaagtgaagtgaccgcttttgctgtacttgaccaggaccaaaaagagattattgatacaaatggagccggtgacgcctttgtgggcgggtttctgagccagctggttagcgataaaccactgaccgagtgtattcgggccggccactacgcggcgtcaataatcatcaggcgaactggttgtaccttccccgagaagccagatttccattag

SEQ ID NO: 167344 - DNA, 1169 bp, Artificial Sequence
  derived and/or modified sequence
gtggatggcagaggtgggctgtagagccaaagtggggtgggagcgcgaagatggcagctgctgaggaggagccgaagcccaaaaagctgaaggtggaggcgccgcaagcgctgagagaaaatattctctttggaatgggaaatcctctgcttgacatctctgctgtagtggacaaagatttccttgataagtattctctgaaaccaaatgaccaaatcttggctgaagacaaacacaaggaactgtttgatgaacttgtgaaaaaattcaaagtcgaatatcatgctggtggctctacccagaattcaattaaagtggctcagtggatgattcaacagccacacaaagcagcaacattttttggatgcattgggatagataaatttggggagatcctgaagagaaaagctgctgaagcccatgtggatgctcattactacgagcagaatgagcagccaacaggaacttgtgctgcatgcatcactggtgacaacaggtccctcatagctaatcttgctgctgccaattgttataaaaaggaaaaacatcttgatctggagaaaaactggatgttggtagaaaaagcaagagtttgttatatagcaggcttttttcttacagtttccccagagtcagtattaaaggtggctcaccatgcttctgaaaacaacaggattttcactttgaatctatctgcaccgtttattagccagttctacaaggaatcattgatgaaagttatgccttatgttgatatactttttggaaatgagacagaagctgccacttttgctagagagcaaggctttgagactaaagacattaaagagatagccaaaaagacacaagccctgccaaagatgaactcaaagaggcagcgaatcgtgatcttcacccaagggagagatgacactataatggctacagaaagtgaagtcactgcttttgctgtcttggatcaagaccagaaagaaattattgataccaatggagctggagatgcatttgttggaggttttctgtctcaactggtctctgacaagcctctgactgaatgtatccgtgctggccactatgcagcaagcatcataattagacggactggctgcacctttcctgagaagccagacttccactgatggaagagctgaaaacacaagcccaggagt

SEQ ID NO: 167345 - DNA, 1089 bp, Artificial Sequence
  derived and/or modified sequence
atggctgctgctgaggaggagcccaagcccaagaagctgaaggtggaggccccccaggccctgcgggagaacatcctgtttggcatgggcaaccccctgctggacatctctgctgtggtggacaaggacttcctggacaagtacagcctgaagcccaatgaccagatcctggccgaggacaagcacaaggagctgtttgatgagctggtgaagaagttcaaggtggagtaccacgccggcggcagcacccagaacagcatcaaggtggcccagtggatgatccagcagccccacaaggccgccaccttcttcggctgcattggaattgacaagtttggagagatcctgaagaggaaggctgctgaggcccacgtggatgcccactactatgagcagaatgagcagcccaccggcacctgtgccgcctgcatcactggagacaacagaagcctcatcgccaacctggccgccgccaactgctacaagaaggagaagcacctggacctggagaagaactggatgctggtggagaaggcccgggtgtgctacatcgccggcttcttcctgactgtgtccccagagagcgtgctgaaggtggcccaccacgccagcgagaacaaccgcatcttcaccctgaacctgagcgcccccttcatcagccagttctacaaggagagcctgatgaaggtgatgccctacgtggacatcctgtttggaaatgaaacagaggccgccacctttgcccgggagcagggctttgagaccaaggacatcaaggagatcgccaagaagacccaggccctgcccaagatgaacagcaagaggcagagaattgtcatcttcacccagggcagagatgacaccatcatggccacagagagcgaggtgacagcctttgctgtgctggaccaggaccagaaggagatcatcgacaccaatggagctggagatgcctttgtgggcggcttcctgagccagctggtgtctgacaagcccctgacagagtgcatccgggccggccactatgctgccagcatcatcatcagaagaacaggctgcaccttccctgagaagccagacttccactag

SEQ ID NO: 167346 - DNA, 1089 bp, Artificial Sequence
  derived and/or modified sequence
atggccgccgccgaggaggagcccaagcccaagaagctgaaggtggaggcaccccaggcattgagggaaaacatcctcttcggaatgggaaaccccttgctggatatctcggccgtggttgacaaagactttctggataaatattctctgaaacccaacgatcagatcttggccgaggacaagcacaaggagctcttcgatgaacttgtgaaaaaatttaaggtcgagtaccatgcgggcgggtccacccagaactcgattaaagtcgcccaatggatgatacagcaaccacacaaggctgctaccttttttggctgtattgggattgataagtttggcgaaatcctgaagcgaaaagcagccgaagctcacgttgacgcacattattatgaacagaatgagcagcctactggaacctgtgccgcatgtatcacgggagataaccgttccctgatagcaaaccttgcagctgccaattgctataaaaaagagaagcatcttgatctggaaaagaactggatgctggttgaaaaagcacgcgtgtgttatattgcaggtttcttcctaaccgttagtcccgagtcggtccttaaagtggcccaccacgcctctgaaaacaatcgtatatttaccctgaacctgtcagcacctttcataagtcagttctataaggagagccttatgaaggttatgccttatgtggacattctatttggcaacgaaacagaggctgccacgtttgctcgggagcaaggtttcgagacgaaggatattaaggagattgctaaaaagacacaagctttgccgaagatgaacagcaaaaggcagcggattgttattttcacacaggggcgggacgacaccattatggctaccgaaagcgaagtgactgcctttgccgtgctcgaccaggaccagaaagaaatcatagataccaacggcgctggtgacgccttcgtcggcgggtttctatcacagcttgtcagcgataagcctcttacagagtgtattagggctggacattatgcggccagtataatcatccggaggacaggctgcacattcccagagaaacccgattttcactag

SEQ ID NO: 167347 - DNA, 1089 bp, Artificial Sequence
  derived and/or modified sequence
atggctgctgccgaggaggaacccaaaccgaaaaagctcaaagttgaggcacctcaagcgttgcgtgagaatatcctgtttggcatgggaaatcctcttctggacataagcgcggttgtggacaaggatttccttgacaagtactccctgaagcccaatgaccagattctggctgaggacaaacataaagaactctttgacgagctggttaaaaagtttaaagtggaatatcacgcaggagggtctactcaaaatagcattaaggtggcgcaatggatgatacagcagccccataaagcagcaacttttttcgggtgtatcggaattgataaattcggggaaattctgaagcgcaaagcagcagaagcacatgtagacgcccactactacgaacagaacgaacagccaaccggcacctgcgcggcatgtataaccggggataatagatcgctaatcgctaatctggccgctgccaattgttacaaaaaggagaagcatctggacctagaaaagaactggatgctggttgagaaggctagggtgtgctatattgctggcttttttctcacagtgtctccagagtccgttttgaaagttgctcatcacgcttccgagaacaaccgaattttcaccctcaacttatccgccccttttatttcccagttttataaagagagcctgatgaaagtcatgccttacgtcgacatcctttttgggaacgaaacagaggccgcaacctttgcacgggagcagggattcgagaccaaggatattaaagagatcgccaaaaagacccaggctttgccaaagatgaattctaagcggcaacgaattgtgatctttacacaaggtcgtgacgacacgatcatggccacggagtccgaagtcaccgcctttgcagttttggaccaggaccaaaaggaaatcattgatactaatggtgcaggggacgcttttgtgggaggattcctgagccagctggttagtgacaagcccttgacagagtgcatccgggctggccactatgccgcttcaattataattaggaggacagggtgcacctttcccgagaaacctgatttccactag

SEQ ID NO: 167348 - DNA, 1089 bp, Artificial Sequence
  derived and/or modified sequence
atggccgccgccgaggaggagcccaagcccaagaagctgaaggtggaggccccccaggccctgagagagaacatcctgttcggcatgggcaaccccctgctggacatcagcgccgtggtggacaaggacttcctggacaagtacagcctgaagcccaacgaccagatcctggccgaggacaagcacaaggagctgttcgacgagctggtgaagaagttcaaggtggagtaccacgccggcggcagcacccagaacagcatcaaggtggcccagtggatgatccagcagccccacaaggccgccaccttcttcggctgcatcggcatcgacaagttcggcgagatcctgaagagaaaggccgccgaggcccacgtggacgcccactactacgagcagaacgagcagcccaccggcacctgcgccgcctgcatcaccggcgacaacagaagcctgatcgccaacctggccgccgccaactgctacaagaaggagaagcacctggacctggagaagaactggatgctggtggagaaggccagagtgtgctacatcgccggcttcttcctgaccgtgagccccgagagcgtgctgaaggtggcccaccacgccagcgagaacaacagaatcttcaccctgaacctgagcgcccccttcatcagccagttctacaaggagagcctgatgaaggtgatgccctacgtggacatcctgttcggcaacgagaccgaggccgccaccttcgccagagagcagggcttcgagaccaaggacatcaaggagatcgccaagaagacccaggccctgcccaagatgaacagcaagagacagagaatcgtgatcttcacccagggcagagacgacaccatcatggccaccgagagcgaggtgaccgccttcgccgtgctggaccaggaccagaaggagatcatcgacaccaacggcgccggcgacgccttcgtgggcggcttcctgagccagctggtgagcgacaagcccctgaccgagtgcatcagagccggccactacgccgccagcatcatcatcagaagaaccggctgcaccttccccgagaagcccgacttccactag
